United States Patent Application Publication US 2006/0150283 A1 - sequence listing, part 20

SEQ ID NO: 77072 - DNA, 1644 bp, Arabidopsis thaliana
  misc_feature (1)..(1644): Ceres Seq. ID no. 12560845
  misc_feature (1)..(1644): Ortholog of  Ceres SEQ ID NO 15168580 as cited in SEQ ID NO 60279
cttggacgtgtaacgccgttaaaacgattctttcccattgtatccgcttttaacaactctcgtcgtcatctccaccgtccgttttctctcagctatattttaatggcgacaattcagaagcttgaagaagttgcaggcaaagatcaaactctaagagccgttgatctaaccatcatcaacggcgtcagaaacgtcgaaacttcaagacctttccaagtaaatcccacagtgagtctcgagcccaaggcggagccggtgatgccgtcgttttcaatgtctttagctccaccgtcttcgacaggaccaccattgaagagagcttcgactaaagaccgtcacacgaaggttgaaggaagagggagaaggatacggatgcctgccacgtgtgcggctaggatttttcaattaactcgagagttaggtcacaaatccgacggcgaaacgattcggtggttgttggagaacgctgagccggcgattatagccgccacgggtacgggaacggttcccgccatcgccatgtcggttaacggaaccttaaaaatcccgacgacgacgaacgctgattctgatatgggtgaaaatctgatgaagaagaaacgtaaacgaccttctaacagtgagtatatagacataagcgacgccgtttcagcttcctccggtttagctccaattgccacgacgacaacgatccaacctccgcaagctctggcatcatccactgtggctcagcaacttctgccgcaaggaatgtatccgatgtgggctattccatcaaacgcaatgattccgacggtcggagctttcttcttgattccacaaatcgctggtccgtcgaatcagcctcagttattagcttttcccgccgccgctgcttcgccgtcgtcttacgtcgccgctgttcaacaggcttccacgatggctagaccacctcctttacaagttgttccaagcagcggctttgtatccgtttcagacgttagcggttcgaatttatcaagagcgacgtcggttatggctccgagctcaagctcaggcgtaacaaccggtagttcatcgtcaattgcaacaacaacgacgcacacgctgagagacttctccctagagatatacgagaaacaagagcttcaccagttcatgagcaccacaacagcacggtcatcgaaccactgaagaaaagaaaggaaacggcggcgtattagtgatcggaaaaaaagcacgtgtgcacatgaagaagtgcacgtgttaagaagtgggcctcgattttaggcagaagtgggtcaacacgcaccaaaaagagagtggagggaggaggagaggggccacacggctcccaccttacgcatagcttccgaggcagccaggttgggtgtggtccccaaatggttagagctacgtggtccgtatgagtaggaccagcttaagcttaagcataattcgaaacgtttcgtttttttggtgggggctcaccactttgtcttgacttttttggtctttgtaattttacaaaataagatttattgaagccctctctaagtcatggtccactcaacaacaattgtgatattgatgttttgattttattaaaatctgtaacaaaataaatatttctatctaaaatgaaaatactaatgttgttttcct

SEQ ID NO: 77073 - protein, 390 aa, Arabidopsis thaliana
  peptide (1)..(390): Ceres Seq. ID no. 12560846
LGRVTPLKRFFPIVSAFNNSRRHLHRPFSLSYILMATIQKLEEVAGKDQTLRAVDLTIINGVRNVETSRPFQVNPTVSLEPKAEPVMPSFSMSLAPPSSTGPPLKRASTKDRHTKVEGRGRRIRMPATCAARIFQLTRELGHKSDGETIRWLLENAEPAIIAATGTGTVPAIAMSVNGTLKIPTTTNADSDMGENLMKKKRKRPSNSEYIDISDAVSASSGLAPIATTTTIQPPQALASSTVAQQLLPQGMYPMWAIPSNAMIPTVGAFFLIPQIAGPSNQPQLLAFPAAAASPSSYVAAVQQASTMARPPPLQVVPSSGFVSVSDVSGSNLSRATSVMAPSSSSGVTTGSSSSIATTTTHTLRDFSLEIYEKQELHQFMSTTTARSSNH

SEQ ID NO: 77074 - protein, 356 aa, Arabidopsis thaliana; identical to SEQ ID NO: 45932
  peptide (1)..(356): Ceres Seq. ID no. 12560847

SEQ ID NO: 77075 - protein, 304 aa, Arabidopsis thaliana; identical to SEQ ID NO: 45933
  peptide (1)..(304): Ceres Seq. ID no. 12560848

SEQ ID NO: 77076 - DNA, 1875 bp, Arabidopsis thaliana
  misc_feature (1)..(1875): Ceres Seq. ID no. 12560891
  misc_feature (1)..(1875): Ortholog of  Ceres SEQ ID NO 14310132 as cited in SEQ ID NO 20638
agaaccctaaaaagaagaagataagaaatcggaaatgggcatcaaggaccttctcagattcatgaaaccttatatccttcccattcacatccagaaatacgccgggaaacgagtgggaatcgatgcttattcatggctacacaaaggagcatactcatgtagtatggagttgtgtttagacactgatgggaagaagaagctgaggtacattgattactttatgcatagagtcaaccttcttcaacactatgagatcattcctgtcgttgttctcgatggtggtaatatgccctgcaaggctgccactggtgatgaacgtcataggaagcgaaaggctaactttgacgctgcaatggtgaagctgaaggaagggaatgtcgcagcagctactgagctttttcagagagcagttagtgtaacatcatccatggctcatcaattgattcaggttctgaaatcagaaaacgtcgaatttattgtagctccctatgaggctgatgctcagctagcatacctatccagcctcgaactggaacaaggcgggattgctgctgttataaccgaagacagcgatttacttgcatatggctgcaaagctgttatctttaagatggaccgctatggtaaaggagaggaactagttctagataatgtttttcaagctgttgatcaaaagccttccttccagaattttgatcaagagctattcactgcaatgtgcgtattggcgggctgtgattttctcccctcggttcctggtgttggtatttcaagagctcatgcattcatctccaagtaccagagtgtagaactcgttttgtcatttctcaagacaaaaaaaggcaaactagttcctgatgattattccagctctttcacggaagcagtttcagtttttcagcacgcacgtgtatatgactttgacgctaagaagctcaagcacttgaaacccctctcccacaacctcctgaatttaccagttgaacaacttgagttcctgggaccagatctgtcgccatctgttgctgttgcaattgctgaaggtaatgttgatcccataaccatgaaagcttttaaccacttctcggtttctaggaaaccgttgaagacgcctgttcgatcattcaaggaacaggaaaagggaagctcctttttggtatgttctttgtctaaaagtgaggaaataatagagctcaaaaggactgcagatgaagctatgattgatccagaagctattgtgaagaagaagatgtactctaaacaagattcagatctatacaaactgcttgcgcagcctaacagggatcaagtggttacccgacccagcaatccctcacttattccggacaacaacccgttcaagattagaaaaaccgatgaaatcaatctggaaatcgcagaatacggtgtgcaagaactcgctgattcgtttgtgaccaaaagcaaagcagtggacgtggcttcttcttcaccaaactctcacgaacacgaggatcaaaaagagtgtgttacaatcgatctgtccaaacttgatgccgctggaatcaaacaggacagtgagaagaacagagtgaaagaaacatttgaaacaacagaagtagatctagctgaagttcaagatcatgtgaacatgacgacaaagagagtgcgtggaacaaaacctagaaccgagaatttcaaagtgaaaacaagctgtaaaagttcagagaacaacaagactataatcaagaagaaacacagtatattagatttcttccagcgattgtaatctctttaattttggtatgtaatcttttcttagcttctttataactcttaatttatgattatttggagaatatagagacgaacaccatatattattacaaacaactc

SEQ ID NO: 77077 - protein, 577 aa, Arabidopsis thaliana
  peptide (1)..(577): Ceres Seq. ID no. 12560892
MGIKDLLRFMKPYILPIHIQKYAGKRVGIDAYSWLHKGAYSCSMELCLDTDGKKKLRYIDYFMHRVNLLQHYEIIPVVVLDGGNMPCKAATGDERHRKRKANFDAAMVKLKEGNVAAATELFQRAVSVTSSMAHQLIQVLKSENVEFIVAPYEADAQLAYLSSLELEQGGIAAVITEDSDLLAYGCKAVIFKMDRYGKGEELVLDNVFQAVDQKPSFQNFDQELFTAMCVLAGCDFLPSVPGVGISRAHAFISKYQSVELVLSFLKTKKGKLVPDDYSSSFTEAVSVFQHARVYDFDAKKLKHLKPLSHNLLNLPVEQLEFLGPDLSPSVAVAIAEGNVDPITMKAFNHFSVSRKPLKTPVRSFKEQEKGSSFLVCSLSKSEEIIELKRTADEAMIDPEAIVKKKMYSKQDSDLYKLLAQPNRDQVVTRPSNPSLIPDNNPFKIRKTDEINLEIAEYGVQELADSFVTKSKAVDVASSSPNSHEHEDQKECVTIDLSKLDAAGIKQDSEKNRVKETFETTEVDLAEVQDHVNMTTKRVRGTKPRTENFKVKTSCKSSENNKTIIKKKHSILDFFQRL

SEQ ID NO: 77078 - protein, 568 aa, Arabidopsis thaliana
  peptide (1)..(568): Ceres Seq. ID no. 12560893
MKPYILPIHIQKYAGKRVGIDAYSWLHKGAYSCSMELCLDTDGKKKLRYIDYFMHRVNLLQHYEIIPVVVLDGGNMPCKAATGDERHRKRKANFDAAMVKLKEGNVAAATELFQRAVSVTSSMAHQLIQVLKSENVEFIVAPYEADAQLAYLSSLELEQGGIAAVITEDSDLLAYGCKAVIFKMDRYGKGEELVLDNVFQAVDQKPSFQNFDQELFTAMCVLAGCDFLPSVPGVGISRAHAFISKYQSVELVLSFLKTKKGKLVPDDYSSSFTEAVSVFQHARVYDFDAKKLKHLKPLSHNLLNLPVEQLEFLGPDLSPSVAVAIAEGNVDPITMKAFNHFSVSRKPLKTPVRSFKEQEKGSSFLVCSLSKSEEIIELKRTADEAMIDPEAIVKKKMYSKQDSDLYKLLAQPNRDQVVTRPSNPSLIPDNNPFKIRKTDEINLEIAEYGVQELADSFVTKSKAVDVASSSPNSHEHEDQKECVTIDLSKLDAAGIKQDSEKNRVKETFETTEVDLAEVQDHVNMTTKRVRGTKPRTENFKVKTSCKSSENNKTIIKKKHSILDFFQRL

SEQ ID NO: 77079 - protein, 534 aa, Arabidopsis thaliana
  peptide (1)..(534): Ceres Seq. ID no. 12560894
MELCLDTDGKKKLRYIDYFMHRVNLLQHYEIIPVVVLDGGNMPCKAATGDERHRKRKANFDAAMVKLKEGNVAAATELFQRAVSVTSSMAHQLIQVLKSENVEFIVAPYEADAQLAYLSSLELEQGGIAAVITEDSDLLAYGCKAVIFKMDRYGKGEELVLDNVFQAVDQKPSFQNFDQELFTAMCVLAGCDFLPSVPGVGISRAHAFISKYQSVELVLSFLKTKKGKLVPDDYSSSFTEAVSVFQHARVYDFDAKKLKHLKPLSHNLLNLPVEQLEFLGPDLSPSVAVAIAEGNVDPITMKAFNHFSVSRKPLKTPVRSFKEQEKGSSFLVCSLSKSEEIIELKRTADEAMIDPEAIVKKKMYSKQDSDLYKLLAQPNRDQVVTRPSNPSLIPDNNPFKIRKTDEINLEIAEYGVQELADSFVTKSKAVDVASSSPNSHEHEDQKECVTIDLSKLDAAGIKQDSEKNRVKETFETTEVDLAEVQDHVNMTTKRVRGTKPRTENFKVKTSCKSSENNKTIIKKKHSILDFFQRL

SEQ ID NO: 77080 - DNA, 2501 bp, Arabidopsis thaliana
  misc_feature (1)..(2501): Ceres Seq. ID no. 12561051
  misc_feature (1)..(2501): Ortholog of  Ceres SEQ ID NO 12590014 as cited in SEQ ID NO 0
cccccatcagaagcggtcaagtcaagcttttagtcaataccccccaaaaccctaaaatcctccaaaacttttgagagggaaaatctctccgccaaaattactctctccttaaacctcttcaccttctctctctcccctcctctgtatctatctcaaatctctctctctgtatctttaactcttattctagttttaatttaagtgtcggaaaaaacccttgttacacagtcatggcggtgatgaacggtggtcgtgcgacgaagcgagcgaggcgtagcaacagaatctcagctgatctttacgatttctctactttcccgacggcggagatcaacggcgagtcgacgactttgccgccgttccgagacggtgtgagaaccttcctcgcgacccacgcgcgtgtcactttccctccttcgacgctcttctcgagtttgatgacgtggcagatcatgcttagacctggagattcgacggacggttcagatctctcttctaaactcgtctctctcgacgttgtggaggaggatgtgacgagatcctctagatctgtttactgtgaacactgctgtgtcgttggttggagtagtcatccagtgtgtagaaagaggtaccgcttcatcataaggtcaggaggagacactaaggcttgcacgaggtgtggtaatactcagaatttgtctgaaggtagcaattgcaaatggtgcagcatggctttagacattgaaaactgggtttactctcagctagaggataacactcacctccttcacggcgttatccactctaatggctacgctcatctactgtgtcttaatggaagagaaggtggctctggttttttgactggtcgtgccattatggacttctgggataggctttgttcctcccttgctgttcgaaaagctagtgtgatggatgtgtcaaggaagtatgggatggactaccggttgcttcatgggattactagagggtgttcgtggtacagtgagtggggttatgaattcaaatcggggagctatgcactcaccaaagaagcttaccagagtgcagtggatactttatctgcgattcctctctctgagtttttgttccaggggaggaaaccaagaactcagctccactccattattagcttctaccaatcactctcgtgttcagagcttgtgactgtcaaagacctcttctcctttctcctacagatgattcgtgagaacagttccaaacctgcatctaagtcgtctgtactgtgtgcttggtctaaaagtgatgtggaacgtgtacagcaaaccatggttaagatactgaaagcttcaggacgcccacaagccaactgggttacaaggtgggctctcaagaggtctatttgcaaatcagcctctccacaactgattgattactgtctcaagcattttggaggggttttggtggatgatggatctcgagtagtcagctcacgttgcaatcctggttcaaacgactttgagtacaggcttgaatctgtcaacaatgtgcaccgcttatctaatcaagatgtaaataatgcatcagtggagcatgtcaaacaggatttaagatatttgtatgaaactttattgcacccacaaaccatggccgagtttaggtctcgagctacaagagaaaaaatgattgacgcagccacaaaaatactggactgtaagcatttcataaaagattacctgtctagcacagtgaaccccgttgcaatcaacctctggtgctgtgttgagctttcggatgaactcaaagaatccccagcccctccacctgaacggttggttttgccattgaacgctactgtttccgaccttaaaatcgaagctgctaaggcttttcaggaagtgtatgcaatgttcaagaggtttgaagttgaggagctcctaggttacggttctatagatgactctattaccctgaaatttctagttggcacaaacggggtcatacggattaaagggagatgctcaaaacacgggctccttagataccgcatggagagaggggtggataattggaaagttgattgcaagtgtggcacaaaggatgatgatggcgagaggatgttggcctgtgatggatgtggtgtgtggcaccacactagatgtattgggatcaataacgctgatgccctaccttccaagttcctttgtttcagatgcattgagttgtacagcaagaaaccaaagcaatctaaaaaagagcgtggatctagtcaagtgcccaaagctggctttgtttgtagaggtgagtcagctgctatgggcagtggatctaatttatccgtaacacttagagtaggctgactgtatttatgatctttctgtatataggttcttatctaggcacaaaactgcaaatggcttaaggtttctacccgtgattgtaactaacacatgaccacttcaagatttcaatcctaagcttaaaagtgttatgtaaacatgggattaagacatttatgaaagtcgaatgttttgttt

SEQ ID NO: 77081 - protein, 697 aa, Arabidopsis thaliana; identical to SEQ ID NO: 45869
  peptide (1)..(697): Ceres Seq. ID no. 12561052

SEQ ID NO: 77082 - protein, 694 aa, Arabidopsis thaliana; identical to SEQ ID NO: 45870
  peptide (1)..(694): Ceres Seq. ID no. 12561053

SEQ ID NO: 77083 - protein, 628 aa, Arabidopsis thaliana
  peptide (1)..(628): Ceres Seq. ID no. 12561054
MTWQIMLRPGDSTDGSDLSSKLVSLDVVEEDVTRSSRSVYCEHCCVVGWSSHPVCRKRYRFIIRSGGDTKACTRCGNTQNLSEGSNCKWCSMALDIENWVYSQLEDNTHLLHGVIHSNGYAHLLCLNGREGGSGFLTGRAIMDFWDRLCSSLAVRKASVMDVSRKYGMDYRLLHGITRGCSWYSEWGYEFKSGSYALTKEAYQSAVDTLSAIPLSEFLFQGRKPRTQLHSIISFYQSLSCSELVTVKDLFSFLLQMIRENSSKPASKSSVLCAWSKSDVERVQQTMVKILKASGRPQANWVTRWALKRSICKSASPQLIDYCLKHFGGVLVDDGSRVVSSRCNPGSNDFEYRLESVNNVHRLSNQDVNNASVEHVKQDLRYLYETLLHPQTMAEFRSRATREKMIDAATKILDCKHFIKDYLSSTVNPVAINLWCCVELSDELKESPAPPPERLVLPLNATVSDLKIEAAKAFQEVYAMFKRFEVEELLGYGSIDDSITLKFLVGTNGVIRIKGRCSKHGLLRYRMERGVDNWKVDCKCGTKDDDGERMLACDGCGVWHHTRCIGINNADALPSKFLCFRCIELYSKKPKQSKKERGSSQVPKAGFVCRGESAAMGSGSNLSVTLRVG

SEQ ID NO: 77084 - DNA, 1531 bp, Arabidopsis thaliana
  misc_feature (1)..(1531): Ceres Seq. ID no. 12561408
  misc_feature (1)..(1531): Ortholog of  Ceres SEQ ID NO 13593967 as cited in SEQ ID NO 56966
gcgagtccagtgagaaaaaaagaataacaatccgacgagaaagaggaaagatcaaatcatctaagtgctggtgccttgattctgcagttctccattttaatccaacaaaaaaagaagctgaatcgacggtatagattcttcaaagaagcaatcataacgcaattgattatatccccaaaagaaaaggtttttaaactccaaaaatgcagactccaaaatcaaggccaggatcattggagctgccacaaaagaagtctcctttaccagctcccaaagttgttaggagactcaaaccaagcggagcagaatccgatccaaaaaccaagacaatatcgaaaactcaaatcccgaaagtagtagctgatcgtcgctctgcaagaatccctctcaatgagattcagaagaagcggacgggaaggataccggaactggaatctacgatatctcagcttcaagaagagcttaagaaggcaaaagaagagctaaacagatcagaagcattgaaaagagaagctcaagaagaagctgaagatgccaagcatcagttaatggatatcaatgcctcggaagattcaagaattgaggagctgcgtaaactctcgcaggagcgagacaagacatggcagtctgaacttgaagctatgcagagacaacacggaatggattctaccgctctgtcttctgccattaacgaagttcagaaactgaaatcgaagctctttgagtccgagtctgagttagagcagtctaagtatgaggtaaggtctttagagaaactcgtcagacagctcgaggaagaaagagtaaacagtagagactcttcatcatcaatggaagtggaagagctgaaagaagcaatgaatctttcaaggcaagagataacacaattgaaatctgcagttgaagcagcagagacaaggtatcaagaagagtatatacagagcacattgcagataagaagcgcatacgaacaaacagaggcggttaaatcaagatattcacagagagaagcagagttaacggaagaattgaacagaaccaaagatgaaatcgaaggtttgcgcaaagagttaatggagaaggtgaaagaagacgaatctacgggcgatttgaagaagctagaatcggatttgatggaagtgagagggagtttaatggataaagagatggagttgcagattctaaggagtgcaatggagaagaaagtggaaaccgcaaacacggaagccatggaagctgagcttaaaagagtgaagattcaatgtgagcaatggaggaaagctgctgagacggcagcttctatactgaacaatgatgaggaaagaacagattctattgagactagcaaaatgttgaagaagtttggtgtgttactcaagaaaaaccataagtaataataatactgattctttttacttgatttaataaaaatggcattattgttgtatgtaaatttataaaatttcgatttgtctaagtttaatttttttgttgaaacgttgccacatttgttgatgaaatttgtattgtg

SEQ ID NO: 77085 - protein, 396 aa, Arabidopsis thaliana; identical to SEQ ID NO: 49913
  peptide (1)..(396): Ceres Seq. ID no. 12561409

SEQ ID NO: 77086 - protein, 281 aa, Arabidopsis thaliana; identical to SEQ ID NO: 49914
  peptide (1)..(281): Ceres Seq. ID no. 12561410

SEQ ID NO: 77087 - protein, 250 aa, Arabidopsis thaliana; identical to SEQ ID NO: 49915
  peptide (1)..(250): Ceres Seq. ID no. 12561411

SEQ ID NO: 77088 - DNA, 1202 bp, Arabidopsis thaliana
  misc_feature (1)..(1202): Ceres Seq. ID no. 12561438
  misc_feature (1)..(1202): Ortholog of  Ceres SEQ ID NO 12636774 as cited in SEQ ID NO 372
  misc_feature (1)..(1202): Ortholog of  Ceres SEQ ID NO 12562215 as cited in SEQ ID NO 20489
  misc_feature (1)..(1202): Ortholog of  Ceres SEQ ID NO 13595548 as cited in SEQ ID NO 51024
  misc_feature (1)..(1202): Ortholog of  Ceres SEQ ID NO 13582350 as cited in SEQ ID NO 56734
  misc_feature (1)..(1202): Ortholog of  Ceres SEQ ID NO 12476493 as cited in SEQ ID NO 58163
  misc_feature (1)..(1202): Ortholog of  Ceres SEQ ID NO 14313459 as cited in SEQ ID NO 62395
  misc_feature (1)..(1202): Ortholog of  Ceres SEQ ID NO 13597295 as cited in SEQ ID NO 63743
  misc_feature (1)..(1202): Ortholog of  Ceres SEQ ID NO 12617090 as cited in SEQ ID NO 64005
  misc_feature (1)..(1202): Ortholog of  Ceres SEQ ID NO 13597439 as cited in SEQ ID NO 64081
  misc_feature (1)..(1202): Ortholog of  Ceres SEQ ID NO 13597233 as cited in SEQ ID NO 64370
  misc_feature (1)..(1202): Ortholog of  Ceres SEQ ID NO 13623850 as cited in SEQ ID NO 0
  misc_feature (1)..(1202): Ortholog of  Ceres SEQ ID NO 14309162 as cited in SEQ ID NO 0
atatcaaacttcaaaagcgtcaaacataaagttaggccaagaaacccatttaaaaaaaaagagagagagatggagagtttcccgatcatcaatctcgagaagcttaatggagaagagagagcaatcactatggagaagatcaaagacgcttgtgaaaactggggcttctttgagtgtgtgaaccatgggatttcactcgagcttttggacaaagtggagaagatgaccaaggaacattacaagaagtgcatggaagagagattcaaggaatcgattaagaacagaggtcttgactctcttcgctctgaagtcaacgacgttgactgggaatccactttctacctcaagcaccttcccgtctctaatatctccgatgtccctgatctcgacgacgattacagaacgttaatgaaagacttcgccggaaagatagagaagttgtcggaggagctactggatctgctgtgcgagaatctcggtttagagaagggttatttaaaaaaggtgttttacgggtcgaaaagaccgacttttggaaccaaagtcagcaattatccaccttgtcctaatccggacctagtcaagggtctccgagcccacaccgacgccggcggcatcatcctcctcttccaagacgacaaagtcagtggacttcagcttcttaaagacggcgagtgggtcgatgttcctccggttaagcattcaatcgtcgttaatctcggcgatcaacttgaggtgataaccaatgggaagtacaagagtgtggaacatagagtgctatctcagacagacggagaaggaagaatgtcgatcgcatcattctataatccgggaagcgactctgttatttttccggcgccggagctgatcggaaaagaagcagagaaggagaagaaagagaactatccgagatttgtgtttgaagattacatgaaactctactctgctgtcaagtttcaggccaaggaaccaaggtttgaagccatgaaagctatggagacaactgtggccaacaatgttggaccattggccactgcgtgaatgatatgtaactggttaataaatatatatatatatatatatatagtctttatataatgtcttagaaacttgattattcactatacgaataattttgttcatgttgttgtatgtttaagtggtgaatgtgttttatatatgggaattaatgttttctgttc

SEQ ID NO: 77089 - protein, 346 aa, Arabidopsis thaliana
  peptide (1)..(346): Ceres Seq. ID no. 12561439
ISNFKSVKHKVRPRNPFKKKEREMESFPIINLEKLNGEERAITMEKIKDACENWGFFECVNHGISLELLDKVEKMTKEHYKKCMEERFKESIKNRGLDSLRSEVNDVDWESTFYLKHLPVSNISDVPDLDDDYRTLMKDFAGKIEKLSEELLDLLCENLGLEKGYLKKVFYGSKRPTFGTKVSNYPPCPNPDLVKGLRAHTDAGGIILLFQDDKVSGLQLLKDGEWVDVPPVKHSIVVNLGDQLEVITNGKYKSVEHRVLSQTDGEGRMSIASFYNPGSDSVIFPAPELIGKEAEKEKKENYPRFVFEDYMKLYSAVKFQAKEPRFEAMKAMETTVANNVGPLATA

SEQ ID NO: 77090 - protein, 323 aa, Arabidopsis thaliana; identical to SEQ ID NO: 25991
  peptide (1)..(323): Ceres Seq. ID no. 12561440

SEQ ID NO: 77091 - protein, 303 aa, Arabidopsis thaliana; identical to SEQ ID NO: 25992
  peptide (1)..(303): Ceres Seq. ID no. 12561441

SEQ ID NO: 77092 - DNA, 1102 bp, Arabidopsis thaliana
  misc_feature (1)..(1102): Ceres Seq. ID no. 12561466
  misc_feature (1)..(1102): Ortholog of  Ceres SEQ ID NO 14307324 as cited in SEQ ID NO 54131
  misc_feature (1)..(1102): Ortholog of  Ceres SEQ ID NO 13594940 as cited in SEQ ID NO 55819
atcattcatcgtacacacacactctctatgacaaagctccccaacatgacgacaacactcaaccatctatttgatctgccggggcagatttgccatgtccagtgtggtttttgcaccactattttgctggtgagtgtaccgtttacaagcttgtcaatggtggtgactgtgagatgtgggcattgcacaagccttctctctgtcaatttgatgaaggcttccttcattcctctccatctccttgcttctctctcccatcttgatgagaccgggaaagaggaggttgcagctacagatggtgtggaagaagaagcatggaaggtgaatcaggagaaggagaacagtccaacgactttggtttcatcttcagacaatgaagatgaagatgtgtctcgtgtttaccaagttgtcaataaaccacctgagaagcgacaaagagctccttcagcttacaattgcttcatcaaggaagagatcaggaggttaaaggctcagaatccaagcatggctcacaaggaagctttcagcttagctgccaaaaattgggcccattttcctccagctcacaacaagagagctgcttcagatcaatgtttttgtgaggaagataacaatgcgatactaccatgcaatgtttttgaggaccatgaagaaagcaataatgggttccgagagagaaaggctcagaggcattccatttggggaaaatctccatttgagtaataacaatttgggatatgaaaatttaacaaaaaaataaataatggcgtatgacatgtgatggtgactcttttcttctagggtttgattatgttggtttagggtttctgttgttggagagagatagagagaagaagaatctgaaacggaagtaggatttgtgtgtgttcgagaagagtccttgggaatgagcgagtttgttcagtaatttcgtagtacttgtcaactttgaacttaatttgaagagacatgcattgactctataaaaaaaattctacttttgcattcatgactactcttattccatgaatgttttaacattccatgaaacagtactttagtaagaatctttggtaacctatcataataaagatccttcttg

SEQ ID NO: 77093 - protein, 240 aa, Arabidopsis thaliana
  peptide (1)..(240): Ceres Seq. ID no. 12561467
IIHRTHTLSMTKLPNMTTTLNHLFDLPGQICHVQCGFCTTILLVSVPFTSLSMVVTVRCGHCTSLLSVNLMKASFIPLHLLASLSHLDETGKEEVAATDGVEEEAWKVNQEKENSPTTLVSSSDNEDEDVSRVYQVVNKPPEKRQRAPSAYNCFIKEEIRRLKAQNPSMAHKEAFSLAAKNWAHFPPAHNKRAASDQCFCEEDNNAILPCNVFEDHEESNNGFRERKAQRHSIWGKSPFE

SEQ ID NO: 77094 - protein, 231 aa, Arabidopsis thaliana
  peptide (1)..(231): Ceres Seq. ID no. 12561468
MTKLPNMTTTLNHLFDLPGQICHVQCGFCTTILLVSVPFTSLSMVVTVRCGHCTSLLSVNLMKASFIPLHLLASLSHLDETGKEEVAATDGVEEEAWKVNQEKENSPTTLVSSSDNEDEDVSRVYQVVNKPPEKRQRAPSAYNCFIKEEIRRLKAQNPSMAHKEAFSLAAKNWAHFPPAHNKRAASDQCFCEEDNNAILPCNVFEDHEESNNGFRERKAQRHSIWGKSPFE

SEQ ID NO: 77095 - protein, 225 aa, Arabidopsis thaliana
  peptide (1)..(225): Ceres Seq. ID no. 12561469
MTTTLNHLFDLPGQICHVQCGFCTTILLVSVPFTSLSMVVTVRCGHCTSLLSVNLMKASFIPLHLLASLSHLDETGKEEVAATDGVEEEAWKVNQEKENSPTTLVSSSDNEDEDVSRVYQVVNKPPEKRQRAPSAYNCFIKEEIRRLKAQNPSMAHKEAFSLAAKNWAHFPPAHNKRAASDQCFCEEDNNAILPCNVFEDHEESNNGFRERKAQRHSIWGKSPFE

SEQ ID NO: 77096 - DNA, 808 bp, Arabidopsis thaliana
  misc_feature (1)..(808): Ceres Seq. ID no. 12561481
  misc_feature (1)..(808): Ortholog of  Ceres SEQ ID NO 15173807 as cited in SEQ ID NO 57520
gccgtcgagaaatctccctctagggtttctttgatcaaaccagagagccgtcagggagagcaaaacaaagatcggagaagatgaagacgattctttcttccgaaacgatggacatccccgacagtgttaccatcaaggttcacgctaaagtgatcgaagtcgaaggacctcgcgggaagcttgttcgcgatttcaagcatctcaacctcgatttccagctgatcaaggatccagagactggaaagaagaagcttaagatcgattcgtggtttggaacacgcaaaaccagcgcctccatcagaaccgctcttagccacgtcgataacttgatctccggtgttaccagaggtttccgttacaagatgaggttcgtgtacgcccattttcccatcaacgcctccatcggcggtgacggaaagtctatcgagatccgtaacttccttggcgagaagaaggtgaggaaggtagagatgttggatggtgtaaccattgttcgatctgagaaggtgaaggatgagattgttcttgacggtaacgatatcgagcttgtttcaaggtcgtgcgctctgatcaaccagaaatgtcacgtgaagaagaaggatatcaggaagttccttgacggtatctatgttagcgagaaaagcaagatcgtagaggaagaatgaatactcatattcccctcttagctcatatttcttgtgtttggaatgttgttagttttgttttatggaccaaatccaccggtgatgtaaaccttgccttttttttgttcgagaatttattaacttatgcaacaagttttggagac

SEQ ID NO: 77097 - protein, 194 aa, Arabidopsis thaliana; identical to SEQ ID NO: 36206
  peptide (1)..(194): Ceres Seq. ID no. 12561482

SEQ ID NO: 77098 - protein, 185 aa, Arabidopsis thaliana; identical to SEQ ID NO: 36207
  peptide (1)..(185): Ceres Seq. ID no. 12561483

SEQ ID NO: 77099 - protein, 100 aa, Arabidopsis thaliana; identical to SEQ ID NO: 36208
  peptide (1)..(100): Ceres Seq. ID no. 12561484

SEQ ID NO: 77100 - DNA, 542 bp, Arabidopsis thaliana
  misc_feature (1)..(542): Ceres Seq. ID no. 12561489
  misc_feature (1)..(542): Ortholog of  Ceres SEQ ID NO 12321778 as cited in SEQ ID NO 20535
actgaaaacagaacaaacacaaacacaaacagagaatcaacgaagaagaaaaatggtgaaggtgatgtgggtttccgttttagctctggcggcggcgattctccttttgacggtcccggtggcagaaggggtgacgtgctcgcctatgcagctggcttcatgtgcggcggcgatgacgtcatcgtcgccgccatcggaggcgtgttgcacaaagctgagagagcagcagccatgcctttgtgggtacatgaggaaccctaccctccgccaatacgttagctcccctaacgcaaggaaagtctccaacagttgcaagattccttccccaagctgttaaggaaatgttaatcatgattaattagtgacaagtttcgctgattatagtggttaatgctggtcttatcttcgtcactactatttagaataataaatgaagtgatgatgattgatgattgatgattgatgattatcatcatcatgcttgaatgttatgttttctatcttataaaatatgaaatatactttagaaatatgtttcgtcg

SEQ ID NO: 77101 - protein, 111 aa, Arabidopsis thaliana
  peptide (1)..(111): Ceres Seq. ID no. 12561490
LKTEQTQTQTENQRRRKMVKVMWVSVLALAAAILLLTVPVAEGVTCSPMQLASCAAAMTSSSPPSEACCTKLREQQPCLCGYMRNPTLRQYVSSPNARKVSNSCKIPSPSC

SEQ ID NO: 77102 - protein, 94 aa, Arabidopsis thaliana; identical to SEQ ID NO: 37678
  peptide (1)..(94): Ceres Seq. ID no. 12561491

SEQ ID NO: 77103 - protein, 92 aa, Arabidopsis thaliana
  peptide (1)..(92): Ceres Seq. ID no. 12561492
TENRTNTNTNRESTKKKNGEGDVGFRFSSGGGDSPFDGPGGRRGDVLAYAAGFMCGGDDVIVAAIGGVLHKAERAAAMPLWVHEEPYPPPIR

SEQ ID NO: 77104 - DNA, 1372 bp, Arabidopsis thaliana
  misc_feature (1)..(1372): Ceres Seq. ID no. 12561497
  misc_feature (1)..(1372): Ortholog of  Ceres SEQ ID NO 15169199 as cited in SEQ ID NO 55297
  misc_feature (1)..(1372): Ortholog of  Ceres SEQ ID NO 15175690 as cited in SEQ ID NO 55466
  misc_feature (1)..(1372): Ortholog of  Ceres SEQ ID NO 15171197 as cited in SEQ ID NO 56892
  misc_feature (1)..(1372): Ortholog of  Ceres SEQ ID NO 14306381 as cited in SEQ ID NO 58812
atccctttctctctcttcccctcttctctctatttccagatcgaaacatctctcttcacaaaatgcctttgtcacggtccctcctttcgcggaggatctcgaactcttttaggtttcatcagggagagacaacgacggcaccggaatccgaatcgattcctccgccgtcgaatatggccggttcttcgtcatggtcggcgatgctccctgaattattaggcgagatcattcgtcgcgtggaggagactgaggaccgttggcctcaacgtcgtgatgtagttacttgcgcttgcgtttctaagaaatggagagaaatcactcacgatttcgctagatcctctcttaactctggcaaaattactttcccttcttgcctcaaattgccaggtcctagagacttttctaatcagtgcttgataaagaggaacaagaagacatcaacgttttacttgtatcttgctctaacaccatcattcactgataagggaaagtttcttctggcggcgcggaggtttaggaccggtgcttacactgagtacatcatatcacttgatgctgatgatttctctcaaggaagtaatgcctacgtcggaaaattaagatcagattttcttgggaccaactttacagtatacgatagccaaccaccacacaacggagcaaaaccttcaaatggcaaagccagtcgcagatttgcatcaaagcagataagccctcaagttccagcaggcaactttgaagtcggtcatgtttcttataaattcaaccttttgaaatcaagaggtccaagaagaatggtaagcacactccgatgcccatcaccatcaccttcatcatcatccgctggactctcgtctgaccaaaagccatgtgatgtaaccaagataatgaaaaaacccaacaaggatggttccagcttgacaatactaaagaacaaagctcctagatggcacgagcacttgcagtgctggtgtctgaacttccatggacgagttactgttgcttcggtcaagaactttcagctggttgcgaccgttgaccaaagtcaaccgagcggtaaaggcgatgaagaaacagttcttctacagtttggtaaagtgggagatgacactttcactatggattatagacagcctctctctgcatttcaggcttttgctatctgtctcacaagtttcggcactaaacttgcctgcgagtgaaacccaacaaaaggcaacagaaaagaaaaagtgaactggctttgcaaaaatgtaatgttttgatgtaatcatgtgtaagtgtaaacacaaaggtatgtggaaaggagaagcacataagtattattatgtaagaaacattatttaaaacccataatcataatgtatctctt

SEQ ID NO: 77105 - protein, 399 aa, Arabidopsis thaliana
  peptide (1)..(399): Ceres Seq. ID no. 12561498
PFLSLPLFSLFPDRNISLHKMPLSRSLLSRRISNSFRFHQGETTTAPESESIPPPSNMAGSSSWSAMLPELLGEIIRRVEETEDRWPQRRDVVTCACVSKKWREITHDFARSSLNSGKITFPSCLKLPGPRDFSNQCLIKRNKKTSTFYLYLALTPSFTDKGKFLLAARRFRTGAYTEYIISLDADDFSQGSNAYVGKLRSDFLGTNFTVYDSQPPHNGAKPSNGKASRRFASKQISPQVPAGNFEVGHVSYKFNLLKSRGPRRMVSTLRCPSPSPSSSSAGLSSDQKPCDVTKIMKKPNKDGSSLTILKNKAPRWHEHLQCWCLNFHGRVTVASVKNFQLVATVDQSQPSGKGDEETVLLQFGKVGDDTFTMDYRQPLSAFQAFAICLTSFGTKLACE

SEQ ID NO: 77106 - protein, 379 aa, Arabidopsis thaliana; identical to SEQ ID NO: 22139
  peptide (1)..(379): Ceres Seq. ID no. 12561499

SEQ ID NO: 77107 - protein, 342 aa, Arabidopsis thaliana; identical to SEQ ID NO: 22140
  peptide (1)..(342): Ceres Seq. ID no. 12561500

SEQ ID NO: 77108 - DNA, 1522 bp, Arabidopsis thaliana
  misc_feature (1)..(1522): Ceres Seq. ID no. 12561525
  misc_feature (1)..(1522): Ortholog of  Ceres SEQ ID NO 13659033 as cited in SEQ ID NO 66372
  misc_feature (1)..(1522): Ortholog of  Ceres SEQ ID NO 13655724 as cited in SEQ ID NO 68973
  misc_feature (1)..(1522): Ortholog of  Ceres SEQ ID NO 12625899 as cited in SEQ ID NO 69079
acgaaagccaaaataaaagagagaaaaagaagataagttgttctatgttcctgaaatgggattaaacgagcaacaaaatgttccaagtcagaggaagatcatagtttttatagtcttagcttttataccaatagctctgtttcgactctgttttaataatccattctcctccattaaagacacctctcttcaagactctgcagctaacgttgtgatcactagcttctcttcatcttctcaagaagaagaaagccaagagagttttgatcatatacaagatgaacctttatgcgattatacgcaagggaactgggtcagagacgagattggtccactctacaatggttcaacatgtggaacaatcaaggatggtcagaattgtttccgccatggtagacctgattccggttatctttactggaaatggaaaccaaacgaatgcgatataccgagattcgactcgaaccggtttcttgatcttatgagagataagcatctagcttttatcggtgattccatggctagaaatcagcttgagtctcttttatgcttgctctctaccgtctctagccctgatctcgtctatagaaacggagaagacaataaattcagaagatggcgtttcgagtcacacaacgtcactgtctcggtttactggtccccgtttttggtggccggtttagagaaatcgggaaacttggaccacaatgtattgcacatagaccgcgtggatgagagatggggcaatgatttagaacgttttgatacggtcgtagtctctgtgggacattggtttctgcatccagcggtttactacgagtctggttcggttttgggatgtcattcttgtgaaacaagtaactgtaccgaggtagggttttatgatgtatttagaaaagcgataagaacaacgttgagagcggttgctggaagtggtcgtgaggtgatcttgacgacattttcgccatcacattttgaaggacggccttgggacagtctcggcgcatgtaacatgaccaagccgtacgaagggaaggttttagaaggtctggacttggacatgcgcaaaatagaaattgaggaatatacggcggctgcggctgaggtgaggttagaggtgttggacgtgacggctatgtcggtactgagaccagacggacatcctggtccgtacatgtacgcggacccgttcaagaacggtgtaccggagagaattcctaatgattgtttgcattggtgtctacctggtcctgtcgacacgtggaacgagatcatgatcgagatgttgcggcgatggaaggtttaaatgatgaacattgattgttgaagatcctatgatatcattcatttacacgcatatgacaaaagaacaaaatgtgtaataattttttgggatttcaaaaagtagctaggtagtttattttcttggattagatacgaaaaaaacagacatggatgatactcttttttgttggttatttcttccgttcttcaaaccatggaggagtacaaaaaatagttg

SEQ ID NO: 77109 - protein, 416 aa, Arabidopsis thaliana; identical to SEQ ID NO: 24155
  peptide (1)..(416): Ceres Seq. ID no. 12561526

SEQ ID NO: 77110 - protein, 274 aa, Arabidopsis thaliana; identical to SEQ ID NO: 24156
  peptide (1)..(274): Ceres Seq. ID no. 12561527

SEQ ID NO: 77111 - protein, 262 aa, Arabidopsis thaliana; identical to SEQ ID NO: 24157
  peptide (1)..(262): Ceres Seq. ID no. 12561528

SEQ ID NO: 77112 - DNA, 1094 bp, Arabidopsis thaliana
  misc_feature (1)..(1094): Ceres Seq. ID no. 12561529
  misc_feature (1)..(1094): Ortholog of  Ceres SEQ ID NO 13594482 as cited in SEQ ID NO 51285
  misc_feature (1)..(1094): Ortholog of  Ceres SEQ ID NO 13655381 as cited in SEQ ID NO 63359
atgttctaccaatcgtcgtcgtctctcacgcaaattcttcattcgttctgtggaaacacagaaatggagactccatatccgaaactcatcgatccttcaaagactcgaataggatggattggcatcgggataatgggatcggccatggtttctcatattatcgccgcaggctattctgtcacagtttacgctcgcgacctccggaaaacaaaagatctgcaaaccaaaggagctcgcatagccaatagccccaaagagttagcggagatgagcgacgttgtgttcacgattgttggaaacttcaacgatgtccgatcattgcttctcggtgacgatggtgtactctctggtcttacgcccggtggagtaacagtggacatgactagtagcaaaccaggattggcgcgtgaaatacacgcagaagcgaggcgtaggaattgttgggcggtggatgcgccggtatcaggtggagacgctggagcacgagaggggacgttagggattttcgccggcggagattcagagattgtggagtggttgtccccggtgatgaagaatatagggactgttacttatatgggagaagcagggagtgggcaaagctgcaagatagggaatcagattgctggtgcgagcaacctggttggacttgctgaagggatagtgttcgctgagaaagcgggtttagatacagtgaaatggctcgaggcggtgaaggatggtgcagctggatcggcggttatgcggctgtttggggagatgattgtgaagagggattatagggcgactggctttgcggagtatatggtgaaagatttgggaatggctgcagaggcggcgatgcctggtgctgctctgagcaagcagttgttcactggaatggtggctaatggagatggcaagttaggtattcaaggcgtcgtctctgttattagaagacttaacggcatatcctgaaaacacttgtgttgtaaaacagagtgttccaatgatttcacgatcaactaggcaaacttgtcttcgatttggtttaagttgataataagaagaacatcgagtctcaccaatctcaataagaaacaaagggcatttat

SEQ ID NO: 77113 - protein, 318 aa, Arabidopsis thaliana
  peptide (1)..(318): Ceres Seq. ID no. 12561530
MFYQSSSSLTQILHSFCGNTEMETPYPKLIDPSKTRIGWIGIGIMGSAMVSHIIAAGYSVTVYARDLRKTKDLQTKGARIANSPKELAEMSDVVFTIVGNFNDVRSLLLGDDGVLSGLTPGGVTVDMTSSKPGLAREIHAEARRRNCWAVDAPVSGGDAGAREGTLGIFAGGDSEIVEWLSPVMKNIGTVTYMGEAGSGQSCKIGNQIAGASNLVGLAEGIVFAEKAGLDTVKWLEAVKDGAAGSAVMRLFGEMIVKRDYRATGFAEYMVKDLGMAAEAAMPGAALSKQLFTGMVANGDGKLGIQGVVSVIRRLNGIS

SEQ ID NO: 77114 - protein, 297 aa, Arabidopsis thaliana
  peptide (1)..(297): Ceres Seq. ID no. 12561531
METPYPKLIDPSKTRIGWIGIGIMGSAMVSHIIAAGYSVTVYARDLRKTKDLQTKGARIANSPKELAEMSDVVFTIVGNFNDVRSLLLGDDGVLSGLTPGGVTVDMTSSKPGLAREIHAEARRRNCWAVDAPVSGGDAGAREGTLGIFAGGDSEIVEWLSPVMKNIGTVTYMGEAGSGQSCKIGNQIAGASNLVGLAEGIVFAEKAGLDTVKWLEAVKDGAAGSAVMRLFGEMIVKRDYRATGFAEYMVKDLGMAAEAAMPGAALSKQLFTGMVANGDGKLGIQGVVSVIRRLNGIS

SEQ ID NO: 77115 - protein, 274 aa, Arabidopsis thaliana
  peptide (1)..(274): Ceres Seq. ID no. 12561532
MGSAMVSHIIAAGYSVTVYARDLRKTKDLQTKGARIANSPKELAEMSDVVFTIVGNFNDVRSLLLGDDGVLSGLTPGGVTVDMTSSKPGLAREIHAEARRRNCWAVDAPVSGGDAGAREGTLGIFAGGDSEIVEWLSPVMKNIGTVTYMGEAGSGQSCKIGNQIAGASNLVGLAEGIVFAEKAGLDTVKWLEAVKDGAAGSAVMRLFGEMIVKRDYRATGFAEYMVKDLGMAAEAAMPGAALSKQLFTGMVANGDGKLGIQGVVSVIRRLNGIS

SEQ ID NO: 77116 - DNA, 740 bp, Arabidopsis thaliana
  misc_feature (1)..(740): Ceres Seq. ID no. 12561533
  misc_feature (1)..(740): Ortholog of  Ceres SEQ ID NO 12784091 as cited in SEQ ID NO 67615
  misc_feature (1)..(740): Ortholog of  Ceres SEQ ID NO 15177688 as cited in SEQ ID NO 0
gcggtcttatcccgaaactccaagaacacataattttttttcttggtggtctctccaatggctttctctgcgactgtgtctcagctttcttctctttcaaccatctcctcttcattaccaatttcttctagaagactccctcatcgatctcttcctcaattcacagtcaaagcagaagcagagaaagagaaacagagcacacagggcaagtctgatggggaagcatcaccagctgcaaccaaaacccctaaaaccctccccaagaaaccggtttactcgatgaagaagggccaaatcgttcgtgtggaaaaagagaagtacctcaacagcatcaattacttatcagttggacatcctcctttctacaaaggacttgattacatatacgaagatcgcggcgaggtcttggaccttcgtgtctttgagacaggagagtatgcacttgttggatgggttggtatccccaccgcaccagcttggctcccaacagatatgctcatcaagtgtgagaaacttgtttacgagcgaatgtagagtcaagaaggttccaagaagaatcctttggaatgcaactgatataccaaggattgtgttaagctgagatgaacgataacaatggcgcaccatcatgatcatgtgttcaagagtttgacaaagtatcaacgttacaattagttacaaaaactgttgtggagtgtggaatatgtcatcagactcctataataagaatgcagcttcag

SEQ ID NO: 77117 - protein, 158 aa, Arabidopsis thaliana
  peptide (1)..(158): Ceres Seq. ID no. 12561534
MAFSATVSQLSSLSTISSSLPISSRRLPHRSLPQFTVKAEAEKEKQSTQGKSDGEASPAATKTPKTLPKKPVYSMKKGQIVRVEKEKYLNSINYLSVGHPPFYKGLDYIYEDRGEVLDLRVFETGEYALVGWVGIPTAPAWLPTDMLIKCEKLVYERM

SEQ ID NO: 77118 - protein, 93 aa, Arabidopsis thaliana
  peptide (1)..(93): Ceres Seq. ID no. 12561535
RSYPETPRTHNFFSWWSLQWLSLRLCLSFLLFQPSPLHYQFLLEDSLIDLFLNSQSKQKQRKRNRAHRASLMGKHHQLQPKPLKPSPRNRFTR

SEQ ID NO: 77119 - protein, 84 aa, Arabidopsis thaliana
  peptide (1)..(84): Ceres Seq. ID no. 12561536
MKKGQIVRVEKEKYLNSINYLSVGHPPFYKGLDYIYEDRGEVLDLRVFETGEYALVGWVGIPTAPAWLPTDMLIKCEKLVYERM

SEQ ID NO: 77120 - DNA, 1536 bp, Arabidopsis thaliana
  misc_feature (1)..(1536): Ceres Seq. ID no. 12561544
  misc_feature (1)..(1536): Ortholog of  Ceres SEQ ID NO 15177091 as cited in SEQ ID NO 52140
  misc_feature (1)..(1536): Ortholog of  Ceres SEQ ID NO 15172539 as cited in SEQ ID NO 57333
  misc_feature (1)..(1536): Ortholog of  Ceres SEQ ID NO 14315951 as cited in SEQ ID NO 57634
  misc_feature (1)..(1536): Ortholog of  Ceres SEQ ID NO 13597324 as cited in SEQ ID NO 64842
  misc_feature (1)..(1536): Ortholog of  Ceres SEQ ID NO 13658672 as cited in SEQ ID NO 66627
aaattgcggaggctgagagatctcaaatcgacgaccaacaggaagaatgagcagtcgttcgagtagaaccgtgtacgtcggaaaccttcctggcgatatccgtgagagagaggtcgaagatttgttcagtaagtatggacctgttgttcaaattgatttgaaggttcctccaaggcctcctggttatgcattcgttgagtttgatgatgctcgggatgctgaagatgctattcatggtcgtgatggctatgactttgatgggcatcgtttgagggtggaattggcgcatggtgggaggcgttcatcagatgatactcggggtagtttcaatggtggtggccgtggtggtggtcgcggccgtggtgatggtggtagtcgtgggccatctaggagatcagagtttcgtgttctagtcacaggcttgccttcatctgcttcttggcaagatctcaaggatcacatgcgtaaaggaggcgatgtctgtttctcgcaagtgtaccgtgatgctagagggacaactggagttgttgattacacctgctatgaggacatgaagtatgcgctgaaaaagctcgacgacacagagtttcgaaatgcgttttcgaatggatatgtccgggttagagaatatgattcaaggaaggattctaggagtcctagccggggaagatcctattctaagagccgcagccgcagccgtggacgaagcgtgagccgaagcaggagcagaagcaggagcaggagcagaagtcccaaggcaaagtcttcacgtaggtcccctgcaaaatctacatcaagatctcctggcccccgctcgaagtcaaggtcaccgtctccaagaagatggataacagtggagacattggatcacttggatcacaatattatatcgggatttctgtaaaactatattggctcgatggattgacaatatggaatctgggttctcttgggacgtccgtggctcatttggcaacacaagtttttttggccacatggcttataaaacctctgtcctatcacctatgttttaactaagtagcagaatagtttggtttatgtttctttttttttatttgttgcaacttcttaatctctgtgagatagaaggagaggctccaggaccttgctgaacagtataaaacacaacatgtttggatttttgaatctgagtttcttttcttggacttttgcagatcgcgttcaagatcaagatctcctctaccttctgttcagaaggaaggaagcaagagccctagcaagccaagtccagccaagagtcctatccacactaggagtccatcgaggtaaaatgggagatatccaggtgaaaagagaagagagaagcatcttcttgctactcaaaacaaattctactttcttgaagtggattatatctgaacgcttattgactgtagaagatgcgacaagtttgatttgcactatcattttgtaatattcttgccattcttcgtcttctggatccctttacttttgagaatgatgtttttttttgaagatatcgtttcttttccc

SEQ ID NO: 77121 - protein, 285 aa, Arabidopsis thaliana
  peptide (1)..(285): Ceres Seq. ID no. 12561545
MSSRSSRTVYVGNLPGDIREREVEDLFSKYGPVVQIDLKVPPRPPGYAFVEFDDARDAEDAIHGRDGYDFDGHRLRVELAHGGRRSSDDTRGSFNGGGRGGGRGRGDGGSRGPSRRSEFRVLVTGLPSSASWQDLKDHMRKGGDVCFSQVYRDARGTTGVVDYTCYEDMKYALKKLDDTEFRNAFSNGYVRVREYDSRKDSRSPSRGRSYSKSRSRSRGRSVSRSRSRSRSRSRSPKAKSSRRSPAKSTSRSPGPRSKSRSPSPRRWITVETLDHLDHNIISGFL

SEQ ID NO: 77122 - protein, 147 aa, Arabidopsis thaliana
  peptide (1)..(147): Ceres Seq. ID no. 12561546
MRKGGDVCFSQVYRDARGTTGVVDYTCYEDMKYALKKLDDTEFRNAFSNGYVRVREYDSRKDSRSPSRGRSYSKSRSRSRGRSVSRSRSRSRSRSRSPKAKSSRRSPAKSTSRSPGPRSKSRSPSPRRWITVETLDHLDHNIISGFL

SEQ ID NO: 77123 - DNA, 1050 bp, Arabidopsis thaliana
  misc_feature (1)..(1050): Ceres Seq. ID no. 12561563
  misc_feature (1)..(1050): Ortholog of  Ceres SEQ ID NO 12557432 as cited in SEQ ID NO 92
  misc_feature (1)..(1050): Ortholog of  Ceres SEQ ID NO 14305097 as cited in SEQ ID NO 0
aaacgaaaagcttttgaagaacagaggaacaagaagaagaaagatgttcaggaaccagtacgacacagatgtgacaacatggagtcccacaggtcgactattccaagtcgaatacgccatggaagctgtgaaacaaggctccgcagcaataggactcagatctcgctctcatgtcgtcctcgcttgtgtcaacaaagcacaatcagagctctcttctcatcaaaggaagatctttaaagtcgatgatcatattggtgttgctattgctggtctcactgctgatggtcgtgttctctctcgatatatgagatctgagtctattaatcactcttttacttatgagtctcctcttcctgttggtcgtcttgttgttcatcttgctgataaagctcaggtatgtacccaacgatcatggaaacggccttatggtgtgggtttgctggtaggtggattggacgagtcaggagctcacctctactacaactgccctagcggaaactactttgaatatcaagcattcgctatcgggtctcgttcacaagctgcgaaaacctatctggagcgcaaattcgagagcttccaagaatcatcaaaagaagatctgataaaagatgctattatggccataagggaaactttgcaaggggaaacactgaagagctcgctctgcactgtttctgttctaggagtcgatgaaccattccatttcttggaccaggaaagcattcaaaaggtgattgatacgtttgagaaggttcctgaggaagaggaagatgctggtgagggtgaggccgaacccgaagctgctcctggtgctgctggaactggtgaacaaggtggttcaggtgatcaagatgttgcaccaatggaaatttgagcaagagggaatgagttcaaagttggattttctaaccaattttcttgtgtgtagctctttgatatgttccaacttccaagtacaattgtggtttttattcggctttgtttatttaacagcttggaacaaggagttattgagtgccactagcttatgtttagtcctacttaagt

SEQ ID NO: 77124 - protein, 291 aa, Arabidopsis thaliana
  peptide (1)..(291): Ceres Seq. ID no. 12561564
NEKLLKNRGTRRRKMFRNQYDTDVTTWSPTGRLFQVEYAMEAVKQGSAAIGLRSRSHVVLACVNKAQSELSSHQRKIFKVDDHIGVAIAGLTADGRVLSRYMRSESINHSFTYESPLPVGRLVVHLADKAQVCTQRSWKRPYGVGLLVGGLDESGAHLYYNCPSGNYFEYQAFAIGSRSQAAKTYLERKFESFQESSKEDLIKDAIMAIRETLQGETLKSSLCTVSVLGVDEPFHFLDQESIQKVIDTFEKVPEEEEDAGEGEAEPEAAPGAAGTGEQGGSGDQDVAPMEI

SEQ ID NO: 77125 - protein, 277 aa, Arabidopsis thaliana; identical to SEQ ID NO: 35615
  peptide (1)..(277): Ceres Seq. ID no. 12561565

SEQ ID NO: 77126 - protein, 252 aa, Arabidopsis thaliana; identical to SEQ ID NO: 35616
  peptide (1)..(252): Ceres Seq. ID no. 12561566

SEQ ID NO: 77127 - DNA, 1734 bp, Arabidopsis thaliana
  misc_feature (1)..(1734): Ceres Seq. ID no. 12561581
  misc_feature (1)..(1734): Ortholog of  Ceres SEQ ID NO 13600220 as cited in SEQ ID NO 0
atcataaacttgttctcttccagaagaaactaaaaacaaaaatggcattgcaaaagtttcctctcatggggctgcttttgctcctaaccatcctcgtctctgtgacaacagcggttgatgatcctgtttgcccggcgacttccaagctaagccgagcaagtttccctaatgggtttttgtttggcacggctactgctgcgtttcaggtcgaaggtgcaattaatgaaacttgtcgtggaccggctctatgggatatctactgtagaagaaatccagagagatgtagtggcgaccacgccgatgtggccgttgatttcttccatcgttataaggaagatattcagctaatgaagaatctaaacacagatgcattcagactctcaatcgcatggtcaagaatatttcctcatgggagaaaggagaagggagtgagtcaagctggtgtgcaattctaccacgagctcatcgatgaactccttaaaaatggtatagttccgtttgtgactgttttccattgggacactccacaagatttggaagacgaatatggcggtttcttaagccaaaacattgtgaaagattttcgagaatatgcagattatgttttcactgaatacggtggaaaagtgaaaaactggatcactttcaacgagccatgggtctttgctcacgcaggttacgacttaggaaagaaagcaccaggacgttgttctcgctacgttccaggttgcgaagaccgagagggacaatctggtaaagaggcttatctagtcagtcacaatctcctcaacgctcacgcagaagctgttgaagttttccgccaaaaggttaaaggtgggaaaatcggaatcgcacatagtccggcttggttcgaaccacatgatcttaaagattcaaatgacgctccaactgttagccgtgtacttgactttatgttgggatggcatctggagccaactacttcgggagattatccacaaatcatgaaagaccttcttggttacagattgcctcaatttactgctgcacaaaaagcaaaattgaaagattcgaccgatttcgtagggcttaactactatacttcgacattttcaaattataatgagaagccagatccgtctaaaccaagttggaagcaagattctcttgtttcctgggaacctaagaatgtagatcacagcgccattggtagcatgcctcttactgctgcattgcccgtctacgctaaaggatttagaaagcttttaaagtacatcaaggacaaatacgcaaacccggagattatgataatggaaaatggatatggagataaacttgggaccacagattcggttgacgttggtactgctgatcataacaggaaatattatcttcagaggcatcttctggctatgaacgaggctatttgcatcgataaggtgagagttacgggatactttgtatggtcattgttggataacttcgaatggcaagatggttacaaaaacagattcggactctattacgtcgatttcaaaaataacctcacacgttatgagaaagaatcagccaagtattacaaagatttcctcgctcaaggtgttcgtccatccgcactcaagagggatgagctttaagttatattttgaggatttcgttttctattcgatgtttttcctatgttttagtttgtgattgaccacgcacgattcatgagtcgtggttaataataataaaagtgtttcgttttccttc

SEQ ID NO: 77128 - protein, 537 aa, Arabidopsis thaliana
  peptide (1)..(537): Ceres Seq. ID no. 12561582
HKLVLFQKKLKTKMALQKFPLMGLLLLLTILVSVTTAVDDPVCPATSKLSRASFPNGFLFGTATAAFQVEGAINETCRGPALWDIYCRRNPERCSGDHADVAVDFFHRYKEDIQLMKNLNTDAFRLSIAWSRIFPHGRKEKGVSQAGVQFYHELIDELLKNGIVPFVTVFHWDTPQDLEDEYGGFLSQNIVKDFREYADYVFTEYGGKVKNWITFNEPWVFAHAGYDLGKKAPGRCSRYVPGCEDREGQSGKEAYLVSHNLLNAHAEAVEVFRQKVKGGKIGIAHSPAWFEPHDLKDSNDAPTVSRVLDFMLGWHLEPTTSGDYPQIMKDLLGYRLPQFTAAQKAKLKDSTDFVGLNYYTSTFSNYNEKPDPSKPSWKQDSLVSWEPKNVDHSAIGSMPLTAALPVYAKGFRKLLKYIKDKYANPEIMIMENGYGDKLGTTDSVDVGTADHNRKYYLQRHLLAMNEAICIDKVRVTGYFVWSLLDNFEWQDGYKNRFGLYYVDFKNNLTRYEKESAKYYKDFLAQGVRPSALKRDEL

SEQ ID NO: 77129 - protein, 524 aa, Arabidopsis thaliana
  peptide (1)..(524): Ceres Seq. ID no. 12561583
MALQKFPLMGLLLLLTILVSVTTAVDDPVCPATSKLSRASFPNGFLFGTATAAFQVEGAINETCRGPALWDIYCRRNPERCSGDHADVAVDFFHRYKEDIQLMKNLNTDAFRLSIAWSRIFPHGRKEKGVSQAGVQFYHELIDELLKNGIVPFVTVFHWDTPQDLEDEYGGFLSQNIVKDFREYADYVFTEYGGKVKNWITFNEPWVFAHAGYDLGKKAPGRCSRYVPGCEDREGQSGKEAYLVSHNLLNAHAEAVEVFRQKVKGGKIGIAHSPAWFEPHDLKDSNDAPTVSRVLDFMLGWHLEPTTSGDYPQIMKDLLGYRLPQFTAAQKAKLKDSTDFVGLNYYTSTFSNYNEKPDPSKPSWKQDSLVSWEPKNVDHSAIGSMPLTAALPVYAKGFRKLLKYIKDKYANPEIMIMENGYGDKLGTTDSVDVGTADHNRKYYLQRHLLAMNEAICIDKVRVTGYFVWSLLDNFEWQDGYKNRFGLYYVDFKNNLTRYEKESAKYYKDFLAQGVRPSALKRDEL

SEQ ID NO: 77130 - protein, 516 aa, Arabidopsis thaliana
  peptide (1)..(516): Ceres Seq. ID no. 12561584
MGLLLLLTILVSVTTAVDDPVCPATSKLSRASFPNGFLFGTATAAFQVEGAINETCRGPALWDIYCRRNPERCSGDHADVAVDFFHRYKEDIQLMKNLNTDAFRLSIAWSRIFPHGRKEKGVSQAGVQFYHELIDELLKNGIVPFVTVFHWDTPQDLEDEYGGFLSQNIVKDFREYADYVFTEYGGKVKNWITFNEPWVFAHAGYDLGKKAPGRCSRYVPGCEDREGQSGKEAYLVSHNLLNAHAEAVEVFRQKVKGGKIGIAHSPAWFEPHDLKDSNDAPTVSRVLDFMLGWHLEPTTSGDYPQIMKDLLGYRLPQFTAAQKAKLKDSTDFVGLNYYTSTFSNYNEKPDPSKPSWKQDSLVSWEPKNVDHSAIGSMPLTAALPVYAKGFRKLLKYIKDKYANPEIMIMENGYGDKLGTTDSVDVGTADHNRKYYLQRHLLAMNEAICIDKVRVTGYFVWSLLDNFEWQDGYKNRFGLYYVDFKNNLTRYEKESAKYYKDFLAQGVRPSALKRDEL

SEQ ID NO: 77131 - DNA, 1962 bp, Arabidopsis thaliana
  misc_feature (1)..(1962): Ceres Seq. ID no. 12561604
  misc_feature (1)..(1962): Ortholog of  Ceres SEQ ID NO 13638331 as cited in SEQ ID NO 58047
ccataaaaatctatcaataatcacttcctctctctctctctctctcttatacaacactcaagaagcgagacacagaggagagagttagtcttcttctctgtttttgtctctttggctatatatattcaaacattgtgtgaacagaacacaaatcaacacaacacacacaactttgtgttctttaagttttgtttcagagatcaatggccgggactggattgtttgctgagattcttgatggagaagtatacaaatactacgctgatggtgagtggaaaacttcttcctcaggtaagagtgttgccatcatgaacccggccacgaggaagacacagtacaaggttcaagcatgcacgcaagaagaagtgaacgcggtgatggaactggcgaaatcagctcagaaatcgtgggcgaaaactcctctttggaaaagagctgagcttcttcacaaggctgcagcaatccttaaggacaacaaagctcccatggctgagtctcttgttaaagaaatcgctaaacccgccaaagattctgttactgaggttgtgaggtctggagatttgatctcttattgtgctgaagaaggtgttaggatcttaggtgaagggaagtttcttctctccgatagcttccccggtaatgaccgtactaagtactgcctcacttccaagattccactcggtgtggttttggctattcctccattcaattatccagttaatctcgctgtatcgaagatcgctcctgctttgatcgccggaaactcccttgtcctcaaacctccaactcaaggagctgtttcttgccttcacatggtacattgctttcacttagccggtttcccaaaaggtcttatcagctgcatcaccggaaaaggatctgagatcggcgatttcctcactatgcaccctgctgttaactgcattagtttcacgggtggtgataccggaatctcaatctcaaagaaagctggtatgatccctcttcaaatggaacttggaggtaaagatgcatgcattgttctagatgatgctgatcttgatttagttgcttccaatatcatcaaaggaggattctcttacagcgggcagagatgcactgcggttaaggtagtcctagtgatggaatcagtagcggatgagcttgttgagaaagtgaaagctaaagtggccaaactcacggtgggaccgcccgaagagaactccgatatcacggcagtggtgtcggaatcttcagctaatttcattgaaggattggtgatggatgctaaggagaaaggagcaacgttttgtcaagagtataaaagagagggtaacttgatttggccgttgcttttggataatgttagaccggacatgaggatcgcgtgggaggaaccattcggtcctgttgtgccggtcttgaggatcaattctgttgaagaagggattaatcattgcaatgcaagcaactttggccttcagggatgtgtattcactaaagacatcaacaaggcaatactgatcagtgatgcaatggagacaggaaccgttcagatcaactctgcgccagctcgtggaccggaccacttccctttccagggacttaaggacagtggaatagggtcacaaggtgtgacaaatagcatcaatttgatgactaaagtgaagaccactgtcattaacttgcctacaccttcttactctatgggttagtttccctttttttttatgttcttcatcttagaatcaaaatcaatcatgtcatgtttgtattggattcaatcgaatactgcgaataaagggagtgattagcgtaactattatggtttgtaatctctatgtaaccaataagaggatattatgaaagatgagtgagaggtttggttgtgttgtgttataacaggggacggtttcatctcacgcctgtgattcgagcacacaaaactgaaaacttcttttgataattggagttttatcattt

SEQ ID NO: 77132 - protein, 496 aa, Arabidopsis thaliana
  peptide (1)..(496): Ceres Seq. ID no. 12561605
MAGTGLFAEILDGEVYKYYADGEWKTSSSGKSVAIMNPATRKTQYKVQACTQEEVNAVMELAKSAQKSWAKTPLWKRAELLHKAAAILKDNKAPMAESLVKEIAKPAKDSVTEVVRSGDLISYCAEEGVRILGEGKFLLSDSFPGNDRTKYCLTSKIPLGVVLAIPPFNYPVNLAVSKIAPALIAGNSLVLKPPTQGAVSCLHMVHCFHLAGFPKGLISCITGKGSEIGDFLTMHPAVNCISFTGGDTGISISKKAGMIPLQMELGGKDACIVLDDADLDLVASNIIKGGFSYSGQRCTAVKVVLVMESVADELVEKVKAKVAKLTVGPPEENSDITAVVSESSANFIEGLVMDAKEKGATFCQEYKREGNLIWPLLLDNVRPDMRIAWEEPFGPVVPVLRINSVEEGINHCNASNFGLQGCVFTKDINKAILISDAMETGTVQINSAPARGPDHFPFQGLKDSGIGSQGVTNSINLMTKVKTTVINLPTPSYSMG

SEQ ID NO: 77133 - protein, 461 aa, Arabidopsis thaliana
  peptide (1)..(461): Ceres Seq. ID no. 12561606
MNPATRKTQYKVQACTQEEVNAVMELAKSAQKSWAKTPLWKRAELLHKAAAILKDNKAPMAESLVKEIAKPAKDSVTEVVRSGDLISYCAEEGVRILGEGKFLLSDSFPGNDRTKYCLTSKIPLGVVLAIPPFNYPVNLAVSKIAPALIAGNSLVLKPPTQGAVSCLHMVHCFHLAGFPKGLISCITGKGSEIGDFLTMHPAVNCISFTGGDTGISISKKAGMIPLQMELGGKDACIVLDDADLDLVASNIIKGGFSYSGQRCTAVKVVLVMESVADELVEKVKAKVAKLTVGPPEENSDITAVVSESSANFIEGLVMDAKEKGATFCQEYKREGNLIWPLLLDNVRPDMRIAWEEPFGPVVPVLRINSVEEGINHCNASNFGLQGCVFTKDINKAILISDAMETGTVQINSAPARGPDHFPFQGLKDSGIGSQGVTNSINLMTKVKTTVINLPTPSYSMG

SEQ ID NO: 77134 - protein, 438 aa, Arabidopsis thaliana
  peptide (1)..(438): Ceres Seq. ID no. 12561607
MELAKSAQKSWAKTPLWKRAELLHKAAAILKDNKAPMAESLVKEIAKPAKDSVTEVVRSGDLISYCAEEGVRILGEGKFLLSDSFPGNDRTKYCLTSKIPLGVVLAIPPFNYPVNLAVSKIAPALIAGNSLVLKPPTQGAVSCLHMVHCFHLAGFPKGLISCITGKGSEIGDFLTMHPAVNCISFTGGDTGISISKKAGMIPLQMELGGKDACIVLDDADLDLVASNIIKGGFSYSGQRCTAVKVVLVMESVADELVEKVKAKVAKLTVGPPEENSDITAVVSESSANFIEGLVMDAKEKGATFCQEYKREGNLIWPLLLDNVRPDMRIAWEEPFGPVVPVLRINSVEEGINHCNASNFGLQGCVFTKDINKAILISDAMETGTVQINSAPARGPDHFPFQGLKDSGIGSQGVTNSINLMTKVKTTVINLPTPSYSMG

SEQ ID NO: 77135 - DNA, 987 bp, Arabidopsis thaliana
  misc_feature (1)..(987): Ceres Seq. ID no. 12561608
  misc_feature (1)..(987): Ortholog of  Ceres SEQ ID NO 15172729 as cited in SEQ ID NO 56037
  misc_feature (1)..(987): Ortholog of  Ceres SEQ ID NO 12615635 as cited in SEQ ID NO 63133
  misc_feature (1)..(987): Ortholog of  Ceres SEQ ID NO 13584899 as cited in SEQ ID NO 64830
  misc_feature (1)..(987): Ortholog of  Ceres SEQ ID NO 13654441 as cited in SEQ ID NO 67814
  misc_feature (1)..(987): Ortholog of  Ceres SEQ ID NO 13596128 as cited in SEQ ID NO 67831
  misc_feature (1)..(987): Ortholog of  Ceres SEQ ID NO 12585194 as cited in SEQ ID NO 68878
  misc_feature (1)..(987): Ortholog of  Ceres SEQ ID NO 12589186 as cited in SEQ ID NO 0
atagtaaactcaagtaatcaagcaagtaaacgaaacataaaaataaaagtagtgcaagaaacagaggagttagataccaaaaagtgagagatatcgaatggcggagaaagaagagagtgtgaagcttctagggttttgggcaagcccttttagtcgtcgagtcgagatggctctcaaactcaaaggcgtgccatacgaatacttggaagaagatttgcccaacaagacccctttgcttctggagctaaacccgcttcacaagaaagttccggttcttgtccacaatgacaaaatattactcgagtcacatctgattctcgaatacatcgatcagacgtggaagaacagtccaattcttcctcaagatccttacgagaaggccatggctcgattttgggccaagttcatcgatgaccagatcctaacactagggtttaggtcccttgtaaaagcagagaaaggaagagaggttgctattgaagagactcgggaactgcttatgtttcttgagaaagaagtcactggaaaagatttcttcggtggcaagacaatcggattcttggacatgatcgcaggaagtatgatcccattttgtctagctagactttggaaaggtattggaattgatatgattccagaggagaagtttccggaattaaatagatggatcaagaatttggaagaagttgaggcagtgaggggatgtattcctccaagagagaaacaaattgagcgcatgaccaaaattgcagagacaattaagtctgcctaaattaaagatacttcttgcctacgaaaatatttgatttatatgcttgcatcgttttttatttatatttttattttttaaagtttttcgaaaaatagaatgacctaatatttaagtaaaaagatcaaaaacctatttgaaagttacagcaatcaaataacgtggtgtgtctggagattgtaaaagccaagactagaaggaaataagaataaaataac

SEQ ID NO: 77136 - protein, 224 aa, Arabidopsis thaliana
  peptide (1)..(224): Ceres Seq. ID no. 12561609
MAEKEESVKLLGFWASPFSRRVEMALKLKGVPYEYLEEDLPNKTPLLLELNPLHKKVPVLVHNDKILLESHLILEYIDQTWKNSPILPQDPYEKAMARFWAKFIDDQILTLGFRSLVKAEKGREVAIEETRELLMFLEKEVTGKDFFGGKTIGFLDMIAGSMIPFCLARLWKGIGIDMIPEEKFPELNRWIKNLEEVEAVRGCIPPREKQIERMTKIAETIKSA

SEQ ID NO: 77137 - protein, 201 aa, Arabidopsis thaliana
  peptide (1)..(201): Ceres Seq. ID no. 12561610
MALKLKGVPYEYLEEDLPNKTPLLLELNPLHKKVPVLVHNDKILLESHLILEYIDQTWKNSPILPQDPYEKAMARFWAKFIDDQILTLGFRSLVKAEKGREVAIEETRELLMFLEKEVTGKDFFGGKTIGFLDMIAGSMIPFCLARLWKGIGIDMIPEEKFPELNRWIKNLEEVEAVRGCIPPREKQIERMTKIAETIKSA

SEQ ID NO: 77138 - protein, 129 aa, Arabidopsis thaliana
  peptide (1)..(129): Ceres Seq. ID no. 12561611
MARFWAKFIDDQILTLGFRSLVKAEKGREVAIEETRELLMFLEKEVTGKDFFGGKTIGFLDMIAGSMIPFCLARLWKGIGIDMIPEEKFPELNRWIKNLEEVEAVRGCIPPREKQIERMTKIAETIKSA

SEQ ID NO: 77139 - DNA, 1219 bp, Arabidopsis thaliana
  misc_feature (1)..(1219): Ceres Seq. ID no. 12561639
  misc_feature (1)..(1219): Ortholog of  Ceres SEQ ID NO 14304716 as cited in SEQ ID NO 53189
  misc_feature (1)..(1219): Ortholog of  Ceres SEQ ID NO 14304898 as cited in SEQ ID NO 53598
aagaatacctgaaaacactttctattcataaaccctttacgacaaaacaataaagacgtctctcgatttatctttgtcttaatcaggaaactatttgacatttctttatcgattattacttcatattcgggtatggatgaagattttttcttacccgatttctcactagtagacattgatttcgactttaatatttacgaagaaaataatttatcacctgatgaatctttatcaaattcacgaagagctgatcaatcgtcaaagtttgatcatcaaatgcattttgagtgcctcagagagaagccaaaggcagcggtgaagcctatgatgaagatcaacaacaagcaacaactgatttcttttgatttctctagtaatgttatttcttctccagccgcggaggagatcattatggataaattggttggtcgtggaaccaaaagaaaaacatgttctcatggcacaagatctccggttcttgcgaaagaacatgttttagccgagagaaagcgccgtgagaagctttctgaaaaattcattgctctttcagctctccttcccgggcttaagaaggcggacaaggtaacgattcttgatgacgcgatctcgcgtatgaaacaactccaagaacaactaagaacgctcaaggaagaaaaagaagcaacgagacaaatggaatccatgattcttgtaaagaaatctaaagtgtttttcgacgaggaacctaacctatcatgttctccttcagttcatattgaattcgatcaagcattaccagaaatcgaagcgaaaatttctcaaaatgacattctcatccgaatcctttgcgagaaaagcaaagggtgcatgatcaacatactaaacacaattgaaaactttcaattgcgcattgaaaatagcatcgtattgccattcggagactcgactctcgacatcacagtccttgcacagatggataaagatttttcgatgagtatacttaaggatcttgtacggaacctgagactcgcaatggtttaggtcttctttcaagttttagtaacctgagactgtacattgacacaatcgtttcgtggatttgctatcgttttcttcttgagattttttcacacgtgcccacatgtttgatgtgtttttttagcaaagctatttccgataacgaccgttgagaattaatttagatgtaacattttttgtttgttaataatgaatttaaaat

SEQ ID NO: 77140 - protein, 295 aa, Arabidopsis thaliana
  peptide (1)..(295): Ceres Seq. ID no. 12561640
MDEDFFLPDFSLVDIDFDFNIYEENNLSPDESLSNSRRADQSSKFDHQMHFECLREKPKAAVKPMMKINNKQQLISFDFSSNVISSPAAEEIIMDKLVGRGTKRKTCSHGTRSPVLAKEHVLAERKRREKLSEKFIALSALLPGLKKADKVTILDDAISRMKQLQEQLRTLKEEKEATRQMESMILVKKSKVFFDEEPNLSCSPSVHIEFDQALPEIEAKISQNDILIRILCEKSKGCMINILNTIENFQLRIENSIVLPFGDSTLDITVLAQMDKDFSMSILKDLVRNLRLAMV

SEQ ID NO: 77141 - protein, 247 aa, Arabidopsis thaliana
  peptide (1)..(247): Ceres Seq. ID no. 12561641
MHFECLREKPKAAVKPMMKINNKQQLISFDFSSNVISSPAAEEIIMDKLVGRGTKRKTCSHGTRSPVLAKEHVLAERKRREKLSEKFIALSALLPGLKKADKVTILDDAISRMKQLQEQLRTLKEEKEATRQMESMILVKKSKVFFDEEPNLSCSPSVHIEFDQALPEIEAKISQNDILIRILCEKSKGCMINILNTIENFQLRIENSIVLPFGDSTLDITVLAQMDKDFSMSILKDLVRNLRLAMV

SEQ ID NO: 77142 - protein, 231 aa, Arabidopsis thaliana
  peptide (1)..(231): Ceres Seq. ID no. 12561642
MMKINNKQQLISFDFSSNVISSPAAEEIIMDKLVGRGTKRKTCSHGTRSPVLAKEHVLAERKRREKLSEKFIALSALLPGLKKADKVTILDDAISRMKQLQEQLRTLKEEKEATRQMESMILVKKSKVFFDEEPNLSCSPSVHIEFDQALPEIEAKISQNDILIRILCEKSKGCMINILNTIENFQLRIENSIVLPFGDSTLDITVLAQMDKDFSMSILKDLVRNLRLAMV

SEQ ID NO: 77143 - DNA, 1766 bp, Arabidopsis thaliana
  misc_feature (1)..(1766): Ceres Seq. ID no. 12561671
  misc_feature (1)..(1766): Ortholog of  Ceres SEQ ID NO 14312216 as cited in SEQ ID NO 53930
  misc_feature (1)..(1766): Ortholog of  Ceres SEQ ID NO 13656404 as cited in SEQ ID NO 65806
  misc_feature (1)..(1766): Ortholog of  Ceres SEQ ID NO 12779935 as cited in SEQ ID NO 66774
  misc_feature (1)..(1766): Ortholog of  Ceres SEQ ID NO 13598695 as cited in SEQ ID NO 67368
  misc_feature (1)..(1766): Ortholog of  Ceres SEQ ID NO 13591174 as cited in SEQ ID NO 68289
aagagcaagagagtggtttgattcaatttttaaaattctaaataaaactccaaccgtgaatccagccatgaaactctttttagaaaatccttttttataacaaataattcctctgcttcttcttcttcttcgtttatttcaccttttttggtttctttagctcagaaaaagcccattctttttttctattcttgtttattttaatcatactgtgcgtttctacaaagtttgttcctttcttcttcaactctctcactcacagtcacagagatctgtttcttttctttttttgctttcactcttctcttccagtgagagagagtgagagaaaatggtgaagcttttgttagtagggtttgttgtggctggtataatactgggaactcaagcaaatgaatatttagatttcaatgtgacagaaatagatcgcattgaggaattagagtttggattttccaaatatagctccaatttgaaccctttaatggttggtctcacccttatcagaggagctgattctggagctgtttgtttggatggaacattgcctggatatcacttgcaccgtggacatggatctggagctaatagctggctcattcaattggagggaggaggatggtgcaacaacatcaggacctgtgtatacaggaagactactcgacgtggttcctctaattatatggagaaacagcttcagtttacaggaatactgagtgacaaagctcaagaaaatcctgactttttcaactggaatagagttaagcttcgttactgcgatggcgcttctttcagtggagatggccagaatcaggctgcacaacttcagtttagaggagagcgtatctggagagccgcaatagatgatttgaaggcgaatggaatgcgatacgccaatcaggcacttctctccggatgctctgctggtggtttagcagcaatcttgcgctgcgatgagtttaggaacttattccctggatcaaccaaagtcaagtgcttgagtgatgcaggcttgttcttggacactgccgatgtttcaggcggccgcacaatcaggaacttatacaatggtgtcgtagaattgcagagtgtgaagaacaatcttccacgtatatgcacaaaccatcttgatccaacctcgtgtttcttcccacaaaatctgatcagtcaaatgaaaactccactttttatcgtcaacgcagcatatgatacatggcagattcaaagcagtatagctccaacatcagctgatcctagtggattttggcatgactgcagactaaaccatggaaaatgtactcctgcacagttgagattcttgcaaggattcagggaacagatgcttagagtagtcaagggcttctcaatgtctagacagaatggattgttcatcaattcttgctttgctcactgccaaaccgagagacaagatacttggtttgccgatgattctcctgttatcaggaaaaaggcggtggcaatagctgtaggagattggtatttcgatagagcggaagtgaagttagtcgattgcccatacccgtgtgacaagagctgccacaacttggtgttcagatgattgtttgactatgttctttattctctctcatatatacataccttagaaaatttctttctttcaaaaggaaagattttgtatcctttggtagtaaccaatgcctcattggtatatgattaagtgtatcgtggaaaatcataataaaaaaacaaaacaaaacaaagtttgcttaaaaagagttcaatgt

SEQ ID NO: 77144 - protein, 415 aa, Arabidopsis thaliana; identical to SEQ ID NO: 35190
  peptide (1)..(415): Ceres Seq. ID no. 12561672

SEQ ID NO: 77145 - protein, 364 aa, Arabidopsis thaliana; identical to SEQ ID NO: 35191
  peptide (1)..(364): Ceres Seq. ID no. 12561673

SEQ ID NO: 77146 - protein, 298 aa, Arabidopsis thaliana; identical to SEQ ID NO: 35192
  peptide (1)..(298): Ceres Seq. ID no. 12561674

SEQ ID NO: 77147 - DNA, 1246 bp, Arabidopsis thaliana
  misc_feature (1)..(1246): Ceres Seq. ID no. 12561683
  misc_feature (1)..(1246): Ortholog of  Ceres SEQ ID NO 12613953 as cited in SEQ ID NO 68388
aatctctcgctctgttacgccattttcgtgagtaagaagaagaaacccgaaaacctcaaaccatggccgagggactcgtattgaagggcattatgcgcgcccacaccgacattgtcacggccatcgctacgccgatcgacaattccgacatcatcgtcacagcgtcgcgtgacaaatccatcatcctctggaaactcacaaaggacgataagtcttacggtgttgctcagcgtaggctcacaggtcactctcacttcgtggaagatgttgttctctcatcggacggtcagtttgcactctccggaagctgggacggtgagctccgtctctgggatcttgccacgggagaaacaactcgtcgattcgttggtcatacgaaagatgtgctctctgttgcattctctactgataaccggcagatcgtgtctgcttctcgtgatcgtacgattaagctttggaacacacttggtgagtgtaagtataccatctctgaaggtgatggtcacaaggaatgggttagttgtgttaggtttagtcctaatactcttgtaccaactattgtatctgcttcttgggataaaactgtgaaagtttggaatctccagaactgtaagctgaggaactctcttgttggtcactctggttacctcaacactgttgctgtctcgcctgatggttcgctatgcgccagtggtgggaaagatggtgttatcttgttgtgggatttggctgaaggaaagaagctttactcgcttgaggcgggttcgattattcactcgctttgcttcagtcctaacagatactggttgtgtgctgctactgagaatagcattaggatttgggatcttgagagcaagtctgttgttgaggacttgaaggttgatctcaagtctgaggcagagaagaatgaaggtggtgttggaactggtaaccagaagaaggttatctactgcacaagcttgaactggagtgcagatggaagcacattgttcagtggttacactgatggagttgtcagggtctggggtattggtcgttactagagacacaacaagatgaagaagaagtcacgaaatctccggaaaaaagtttagctgcttttaatttttccagactgcgtcagtattgtattagtctctcgcaaacctctattttggcaatttttgtttaatttccagaagagaaaaaaacaatccattgattatcatatcactatatatcaaaaggtcacgattttgattacact

SEQ ID NO: 77148 - protein, 326 aa, Arabidopsis thaliana
  peptide (1)..(326): Ceres Seq. ID no. 12561684
MAEGLVLKGIMRAHTDIVTAIATPIDNSDIIVTASRDKSIILWKLTKDDKSYGVAQRRLTGHSHFVEDVVLSSDGQFALSGSWDGELRLWDLATGETTRRFVGHTKDVLSVAFSTDNRQIVSASRDRTIKLWNTLGECKYTISEGDGHKEWVSCVRFSPNTLVPTIVSASWDKTVKVWNLQNCKLRNSLVGHSGYLNTVAVSPDGSLCASGGKDGVILLWDLAEGKKLYSLEAGSIIHSLCFSPNRYWLCAATENSIRIWDLESKSVVEDLKVDLKSEAEKNEGGVGTGNQKKVIYCTSLNWSADGSTLFSGYTDGVVRVWGIGRY

SEQ ID NO: 77149 - protein, 316 aa, Arabidopsis thaliana
  peptide (1)..(316): Ceres Seq. ID no. 12561685
MRAHTDIVTAIATPIDNSDIIVTASRDKSIILWKLTKDDKSYGVAQRRLTGHSHFVEDVVLSSDGQFALSGSWDGELRLWDLATGETTRRFVGHTKDVLSVAFSTDNRQIVSASRDRTIKLWNTLGECKYTISEGDGHKEWVSCVRFSPNTLVPTIVSASWDKTVKVWNLQNCKLRNSLVGHSGYLNTVAVSPDGSLCASGGKDGVILLWDLAEGKKLYSLEAGSIIHSLCFSPNRYWLCAATENSIRIWDLESKSVVEDLKVDLKSEAEKNEGGVGTGNQKKVIYCTSLNWSADGSTLFSGYTDGVVRVWGIGRY

SEQ ID NO: 77150 - DNA, 741 bp, Arabidopsis thaliana
  misc_feature (1)..(741): Ceres Seq. ID no. 12561686
  misc_feature (1)..(741): Ortholog of  Ceres SEQ ID NO 13599321 as cited in SEQ ID NO 0
aattcaatctcttccaatttctcttcttcttcttcttcttcctcgcgacgcgttaatggcggcttcgttctcactcacgagcttcatctccttcatctcaccattcaaatctcaaactaaacctacaccaccaccaaatctcactcttccttctccaacaatctcccaaaggcgaagaaatgatctcgctatcgaatcaatggcggtcgaagaaacttcctcaaccgcttcttcactttcctctgagcttgcttccgtgatttgtccctcgcttgcttactccaacacactcttcttcagttctggatacaatgtgcaagtgtttgttgaagataatgagtcagaggagaggcttgtgaatcgatttaggagagaagtgatgagaactggtgttatacaggaatgtaagaggagaagatactttgagaataaacaagatgagaagaaacgtaggactcgtgatgctgctaagcgtaataagaaaaggcgtcctcaagcaaggtttactcaagaaacaagagaagaagcagcagcagcaactaagagtaagaaaaaagatgaggaagaagacaactgggagatgcctggtggagatgtaccttcttgaaacacgattttagtatataaaatctccggtcttttgattaaatttcgtattatcccgtttttattacttggtacattgtgagttggaaatgtgtttactgcatattataacttgcttctagtattgagttctct

SEQ ID NO: 77151 - protein, 201 aa, Arabidopsis thaliana
  peptide (1)..(201): Ceres Seq. ID no. 12561687
IQSLPISLLLLLLPRDALMAASFSLTSFISFISPFKSQTKPTPPPNLTLPSPTISQRRRNDLAIESMAVEETSSTASSLSSELASVICPSLAYSNTLFFSSGYNVQVFVEDNESEERLVNRFRREVMRTGVIQECKRRRYFENKQDEKKRRTRDAAKRNKKRRPQARFTQETREEAAAATKSKKKDEEEDNWEMPGGDVPS

SEQ ID NO: 77152 - protein, 183 aa, Arabidopsis thaliana
  peptide (1)..(183): Ceres Seq. ID no. 12561688
MAASFSLTSFISFISPFKSQTKPTPPPNLTLPSPTISQRRRNDLAIESMAVEETSSTASSLSSELASVICPSLAYSNTLFFSSGYNVQVFVEDNESEERLVNRFRREVMRTGVIQECKRRRYFENKQDEKKRRTRDAAKRNKKRRPQARFTQETREEAAAATKSKKKDEEEDNWEMPGGDVPS

SEQ ID NO: 77153 - protein, 135 aa, Arabidopsis thaliana
  peptide (1)..(135): Ceres Seq. ID no. 12561689
MAVEETSSTASSLSSELASVICPSLAYSNTLFFSSGYNVQVFVEDNESEERLVNRFRREVMRTGVIQECKRRRYFENKQDEKKRRTRDAAKRNKKRRPQARFTQETREEAAAATKSKKKDEEEDNWEMPGGDVPS

SEQ ID NO: 77154 - DNA, 1183 bp, Arabidopsis thaliana
  misc_feature (1)..(1183): Ceres Seq. ID no. 12561711
  misc_feature (1)..(1183): Ortholog of  Ceres SEQ ID NO 12608620 as cited in SEQ ID NO 60192
  misc_feature (1)..(1183): Ortholog of  Ceres SEQ ID NO 13662898 as cited in SEQ ID NO 66199
  misc_feature (1)..(1183): Ortholog of  Ceres SEQ ID NO 14313358 as cited in SEQ ID NO 67347
  misc_feature (1)..(1183): Ortholog of  Ceres SEQ ID NO 13654314 as cited in SEQ ID NO 67914
tcgtgccattagcttttacattaagagaaaacacttgcaaaactaagtgctatctctcttcttcttccttctcctaacaacttatataccatgagtctcttcaacactgaaaacacatgggcctttgtctttggcttgctcggcaaccttatctcctttgccgtgttcctatctcctgtgccaacgttctataggatttggaagaagaagacaacagaagggtttcagtctattccttatgttgtggcgctcttcagtgcgacgctttggctttactatgcgacacagaagaaagatgtcttcctcctcgtaaccattaacgcctttggttgcttcatcgaaaccatctacatctctatgttccttgcctacgctcccaagccagctcggatgttgacagtgaagatgctacttcttatgaactttggaggattctgtgcgattctccttctttgccaattcttggtaaaaggagccacacgtgctaagattatcggaggaatctgtgtcggattctctgtttgtgttttcgctgctcctctaagcataatcaggacggtaataaagacaagaagtgtggagtacatgccctttagcttatccttaacccttaccatcagtgctgtcatatggctcctttatggtcttgctctcaaggacatctatgttgctttcccgaatgtgcttggttttgctctcggtgcactccaaatgatactctacgttgtctacaaatactgtaaaacgtcgccgcatctaggagagaaagaagtcgaagctgctaagttaccggaggtgagcctcgatatgttgaagctaggcacagtttcatcccctgagccaatctcagtggttcgtcaagcgaacaagtgtacctgcggaaatgatcgaagggctgagattgaagatggacaaacccctaaacatggcaagcagtcctcttccgcagcagctacatgaataaaaatacgttaatgttgactttaccccaacttgatataccaaccaccacgtgtaccccgttacgctgtcgtatttttctgagtttatcaagtgtgcgaagtagaggattaattttccggagttagtttctctacttctttataaaaatttgtgtaattatctattggggataatgtatatttcctattttctgatttaacgaaaactatttaaaatatcc

SEQ ID NO: 77155 - protein, 289 aa, Arabidopsis thaliana; identical to SEQ ID NO: 41925
  peptide (1)..(289): Ceres Seq. ID no. 12561712

SEQ ID NO: 77156 - protein, 200 aa, Arabidopsis thaliana; identical to SEQ ID NO: 41926
  peptide (1)..(200): Ceres Seq. ID no. 12561713

SEQ ID NO: 77157 - protein, 189 aa, Arabidopsis thaliana; identical to SEQ ID NO: 41927
  peptide (1)..(189): Ceres Seq. ID no. 12561714

SEQ ID NO: 77158 - DNA, 895 bp, Arabidopsis thaliana
  misc_feature (1)..(895): Ceres Seq. ID no. 12561719
  misc_feature (1)..(895): Ortholog of  Ceres SEQ ID NO 12611101 as cited in SEQ ID NO 55920
aaagcaattgtcagatttcagcatctcccatggaggaatcaagattcgattctgaagatgttgattatgctgagattgttgttgttcgtcatggtgaaacatcttggaatgccgagagaaaaatccagggtcatttggatgttgagttaaatgatgcaggaagacaacaagcacaaagagttgcagagcggttatcgaaggagcagaagatatctcatgtatactcttctgacttgaagagagcctttgagactgctcagatcattgctgctaaatgcggcaagcttgaggtgcttaccgatcgtgatttgcgggaaagacatttaggagatatgcaagggcttgtgtatcaagaagcttcgaaaattcgcccggaagcttacaaggctttttcatctaaccgcacagacgttgatattccaggtggaggagaaagtcttgacaaactttacgatagatgtacaactgcattacagagaatcggcgacaaacataaaggtgaaaggatagtagtagtgactcatggaggtgtgatccgatctctctacgaaagagctcgtccaagtgcaagaaaagttgaaaagatactcaatacatcggtcaatgtgttccgtttattcgacggagacaaatggaccatccaagtttggggtgatgtgagtcatctggaggaaaccggcttcttacaatcaggttttggtggtgatagaacctctggttagagagattctatactcttagtcttcttccccttggaagagcatttatgtaatttaagtttcactccataacttttcaatttttaacatttgaccccattactttgataaagtgatttgggaggattgataaagtaaattgctataaatttctacagtcaaatgttatatggttc

SEQ ID NO: 77159 - protein, 239 aa, Arabidopsis thaliana
  peptide (1)..(239): Ceres Seq. ID no. 12561720
SNCQISASPMEESRFDSEDVDYAEIVVVRHGETSWNAERKIQGHLDVELNDAGRQQAQRVAERLSKEQKISHVYSSDLKRAFETAQIIAAKCGKLEVLTDRDLRERHLGDMQGLVYQEASKIRPEAYKAFSSNRTDVDIPGGGESLDKLYDRCTTALQRIGDKHKGERIVVVTHGGVIRSLYERARPSARKVEKILNTSVNVFRLFDGDKWTIQVWGDVSHLEETGFLQSGFGGDRTSG

SEQ ID NO: 77160 - protein, 230 aa, Arabidopsis thaliana
  peptide (1)..(230): Ceres Seq. ID no. 12561721
MEESRFDSEDVDYAEIVVVRHGETSWNAERKIQGHLDVELNDAGRQQAQRVAERLSKEQKISHVYSSDLKRAFETAQIIAAKCGKLEVLTDRDLRERHLGDMQGLVYQEASKIRPEAYKAFSSNRTDVDIPGGGESLDKLYDRCTTALQRIGDKHKGERIVVVTHGGVIRSLYERARPSARKVEKILNTSVNVFRLFDGDKWTIQVWGDVSHLEETGFLQSGFGGDRTSG

SEQ ID NO: 77161 - protein, 129 aa, Arabidopsis thaliana
  peptide (1)..(129): Ceres Seq. ID no. 12561722
MQGLVYQEASKIRPEAYKAFSSNRTDVDIPGGGESLDKLYDRCTTALQRIGDKHKGERIVVVTHGGVIRSLYERARPSARKVEKILNTSVNVFRLFDGDKWTIQVWGDVSHLEETGFLQSGFGGDRTSG

SEQ ID NO: 77162 - DNA, 887 bp, Arabidopsis thaliana
  misc_feature (1)..(887): Ceres Seq. ID no. 12561723
  misc_feature (1)..(887): Ortholog of  Ceres SEQ ID NO 12610385 as cited in SEQ ID NO 55938
  misc_feature (1)..(887): Ortholog of  Ceres SEQ ID NO 13661939 as cited in SEQ ID NO 61170
  misc_feature (1)..(887): Ortholog of  Ceres SEQ ID NO 15178805 as cited in SEQ ID NO 0
atcgatcactgaatcttcttcttcttcttcttccttctctcaagaacagattttttttaaacgagcttgatcaataaattctctcaagatctatggcggaagagcatcgatgtcagacaccagaaagcaaccgtctctgtgttaacaactgtggcttcctcggcagctccgccaccatgaatctctgttctaattgttacggcgatctttgtctcaaacaacaacaacaatcctcctccatcaaatccaccgttgaatcttccctctctgtatctcctccgtcgtcatcatcatcggagatctcttctccgatcatccctcctctccttaaaaatccatcagtcaagctagaggtaccggagaaaaaggcggtgatttcgctgccgacgacggagcagaatcagcaacagaggccgaatcggtgcacgacgtgtaggaaacgggtcgggttaaccggattcaagtgccggtgcggtacgatgttttgcggggttcataggtacccggagatccatggatgcagctacgatttcaaatcggccggacgtgaagagatcgcgaaagcgaatccgttggtgaaagcagcgaagcttcagaagatatgatcagagccgttcgatgcgttgacttttcctctcgtaagtcttcatttctacgcgtatgtgtgtcctccgtcccccgagaaatacggatggtgtcgatttgattgatctcagccgttggatcaaaaatggtttattattgtaaaagattgattatgtatttatcaaagggacacgtgtcacgtggttttaggatggagacgctttcgctttttctccttcattttattttctttttcctttcagaaagaaataagattattcgcgttggctttttctttttat

SEQ ID NO: 77163 - protein, 170 aa, Arabidopsis thaliana; identical to SEQ ID NO: 48223
  peptide (1)..(170): Ceres Seq. ID no. 12561724

SEQ ID NO: 77164 - protein, 142 aa, Arabidopsis thaliana; identical to SEQ ID NO: 29088
  peptide (1)..(142): Ceres Seq. ID no. 12561725

SEQ ID NO: 77165 - DNA, 1421 bp, Arabidopsis thaliana
  misc_feature (1)..(1421): Ceres Seq. ID no. 12561726
  misc_feature (1)..(1421): Ortholog of  Ceres SEQ ID NO 15176895 as cited in SEQ ID NO 54714
aaaaagctaagtaaactactcaagtccctcccttttccggcgtcgctattctcagtctcattctgtctcccccatggaagctcggattttgcagtcttcttcttcctgttattcgtctctttacgctgtcaatcgatcccggttctcttctgtgtcatctccgaaacctttctccgtcagctttgctcagacgacgagaacaaggactcgtgtattatccatgtcgaagaaagatggtcgcactgataaagatgatgacactgatagtctcaattacaaagattctggtgttgatatcgatgctggtgctgagcttgttaaacgaatcgcaaagatggctcctggaattggtggatttggtggtctctttccattaggtgatagttatcttgtagctggtacggatggtgtagggactaaattgaaattggcatttgaaactggaattcatgacaccattggaatcgacttggttgctatgagtgtgaatgatattattacttctggtgcaaagcctctgtttttccttgattactttgctactagtcgtcttgatgtagaccttgctgaaaaggtcattaaagggattgttgaaggttgtcggcaatcggaatgtgctctcttagggggagagactgcagagatgcctgacttttatgcagagggcgagtacgatctaagtgggtttgcagtaggcatagtaaagaaaacttcagttatcaacggaaaaaacattgtggccggtgatgttcttattggcctcccgtctagtggtgttcattccaatggtttttctctagtaagaagggtattggctcgaagcaatctttcgctgaaggatgcgcttccaggtggatcaagtacccttggtgatgctctaatggcacccactgtcatttacgtgaaacaggtacttgatatgatagaaaaaggaggagtgaaaggtttagctcatatcacaggcggaggtttcacagacaacattccccgagtcttcccggacggtttgggtgctgttattcacaccgatgcttgggaacttccaccgttgttcaagtggattcaacagactgggagaatagaagacagtgagatgagaaggacgtttaacctggggatagggatggttatggtggttagtccagaggcagcttcacgaatactagaagaagtcaagaatggagactatgttgcgtatcgcgtaggagaggttgtcaacggtgaaggcgtaagctatcagtagagtgttgtgtgttcttttttcttctgtgtttttttaagttttcgtttcccaccgtttttaagaattaatccatttgtctacggttttatgaggttacaatcgagatgaggcattttttaagacgtcgtgttattatttgatctaattttttaaaaacaaccaatgtgattggtctggt

SEQ ID NO: 77166 - protein, 389 aa, Arabidopsis thaliana; identical to SEQ ID NO: 50839
  peptide (1)..(389): Ceres Seq. ID no. 12561727

SEQ ID NO: 77167 - protein, 340 aa, Arabidopsis thaliana; identical to SEQ ID NO: 50840
  peptide (1)..(340): Ceres Seq. ID no. 12561728

SEQ ID NO: 77168 - protein, 302 aa, Arabidopsis thaliana; identical to SEQ ID NO: 50841
  peptide (1)..(302): Ceres Seq. ID no. 12561729

SEQ ID NO: 77169 - DNA, 1506 bp, Arabidopsis thaliana
  misc_feature (1)..(1506): Ceres Seq. ID no. 12561738
  misc_feature (1)..(1506): Ortholog of  Ceres SEQ ID NO 14308095 as cited in SEQ ID NO 55286
atatcgtcccaaaaaaagcaaaagtccaaaaaaaaacaactccaaaacattctctcttagctctttactctttagtttctctctctctctctgcctttctctttgttgaagttcatggatgctacgaagtggactcagggttttcaagaaatgataaacgtaaagccaatggagcaaatgatttctagcaccaacaacaacacaccgcaacaacaaccaacattcatcgccaccaacacaaggccaaacgccaccgcatccaatggtggctccggaggaaataccaacaacacggctacgatggaaactagaaaggcgaggccacaagagaaagtaaattgtccaagatgcaactcaacaaacacaaagttctgttattacaacaactacagtctcacgcaaccaagatacttctgcaaaggttgtcgaaggtattggaccgaaggtggctctcttcgtaacgtcccagtcggaggtagctcaagaaagaacaagagatcctctacacctttagcttcaccttctaatcccaaacttccagatctaaacccaccgattcttttctcaagccaaatccctaataagtcaaataaagatctcaacttgctatctttcccggtcatgcaagatcatcatcatcatgctcttgagcttctaagatccaatggagtctcttcaagaggcatgaacacgttcttgcctggtcaaatgatggattcaaactcagtcctgtactcatctttagggtttccaacaatgcctgattacaaacagagtaataacaacctttcattctccattgatcatcatcaagggattggacataacaccatcaacagtaaccaaagagctcaagataacaatgatgacatgaatggagcaagtagggttttgttccctttttcagacatgaaagagctttcaagcacaacccaagagaagagtcatggtaataatacatattggaatgggatgttcagtaatacaggaggatcttcatggtgaaaaaaggttaaaaagagctcatgaactatcagctttcttctctttttctgtttttttctcctattttattatagtttttactttgatgatcttttgttttttctcacatggggaactttacttaaagttgtcagaacttagtttacagattgtctttttattccttctttctggttttccttttttcctttttttatcagtctttttaaaatatgtatttcataattgggtttgatcattcatatttattagtatcaaaatagagtctatgttcatgagggagtgttaaggggtgtgagggtagaagaataagtgaatacgagggcttcgtgtgtaatcagtgagatctgtattcatcgtttcttctatttgtagaagtatttctgtaatttattcatatttttcaacaaaaaaaaaaaatcatctttatatccaatcattatccgattgaaattaaaattgtgttaaccctaagcttgaatagattgttttaatttgttg

SEQ ID NO: 77170 - protein, 296 aa, Arabidopsis thaliana; identical to SEQ ID NO: 42123
  peptide (1)..(296): Ceres Seq. ID no. 12561739

SEQ ID NO: 77171 - protein, 284 aa, Arabidopsis thaliana; identical to SEQ ID NO: 42124
  peptide (1)..(284): Ceres Seq. ID no. 12561740

SEQ ID NO: 77172 - protein, 278 aa, Arabidopsis thaliana
  peptide (1)..(278): Ceres Seq. ID no. 12561741
MEQMISSTNNNTPQQQPTFIATNTRPNATASNGGSGGNTNNTATMETRKARPQEKVNCPRCNSTNTKFCYYNNYSLTQPRYFCKGCRRYWTEGGSLRNVPVGGSSRKNKRSSTPLASPSNPKLPDLNPPILFSSQIPNKSNKDLNLLSFPVMQDHHHHALELLRSNGVSSRGMNTFLPGQMMDSNSVLYSSLGFPTMPDYKQSNNNLSFSIDHHQGIGHNTINSNQRAQDNNDDMNGASRVLFPFSDMKELSSTTQEKSHGNNTYWNGMFSNTGGSSW

SEQ ID NO: 77173 - DNA, 1381 bp, Arabidopsis thaliana
  misc_feature (1)..(1381): Ceres Seq. ID no. 12561746
  misc_feature (1)..(1381): Ortholog of  Ceres SEQ ID NO 13661015 as cited in SEQ ID NO 60921
  misc_feature (1)..(1381): Ortholog of  Ceres SEQ ID NO 15173676 as cited in SEQ ID NO 61789
  misc_feature (1)..(1381): Ortholog of  Ceres SEQ ID NO 13596304 as cited in SEQ ID NO 69269
agagctagcttctgatacatttcgactttggcgtttctcgatctgttgtttctgctcccaaataaaaataaaaaaaaatcggatcggggatttccccaaatcgtaaaattaggttttgttcttcatttctagccctagcttagttttatcgttatcttattcattaaggtttgattctacctttgtttcgcttccctcctcgaattttgcaattccgttattaaaggatcctagtttttctggctcttgtactacgtcaagtttcatggattctcgagtttcgattctcttcgtctgtgcaatagccgtgtcatgctttacgtctgggtctgcttcatcaccagtggacttttccgtttgcaattacgaattcgagctgtttcgattcgatttagaggccaaatgtcctccttctctgtatccaactcctcctattgaggtagatggagactcactagacaggctaatggcttcacaacatggaaatgcttatatgtctgtactcttttatgcttcctggtgcccattctcacgtgctgtgcgccctaagtttgatatgttgagttccatgtttcctcaaatacaacacctagctgtggagcattctcaagcactgccatctgtcttttctaggtatggtatccatagcttaccttcaatcctgatggtaaatcaaactttaaatgctcggtaccatggtcgaaaggatcttatatccctgattgagttttatgaagaggcaacaggcctccaacctgtccagtatgtggctgaaggggaaccaacaggcttaaatgccggtgatggtaacttgatcacatggttgcgcaaggggacatctattagagaaatattcaaacaagatccgttcttggtactatctctgctgtttatctgtttacaaatggcaatccttgtcttccccatagctgaatcccgcatgagagcgttatgggcttcttacgttgccaatttgaacttgggaagatttggagagataagccaactgttcaaccgtggtattcacatggtcgatgtgaggaggttatggttgaaactaagtctcgtcaaaacaagaaacttccatgaaagggcaaagaacgcacaagcttgggcttcatcgctggcatctgtctctctaggccaaacttcatcagaccaatcctgatctcaagggtaagatcatgtcagtattgggaagagatgagcttttaagtgtgtgctggaaatctgagagttcctttaatgaatgttatatgacttatttgagtttgatttgtctgcaacgaagcatgtaaatccaggaacagctttgcttctgtttgtgaatatctttctcccttttttgttctataaatttgagatgtctgtttttggcctc

SEQ ID NO: 77174 - protein, 300 aa, Arabidopsis thaliana
  peptide (1)..(300): Ceres Seq. ID no. 12561747
MDSRVSILFVCAIAVSCFTSGSASSPVDFSVCNYEFELFRFDLEAKCPPSLYPTPPIEVDGDSLDRLMASQHGNAYMSVLFYASWCPFSRAVRPKFDMLSSMFPQIQHLAVEHSQALPSVFSRYGIHSLPSILMVNQTLNARYHGRKDLISLIEFYEEATGLQPVQYVAEGEPTGLNAGDGNLITWLRKGTSIREIFKQDPFLVLSLLFICLQMAILVFPIAESRMRALWASYVANLNLGRFGEISQLFNRGIHMVDVRRLWLKLSLVKTRNFHERAKNAQAWASSLASVSLGQTSSDQS

SEQ ID NO: 77175 - protein, 233 aa, Arabidopsis thaliana
  peptide (1)..(233): Ceres Seq. ID no. 12561748
MASQHGNAYMSVLFYASWCPFSRAVRPKFDMLSSMFPQIQHLAVEHSQALPSVFSRYGIHSLPSILMVNQTLNARYHGRKDLISLIEFYEEATGLQPVQYVAEGEPTGLNAGDGNLITWLRKGTSIREIFKQDPFLVLSLLFICLQMAILVFPIAESRMRALWASYVANLNLGRFGEISQLFNRGIHMVDVRRLWLKLSLVKTRNFHERAKNAQAWASSLASVSLGQTSSDQS

SEQ ID NO: 77176 - protein, 224 aa, Arabidopsis thaliana
  peptide (1)..(224): Ceres Seq. ID no. 12561749
MSVLFYASWCPFSRAVRPKFDMLSSMFPQIQHLAVEHSQALPSVFSRYGIHSLPSILMVNQTLNARYHGRKDLISLIEFYEEATGLQPVQYVAEGEPTGLNAGDGNLITWLRKGTSIREIFKQDPFLVLSLLFICLQMAILVFPIAESRMRALWASYVANLNLGRFGEISQLFNRGIHMVDVRRLWLKLSLVKTRNFHERAKNAQAWASSLASVSLGQTSSDQS

SEQ ID NO: 77177 - DNA, 2388 bp, Arabidopsis thaliana
  misc_feature (1)..(2388): Ceres Seq. ID no. 12561754
  misc_feature (1)..(2388): Ortholog of  Ceres SEQ ID NO 13598023 as cited in SEQ ID NO 66487
ttttttgttttgtttttcttaattacttttgggtatcccaggttcagaacaggtttgggttgtagtaaaattgggttcctcttgctatagtggaaatggcggctttattagcttctcagagctgctgctatggcggtgagaccgcaagagtcaccaaagctattggtttcagtagctctttggagaatcatttcactggggaagccactcagtgttatggcagcaagtctaagagatttcgtattgagatgagacagtcggaattgccctctaaggttggaatcaatggacgttcagtcaaaatggttcctgcgagtgaggtggtgaagaggaaagatggtgtgaatggatcggctgggaaaggtgttaatggagcgagtttggttagtagtagaaacattaatggtgcggcgtcaactttggttaaggcaccaaagaaaacaacagaatcgtaccttcctccaccggttgaaggagttagggttcttccttctgatgaaggttttagctgggctgatgagaattatagctcacttcaacgcagtattgatgtttggtcatttgttatttccctgaggattcgtatcttgttcgataattcgaaatgggcttatgttggaggattcacagaagaaaaacagaaaagcagaagaagagaaacagcttcatggttgagagagagtgtattgcagcttggtccaacgtttatcaaactgggacagttgtcttcaactaggtcagacttgtttccgcgcgaattcgtggatgagctttccaagttgcaggacagagtccccgctttttctccagagaaagcaaagcgcttcattgaggctgaacttggggctcctattagtgtaatgtataaagaatttgaagagcaacccatagctgcagctagccttggtcaggtacacagagctgttttgcacaatggcgagaaagtggtagtaaaagtacaaagacccggactaaagaaacttttcgatattgatctacgaaatctgaagctgattgccgagtatttccagaaaagtgaatcatttggtacaaacgattgggttggtatctatgaagaatgtgccttaattttgtatcaagagattgactacataaacgaagctaagaacgctgacagattccggagagacttccggaatataaactgggtccgcgtacctttggtttattgggattactctgccatgaaggtcttgactttggagtatgtaccaggtgttaagatcaacaacttggacgccttagctgcacggggttttaaccgttctagaatcgcatcacgggccattgaagcttatcttatacagatactcaaaaccggcttctttcatgcggatccgcacccaggaaaccttgcaattgatgtagatgaatcaatcatctactatgacttcggcatgatgggagagatcaaaacatttactcggaagagattacttgatctcttctattctgtttatgaaaaagatgcaaaaaaggtcatgcaaaaccttatagaccttgaagcacttcaacccactggagatctttcatcggtaaggagatctgttcagtttttcttggacaacctattaagccaatcaccagatcagcaacagactttggcagctattggagaggatctgtttgcaatttcccaggatcagccattccgtttcccatcaactttcacctttgtcatccgagcattttccacacttgagggtattggttacatccttgatccagaattttcctttgtgaaggttgcggctccttatgcgcaggaactcctggatctaaaacaaaggcaacgctcgggaactcagcttgtccaagaaataagaaagcaggctgatgatgccaggtcttctactctgtctatgccatatcgagtgcagcgaatagaagagtttgtgaaagaactcgattcaggcgatctgaaactccgtgttcgggttcttgagtcggaaagagcagcccggaaagcgacaatactgcagatggcgacgatgtatacagttcttggaggaactctacttaatattggggttacatttagcaaccaaggaagtcagcttgttgccaatggatccttcattggagcagggatattcatgttattggtactgaggtctatgcaaagggtaaataagcttgataaatttgagaagatgatatgatgatgactggtggtctggtggatagtttattcttttaaagctccaaatatcagatatagaatttgtgatgtataggtatagcatgtatctttagctcccatacacaatatttataaattgtataaaaactgtttctaaggaaaggaaagtcaaagatataatatgagactgagtttcactataaagtacacaacttttattctcc

SEQ ID NO: 77178 - protein, 695 aa, Arabidopsis thaliana
  peptide (1)..(695): Ceres Seq. ID no. 12561755
MAALLASQSCCYGGETARVTKAIGFSSSLENHFTGEATQCYGSKSKRFRIEMRQSELPSKVGINGRSVKMVPASEVVKRKDGVNGSAGKGVNGASLVSSRNINGAASTLVKAPKKTTESYLPPPVEGVRVLPSDEGFSWADENYSSLQRSIDVWSFVISLRIRILFDNSKWAYVGGFTEEKQKSRRRETASWLRESVLQLGPTFIKLGQLSSTRSDLFPREFVDELSKLQDRVPAFSPEKAKRFIEAELGAPISVMYKEFEEQPIAAASLGQVHRAVLHNGEKVVVKVQRPGLKKLFDIDLRNLKLIAEYFQKSESFGTNDWVGIYEECALILYQEIDYINEAKNADRFRRDFRNINWVRVPLVYWDYSAMKVLTLEYVPGVKINNLDALAARGFNRSRIASRAIEAYLIQILKTGFFHADPHPGNLAIDVDESIIYYDFGMMGEIKTFTRKRLLDLFYSVYEKDAKKVMQNLIDLEALQPTGDLSSVRRSVQFFLDNLLSQSPDQQQTLAAIGEDLFAISQDQPFRFPSTFTFVIRAFSTLEGIGYILDPEFSFVKVAAPYAQELLDLKQRQRSGTQLVQEIRKQADDARSSTLSMPYRVQRIEEFVKELDSGDLKLRVRVLESERAARKATILQMATMYTVLGGTLLNIGVTFSNQGSQLVANGSFIGAGIFMLLVLRSMQRVNKLDKFEKMI

SEQ ID NO: 77179 - protein, 644 aa, Arabidopsis thaliana; identical to SEQ ID NO: 38197
  peptide (1)..(644): Ceres Seq. ID no. 12561756

SEQ ID NO: 77180 - protein, 626 aa, Arabidopsis thaliana; identical to SEQ ID NO: 38198
  peptide (1)..(626): Ceres Seq. ID no. 12561757

SEQ ID NO: 77181 - DNA, 3341 bp, Arabidopsis thaliana
  misc_feature (1)..(3341): Ceres Seq. ID no. 12561762
  misc_feature (1)..(3341): Ortholog of  Ceres SEQ ID NO 13659131 as cited in SEQ ID NO 66756
tttttttttttaattggcttggggttagagtctgaagagagagtaagaaatctgatggggaagagaaaagagcgtcgttacgccgccatgaatagcaccggccgtcgtgtcaagcttgatctctttgcggaaccctctggagatttgggtggctcagatgtgcgtgatggagttgagcgggaacaaacagagcttaatgagctacccaattcaccttcttcttcaggtgggttccatcagctatcttcaaaatccgctatgtagccaagcccatagttatttgtcaccaaaatttcttctcagagtattagagtgattgtggtcttaaggacgtcgtatgacatcagttcaggccaagacacagtgatattttgaatgagttggtctattttgcagcttcaagctttctggggactttcttctggatgtagctcctagcggttcgtatgtctctggctgttttggcttgctacgcttaactgacggctttgtcatttatttgtgacaggtcgctgataaatcttccccgacgttattctctatcctttttttttttactttacaatgcaatataaagtatcacattcctatacttttagcaggtcatataactgaagtctatgtatgtacttggtacggctcccaaattttgacgctttatttatttgcttttttcaggtcagaaaacagaaaatcctttgcttttacttgggcagtatagtgatgatgaggtggaagaagattcggataagaaggcagatgatacctctgcagatagtttcttagccaataaaaatgagcaggttgatggattaattcaaggaggacacaaagatacgaatatcaaatcaggtgcagtcaccaccactatgcagatggctgatcaacagcagacaggggagaattcttctgctcttgattctagagctgaagtagaaactggttataccacagtgagtaactcaacaacattggatggactaaacaagcagacagttccctcagttcaagcatctggcagtgtgtctttggagcaccaggctcccacagatgttacgtcgcagtggaagatgattctgcatgaggagagcaatcagtattattactggaatacagaaactggagaaacttcgtgggaattgcctacagttttgactcaaactacctttgcatatgggactgggtacaatgagtctgggcccatggttacagatgcttccaccttgatttcaagtgttgaaccaagctatttcgtacccgtgcaaaatagtttcacaggaactgactattctacttttccaactgttgagctggatgggagaaacaaaagtgaagatctatatgtcaaaagtttaggaactgatggtcatcaagttgaatgtcggatagactctgttgttagttgtcaggaggacctttcaaggccaggaaattcagatcatgtgcatacttattttgatgcaggagctgctactgacctcccatctcgcttgttgagtcaaatcgaaagcttactggagaagctgaggtctctgaagaggtcgcatgggaactttcacagcaatgagcagataacaaagtacattctggaggttgaagtcagacattctgatgtaaaggcgctcatattggacacctcacctttactttctttttggcttcacactgagaaacaacttaagcggctggaagatagtgttaacgatgagatttaccagcttgcaaaatctgcagtaatggatgaaccagaaactaacaaaagccctcccaaagaaaagttggtggcagatgctaatacagagagtgagtccgaggacagtgagagagatggagagttagctcaatctggaaaatctcttcattcagatgaatcagctgatgggagcggcgatggatctcctaaacactccccaaatcatccagctgggcagtctgatattattccttcaactgagatgcttcagaaggccggctccccagatgtggaagatgttgacatggatgtggatatggaagttgaagaatcagttccagtgtcttctgttcaagtgatagacgcttctgatggtaagatgttcagtcaaacagagccatccaaccttcatacagatgttccaccacctccgggtgaggaatggattccaccaccgccgtctgagagtgaagatgttcctccaccgccaccagacagttatagcgaaccaattcctccaccacctgacaatggccatgtcgcttcatctttgtccagtgactctctcggagttccctataccgtacctcaatcatatatgcatcaatctgctgattatgcgacacaatacaacttatcctatccagagtccaattatcaatataccaatgctgttactctagctcctaatactcagttctatggccatgtggatggatctcaagtttctcttccccaatccacattttattatgaaactgttcctggtacaactgaagttgttcctgcagcagccagtgctggtgaagcttattacgatttcaatggtgcagctccactgtttcctgtcattagctcgggtgagtcatctctacatcacagtggagttggttctgctaatcaccacatcccaaacaactcttctacagctgcagtgcctagttcgagatccaatgactctactgaggttggatcttcagcaactgcttctaaatccacagatgttacaagtggatcgtctctattagcaaaaggtcaaactaaagtgaaacggacaaaaaagaaaacagtagctgctacatctacattgaggtcaaataaaaaggtttccagtttggttgacaagtggaaagctgcgaaagaggagctaaacgatagcgaagaagaagaagatgattccgaaatcctagatagaaaaagaaaacgagaaatcgaagaatggaaatctcgacaaatcgcaagtggagaggctaaagacaacgcaaatttccaacccctgggtggtgactggcgtgagaaagtgaaacggaagagagaacgagctgagaagtctcagaagaaagaccccgaaaagcagcaaaaacctgatctaacaaaactctcagcaaatctcccgtcggaatggcaggcatattgggacgaatctaccaaaaaagtttactatgggaatacgagtacatctcaaaccagttggacacgacccactacctgaacctcaattgctttctcgtctcacattttttacaatttcttctgtgatacatttgttttagattctctaatcttacctttatgtaaatttattacagagctagtgttggtgacatatagacaaagctaaatcaagaaaatatcattttaccatttc

SEQ ID NO: 77182 - protein, 771 aa, Arabidopsis thaliana; identical to SEQ ID NO: 75208
  peptide (1)..(771): Ceres Seq. ID no. 12561763

SEQ ID NO: 77183 - protein, 769 aa, Arabidopsis thaliana
  peptide (1)..(769): Ceres Seq. ID no. 12561764
MADQQQTGENSSALDSRAEVETGYTTVSNSTTLDGLNKQTVPSVQASGSVSLEHQAPTDVTSQWKMILHEESNQYYYWNTETGETSWELPTVLTQTTFAYGTGYNESGPMVTDASTLISSVEPSYFVPVQNSFTGTDYSTFPTVELDGRNKSEDLYVKSLGTDGHQVECRIDSVVSCQEDLSRPGNSDHVHTYFDAGAATDLPSRLLSQIESLLEKLRSLKRSHGNFHSNEQITKYILEVEVRHSDVKALILDTSPLLSFWLHTEKQLKRLEDSVNDEIYQLAKSAVMDEPETNKSPPKEKLVADANTESESEDSERDGELAQSGKSLHSDESADGSGDGSPKHSPNHPAGQSDIIPSTEMLQKAGSPDVEDVDMDVDMEVEESVPVSSVQVIDASDGKMFSQTEPSNLHTDVPPPPGEEWIPPPPSESEDVPPPPPDSYSEPIPPPPDNGHVASSLSSDSLGVPYTVPQSYMHQSADYATQYNLSYPESNYQYTNAVTLAPNTQFYGHVDGSQVSLPQSTFYYETVPGTTEVVPAAASAGEAYYDFNGAAPLFPVISSGESSLHHSGVGSANHHIPNNSSTAAVPSSRSNDSTEVGSSATASKSTDVTSGSSLLAKGQTKVKRTKKKTVAATSTLRSNKKVSSLVDKWKAAKEELNDSEEEEDDSEILDRKRKREIEEWKSRQIASGEAKDNANFQPLGGDWREKVKRKRERAEKSQKKDPEKQQKPDLTKLSANLPSEWQAYWDESTKKVYYGNTSTSQTSWTRPTT

SEQ ID NO: 77184 - protein, 704 aa, Arabidopsis thaliana
  peptide (1)..(704): Ceres Seq. ID no. 12561765
MILHEESNQYYYWNTETGETSWELPTVLTQTTFAYGTGYNESGPMVTDASTLISSVEPSYFVPVQNSFTGTDYSTFPTVELDGRNKSEDLYVKSLGTDGHQVECRIDSVVSCQEDLSRPGNSDHVHTYFDAGAATDLPSRLLSQIESLLEKLRSLKRSHGNFHSNEQITKYILEVEVRHSDVKALILDTSPLLSFWLHTEKQLKRLEDSVNDEIYQLAKSAVMDEPETNKSPPKEKLVADANTESESEDSERDGELAQSGKSLHSDESADGSGDGSPKHSPNHPAGQSDIIPSTEMLQKAGSPDVEDVDMDVDMEVEESVPVSSVQVIDASDGKMFSQTEPSNLHTDVPPPPGEEWIPPPPSESEDVPPPPPDSYSEPIPPPPDNGHVASSLSSDSLGVPYTVPQSYMHQSADYATQYNLSYPESNYQYTNAVTLAPNTQFYGHVDGSQVSLPQSTFYYETVPGTTEVVPAAASAGEAYYDFNGAAPLFPVISSGESSLHHSGVGSANHHIPNNSSTAAVPSSRSNDSTEVGSSATASKSTDVTSGSSLLAKGQTKVKRTKKKTVAATSTLRSNKKVSSLVDKWKAAKEELNDSEEEEDDSEILDRKRKREIEEWKSRQIASGEAKDNANFQPLGGDWREKVKRKRERAEKSQKKDPEKQQKPDLTKLSANLPSEWQAYWDESTKKVYYGNTSTSQTSWTRPTT

SEQ ID NO: 77185 - DNA, 1930 bp, Arabidopsis thaliana
  misc_feature (1)..(1930): Ceres Seq. ID no. 12561774
  misc_feature (1)..(1930): Ortholog of  Ceres SEQ ID NO 15176403 as cited in SEQ ID NO 52988
ttgccgtcgagacgaagaacccgctttctctgaaaccgtaatctcacttcaatatctgcgaatccacaaatctggattcacacctgagaagtttgttaatcggtacatctctagatttttgcaatcggagatggagatcgaatccgtcgcagctggttcttgttccaaggagaatcaaatgatctacaaggaatggttcgaattctccgattcagacggcgatggccgtattactggtaacgatgcgatcaagttcttcactatgtcgaatttgcctcgtccggaattgaagcagatctgggctattgcagattcaaagagacaagggtatcttggtttcaaagagtttattgttgccatgcagcttgtttcgttggctcaaactggacatgaaatatcgcatgaagttcttattagcgatgttgatttcaaaaatatcaatcctcctaccatggaaggtctgggtgtattaatggcgaaaaagaagcattcatcaaagtcgagtgatcctaatatgaatggtagccctgccgcagacacctcacttacagctcactggttctcttcaaaatcttcaaaaaagatttctctgtcctccgtaacatctatagtggatggcctgaagaggttgtacattcagaagctgaagccacttgaagtagcatatcggtttaacgattttgtatcccctttgttgactaacagtgatttcgatgcaaaacctatggtaatgcttctgggtcaatactccacaggaaaaacaacattcattaagcatttgcttaaatctacttatccaggagctcatattggaccagagccgactactgacagatttgttgttgtcatgtctggacctgatgaaagaagcattccggggaacacagtagcagttcaagcagatatgccattcagtggtcttacaacttttgggactgcctttttgtcaaagtttgaatgctctcagatgcctcaccctctgctggagcatgtaacatttgtcgacacccctggagttttatcaggggaaaaacaaagaacacagcgagcatatgatttcactggtgttacatcatggtttgcctctaagtgtgatcttatcctcctcctatttgacccacacaagctggatgtaagtgatgagttcaagcgtgtaatttcatctttacgcggtcatgatgacaagatccgcgttgttctgaataaggctgaccaagtggacactcagcagctaatgagggtatatggagctctcatgtggtcacttgggaaagttctcaatactcctgaggtctctcgtgtctacattggttccttcagtgataaacccataaacgaagctgcaactggtccaattgggagagagttgtttgaaaaggagcaagatgaccttcttgctgatttgaaagacattcctaagaaagcttgtgatcgtcgaataaatgagtttgtgaaacgggcaagagcagcaaagatacatgcgtacatcatcagccatttgaagaaggagatgccagcgataatggggaaagccaaagctcaacagaaactgatagataacttggaagacgagtttggaaaggtacaaagagagcatcacttacctaaaggagatttcccaaatgtggatcatttcagggaggtgctaagtggttacaacatcgacaagtttgagaagctaaagccgaaaatgttgcagactgttgatgatatgttggggtatgacatcccagagctcttgaaaaatttcaaaaacccttatgattaatatttctatccctcttatcttctgcggttgctgtataatccaaaactatacattcacttttggcctagcccttgtgacttgtgagcgttaatgcatatttgtatcttacaagccttgtagacaatagagacaaacataaagagtgctgacttgataattggc

SEQ ID NO: 77186 - protein, 588 aa, Arabidopsis thaliana
  peptide (1)..(588): Ceres Seq. ID no. 12561775
CRRDEEPAFSETVISLQYLRIHKSGFTPEKFVNRYISRFLQSEMEIESVAAGSCSKENQMIYKEWFEFSDSDGDGRITGNDAIKFFTMSNLPRPELKQIWAIADSKRQGYLGFKEFIVAMQLVSLAQTGHEISHEVLISDVDFKNINPPTMEGLGVLMAKKKHSSKSSDPNMNGSPAADTSLTAHWFSSKSSKKISLSSVTSIVDGLKRLYIQKLKPLEVAYRFNDFVSPLLTNSDFDAKPMVMLLGQYSTGKTTFIKHLLKSTYPGAHIGPEPTTDRFVVVMSGPDERSIPGNTVAVQADMPFSGLTTFGTAFLSKFECSQMPHPLLEHVTFVDTPGVLSGEKQRTQRAYDFTGVTSWFASKCDLILLLFDPHKLDVSDEFKRVISSLRGHDDKIRVVLNKADQVDTQQLMRVYGALMWSLGKVLNTPEVSRVYIGSFSDKPINEAATGPIGRELFEKEQDDLLADLKDIPKKACDRRINEFVKRARAAKIHAYIISHLKKEMPAIMGKAKAQQKLIDNLEDEFGKVQREHHLPKGDFPNVDHFREVLSGYNIDKFEKLKPKMLQTVDDMLGYDIPELLKNFKNPYD

SEQ ID NO: 77187 - protein, 545 aa, Arabidopsis thaliana; identical to SEQ ID NO: 36226
  peptide (1)..(545): Ceres Seq. ID no. 12561776

SEQ ID NO: 77188 - protein, 529 aa, Arabidopsis thaliana; identical to SEQ ID NO: 36227
  peptide (1)..(529): Ceres Seq. ID no. 12561777

SEQ ID NO: 77189 - DNA, 1316 bp, Arabidopsis thaliana
  misc_feature (1)..(1316): Ceres Seq. ID no. 12561782
  misc_feature (1)..(1316): Ortholog of  Ceres SEQ ID NO 13639636 as cited in SEQ ID NO 60184
ctcactctctctttgttccatggacttgcaactgaaacaatggagaagtcagcagcagaatgagtcagaagaacaaggctctgctgcaactaagatatcaaactttttctttgatcagattcagtcccaaactgctacttctgctgctgcggctcctcttcctctctttgtccctgaacccacttcttcctcttctttctcttgcttctctcctgactcttctaattcttcttcttcttccaggttcctcaagatgggaaacttcttcagctgggcacagtggcaagaacttgagctacaagcactgatctatagatacatgttggctggtgcttctgttcctcaagagcttctcttacctattaagaaaagtctcctccatcaatctcctatgcatttccttcaccatcctcttcaacatagttttcctcatcaccaaccttcttggtattggggaagaggagcaatggatcctgagccagggaggtgtaagagaactgacggcaagaaatggagatgttcaagggatgttgtagcgggccacaagtattgtgaccgccacattcaccgtggaagaaaccgttcaagaaagcctgtggaaaccgccacaaccaccatcacaacgacagccacaacaaccgcatcttcttttgtcttaggtgaggagcttggtcatggaccaaacaacaaccacttcttctcctctggttcatctcaacctctccaccttagtcatcaacaaagttgttcttcagagatgaaacaagaaagcaacaacaacaagaggccatatgaagctaacagtggattcagcaatggaagatcagacgatggtcacatcttgaggcatttctttgacgattggccacgatcatcagactctacctccagtccaatgagctcatccacttgtcatctttcaatctccatgcccggtaacaacacgtcctcagatgtttctctaaaactttccacaggcaatgaagaagaagaagagaacatgagaaataacaacaatgagagggagcaaatgaattggtggagcaatggagggaatcaccacaacaatatgggaggaccattagctgaggctttgaggtcagcttcttcgacgtcaagtgttcttcatcagatgggaatctctactcaagtttttcattaaagaaaagtgtttgtaatctttttggtttgtgctctttgaatctttattttctgcagaaaataatctttgaatttgtcttcttttggaattgtgagttctgcttttggaattgttttgttccttactctgctattatatttatgtttaaagcttg

SEQ ID NO: 77190 - protein, 386 aa, Arabidopsis thaliana
  peptide (1)..(386): Ceres Seq. ID no. 12561783
SLSLCSMDLQLKQWRSQQQNESEEQGSAATKISNFFFDQIQSQTATSAAAAPLPLFVPEPTSSSSFSCFSPDSSNSSSSSRFLKMGNFFSWAQWQELELQALIYRYMLAGASVPQELLLPIKKSLLHQSPMHFLHHPLQHSFPHHQPSWYWGRGAMDPEPGRCKRTDGKKWRCSRDVVAGHKYCDRHIHRGRNRSRKPVETATTTITTTATTTASSFVLGEELGHGPNNNHFFSSGSSQPLHLSHQQSCSSEMKQESNNNKRPYEANSGFSNGRSDDGHILRHFFDDWPRSSDSTSSPMSSSTCHLSISMPGNNTSSDVSLKLSTGNEEEEENMRNNNNEREQMNWWSNGGNHHNNMGGPLAEALRSASSTSSVLHQMGISTQVFH

SEQ ID NO: 77191 - protein, 380 aa, Arabidopsis thaliana
  peptide (1)..(380): Ceres Seq. ID no. 12561784
MDLQLKQWRSQQQNESEEQGSAATKISNFFFDQIQSQTATSAAAAPLPLFVPEPTSSSSFSCFSPDSSNSSSSSRFLKMGNFFSWAQWQELELQALIYRYMLAGASVPQELLLPIKKSLLHQSPMHFLHHPLQHSFPHHQPSWYWGRGAMDPEPGRCKRTDGKKWRCSRDVVAGHKYCDRHIHRGRNRSRKPVETATTTITTTATTTASSFVLGEELGHGPNNNHFFSSGSSQPLHLSHQQSCSSEMKQESNNNKRPYEANSGFSNGRSDDGHILRHFFDDWPRSSDSTSSPMSSSTCHLSISMPGNNTSSDVSLKLSTGNEEEEENMRNNNNEREQMNWWSNGGNHHNNMGGPLAEALRSASSTSSVLHQMGISTQVFH

SEQ ID NO: 77192 - protein, 302 aa, Arabidopsis thaliana
  peptide (1)..(302): Ceres Seq. ID no. 12561785
MGNFFSWAQWQELELQALIYRYMLAGASVPQELLLPIKKSLLHQSPMHFLHHPLQHSFPHHQPSWYWGRGAMDPEPGRCKRTDGKKWRCSRDVVAGHKYCDRHIHRGRNRSRKPVETATTTITTTATTTASSFVLGEELGHGPNNNHFFSSGSSQPLHLSHQQSCSSEMKQESNNNKRPYEANSGFSNGRSDDGHILRHFFDDWPRSSDSTSSPMSSSTCHLSISMPGNNTSSDVSLKLSTGNEEEEENMRNNNNEREQMNWWSNGGNHHNNMGGPLAEALRSASSTSSVLHQMGISTQVFH

SEQ ID NO: 77193 - DNA, 1021 bp, Arabidopsis thaliana
  misc_feature (1)..(1021): Ceres Seq. ID no. 12561789
  misc_feature (1)..(1021): Ortholog of  Ceres SEQ ID NO 13596609 as cited in SEQ ID NO 63070
  misc_feature (1)..(1021): Ortholog of  Ceres SEQ ID NO 12616895 as cited in SEQ ID NO 63909
  misc_feature (1)..(1021): Ortholog of  Ceres SEQ ID NO 13598574 as cited in SEQ ID NO 69083
actactatgtacagattcagcaacacagttattggggtcttaaaccttctcaccttactagcctcgattccaatcatcggaaccgctttatacaaggcaagaagcagcacgacatgtgaaaacttcctccagacgccgctacttgttataggattcatcatactcatagtttcccttgcgggattcataggagcctgcttcaacgtggcatgggctctttgggtgtacttagtggtcatgatcttcctcatcgctaccctaatgggtctaacgctatttggtctggtggtgacgagccaaggaggtggagtggaagtgccagggaggatttataaagagtataggcttggagactatcatccatggttgagagagagagttagggatcctgagtattggaactccattagaagctgtatcttgagttccaagacttgtactaagattgagtcttggactacacttgattatttccaaagagacatgacttctgttcagtcgggatgttgtaagccaccgacggcgtgtacgtacgaagctggagtagtggacggaggaggagattgcttcagatggaacaatggagtggagatgttatgctacgagtgcgatgcttgcaaggctggtgttctcgaagagatccgtctcgactggagaaagttatcggttgtcaacattctcgtcctcgtcctcctcatcgcggtctacgccgctggttgctgcgccttccacaacactcgccacgcagctcatccttaccatccatctgatgataaccgcatgaccagagtccgtcctcgttgggactattactggtggagatggtggcacgaaaagaaagagcagctttactaaaagccgcatcgtttttttgttcttaatcattttctttttagcaaacttagattaagaaaacacaaagatagtttaaaaatgttgatgtagtcctgttcctataaatcatcaagagattagtaagatttgctacgagtgcatgagtatatgcatatatttttcgtct

SEQ ID NO: 77194 - protein, 284 aa, Arabidopsis thaliana
  peptide (1)..(284): Ceres Seq. ID no. 12561790
TTMYRFSNTVIGVLNLLTLLASIPIIGTALYKARSSTTCENFLQTPLLVIGFIILIVSLAGFIGACFNVAWALWVYLVVMIFLIATLMGLTLFGLVVTSQGGGVEVPGRIYKEYRLGDYHPWLRERVRDPEYWNSIRSCILSSKTCTKIESWTTLDYFQRDMTSVQSGCCKPPTACTYEAGVVDGGGDCFRWNNGVEMLCYECDACKAGVLEEIRLDWRKLSVVNILVLVLLIAVYAAGCCAFHNTRHAAHPYHPSDDNRMTRVRPRWDYYWWRWWHEKKEQLY

SEQ ID NO: 77195 - protein, 282 aa, Arabidopsis thaliana
  peptide (1)..(282): Ceres Seq. ID no. 12561791
MYRFSNTVIGVLNLLTLLASIPIIGTALYKARSSTTCENFLQTPLLVIGFIILIVSLAGFIGACFNVAWALWVYLVVMIFLIATLMGLTLFGLVVTSQGGGVEVPGRIYKEYRLGDYHPWLRERVRDPEYWNSIRSCILSSKTCTKIESWTTLDYFQRDMTSVQSGCCKPPTACTYEAGVVDGGGDCFRWNNGVEMLCYECDACKAGVLEEIRLDWRKLSVVNILVLVLLIAVYAAGCCAFHNTRHAAHPYHPSDDNRMTRVRPRWDYYWWRWWHEKKEQLY

SEQ ID NO: 77196 - protein, 205 aa, Arabidopsis thaliana
  peptide (1)..(205): Ceres Seq. ID no. 12561792
MIFLIATLMGLTLFGLVVTSQGGGVEVPGRIYKEYRLGDYHPWLRERVRDPEYWNSIRSCILSSKTCTKIESWTTLDYFQRDMTSVQSGCCKPPTACTYEAGVVDGGGDCFRWNNGVEMLCYECDACKAGVLEEIRLDWRKLSVVNILVLVLLIAVYAAGCCAFHNTRHAAHPYHPSDDNRMTRVRPRWDYYWWRWWHEKKEQLY

SEQ ID NO: 77197 - DNA, 3754 bp, Arabidopsis thaliana
  misc_feature (1)..(3754): Ceres Seq. ID no. 12561805
  misc_feature (1)..(3754): Ortholog of  Ceres SEQ ID NO 13597732 as cited in SEQ ID NO 64810
  misc_feature (1)..(3754): Ortholog of  Ceres SEQ ID NO 14301912 as cited in SEQ ID NO 67786
  misc_feature (1)..(3754): Ortholog of  Ceres SEQ ID NO 13597826 as cited in SEQ ID NO 69117
ctcttcccacttctcactctctgatctcagatctctccctccctctttctccgatctcagatccattcaacaatctacaaagaagatggaaccagtctcttcatggggtaacacctctctcgtctccgtagatccagagatccacgacctaatcgagaaggagaaacgtcggcaatgtcgaggaatcgaacttatcgcttccgagaatttcacttccttcgccgtcatcgaagctctcggaagtgccttaaccaacaaatactccgaaggtattcctggtaatcgttattacggaggtaacgaattcatcgatgagatcgagaatctttgccgttcaagagctctcgaagctttccattgtgatccagcagcgtggggcgttaatgttcagccgtattctggatctccggcaaatttcgctgcttacacggctttgcttcagcctcacgatcgtatcatggggcttgatttgccttcaggtggtcatttgactcatggttactatacatctggtggtaagaagatctctgcgacttcgatctactttgagagtcttccgtataaggtgaatttcaccactggttacattgattacgataagcttgaagagaaggcgttggatttcaggcctaagttgcttatctgtggtggtagtgcgtatcctagggattgggattacgctagatttagagctattgctgataaggttggagctcttttgctttgtgacatggctcacatcagtggtctcgttgctgctcaggaagctgcaaacccatttgagtactgtgacgttgtgacaaccacaacccacaagagtttgaggggtccaagggctggtatgattttctacaggaagggtccaaaaccaccaaagaagggtcaacccgagggtgcagtctatgattttgaggacaaaatcaactttgctgtattccctgcgcttcaaggtggtcctcacaatcaccagattggtgctctagctgttgcgttgaagcaggctaatactcctgggttcaaggtctacgcaaaacaagtgaaagccaatgctgttgcccttggaaactacctaatgagcaagggttaccagattgtgaccaatggaactgagaaccaccttgttctctgggatcttcgccctcttggattgaccggaaacaaggttgagaagctctgcgatctgtgcagcattacattgaacaagaacgcagtatttggagacagtagtgctcttgctcctggaggtgtaagaatcggtgcacccgcgatgacatcgagaggattggtggagaaggactttgagcagataggagaattcctgagccgtgcagtgacactgacgttggacatccaaaagacatacggtaagttgttgaaggacttcaacaagggtttggtgaacaacaaagatctcgatcagctcaaggctgatgtcgagaagttctcggcgtcttatgagatgcctggattcctcatgtctgagatgaagtacaaggattagagatctttctctatatgcaagagtaatcttctattattatctaccatatatataaaatatgcttttgtaggatcgccttaaaggcgaagagatgaagatgcaaacagtaaaaaaaaagggttttcttttcagctatttcttcttgaatgttttttttctttttcttttggtttcttattgaaattgttgtatttttgttggcttttttctaataatatcagcgagtttttctttccactgtttcaattaaatacggtgtgtttgtatgggttttagtttcatagattgaattatttgtactcaactaaggaattcttgtaaatgcaaaaaaaaaagaaagttttacgaaaagtaaaaaaaaaaaaaaaagagctcttggatccttctctttgaaaggtggattctttttggccggagaaagccaattctgagctcgccaatggctaacagagcattgaaccggcttctacggaatttctttgtagaaagttcaccattcaggaagagaagtggattgtatcaaggagttgtttacaatgtaatcaaacggtttcagtctcatttatcagagtccgggaaggtagaaaaggagttagaagagcaggaggcagagaagagaaggcctagtagtgtcacttcttcgaggtccggattagagaaaagaagacaatttgaatcaggaatcgacaatgatagctctagtgatgaagatacaggtgatggaaagtggaaactagacctagcttggctcactaaagcacttgagccagctatgcaattacgtagatgggctcttccaacaggagagaagtcactgcctggtagtcgatctctgtctgagataattgctagtattcagaggagtaggcttgggattgaaggttggacttttggtgatcttactattggtctctatcttatataccttagacaagcatccttgtctccatttgaggacgtcaagggcgtagaagttgtttcagagtctacagtttatgatctgatatataatgcggagttagcaaaaggttgttacagggatagtgtgagtggtcttgcaaagaacaccatgcttcgagagaataacattcttaaatttgtgaaagattcaagtgttatgaggcctggatactacataggagttgatcatcgaaggaaacttgttgtctttggaatacgcgggacacatacaatttacgatcttatcactgacattgtctcttcaagcgatgaagaagtcacttttgaaggctactcaacacactttggaactgctgaagctgcacgatggttccttaaccacgaattgcaaactataagaagatgcttagcgaaatacgagggatacaagctacggcttgttggtcattctctcggcggtgctatagcctccttaatggcgataatgctcaagaaaatgccaagggaggaattgggattcgatgctgaaattatttcagccgttgggtatgcgacacctccttgtgtttccaaagagcttgcagagaattgctctgagtttgtaacaactattgtaatgcaggacgacattatacctagactcagtgcagcttctctagcgagattgaggaatgaaatccttcagacagattggacaagtgtaattgagaaggaagaatggaagaacgttttggatttggtaacaaacgcaaaacaagttgtcacctctgtgcaagacgtagctagaaaagtttctgattatgcaaacttcggaaacaaaaaagaagttccagaaatcccgtcatccaagaacaaccagtctgggatattaatctctgactctactactaaagatgttgtgaaattgccagaagagttatatgtaccgggtgcagtttactatctgatgaggagcctaagaggaaccccgaaaagctcagcaggaaaacaagtagagtactatagtctatggaagagagatccaggacaacattttcagaggatacttctctccggtaatttcattacagaccataaatgtgatagccattactacgctctgcgagatgtgctcaaaggatttcccagtttcatcaacgaaagcatctttaagaagtgaaatactgaaatggaatctcatctctggatagaacgtaatgttttagtttgtgagtttgtctgcaaacatttttttaagaataaatgatcagtttatcccagcatgaaaaaattatgcttcttagaaattttgaatgattaatgaaaagctggctgtgattgctgattggttcc

SEQ ID NO: 77198 - protein, 546 aa, Arabidopsis thaliana
  peptide (1)..(546): Ceres Seq. ID no. 12561806
MANRALNRLLRNFFVESSPFRKRSGLYQGVVYNVIKRFQSHLSESGKVEKELEEQEAEKRRPSSVTSSRSGLEKRRQFESGIDNDSSSDEDTGDGKWKLDLAWLTKALEPAMQLRRWALPTGEKSLPGSRSLSEIIASIQRSRLGIEGWTFGDLTIGLYLIYLRQASLSPFEDVKGVEVVSESTVYDLIYNAELAKGCYRDSVSGLAKNTMLRENNILKFVKDSSVMRPGYYIGVDHRRKLVVFGIRGTHTIYDLITDIVSSSDEEVTFEGYSTHFGTAEAARWFLNHELQTIRRCLAKYEGYKLRLVGHSLGGAIASLMAIMLKKMPREELGFDAEIISAVGYATPPCVSKELAENCSEFVTTIVMQDDIIPRLSAASLARLRNEILQTDWTSVIEKEEWKNVLDLVTNAKQVVTSVQDVARKVSDYANFGNKKEVPEIPSSKNNQSGILISDSTTKDVVKLPEELYVPGAVYYLMRSLRGTPKSSAGKQVEYYSLWKRDPGQHFQRILLSGNFITDHKCDSHYYALRDVLKGFPSFINESIFKK

SEQ ID NO: 77199 - protein, 499 aa, Arabidopsis thaliana
  peptide (1)..(499): Ceres Seq. ID no. 12561807
SSHFSLSDLRSLPPSFSDLRSIQQSTKKMEPVSSWGNTSLVSVDPEIHDLIEKEKRRQCRGIELIASENFTSFAVIEALGSALTNKYSEGIPGNRYYGGNEFIDEIENLCRSRALEAFHCDPAAWGVNVQPYSGSPANFAAYTALLQPHDRIMGLDLPSGGHLTHGYYTSGGKKISATSIYFESLPYKVNFTTGYIDYDKLEEKALDFRPKLLICGGSAYPRDWDYARFRAIADKVGALLLCDMAHISGLVAAQEAANPFEYCDVVTTTTHKSLRGPRAGMIFYRKGPKPPKKGQPEGAVYDFEDKINFAVFPALQGGPHNHQIGALAVALKQANTPGFKVYAKQVKANAVALGNYLMSKGYQIVTNGTENHLVLWDLRPLGLTGNKVEKLCDLCSITLNKNAVFGDSSALAPGGVRIGAPAMTSRGLVEKDFEQIGEFLSRAVTLTLDIQKTYGKLLKDFNKGLVNNKDLDQLKADVEKFSASYEMPGFLMSEMKYKD

SEQ ID NO: 77200 - protein, 471 aa, Arabidopsis thaliana
  peptide (1)..(471): Ceres Seq. ID no. 12561808
MEPVSSWGNTSLVSVDPEIHDLIEKEKRRQCRGIELIASENFTSFAVIEALGSALTNKYSEGIPGNRYYGGNEFIDEIENLCRSRALEAFHCDPAAWGVNVQPYSGSPANFAAYTALLQPHDRIMGLDLPSGGHLTHGYYTSGGKKISATSIYFESLPYKVNFTTGYIDYDKLEEKALDFRPKLLICGGSAYPRDWDYARFRAIADKVGALLLCDMAHISGLVAAQEAANPFEYCDVVTTTTHKSLRGPRAGMIFYRKGPKPPKKGQPEGAVYDFEDKINFAVFPALQGGPHNHQIGALAVALKQANTPGFKVYAKQVKANAVALGNYLMSKGYQIVTNGTENHLVLWDLRPLGLTGNKVEKLCDLCSITLNKNAVFGDSSALAPGGVRIGAPAMTSRGLVEKDFEQIGEFLSRAVTLTLDIQKTYGKLLKDFNKGLVNNKDLDQLKADVEKFSASYEMPGFLMSEMKYKD

SEQ ID NO: 77201 - DNA, 943 bp, Arabidopsis thaliana
  misc_feature (1)..(943): Ceres Seq. ID no. 12561809
  misc_feature (1)..(943): Ortholog of  Ceres SEQ ID NO 14301475 as cited in SEQ ID NO 62936
  misc_feature (1)..(943): Ortholog of  Ceres SEQ ID NO 12619999 as cited in SEQ ID NO 66123
  misc_feature (1)..(943): Ortholog of  Ceres SEQ ID NO 13656436 as cited in SEQ ID NO 69154
ctccgtctttatagagaaaaaaagattctcttctcttctcgttctcatcatcgtcttaaagaaggaattcgatttttcgcctgaacctgcggatttttcgattcttcaaattcaatgtcttatgcttatctcttcaagtatatcatcatcggcgatactggagtggggaaatcatgtcttctgcttcagttcaccgacaagaggtttcagccggtgcatgaccttaccattggtgttgaatttggggctaggatgatcaccatcgataacaaacctatcaagcttcagatctgggatacggctggtcaagaatcctttaggtctattacaaggtcatactatagaggagctgcaggggcattgcttgtctatgatatcacaaggagggagacatttaaccatctagctagctggctagaagatgcaaggcagcatgcaaatgcaaatatgacgataatgctcattgggaataagtgtgatcttgctcacagaagggcagtgagtacagaggaaggagagcagtttgcaaaggagcacggtcttatattcatggaggcctctgccaagactgctcagaatgttgaggaggcattcattaagacagctgcaacaatatacaagaagattcaagatggtgtgtttgatgtgtcaaatgagtcatatggaatcaaagttggatatggaggaattccaggaccatcaggtggaagagatggatcaacctcgcaaggaggagggtgctgcggctgagatgggaaaaatatgtctatgtcattatgtaaaaatgatcacatatgatatagcaaaaatgtctctgcttctttctatagttgtaaatcgttttggaattcgatttggtgactgtgttgtggttggttttggaacggtttgacaatacacgtgtatgcctattcatatatctaaaaattaagatgtgtttgcg

SEQ ID NO: 77202 - protein, 211 aa, Arabidopsis thaliana; identical to SEQ ID NO: 23858
  peptide (1)..(211): Ceres Seq. ID no. 12561810

SEQ ID NO: 77203 - protein, 165 aa, Arabidopsis thaliana; identical to SEQ ID NO: 23859
  peptide (1)..(165): Ceres Seq. ID no. 12561811

SEQ ID NO: 77204 - DNA, 1132 bp, Arabidopsis thaliana
  misc_feature (1)..(1132): Ceres Seq. ID no. 12561819
  misc_feature (1)..(1132): Ortholog of  Ceres SEQ ID NO 13598416 as cited in SEQ ID NO 63371
  misc_feature (1)..(1132): Ortholog of  Ceres SEQ ID NO 13584271 as cited in SEQ ID NO 63893
aaattcatttcaacgtagaagcttctacagattcgatttgggtgtttttggttttggatttggtaaagcttctcggtcacttgctcggtgattgaaactgaatcgattgtgattgtgattgtgattgtgattgtgattgtgagggaattatggctcaagccgtagaagagtggtacaagcagatgccgattataacccggtcgtatctcacggcggctgtagtcaccaccgtcgggtgttcgctcgagattatatctccttataatctctacctaaatcctacccttgtggtgaagcaataccagttctggcgtcttgtcacaaatttcctttatttccgaaagatggatttggactttttgttccatatgttttttctagctcgatactgcaaactgctcgaagaaaactccttcaggggaaagaccacggatttcctttacatgctcttattcggggcaactgttctaactggtattgttctcattggcggaatgataccttatttgtctgtttcattctccaaaatcatcttcctcagcaattcattgactttcatgatggtctatgtatggagtaaacaaaatccttacatccacatgagtttccttggcctcttcactttcacagcagcttatttaccatgggtacttcttggattctctatccttgttggtgcaagtgcatggggggattttctgggaatgatagcgggccacgcatactacttcttggcatttgtgtatccccgaatgacggatcgacgtcccttgaaaactccatctttcctcaaggccctatttgctgatgagccagtcgtgattgcaaggccagaagatgtgagatttgctcatgcgccttttgatgaaatccaccaagactgaatcttgatcctccacaaaacaccagccacaacgcacagttcaagtgtactcagataatgttattgactcttgacctttatagttgtggataatgtggaagtgagatagtgttggctctgatttttttccctagttttctgtctgcttttcttgtccgatacaaatgtgtttcctccttgtgcatatgaactcaaattgtgtacaaagtcttcaaaagtgctagtttatagtttcgtcattagatcatt

SEQ ID NO: 77205 - protein, 244 aa, Arabidopsis thaliana
  peptide (1)..(244): Ceres Seq. ID no. 12561820
MAQAVEEWYKQMPIITRSYLTAAVVTTVGCSLEIISPYNLYLNPTLVVKQYQFWRLVTNFLYFRKMDLDFLFHMFFLARYCKLLEENSFRGKTTDFLYMLLFGATVLTGIVLIGGMIPYLSVSFSKIIFLSNSLTFMMVYVWSKQNPYIHMSFLGLFTFTAAYLPWVLLGFSILVGASAWGDFLGMIAGHAYYFLAFVYPRMTDRRPLKTPSFLKALFADEPVVIARPEDVRFAHAPFDEIHQD

SEQ ID NO: 77206 - protein, 233 aa, Arabidopsis thaliana
  peptide (1)..(233): Ceres Seq. ID no. 12561821
MPIITRSYLTAAVVTTVGCSLEIISPYNLYLNPTLVVKQYQFWRLVTNFLYFRKMDLDFLFHMFFLARYCKLLEENSFRGKTTDFLYMLLFGATVLTGIVLIGGMIPYLSVSFSKIIFLSNSLTFMMVYVWSKQNPYIHMSFLGLFTFTAAYLPWVLLGFSILVGASAWGDFLGMIAGHAYYFLAFVYPRMTDRRPLKTPSFLKALFADEPVVIARPEDVRFAHAPFDEIHQD

SEQ ID NO: 77207 - protein, 179 aa, Arabidopsis thaliana; identical to SEQ ID NO: 74570
  peptide (1)..(179): Ceres Seq. ID no. 12561822

SEQ ID NO: 77208 - DNA, 1384 bp, Arabidopsis thaliana
  misc_feature (1)..(1384): Ceres Seq. ID no. 12561906
  misc_feature (1)..(1384): Ortholog of  Ceres SEQ ID NO 13596090 as cited in SEQ ID NO 68377
  misc_feature (1)..(1384): Ortholog of  Ceres SEQ ID NO 14303557 as cited in SEQ ID NO 68595
aaagtgccactttttcttcctaaatcctctctctctctctccgttcccgagacaagcaaaagcttcaatctcaaatctttcagcagctacaaaaatgttcttcatctaaaagagactgtgaagcagagagagagagagagagagagagagagagagatgggaggtgtgacgtcatcagttgcggcgaagttcgctttcttcccgccgagtccgtcgtcttacaagctggtttacgatgaactgaccggacttcttctgatgaacccatttcctcaccgtgaaaacgttgaaatccttaagcttccgacacgtagaggaacagagatcgtggctatgtacgtcagacatccgatggctacctctactctgctttattcccatggaaacgccgccgatctgggccagatgtatgagctcttcatcgaattgagcatccatcttaaggttaatctcatggggtacgattactccgggtatggacaatctactggaaagccaagtgagcaccatacatatgctgatatcgaagctgcttataaatgtcttgaggaaacctatggagcaaaacaggaagacataatcctttatggccaatccgttggaagtggacctacattagatcttgctgctcggttgcctcaattaagagctgctgttctccatagcccgattctttctggtctaagagtaatgtatccagtgaagaagacatactggttcgacatcttcaagaatatcgacaaaatacctcttgtgaattgcccggttctcgtcattcacggaacttgtgatgaagttgttgactgttctcatggaaaacaactatgggaactctctaaagagaaatatgaaccgctttggctcgaaggcggtaaccactgtgatctagaacactatcctgaatacattaaacaccttaagaagttcatcacaaccgtagagagagatctctcctcgagggcgagcacggcccaattagagaaacagagcagcgatttggaaatgccgaggcagagcgtagatagaagagagaagccgaggcaaagcgttgataaaagggagaaagagaaacctccaaagggtccttcaaagaagagtaagctgagaatcacgttcgagcagcacttagatcggactaggagaagcgttgacttccacgaaaaggcaaggaagagcgttgaccatcatcagcatcatcagaatcatcatcagattgagagaggaaggaagagtgttgatagattggatagagtacggtctgagtaaaccggagaaaatctaccacacgtacataagttgttacagaacaagaacatttgatcttgatcttgattggccattctaatgtttatggttttttgttttgatttgtgagttattctcc

SEQ ID NO: 77209 - protein, 421 aa, Arabidopsis thaliana
  peptide (1)..(421): Ceres Seq. ID no. 12561907
KVPLFLPKSSLSLSVPETSKSFNLKSFSSYKNVLHLKETVKQREREREREREMGGVTSSVAAKFAFFPPSPSSYKLVYDELTGLLLMNPFPHRENVEILKLPTRRGTEIVAMYVRHPMATSTLLYSHGNAADLGQMYELFIELSIHLKVNLMGYDYSGYGQSTGKPSEHHTYADIEAAYKCLEETYGAKQEDIILYGQSVGSGPTLDLAARLPQLRAAVLHSPILSGLRVMYPVKKTYWFDIFKNIDKIPLVNCPVLVIHGTCDEVVDCSHGKQLWELSKEKYEPLWLEGGNHCDLEHYPEYIKHLKKFITTVERDLSSRASTAQLEKQSSDLEMPRQSVDRREKPRQSVDKREKEKPPKGPSKKSKLRITFEQHLDRTRRSVDFHEKARKSVDHHQHHQNHHQIERGRKSVDRLDRVRSE

SEQ ID NO: 77210 - protein, 369 aa, Arabidopsis thaliana; identical to SEQ ID NO: 41674
  peptide (1)..(369): Ceres Seq. ID no. 12561908

SEQ ID NO: 77211 - protein, 335 aa, Arabidopsis thaliana; identical to SEQ ID NO: 41675
  peptide (1)..(335): Ceres Seq. ID no. 12561909

SEQ ID NO: 77212 - DNA, 977 bp, Arabidopsis thaliana
  misc_feature (1)..(977): Ceres Seq. ID no. 12561910
  misc_feature (1)..(977): Ortholog of  Ceres SEQ ID NO 14308077 as cited in SEQ ID NO 58566
  misc_feature (1)..(977): Ortholog of  Ceres SEQ ID NO 15226608 as cited in SEQ ID NO 64190
attccgggagaaaaagtcgcgatacttgagctactcagctttagggtttaacatgttaaggtctctgatttggaaacgatcacaggcatattcttcagtcgtcacgatgtcttcaatcagtcagagaggaaatgaaaggcttttgtctgaagtcgctggttcacattcaagagataataagatattggttttgggaggaaatggttatgtaggttcacacatatgtaaggaggcactgagacaaggtttctctgtatctagtcttagcaggtctggaagatcttctcttcacgattcgtgggtcgatgatgtaacctggcatcaaggtgatttgctttcacccgattctctgaagcctgcactagaaggaattacatctgtgatttcatgtgttggtggttttggttccaactcacaaatggtcagaattaacggtactgcaaacatcaatgctgttaaagctgcagcagaacaaggtgtgaagagatttgtgtatatatcagctgcggattttggtgtcataaataacttgattcgaggatatttcgaagggaagagagcaaccgaagctgagattttggataaatttggaaacagaggttcggttttaaggccaggattcatacatgggactcgtcaggtcggtagcataaagctgccacttagtctcattggagctcctctcgaaatggttttgaagctgttgccaaaagaggtgacgaaaattcctgtgatcgggccacttttaatacctccggtcaatgtcaaatccgttgcagcaacagcggtaaaagctgcagttgatcccgagtttgcttctggagtcatcgatgtgtaccggattcttcaacatggtcactgaaaacaacacctgtcttaacaaagttctcctcaatacggttttaaatgtcaaattcaaatgtaaccaataaccatcgtctctggtcttctgctaccaaataaactatgactttcgc

SEQ ID NO: 77213 - protein, 286 aa, Arabidopsis thaliana
  peptide (1)..(286): Ceres Seq. ID no. 12561911
FREKKSRYLSYSALGFNMLRSLIWKRSQAYSSVVTMSSISQRGNERLLSEVAGSHSRDNKILVLGGNGYVGSHICKEALRQGFSVSSLSRSGRSSLHDSWVDDVTWHQGDLLSPDSLKPALEGITSVISCVGGFGSNSQMVRINGTANINAVKAAAEQGVKRFVYISAADFGVINNLIRGYFEGKRATEAEILDKFGNRGSVLRPGFIHGTRQVGSIKLPLSLIGAPLEMVLKLLPKEVTKIPVIGPLLIPPVNVKSVAATAVKAAVDPEFASGVIDVYRILQHGH

SEQ ID NO: 77214 - protein, 269 aa, Arabidopsis thaliana; identical to SEQ ID NO: 35416
  peptide (1)..(269): Ceres Seq. ID no. 12561912

SEQ ID NO: 77215 - protein, 251 aa, Arabidopsis thaliana; identical to SEQ ID NO: 35417
  peptide (1)..(251): Ceres Seq. ID no. 12561913

SEQ ID NO: 77216 - DNA, 763 bp, Arabidopsis thaliana
  misc_feature (1)..(763): Ceres Seq. ID no. 12561924
  misc_feature (1)..(763): Ortholog of  Ceres SEQ ID NO 12624284 as cited in SEQ ID NO 61595
  misc_feature (1)..(763): Ortholog of  Ceres SEQ ID NO 15225557 as cited in SEQ ID NO 0
cccttctctctctctctctctctctcacacacacacacaaacgcacatacttgagcaaagtcatcacaatgagcttcttcatcgaagattctggtctcatagtcactcagcttctctacaaaatggctgttctcatcaccgtcttgagatggatcctcgcttggatcttacgctaccgatccagatccagatccacctcttcttccacttccgcctgtccttcgatttcctcacaggcgatcaaagaaagcctctccgtgacgacgttccgtgacgcagctgagagatctccggcgatgatcaacgacacctgcgctgtgtgtctcggagatctggaagatggagatgaggttagagaactcaggaactgtagccatatgtttcaccgtgagtgtattgaccggtggttggattatgaatgttgcggtggtgatgagaataacgaaggtgaggaggataatcaccgtacgtgtcctctttgtagaactccgctacttgctgctaatacgacgtcgtgtggtgattggccgacgaagaacgaacctagctgggccgttgaacggcttctctacctcttcggagatgatcttcacgtctgatttcatttttttttgtcttttccgatttttatttgattttttatttagtgggatcgattttgatcaattagaaatttaagtagtgagagtggttaatttttgtaaattgggggatttaatgtgttagattaggaaatataataataatatcatcgattaatttc

SEQ ID NO: 77217 - protein, 198 aa, Arabidopsis thaliana
  peptide (1)..(198): Ceres Seq. ID no. 12561925
LLSLSLSLTHTHKRTYLSKVITMSFFIEDSGLIVTQLLYKMAVLITVLRWILAWILRYRSRSRSTSSSTSACPSISSQAIKESLSVTTFRDAAERSPAMINDTCAVCLGDLEDGDEVRELRNCSHMFHRECIDRWLDYECCGGDENNEGEEDNHRTCPLCRTPLLAANTTSCGDWPTKNEPSWAVERLLYLFGDDLHV

SEQ ID NO: 77218 - protein, 176 aa, Arabidopsis thaliana; identical to SEQ ID NO: 28245
  peptide (1)..(176): Ceres Seq. ID no. 12561926

SEQ ID NO: 77219 - protein, 158 aa, Arabidopsis thaliana; identical to SEQ ID NO: 28246
  peptide (1)..(158): Ceres Seq. ID no. 12561927

SEQ ID NO: 77220 - DNA, 3525 bp, Arabidopsis thaliana
  misc_feature (1)..(3525): Ceres Seq. ID no. 12562002
  misc_feature (1)..(3525): Ortholog of  Ceres SEQ ID NO 13597957 as cited in SEQ ID NO 60744
gtcgtcgtcgtctctctctctctctcttccccgatccaatcttctcctttgtctctcgacacaaacaaaggaaacagctgagaaaactattatcatcatcatcatctctctctatatcataaacccttctttttctctctatcctcttcttcttcttcctcatatatacttgtcttcttttttcaaattttaccaattcgtaatctcatcttctgtttcatctgcgaatctgagcttccttcttcgtttctttggagcttctggactcgtgatcgggtctctctacttgcttacctcttttctctttctattagtctctcgcatttgttctcgattcgattgcagcagaagaaacaatcactactgtttgttttcgtcggttctggaagatttttctggggctgcttgattgtttttgcaagtccatggtttaaatctcgggagcaagagattcgtgttttgcttcaaacccaacgatacgtggtcaaagttttagagtatctttgattgaattgcgtctgaattgaattcgacattttatttcgattttgaatattggtgaatgctccggcgagattattctctcagcccatcggcttgggcttagatctgtaaatcaaaaggaaccaataattgagaaatcagctatgacctcatcgccatcagtggagaatggcggctcaggctcctctggatcatctgctcttttaggctgtatgcaacaattcaagctcttcgagactcaagcgaatttctatatgattggttggaacggtagtggagtatatagaatacttaagatagaccggctcgaagcatctgagcttaatctcagagaggattcgactgcgtataccaaaaaagaatgctacgagttgcttaaacggatacacgaaggaaacaaggcgactggtggactgaaacttgtcactgtttgttatggaatcattgggttcattaagtttttgggaccatattacatgctgcttataactgaaagaagagagataggtgaaatttgtggtcacattgtttacgaagtgtcaaagagtgatatgattgcattgcaacattctagcgtgctttgcaacactgcaaatttaagagacgagaacaggtacaagagactcctgtgtatggtggaccttacgaaagacttctttttcagctattcttacaatataatgcgaagtttccagaagaatatatgcgaccatgagagtggaggtactctctataagaaaatgtttgtgtggaacgaattcttgactcggggaactcgacatcaccttcggaataccctgtggactgtagcattggtgtatgggttttttaagcagacaatactttccgaagctggacggaatttcaaactcactcttattgctaggcgttcccgccataatgctggaaccaggtacttgaaacgaggaataaacgaaagtggcaatgttgctaatgatgtggaaacagaacagatagtgtctgaggatgttccagtagaccgtcccatgcaaataagttctgttgtgcagaatcgtggctcaatccctctattctggtcacaggagacctcacggatgaaagttaagcctgatatagtattgtcaaaaagggacctgaactatgaggcaactagagttcactttgaaaatcttgtggagcgttatggagtccccatcattattctgaacttgatcaagaccaacgagaggaaacccagggagtcgattctccgggcagagtttgctaatgcaattgactttataaacaaagatctgccggaagaaaatcggcttagattcctccactgggacttgcacaaacattttcacagcaaaacagaaaatgtattggcacttcttggaaaagtagctgcctgtgctttgatgctaacaggtttcttttattatcaacttacaccagcaatgaagcttgagggttatatgagcttgtcttcgtctgatgccgacacgtctccacataatagttctgatgatgatagtagggattatgactcattagagaagaattgccgcccaagtaagaatgttgcaaatggtgattatgatgtcaagcctagcaggctccagagtggagtgctgcggaccaactgcatagattgccttgatcgtacaaatgttgcccaatatgcatatggttgggctgctctagggcaacagcttcatgctttaggaattagagatgctccaacaatagaacttgatgatcctttgtctagtactttaatggggttatacgagagaatgggagacacactagcttatcaatatggtggatctgcagcccacaataaggtttttagtgaaaggcgaggccagtggagagcagcaacccagtcacaagagttcttgaggactctgcaacgttattataataacgcatatatggatgcggataaacaagatgccattaatatatttcttggtactttccggcctgaacaagggagccaggcggtttgggagttgcgttcagattcccactctaatggacgaagtggagagataagcatgggggaagatgaaaagtttcttgtaaagaggtgcttatcagatgggaatattctccatgaaagtcacactccgatgtctgcaatgagtagaaagaatgaaagcatatcacatagaggttttgtgtcgtcacaccaagtgactcgtactcatataatttcagaatcatcaccagatatgccagctgccggtgatgtaacattatcgaggtgtactccgtcaatgcctagcacacatttttttggagatgtccaaaaagttcaacataatggtagtagctccatttacttgtccgagcaagaagatatgtctagtgtctcaaatttcgttgatattgagtggctttcgtcgtcagaaaatctatgtgagaacgatcacttgtccaggccgtcagcgcttacaatatattcaaccgcagagacgtcttcatcagagaatatcatcactgaagtaaaacaattgacgccagctatgagagagagtggatcaagcagcaggaagggaaaagaaccagtggaaaccgaactgtctgtacacacaaagattcgcgatgatttcccagatagcttcaaacaatgggtagcatacggggaagcactctgccattgaagatctctcaactttccatttccaacaaagaacatactttgctttcaccaaacttaaaagtcttctgaacatttgggtataacggtgcaaacatggagaagcgactggtggaaagatcctcagtaccatgtatatgaggcttcacggtgacgaccgaacggtcaaaagagatagaactattaagaggagcaaatactaaataagctgagaagtttgagtttgcagtcttgcagagaaaacgaaaatttcatctttatggagagaagaaattaaacttgtgataatctgagacttttgttagggtctttttttggggggtttgaagtctgttgtaaatatctgtatcatttgttaatccatctcgtaaggtctttactattcg

SEQ ID NO: 77221 - protein, 831 aa, Arabidopsis thaliana
  peptide (1)..(831): Ceres Seq. ID no. 12562003
MTSSPSVENGGSGSSGSSALLGCMQQFKLFETQANFYMIGWNGSGVYRILKIDRLEASELNLREDSTAYTKKECYELLKRIHEGNKATGGLKLVTVCYGIIGFIKFLGPYYMLLITERREIGEICGHIVYEVSKSDMIALQHSSVLCNTANLRDENRYKRLLCMVDLTKDFFFSYSYNIMRSFQKNICDHESGGTLYKKMFVWNEFLTRGTRHHLRNTLWTVALVYGFFKQTILSEAGRNFKLTLIARRSRHNAGTRYLKRGINESGNVANDVETEQIVSEDVPVDRPMQISSVVQNRGSIPLFWSQETSRMKVKPDIVLSKRDLNYEATRVHFENLVERYGVPIIILNLIKTNERKPRESILRAEFANAIDFINKDLPEENRLRFLHWDLHKHFHSKTENVLALLGKVAACALMLTGFFYYQLTPAMKLEGYMSLSSSDADTSPHNSSDDDSRDYDSLEKNCRPSKNVANGDYDVKPSRLQSGVLRTNCIDCLDRTNVAQYAYGWAALGQQLHALGIRDAPTIELDDPLSSTLMGLYERMGDTLAYQYGGSAAHNKVFSERRGQWRAATQSQEFLRTLQRYYNNAYMDADKQDAINIFLGTFRPEQGSQAVWELRSDSHSNGRSGEISMGEDEKFLVKRCLSDGNILHESHTPMSAMSRKNESISHRGFVSSHQVTRTHIISESSPDMPAAGDVTLSRCTPSMPSTHFFGDVQKVQHNGSSSIYLSEQEDMSSVSNFVDIEWLSSSENLCENDHLSRPSALTIYSTAETSSSENIITEVKQLTPAMRESGSSSRKGKEPVETELSVHTKIRDDFPDSFKQWVAYGEALCH

SEQ ID NO: 77222 - protein, 808 aa, Arabidopsis thaliana
  peptide (1)..(808): Ceres Seq. ID no. 12562004
MQQFKLFETQANFYMIGWNGSGVYRILKIDRLEASELNLREDSTAYTKKECYELLKRIHEGNKATGGLKLVTVCYGIIGFIKFLGPYYMLLITERREIGEICGHIVYEVSKSDMIALQHSSVLCNTANLRDENRYKRLLCMVDLTKDFFFSYSYNIMRSFQKNICDHESGGTLYKKMFVWNEFLTRGTRHHLRNTLWTVALVYGFFKQTILSEAGRNFKLTLIARRSRHNAGTRYLKRGINESGNVANDVETEQIVSEDVPVDRPMQISSVVQNRGSIPLFWSQETSRMKVKPDIVLSKRDLNYEATRVHFENLVERYGVPIIILNLIKTNERKPRESILRAEFANAIDFINKDLPEENRLRFLHWDLHKHFHSKTENVLALLGKVAACALMLTGFFYYQLTPAMKLEGYMSLSSSDADTSPHNSSDDDSRDYDSLEKNCRPSKNVANGDYDVKPSRLQSGVLRTNCIDCLDRTNVAQYAYGWAALGQQLHALGIRDAPTIELDDPLSSTLMGLYERMGDTLAYQYGGSAAHNKVFSERRGQWRAATQSQEFLRTLQRYYNNAYMDADKQDAINIFLGTFRPEQGSQAVWELRSDSHSNGRSGEISMGEDEKFLVKRCLSDGNILHESHTPMSAMSRKNESISHRGFVSSHQVTRTHIISESSPDMPAAGDVTLSRCTPSMPSTHFFGDVQKVQHNGSSSIYLSEQEDMSSVSNFVDIEWLSSSENLCENDHLSRPSALTIYSTAETSSSENIITEVKQLTPAMRESGSSSRKGKEPVETELSVHTKIRDDFPDSFKQWVAYGEALCH

SEQ ID NO: 77223 - protein, 794 aa, Arabidopsis thaliana
  peptide (1)..(794): Ceres Seq. ID no. 12562005
MIGWNGSGVYRILKIDRLEASELNLREDSTAYTKKECYELLKRIHEGNKATGGLKLVTVCYGIIGFIKFLGPYYMLLITERREIGEICGHIVYEVSKSDMIALQHSSVLCNTANLRDENRYKRLLCMVDLTKDFFFSYSYNIMRSFQKNICDHESGGTLYKKMFVWNEFLTRGTRHHLRNTLWTVALVYGFFKQTILSEAGRNFKLTLIARRSRHNAGTRYLKRGINESGNVANDVETEQIVSEDVPVDRPMQISSVVQNRGSIPLFWSQETSRMKVKPDIVLSKRDLNYEATRVHFENLVERYGVPIIILNLIKTNERKPRESILRAEFANAIDFINKDLPEENRLRFLHWDLHKHFHSKTENVLALLGKVAACALMLTGFFYYQLTPAMKLEGYMSLSSSDADTSPHNSSDDDSRDYDSLEKNCRPSKNVANGDYDVKPSRLQSGVLRTNCIDCLDRTNVAQYAYGWAALGQQLHALGIRDAPTIELDDPLSSTLMGLYERMGDTLAYQYGGSAAHNKVFSERRGQWRAATQSQEFLRTLQRYYNNAYMDADKQDAINIFLGTFRPEQGSQAVWELRSDSHSNGRSGEISMGEDEKFLVKRCLSDGNILHESHTPMSAMSRKNESISHRGFVSSHQVTRTHIISESSPDMPAAGDVTLSRCTPSMPSTHFFGDVQKVQHNGSSSIYLSEQEDMSSVSNFVDIEWLSSSENLCENDHLSRPSALTIYSTAETSSSENIITEVKQLTPAMRESGSSSRKGKEPVETELSVHTKIRDDFPDSFKQWVAYGEALCH

SEQ ID NO: 77224 - DNA, 1157 bp, Arabidopsis thaliana
  misc_feature (1)..(1157): Ceres Seq. ID no. 12562035
  misc_feature (1)..(1157): Ortholog of  Ceres SEQ ID NO 15179622 as cited in SEQ ID NO 61057
gtatcaggtgctctgctccacttacctttaatcttcaatcaacggtactctcaggaacaggaatcagatcgagcaatgctcaggttaatcgttaattaccctctgattcccaagatatcccaccgggtttgtagtaacagtagtagtaagctcgggagttactatgattcttcgtcgatcataaaatatggcggaatcagcgatgttgttggtaagaagcaggagctttttctaagtgtttcggtgaaagcagtggaagacaaaggtaacaatggaggtggaagcatgagtttctcgggtcaaagctgggatcctagttccgagattgaagttccttcagaccaaagacccgtgaatgagtattcgtctctaaaggaaggaatgttgtattcatggggagaattgggtccaagcgaattctttattcgtctaggtggtctttggttggtcactttcactgttcttggagttcctgttgcagctgctagctttaatccttccagagagcctttgagatttattctagctgcagggactggaactttatttctcgtttctttgattgtcttgagaatttatctggggtggagctatgttggagatagactactttctgcagttataccttacgaagagagtggatggtatgatggacaaatgtgggtcaaaccacctgaggtgttggctcgcgacaggttgttgggttcttacaaggtgaagccagtgatcaagatgctcaaacaaacattaatcggaacaggagctttactcgtttcagcattcgtgctattcgttttcgcaacaccagtcgaggatttctttaaaaccactctaggatctacagaaaaccaaccagaagtttccatttcaagaaccagcaacaagttcaatataagaaaagaacaattgcttcgactacccgtagatgttgtgactgacgatgatctggcagcagccgcggctgaggctgcggatggaagacctgtctattgcagagaccggtactaccgtgcattagcaggtggtcaatactgcaaatgggaagatcttgttaaatagttgtcacactaatagaataccaacacacatactacagtatgtaatttttgcttaaaatggctttaaaagcctcatgaattatccactcattcatcact

SEQ ID NO: 77225 - protein, 352 aa, Arabidopsis thaliana
  peptide (1)..(352): Ceres Seq. ID no. 12562036
VSGALLHLPLIFNQRYSQEQESDRAMLRLIVNYPLIPKISHRVCSNSSSKLGSYYDSSSIIKYGGISDVVGKKQELFLSVSVKAVEDKGNNGGGSMSFSGQSWDPSSEIEVPSDQRPVNEYSSLKEGMLYSWGELGPSEFFIRLGGLWLVTFTVLGVPVAAASFNPSREPLRFILAAGTGTLFLVSLIVLRIYLGWSYVGDRLLSAVIPYEESGWYDGQMWVKPPEVLARDRLLGSYKVKPVIKMLKQTLIGTGALLVSAFVLFVFATPVEDFFKTTLGSTENQPEVSISRTSNKFNIRKEQLLRLPVDVVTDDDLAAAAAEAADGRPVYCRDRYYRALAGGQYCKWEDLVK

SEQ ID NO: 77226 - protein, 327 aa, Arabidopsis thaliana
  peptide (1)..(327): Ceres Seq. ID no. 12562037
MLRLIVNYPLIPKISHRVCSNSSSKLGSYYDSSSIIKYGGISDVVGKKQELFLSVSVKAVEDKGNNGGGSMSFSGQSWDPSSEIEVPSDQRPVNEYSSLKEGMLYSWGELGPSEFFIRLGGLWLVTFTVLGVPVAAASFNPSREPLRFILAAGTGTLFLVSLIVLRIYLGWSYVGDRLLSAVIPYEESGWYDGQMWVKPPEVLARDRLLGSYKVKPVIKMLKQTLIGTGALLVSAFVLFVFATPVEDFFKTTLGSTENQPEVSISRTSNKFNIRKEQLLRLPVDVVTDDDLAAAAAEAADGRPVYCRDRYYRALAGGQYCKWEDLVK

SEQ ID NO: 77227 - protein, 257 aa, Arabidopsis thaliana
  peptide (1)..(257): Ceres Seq. ID no. 12562038
MSFSGQSWDPSSEIEVPSDQRPVNEYSSLKEGMLYSWGELGPSEFFIRLGGLWLVTFTVLGVPVAAASFNPSREPLRFILAAGTGTLFLVSLIVLRIYLGWSYVGDRLLSAVIPYEESGWYDGQMWVKPPEVLARDRLLGSYKVKPVIKMLKQTLIGTGALLVSAFVLFVFATPVEDFFKTTLGSTENQPEVSISRTSNKFNIRKEQLLRLPVDVVTDDDLAAAAAEAADGRPVYCRDRYYRALAGGQYCKWEDLVK

SEQ ID NO: 77228 - DNA, 1499 bp, Arabidopsis thaliana
  misc_feature (1)..(1499): Ceres Seq. ID no. 12562043
  misc_feature (1)..(1499): Ortholog of  Ceres SEQ ID NO 13593987 as cited in SEQ ID NO 54961
agattcgttttatttttcaatcgtttcaatttctaaaattctcctctctcaacgcaatcaccaaatccaaatttagggtttcttttctctttctgcgatcgatctctgaaaactcataactgttgtttaatcgtgaagatggcatcaaacggatctttctctgctcagagaaacgcaaacgctagaacaacgatgaagagaagaagcgacaatcgcggttacggtggcggaatcggaggttatcaagaggagacgaaccgttacgcgccgccgcaaaaacgtttcagatcacaagcgcaacagcaattccgatctggtcataatcctctgtatcatcatcatggtagtaataataataacgtgtctagggtttcttctcaatcatataacaattgcggtgttgatgtgattgcttctaattcaagttttgcattacgtaacaatgattctaacaccaacaattatcagaaaccctttgttgctggttatggaaaccctaatccccaaattgttcctcttccattaccttatcgtaagcttgatgacaatctctctttagattcgttacctgattgggttccgaattcaagaaccctaactccgaattatcctgttaggtcatcgaattttgtaccaaacactcctgtttttacgaatgttcaaaatccgatgaatcattcgaacatggtttcagttgtgtctcaatctatgcatcaaccaattgttttgagcaaagaattgactgatttgcttagtcttcttaacaatgagaaagagaagaaaactttagaagcaagtaatagtgattctttgcctgttggattaagctttgataatccatcgtcacttaatgttcgacatgaatctgtgattaagtctctgtattctgatatgccgagacaatgttcatcgtgtgggttgagattcaagtgtcaagaagagcatagtaaacacatggattggcatgtaaggaagaacaggtcggtgaaaaccactacaagactgggtcagcaaccgaagaaatcgaggggatggttagcaagtgcatctttatggctttgtgcagcgacgggaggagagacggtagaagtagcatcttttggaggagaaatgcagaagaagaaaggaaaggacgaagaaccaaaacaactcatggtgcctgcggatgaagatcagaagaattgcgcattatgcgtagagccgtttgaagagttctttagccatgaagatgatgattggatgtataaagatgcagtctacttaaccaagaatggtcgtatagttcatgttaagtgtatgcctgaaccccgacctgctaaggatttgagagagccttcgagggtaatgtctgttacagttccatcggttgcgaaagctatagcctgctgattgagatttttaagatctctgttttagtcattcgtttttttaagtaatgtactttacttgaacaagttgtaacacaaatacagttctatcaattgaatctcctattttac

SEQ ID NO: 77229 - protein, 416 aa, Arabidopsis thaliana
  peptide (1)..(416): Ceres Seq. ID no. 12562044
MASNGSFSAQRNANARTTMKRRSDNRGYGGGIGGYQEETNRYAPPQKRFRSQAQQQFRSGHNPLYHHHGSNNNNVSRVSSQSYNNCGVDVIASNSSFALRNNDSNTNNYQKPFVAGYGNPNPQIVPLPLPYRKLDDNLSLDSLPDWVPNSRTLTPNYPVRSSNFVPNTPVFTNVQNPMNHSNMVSVVSQSMHQPIVLSKELTDLLSLLNNEKEKKTLEASNSDSLPVGLSFDNPSSLNVRHESVIKSLYSDMPRQCSSCGLRFKCQEEHSKHMDWHVRKNRSVKTTTRLGQQPKKSRGWLASASLWLCAATGGETVEVASFGGEMQKKKGKDEEPKQLMVPADEDQKNCALCVEPFEEFFSHEDDDWMYKDAVYLTKNGRIVHVKCMPEPRPAKDLREPSRVMSVTVPSVAKAIAC

SEQ ID NO: 77230 - protein, 398 aa, Arabidopsis thaliana
  peptide (1)..(398): Ceres Seq. ID no. 12562045
MKRRSDNRGYGGGIGGYQEETNRYAPPQKRFRSQAQQQFRSGHNPLYHHHGSNNNNVSRVSSQSYNNCGVDVIASNSSFALRNNDSNTNNYQKPFVAGYGNPNPQIVPLPLPYRKLDDNLSLDSLPDWVPNSRTLTPNYPVRSSNFVPNTPVFTNVQNPMNHSNMVSVVSQSMHQPIVLSKELTDLLSLLNNEKEKKTLEASNSDSLPVGLSFDNPSSLNVRHESVIKSLYSDMPRQCSSCGLRFKCQEEHSKHMDWHVRKNRSVKTTTRLGQQPKKSRGWLASASLWLCAATGGETVEVASFGGEMQKKKGKDEEPKQLMVPADEDQKNCALCVEPFEEFFSHEDDDWMYKDAVYLTKNGRIVHVKCMPEPRPAKDLREPSRVMSVTVPSVAKAIAC

SEQ ID NO: 77231 - protein, 239 aa, Arabidopsis thaliana
  peptide (1)..(239): Ceres Seq. ID no. 12562046
MNHSNMVSVVSQSMHQPIVLSKELTDLLSLLNNEKEKKTLEASNSDSLPVGLSFDNPSSLNVRHESVIKSLYSDMPRQCSSCGLRFKCQEEHSKHMDWHVRKNRSVKTTTRLGQQPKKSRGWLASASLWLCAATGGETVEVASFGGEMQKKKGKDEEPKQLMVPADEDQKNCALCVEPFEEFFSHEDDDWMYKDAVYLTKNGRIVHVKCMPEPRPAKDLREPSRVMSVTVPSVAKAIAC

SEQ ID NO: 77232 - DNA, 1680 bp, Arabidopsis thaliana
  misc_feature (1)..(1680): Ceres Seq. ID no. 12562049
  misc_feature (1)..(1680): Ortholog of  Ceres SEQ ID NO 14314925 as cited in SEQ ID NO 57985
  misc_feature (1)..(1680): Ortholog of  Ceres SEQ ID NO 13591365 as cited in SEQ ID NO 62720
atcgcttcttcctcctcctgcttcttcaactccaaacctcaccctctcaatttccctccttcgccggtccacggcgtcatttcacggtggcgcttcacctctctccgtcacctactctcctaaaaatccaatctttacaaaatccagaccaatatagaaatgactttaatcgcttctctgtctctcccaccaccagctatacaaagacaatcactttctgaatttcataatcttcccgctaaatctcaatccttcaattgtcaattccggtcttctagttcacctttatcttctctccattcttcatcgcttagtaactttctagattttagactaaggcggagaaacagcggattggttccagtggtggcgtgttcaacgacgccgtttatgggcagagttggattacattggagagatgggaatatgtctctgttatcgttttgtggtggaactgatgttacagagaaagctgattcgtctcagttttggtctgctttgcttccatttgttgttgctctcactgccgttgctgctctctcttacccacctagtttcacttgggtatctaaagacctctatgctcctgctcttggagggattatgttatctattggaattcagctttcagttgacgattttgctcttgcattcaaaagaccagtgccgttatctgttgggtttgttgctcagtacgttttgaaaccgcttctcggggttttagttgctaatgcatttgggatgccgaggaccttctacgctggttttatactcacgtgttgtgtggctggggctcagttgtctagttacgcgagttctctgagtaaagctgatgtggccatgagcattcttctcactagttctacaactattgcttctgtaatctttacacctttgcttagtggtcttctaattggatcagtagttcctgttgatgcagttgccatgtcgaagtctatacttcaggtggtacttgttccaatcactcttggccttgtgttaaatacttatgcgaagcctgtggtcactcttcttcaacctgtgatgccgtttgttgctatggtatgcacttcgttgtgcattggaagcccactttcgattaatcgcagtcagattctgtcagctgaaggtcttggattgattgttccaattgttacattccatgccgtagcatttgccttaggatattggttctctaagatcccaggcttacgacaagaggaagaagtaagccggactatctccctttgcacgggaatgcaaagctccacattagccgggcttcttgcaagccagttccttggtagcagccaagccgtgccagcagcttgctctgtagttgtaatggccataatgggtctatgccttgcctctttctggggcaatgggtttcgaatcagggacgttctatcgctatcaacaccgcaaagcactggctacaccgctgaatcatgagcaagaattcagcagcaacaaacctgtaaagcaagggaaccacaccttgggacattgattgcacaagtactttccggtttttaatttgatgtacaaacagcatttgggaagtaaagataaggtttagaggggatggtataggtagtgtagacaaaatggtattcatcaatcatcttgtatgtagtctgctaattcatggtataaaaggttatcttttgttgcctc

SEQ ID NO: 77233 - protein, 431 aa, Arabidopsis thaliana
  peptide (1)..(431): Ceres Seq. ID no. 12562050
MTLIASLSLPPPAIQRQSLSEFHNLPAKSQSFNCQFRSSSSPLSSLHSSSLSNFLDFRLRRRNSGLVPVVACSTTPFMGRVGLHWRDGNMSLLSFCGGTDVTEKADSSQFWSALLPFVVALTAVAALSYPPSFTWVSKDLYAPALGGIMLSIGIQLSVDDFALAFKRPVPLSVGFVAQYVLKPLLGVLVANAFGMPRTFYAGFILTCCVAGAQLSSYASSLSKADVAMSILLTSSTTIASVIFTPLLSGLLIGSVVPVDAVAMSKSILQVVLVPITLGLVLNTYAKPVVTLLQPVMPFVAMVCTSLCIGSPLSINRSQILSAEGLGLIVPIVTFHAVAFALGYWFSKIPGLRQEEEVSRTISLCTGMQSSTLAGLLASQFLGSSQAVPAACSVVVMAIMGLCLASFWGNGFRIRDVLSLSTPQSTGYTAES

SEQ ID NO: 77234 - protein, 354 aa, Arabidopsis thaliana
  peptide (1)..(354): Ceres Seq. ID no. 12562051
MGRVGLHWRDGNMSLLSFCGGTDVTEKADSSQFWSALLPFVVALTAVAALSYPPSFTWVSKDLYAPALGGIMLSIGIQLSVDDFALAFKRPVPLSVGFVAQYVLKPLLGVLVANAFGMPRTFYAGFILTCCVAGAQLSSYASSLSKADVAMSILLTSSTTIASVIFTPLLSGLLIGSVVPVDAVAMSKSILQVVLVPITLGLVLNTYAKPVVTLLQPVMPFVAMVCTSLCIGSPLSINRSQILSAEGLGLIVPIVTFHAVAFALGYWFSKIPGLRQEEEVSRTISLCTGMQSSTLAGLLASQFLGSSQAVPAACSVVVMAIMGLCLASFWGNGFRIRDVLSLSTPQSTGYTAES

SEQ ID NO: 77235 - protein, 342 aa, Arabidopsis thaliana
  peptide (1)..(342): Ceres Seq. ID no. 12562052
MSLLSFCGGTDVTEKADSSQFWSALLPFVVALTAVAALSYPPSFTWVSKDLYAPALGGIMLSIGIQLSVDDFALAFKRPVPLSVGFVAQYVLKPLLGVLVANAFGMPRTFYAGFILTCCVAGAQLSSYASSLSKADVAMSILLTSSTTIASVIFTPLLSGLLIGSVVPVDAVAMSKSILQVVLVPITLGLVLNTYAKPVVTLLQPVMPFVAMVCTSLCIGSPLSINRSQILSAEGLGLIVPIVTFHAVAFALGYWFSKIPGLRQEEEVSRTISLCTGMQSSTLAGLLASQFLGSSQAVPAACSVVVMAIMGLCLASFWGNGFRIRDVLSLSTPQSTGYTAES

SEQ ID NO: 77236 - DNA, 1449 bp, Arabidopsis thaliana
  misc_feature (1)..(1449): Ceres Seq. ID no. 12562301
  misc_feature (1)..(1449): Ortholog of  Ceres SEQ ID NO 12578784 as cited in SEQ ID NO 20729
  misc_feature (1)..(1449): Ortholog of  Ceres SEQ ID NO 13658847 as cited in SEQ ID NO 66674
ctccgatgtttcaaaaacaaagtcgattacgctagaatccatggtcacgacatcttctacagcaattctcttcttcatccgaagatgaattcgtattgggcgaaacttccggtggttaaagctgcgatgcttgctcacccatttatggattgaagctttagagagaaaatgggtgatgaggcagagatcaaggaacatttaaagccacaagcttcatctgaaacaatagacaagaaacataatgtgaaagggaagaggttatggcagaaagtcaagtatcaattggtggagtttcattcattgcctgcttatttaagagacaatgagtacatcattggtcattaccgatccgaatggccgatcaaacagattcttctcagcatctttaccattcataatgagactttgaatgtttggacgcatttgattgggtttttcctgtttttggcactcactatatacactgcaacgaaagtaccgagtgtcgtggatcttcattcgcttcaacaccgtttacccgatttgttgaggaaaacagatctccacaaacttcattctgagctcatgtctcgccttccttctagtccatctagttggcatgtgatggaccttctttataactgtttgcctgaaagattttctcatggcaactacactgacatgtgtgttctgcattctgtgagggaagatcttgcaaacttgatagctcctttgatcttcaggccaattactcgatggccgttttatgcatttctaggtggtgctatattctgtctattagcaagcagcacgtgccacctcctctcatgtcactccgagcgagtctcctacataatgcttaggcttgattacgccggcatcgcagctctaatagcgacttccttctaccctccggtttattactccttcatgtgtgatcctttcttctgcaacctctacttaggattcataaccatcttaggaatcgccactgtgcttgtttctctcctcccggttttccaaagcctggagtttcgggtggtgagggcgtctctgttctttggaatgggattctctggcttagctccgattcttcacaagctgatcatcttttgggaccaacctgaagcccttcacatgacaggttatgagattttgatgggtttgctttatgggttaggagctgtggtttatgcaactaggatcccagagagatggatgccgggtaaattcgatatagcaggacatagccatcagttgtttcatgttctggttgttgctggtgcgttaacgcactatagagctgggctatgagagatattgaaggatgttgaagatgaagattgaagattagatggaatctttgatgttttaaatcttgtttgtagtagcttcatataaaagttggattatgtaaagtcttatctgtaatcaaacgtttaattgtttcttttattcaacaaaggattc

SEQ ID NO: 77237 - protein, 374 aa, Arabidopsis thaliana
  peptide (1)..(374): Ceres Seq. ID no. 12562302
MGDEAEIKEHLKPQASSETIDKKHNVKGKRLWQKVKYQLVEFHSLPAYLRDNEYIIGHYRSEWPIKQILLSIFTIHNETLNVWTHLIGFFLFLALTIYTATKVPSVVDLHSLQHRLPDLLRKTDLHKLHSELMSRLPSSPSSWHVMDLLYNCLPERFSHGNYTDMCVLHSVREDLANLIAPLIFRPITRWPFYAFLGGAIFCLLASSTCHLLSCHSERVSYIMLRLDYAGIAALIATSFYPPVYYSFMCDPFFCNLYLGFITILGIATVLVSLLPVFQSLEFRVVRASLFFGMGFSGLAPILHKLIIFWDQPEALHMTGYEILMGLLYGLGAVVYATRIPERWMPGKFDIAGHSHQLFHVLVVAGALTHYRAGL

SEQ ID NO: 77238 - protein, 242 aa, Arabidopsis thaliana
  peptide (1)..(242): Ceres Seq. ID no. 12562303
MSRLPSSPSSWHVMDLLYNCLPERFSHGNYTDMCVLHSVREDLANLIAPLIFRPITRWPFYAFLGGAIFCLLASSTCHLLSCHSERVSYIMLRLDYAGIAALIATSFYPPVYYSFMCDPFFCNLYLGFITILGIATVLVSLLPVFQSLEFRVVRASLFFGMGFSGLAPILHKLIIFWDQPEALHMTGYEILMGLLYGLGAVVYATRIPERWMPGKFDIAGHSHQLFHVLVVAGALTHYRAGL

SEQ ID NO: 77239 - protein, 229 aa, Arabidopsis thaliana
  peptide (1)..(229): Ceres Seq. ID no. 12562304
MDLLYNCLPERFSHGNYTDMCVLHSVREDLANLIAPLIFRPITRWPFYAFLGGAIFCLLASSTCHLLSCHSERVSYIMLRLDYAGIAALIATSFYPPVYYSFMCDPFFCNLYLGFITILGIATVLVSLLPVFQSLEFRVVRASLFFGMGFSGLAPILHKLIIFWDQPEALHMTGYEILMGLLYGLGAVVYATRIPERWMPGKFDIAGHSHQLFHVLVVAGALTHYRAGL

SEQ ID NO: 77240 - DNA, 1510 bp, Arabidopsis thaliana
  misc_feature (1)..(1510): Ceres Seq. ID no. 12562660
  misc_feature (1)..(1510): Ortholog of  Ceres SEQ ID NO 12614942 as cited in SEQ ID NO 68635
atcagcatcactaaactcgaaccctaaagaaaaacaaaaatggctgccatagcttctactctctctctttcttcaaccaaacctcagagacttttcgattcttccttccatggctcagccatctccgcagctcctatctccatcggtctcaaaccacgatctttctccgttcgcgccacaaccgctggttacgacttgaacgctttcacgttcgacccgatcaaggaatcgatcgtgtcacgtgagatgacgagaaggtacatgacggatatgatcacttatgctgagactgatgtcgtcgtcgttggtgctggatctgctggtttatctgctgcttatgagatcagtaagaaccctaatgttcaagttgccattattgagcaatctgttagtcctggtggtggtgcttggctcggtggtcagcttttctccgccatgattgttcgcaaaccagctcacttgttccttgacgagattggtgtggcttacgatgagcaagacacctacgttgtggttaagcacgcggctctgttcacatcaaccatcatgagcaagcttttggctcgtcctaatgtgaagctcttcaacgctgtggctgctgaggatttgattgtgaaaggaaacagagttggtggtgtggtgactaactgggctcttgtggctcagaaccaccacacacaatcgtgtatggaccctaatgttatggaagcgaagattgtggttagctcttgtggtcatgatggtccttttggagctactggtgttaagaggttgaagagtattgggatgattgatcatgttcctgggatgaaagctttggacatgaacactgctgaggacgctattgtgaggttgaccagagaggttgttcctggtatgattgttaccggtatggaagttgctgagatcgatggtgcaccgagaatgggaccaacttttggtgctatgatgatatcgggacaaaaggcgggacaacttgctcttaaggctttggggctaccgaatgctattgacggaactctcgttggaaacctaagcccggagctggtcttagccgcagcagattcagctgaaaccgtagatgcttaaaatcaaaaggttttaacgttaagaaaagtttcccttgatccttcggatgttgaaggagtgcaataaaaggagtttaggtgtttaatatgtcttgaacttttctggtgtctttgtttctctcttctgaacttctgtgtaaaatatcgtatccgttcattcgtaatgcgtatgttctcgttcttctccttctttatggctctagtacaagcagctttctcgttgtcgttggcaatacaaaatctgtctaaatttgagggatgagattagtgttggatgtcggattcttgtcttcaattctgattcttatccttgaagaaattatgtatagatagagctattcaatgtctatagtttctctgctgatgaaagaacgaagagttttatgattttagattcagagaacagaggaaaactgtgaaat

SEQ ID NO: 77241 - protein, 349 aa, Arabidopsis thaliana; identical to SEQ ID NO: 76367
  peptide (1)..(349): Ceres Seq. ID no. 12562661

SEQ ID NO: 77242 - protein, 280 aa, Arabidopsis thaliana; identical to SEQ ID NO: 76368
  peptide (1)..(280): Ceres Seq. ID no. 12562662

SEQ ID NO: 77243 - protein, 275 aa, Arabidopsis thaliana
  peptide (1)..(275): Ceres Seq. ID no. 12562663
MTDMITYAETDVVVVGAGSAGLSAAYEISKNPNVQVAIIEQSVSPGGGAWLGGQLFSAMIVRKPAHLFLDEIGVAYDEQDTYVVVKHAALFTSTIMSKLLARPNVKLFNAVAAEDLIVKGNRVGGVVTNWALVAQNHHTQSCMDPNVMEAKIVVSSCGHDGPFGATGVKRLKSIGMIDHVPGMKALDMNTAEDAIVRLTREVVPGMIVTGMEVAEIDGAPRMGPTFGAMMISGQKAGQLALKALGLPNAIDGTLVGNLSPELVLAAADSAETVDA

SEQ ID NO: 77244 - DNA, 1973 bp, Arabidopsis thaliana
  misc_feature (1)..(1973): Ceres Seq. ID no. 12562687
  misc_feature (1)..(1973): Ortholog of  Ceres SEQ ID NO 13582285 as cited in SEQ ID NO 59817
attttaaatagtctctttcgtttatgtatatcacaaatacatatcacaacgttcatatttgcaatgtgccaaaatcctccacgtgttaaatccatttgttcatagtttctcgttacaagacaacaaatggtatcaatgtccacggaaaaattgcatacttgcacgcaatctcttcttcttcttcttcgttcttctcgtagcttgaaataagattcatcagaagagtaaataaacatcaaaatccaacaaaccaaactagaaaaatgtcagtagttttactctcttctacttctgcaacaatcaccaaatcccaatccaaaaagattccctttttatctcccaccacaaaattcccattaaaggtctcaatttctccatcaagatcgaaacttttccacaaccctttacgcgtggcggcgccgccgtctgtacccacttcggattcgacggaggagaagcggatcgaagaagaatacggcggagataaggaagaagaagggtctgagtttaagtggagagatcattggtatccagtttctttggttgaggatttggatccgaatgtgccaaccccgttccagctcttgggtcgagaccttgtactctggtttgatcggaatgatcagaaatgggcagcctttgatgatctctgccctcaccggctcgctcctttatctgaaggaaggttggatgagaatggacacttgcaatgttcgtatcatggatggtcatttggtgggtgtggatcttgcactaggattcctcaggctgctacttcaggtcctgaagctcgtgctgttaaatccccgagagcttgtgctattaagttcccgacaatggtgtctcaaggtcttctctttgtgtggcctgatgaaaatggttgggatagagccaattcaattgaaccccctaggttgccggatgatttcgataaaccggaattttcgacggtgacaattcaaagggatcttttctatggatatgatactctcatggaaaatgtatctgatccttcccatatagattttgctcatcacaaggttacaggaagaagagacagagccaaaccattgccgttcaaggtggagtcaagtgggccttggggtttccaaggtgcgaatgatgacagtccaaggataaccgcaaaatttgttgctccgtgctattctatgaacaaaattgagttagatgcgaaactaccaatcgtcggtaatcaaaaatgggtcatttggatttgctcattcaatataccaatggctccaggaaagacccgttccatcgtttgcagcgcccgtaacttctttcagttctctgtaccaggaccagcttggtggcaggttgtaccaagatggtatgaacactggacttcgaacttagtctatgacggagacatgatcgtacttcaaggacaagagaaagtattcctcgctaaatcaatggagtcaccagactacgacgtgaacaaacagtacacaaagctcacattcactccaacccaggcagaccgttttgttctagcattcagaaactggctcagacggcatggtaagagtcagcctgaatggttcggctccaccccgtctaaccaacctctcccttccactgtcttaaccaagcgtcagatgctagatagatttgatcagcatacacaagtatgctcttcctgcaaaggagcttacaacagtttccaaatcctcaagaagtttctcgttggcgcgacggttttctgggccgccacggctggtgttccttctgatgttcagattcgactggttcttgctggtttatcactgatatcagctgcttctgcatatgctttacatgaacaagagaagaactttgtgtttagagattatgtacattctgaaatcgagtagatttgttgtgtatatgtataatcatcatacaaagtacaaacattgtaaatcaaaatccagaggaacttttagcactataaaaccgatttaaccgtt

SEQ ID NO: 77245 - protein, 537 aa, Arabidopsis thaliana; identical to SEQ ID NO: 28578
  peptide (1)..(537): Ceres Seq. ID no. 12562688

SEQ ID NO: 77246 - protein, 346 aa, Arabidopsis thaliana; identical to SEQ ID NO: 28579
  peptide (1)..(346): Ceres Seq. ID no. 12562689

SEQ ID NO: 77247 - protein, 294 aa, Arabidopsis thaliana
  peptide (1)..(294): Ceres Seq. ID no. 12562690
MENVSDPSHIDFAHHKVTGRRDRAKPLPFKVESSGPWGFQGANDDSPRITAKFVAPCYSMNKIELDAKLPIVGNQKWVIWICSFNIPMAPGKTRSIVCSARNFFQFSVPGPAWWQVVPRWYEHWTSNLVYDGDMIVLQGQEKVFLAKSMESPDYDVNKQYTKLTFTPTQADRFVLAFRNWLRRHGKSQPEWFGSTPSNQPLPSTVLTKRQMLDRFDQHTQVCSSCKGAYNSFQILKKFLVGATVFWAATAGVPSDVQIRLVLAGLSLISAASAYALHEQEKNFVFRDYVHSEIE

SEQ ID NO: 77248 - DNA, 1393 bp, Arabidopsis thaliana
  misc_feature (1)..(1393): Ceres Seq. ID no. 12574182
  misc_feature (1)..(1393): Ortholog of  Ceres SEQ ID NO 14310168 as cited in SEQ ID NO 20646
aaattagtgaagacgaagaagaaggaagctatggattctgagaaggcactagagcttgtgaagcatggagctacacttctatttctcgatgttcctcaatatacactggtcggaatcgatactcagatattcgcagttggaccagctttcaaagggattaagatgatacctcctggaattcactttgtattctatagttcatcgacaagggatggtagagagttttcacccaccattggcttctttgttgatgttgccccttctcaggttattgtacgcaaatggaatcagcaagacgagtggttaaccaaagtgtctgaagaagaggaagagagatattctcaagcagtcaggtctttagagtttgacaaaaatcttggcccatacaatttaaagcaatatggggagtggaggcacttatctaactacattacaaaggatgttgttgaaaagtttgagccagttggaggagaaataacagtcacatatgaatctgctattctaaaaggtggacctaaaacggcaatggaaatagcacttgatacgcagatgaaaaaaagcaagtttacgacatcatctactgagcaacctaaagggaataggttttactacacgtctattcctcggattataaagcacaagggaatgtctggacaggagctaacctctatgaatcttgacaagactcaattgctagaaagcgtattgtcaaaagagtacaaagactcggaagacttgctacttggggagctacaattttcatttgttgcatttttgatgggacagtctcttgaatcgttcatgcagtggaagtccatagttagtcttttactgggctgcaccagtgcgccctttcagacgaggagtcagctatttacaaagttcatcaaagtcatctaccaccaactaaaatatggactacaaaaagagaatagtggtcctgagacgggcattcatgcgcttcttgatgattcttggctagcttcagatagctttctgcatttcctttgtaaggacttctttgcattagtggaagagacgtctgtagttgatggagatttattgtcatggacaaggaagttcaaagagttgcttgagaacagattaggatgggagtttcagaagaagagcgctgttgacgggatttactttgaagaagatgatgagtatgctcctgtggttgagatgttggatgaaagtcatggagaatatatggataaaaccacttagacatcgatcgatgcaggtctttgtttggagcataagaagacttgtgagcagattcttgttcaaaatttatggatgtaggttccttgtaacagaccaatttgatgaaagaaattttactttttcctgctaatgcggcagtaatagagaagaatcatattatacc

SEQ ID NO: 77249 - protein, 409 aa, Arabidopsis thaliana
  peptide (1)..(409): Ceres Seq. ID no. 12574183
KLVKTKKKEAMDSEKALELVKHGATLLFLDVPQYTLVGIDTQIFAVGPAFKGIKMIPPGIHFVFYSSSTRDGREFSPTIGFFVDVAPSQVIVRKWNQQDEWLTKVSEEEEERYSQAVRSLEFDKNLGPYNLKQYGEWRHLSNYITKDVVEKFEPVGGEITVTYESAILKGGPKTAMEIALDTQMKKSKFTTSSTEQPKGNRFYYTSIPRIIKHKGMSGQELTSMNLDKTQLLESVLSKEYKDSEDLLLGELQFSFVAFLMGQSLESFMQWKSIVSLLLGCTSAPFQTRSQLFTKFIKVIYHQLKYGLQKENSGPETGIHALLDDSWLASDSFLHFLCKDFFALVEETSVVDGDLLSWTRKFKELLENRLGWEFQKKSAVDGIYFEEDDEYAPVVEMLDESHGEYMDKTT

SEQ ID NO: 77250 - protein, 399 aa, Arabidopsis thaliana
  peptide (1)..(399): Ceres Seq. ID no. 12574184
MDSEKALELVKHGATLLFLDVPQYTLVGIDTQIFAVGPAFKGIKMIPPGIHFVFYSSSTRDGREFSPTIGFFVDVAPSQVIVRKWNQQDEWLTKVSEEEEERYSQAVRSLEFDKNLGPYNLKQYGEWRHLSNYITKDVVEKFEPVGGEITVTYESAILKGGPKTAMEIALDTQMKKSKFTTSSTEQPKGNRFYYTSIPRIIKHKGMSGQELTSMNLDKTQLLESVLSKEYKDSEDLLLGELQFSFVAFLMGQSLESFMQWKSIVSLLLGCTSAPFQTRSQLFTKFIKVIYHQLKYGLQKENSGPETGIHALLDDSWLASDSFLHFLCKDFFALVEETSVVDGDLLSWTRKFKELLENRLGWEFQKKSAVDGIYFEEDDEYAPVVEMLDESHGEYMDKTT

SEQ ID NO: 77251 - protein, 355 aa, Arabidopsis thaliana
  peptide (1)..(355): Ceres Seq. ID no. 12574185
MIPPGIHFVFYSSSTRDGREFSPTIGFFVDVAPSQVIVRKWNQQDEWLTKVSEEEEERYSQAVRSLEFDKNLGPYNLKQYGEWRHLSNYITKDVVEKFEPVGGEITVTYESAILKGGPKTAMEIALDTQMKKSKFTTSSTEQPKGNRFYYTSIPRIIKHKGMSGQELTSMNLDKTQLLESVLSKEYKDSEDLLLGELQFSFVAFLMGQSLESFMQWKSIVSLLLGCTSAPFQTRSQLFTKFIKVIYHQLKYGLQKENSGPETGIHALLDDSWLASDSFLHFLCKDFFALVEETSVVDGDLLSWTRKFKELLENRLGWEFQKKSAVDGIYFEEDDEYAPVVEMLDESHGEYMDKTT

SEQ ID NO: 77252 - DNA, 1771 bp, Arabidopsis thaliana
  misc_feature (1)..(1771): Ceres Seq. ID no. 12574205
  misc_feature (1)..(1771): Ortholog of  Ceres SEQ ID NO 14308698 as cited in SEQ ID NO 58663
gtccctttctgtctgaacctggcaagaagaaccttagcctctctttcttctttctctctctctctctctgtgttactgttctgtttcaactttactccctcagtttcagaacaattccctatctagaagagagataaaaccgagaaggttttggagatagaatcttttgttcttcttttgtccctccttgctcgatttttgttacgtgtgaagcaataaaaaaaaactgatatagctaaatcttccatccattcagaggcttctaaatctgatctgacatggaacaagtgtttgctgattggaattttgaagataattttcacatgtccactaataaaagatcaatcagaccagaagatgaattagtggagctattgtggagagatggtcaagtggttttacaaagccaagctcgtagagaaccgtcagtccaagtccaaacccacaaacaagaaaccctaagaaaacccaacaatatttttcttgacaaccaagaaacagtacaaaagcctaactacgctgctctagatgatcaagaaaccgtctcctggatacaataccctccggatgacgtcatcgaccctttcgaatccgagttctcctctcatttcttctcttcgatcgatcacctcggaggtcctgagaagccacgaacgatcgaagagacagttaagcatgaggctcaagccatggctcctcctaagtttagatcctcggttataacagtcggaccgagtcattgcggcagcaaccagtcaacaaatattcatcaggccactacacttccggtttctatgagtgatagaagcaagaacgtcgaagaaagacttgacacttcgtcaggtggctcctccggttgcagctatggaaggaacaacaaagaaaccgttagtggaacaagtgtaaccattgaccgtaaaagaaaacatgttatggatgctgatcaagaatctgtgtctcaatcagatataggtttgacctcaaccgatgatcaaaccatgggtaacaaatcgagccaacggtcaggatctactcgaagaagccgtgcagctgaagttcataatctctcagaaaggaggaggagagatcggatcaatgaaagaatgaaagctcttcaagaactcatacctcactgcagcagaataaagcttcgatattggatgaagcaattgattacttaaaatcacttcaaatgcaactccaagtgatgtggatgggaagtggaatggcggcggcggcagcagcagcagcaagtccgatgatgtttcccggggtacaatcatctccatacattaatcagatggctatgcaaagtcagatgcaattgtctcaattcccggttatgaaccggtccgctccgcagaaccatcccggtttagtatgtcaaaacccggtacagttgcagctccaagcacagaaccaaatcttatcggagcagctcgctaggtacatgggcgggattccccagatgccgccggcgggaaatcagatgcagaccgtgcaacaacaaccagcggacatgttgggatttggatctccggcgggaccgcaaagtcaactgtcggcaccggcgaccaccgacagtcttcatatgggtaaaataggctgacttggcatatagttttcctccgaaattattcttcttacagttggtgattgttatttatttttggtcgcctaagcaagcataaaagctaagtcaaatgtattatagagatctaataagttagtctcatacttataacttatttttaaacagttgaattatagt

SEQ ID NO: 77253 - protein, 300 aa, Arabidopsis thaliana; identical to SEQ ID NO: 48754
  peptide (1)..(300): Ceres Seq. ID no. 12574206

SEQ ID NO: 77254 - protein, 285 aa, Arabidopsis thaliana; identical to SEQ ID NO: 48755
  peptide (1)..(285): Ceres Seq. ID no. 12574207

SEQ ID NO: 77255 - protein, 163 aa, Arabidopsis thaliana; identical to SEQ ID NO: 48756
  peptide (1)..(163): Ceres Seq. ID no. 12574208

SEQ ID NO: 77256 - DNA, 1996 bp, Arabidopsis thaliana
  misc_feature (1)..(1996): Ceres Seq. ID no. 12574336
  misc_feature (1)..(1996): Ortholog of  Ceres SEQ ID NO 15169092 as cited in SEQ ID NO 60430
  misc_feature (1)..(1996): Ortholog of  Ceres SEQ ID NO 14303680 as cited in SEQ ID NO 66019
  misc_feature (1)..(1996): Ortholog of  Ceres SEQ ID NO 15224940 as cited in SEQ ID NO 0
gctctctcttttcttgcaaacttttgctcggaattctatgctttgctgatctattgttttctctctgcaaaagtaatgagaagctttttgctatgttaagctttagatctgctattatttgttcctttcaagattctaactttggagcaagtaagcaagtcagagagaggacaaattagctgaaatgctggagattgaaagccctacgagtctctgtttccgtacaaacactacttgtaatgctctgcttcgagagcttcagaaaatatgggttgatattggtgagagtgatgctgagaaagaccggatgctaatggaattggagaaggaatgtcttgaaatctacagaagaaaagtggacgaggctgctaattccaaggcacagcttcatcagtcattggtatcaattgaagctgaaattgcttctttactggctgctcttggagtgttcaacagccactcaccgatgaaagcaaaggaaggttcaaaatcattgaaagaaaaacttgctgctgtgaggccaatgcttgaggacttaagattgcaaaaagatgaaagaatgaagcaatttgtggatataaaagcacaaattgagaagatgagtggtgaaatatctggatacagtgaccaactcaacaaaacgatggtcggttctttggctcttgatgaacaagacctgactcttcggaagcttaacgagtatcaaacacatctccgctcgctccagaaagagaagtcggatcgtctgaacaaggttttggactatgtgaatgaggtgcacactctatgtggtgttcttggagtcgactttggtcaaactgttagtgaggttcatccgagcttacataggactgaccatgagcagtctacaaacatttctgatgatacattggatggtctacaccacatgattcataagctgaaaaccgaaaggagcgttcggtttcaaaagttaaaggatgtagcgggttcactttttgagctatggaatctaatggacacatctcaagaagaaagaacgaaatttgcaagtgtcagttatgttgtaagatcatcagaatctgatatcactgagccaaatatcctctctagtgaaacaattgaacaggtgtctgcagaagtagactgttttaataagctgaaagctagcagaatgaaggagcttgtgatgaaaagaaggactgagttagagaatctttgcagattggctcacattgaggctgacacaagcacatcgcttgagaaatcaactgctttgattgattctggattagtggacccttcagagcttcttacaaatattgaattgcatataaacaaaatcaaagaagaagcacatagccggaaagaaataatcgataggattgaccgctggttatctgcgtgcgaagaggaaaactggctagaagaatacaatcaggatgaaacccggtatagtgccggaagaggtggacatgtaaacctcaagcatgcagaacgcgcccggatcacagtaaacaagatcccatcaatggttgacaatctcatcaagaaaacacttctatgggaggacgaaacacggaaatcatttctatatgatggtgttcgattggtatccatacttgaagattataaattgacaaggaaacaacaggaagaggaaaagagacgataccgggatcaaaagaagatgcaggatctgttaataaagcggagggaatcaatttatggatcaaaaccgagtccaagaagaagcaacagtgtaagaaagaccaacggatacaatggggatgcatctgtgcctcctacgccccgcagaaactcagctggagcaacaaataacgacataatgaccaccccaagatcatactcaagccatcgccaaaacggatatttcaaggaagtaagaagactgtcaacagctcctttgaactttgtggcaataccaaaggaagactctgtctctacatacacttcggtttgcggctctgaaccagattcaccgttatataactaa

SEQ ID NO: 77257 - protein, 603 aa, Arabidopsis thaliana
  peptide (1)..(603): Ceres Seq. ID no. 12574337
MLEIESPTSLCFRTNTTCNALLRELQKIWVDIGESDAEKDRMLMELEKECLEIYRRKVDEAANSKAQLHQSLVSIEAEIASLLAALGVFNSHSPMKAKEGSKSLKEKLAAVRPMLEDLRLQKDERMKQFVDIKAQIEKMSGEISGYSDQLNKTMVGSLALDEQDLTLRKLNEYQTHLRSLQKEKSDRLNKVLDYVNEVHTLCGVLGVDFGQTVSEVHPSLHRTDHEQSTNISDDTLDGLHHMIHKLKTERSVRFQKLKDVAGSLFELWNLMDTSQEERTKFASVSYVVRSSESDITEPNILSSETIEQVSAEVDCFNKLKASRMKELVMKRRTELENLCRLAHIEADTSTSLEKSTALIDSGLVDPSELLTNIELHINKIKEEAHSRKEIIDRIDRWLSACEEENWLEEYNQDETRYSAGRGGHVNLKHAERARITVNKIPSMVDNLIKKTLLWEDETRKSFLYDGVRLVSILEDYKLTRKQQEEEKRRYRDQKKMQDLLIKRRESIYGSKPSPRRSNSVRKTNGYNGDASVPPTPRRNSAGATNNDIMTTPRSYSSHRQNGYFKEVRRLSTAPLNFVAIPKEDSVSTYTSVCGSEPDSPLYN

SEQ ID NO: 77258 - protein, 562 aa, Arabidopsis thaliana
  peptide (1)..(562): Ceres Seq. ID no. 12574338
MLMELEKECLEIYRRKVDEAANSKAQLHQSLVSIEAEIASLLAALGVFNSHSPMKAKEGSKSLKEKLAAVRPMLEDLRLQKDERMKQFVDIKAQIEKMSGEISGYSDQLNKTMVGSLALDEQDLTLRKLNEYQTHLRSLQKEKSDRLNKVLDYVNEVHTLCGVLGVDFGQTVSEVHPSLHRTDHEQSTNISDDTLDGLHHMIHKLKTERSVRFQKLKDVAGSLFELWNLMDTSQEERTKFASVSYVVRSSESDITEPNILSSETIEQVSAEVDCFNKLKASRMKELVMKRRTELENLCRLAHIEADTSTSLEKSTALIDSGLVDPSELLTNIELHINKIKEEAHSRKEIIDRIDRWLSACEEENWLEEYNQDETRYSAGRGGHVNLKHAERARITVNKIPSMVDNLIKKTLLWEDETRKSFLYDGVRLVSILEDYKLTRKQQEEEKRRYRDQKKMQDLLIKRRESIYGSKPSPRRSNSVRKTNGYNGDASVPPTPRRNSAGATNNDIMTTPRSYSSHRQNGYFKEVRRLSTAPLNFVAIPKEDSVSTYTSVCGSEPDSPLYN

SEQ ID NO: 77259 - protein, 560 aa, Arabidopsis thaliana
  peptide (1)..(560): Ceres Seq. ID no. 12574339
MELEKECLEIYRRKVDEAANSKAQLHQSLVSIEAEIASLLAALGVFNSHSPMKAKEGSKSLKEKLAAVRPMLEDLRLQKDERMKQFVDIKAQIEKMSGEISGYSDQLNKTMVGSLALDEQDLTLRKLNEYQTHLRSLQKEKSDRLNKVLDYVNEVHTLCGVLGVDFGQTVSEVHPSLHRTDHEQSTNISDDTLDGLHHMIHKLKTERSVRFQKLKDVAGSLFELWNLMDTSQEERTKFASVSYVVRSSESDITEPNILSSETIEQVSAEVDCFNKLKASRMKELVMKRRTELENLCRLAHIEADTSTSLEKSTALIDSGLVDPSELLTNIELHINKIKEEAHSRKEIIDRIDRWLSACEEENWLEEYNQDETRYSAGRGGHVNLKHAERARITVNKIPSMVDNLIKKTLLWEDETRKSFLYDGVRLVSILEDYKLTRKQQEEEKRRYRDQKKMQDLLIKRRESIYGSKPSPRRSNSVRKTNGYNGDASVPPTPRRNSAGATNNDIMTTPRSYSSHRQNGYFKEVRRLSTAPLNFVAIPKEDSVSTYTSVCGSEPDSPLYN

SEQ ID NO: 77260 - DNA, 2016 bp, Arabidopsis thaliana
  misc_feature (1)..(2016): Ceres Seq. ID no. 12574352
  misc_feature (1)..(2016): Ortholog of  Ceres SEQ ID NO 13654989 as cited in SEQ ID NO 63117
  misc_feature (1)..(2016): Ortholog of  Ceres SEQ ID NO 13655640 as cited in SEQ ID NO 63844
  misc_feature (1)..(2016): Ortholog of  Ceres SEQ ID NO 13584744 as cited in SEQ ID NO 69137
aaaatgttcaaaaactctctccccttaatctcttcctctaagaataattgagtggttaagggagagaggagacggagagtttttatattcgttaccggaaaattttgatctccgatggcttcttctcctgaatctgctcctccaacaaactccacctcttctccatctccaccgtctaataccaattcaaccacctcttctccgccggctccgtctcctccttctcctacacctcctcaaggagactcatcatcatcgccacctcctgattccacatctccaccagctccacaagctcctaaccctcctaattcctctaataactctccttcccctccgtcacagggcggtggaggagaaagaggaaatggaggaaacaatggtggcaatgatactccaccgtcacgcggctctcctccttctcctccttctaggagtaatggagataatggtggtagcagatcatcgccaccaggagacactggaggctctcgctcagacaaccctccttctagcggaggaagcagtggaggaggtggaggtggaagaagtaatacgaatacagcgatcatagttggtgtattagtcggagctggacttttgatgatcgttcttattattgtgtgtcttagacgcaaaaagaagagaaaagactccttctaccctgaacccatgaaaggaaaccaatatcaatactatggaaacaacaacaacaacaatgcttcacagaattatccgaattggcacctaaattcacaaggccaaaaccaacaatctactggtggttggggaggcggtggaccatcaccgcctcctcctccgcggatgcctacaagcggagaagattcttccatgtactcaggcccatcacgcccagttttacctcctccttcgcctgctctagccctcggattcaacaagagcacttttacttaccaagagcttgcggctgcaacaggagggtttacggatgctaaccttttgggacagggaggatttgggtatgtccataaaggagtcttgcctagcgggaaagaagtagcagttaagagtttaaaagcgggtagcggacaaggagagagggagtttcaagctgaggtcgatatcattagccgtgtgcatcatcggtatcttgtttctttggttggatattgcatagctgatggacagaggatgttggtttatgagtttgttcctaacaaaactttggaatatcatcttcatgggaaaaatcttccggtaatggagttctccactaggttgcgtatcgccttaggtgctgcgaaaggactcgcttaccttcacgaagactgccatcctcggatcattcaccgcgacatcaagtctgcaaatattctcttggacttcaactttgatgctatggtggctgattttggattagctaagttaacatctgataacaacactcatgtatctactcgtgtgatgggaactttcggatatctagctccagaatatgcttcaagcggtaaattaaccgagaaatccgatgttttctcttacggagttatgttattggaacttataactggaaaacgaccggttgataatagcatcaccatggacgacaccttagtagattgggctcggcctcttatggctcgcgcgctagaagatggaaactttaatgagctcgcagatgcgaggcttgaaggcaactacaacccgcaagaaatggctcgaatggtgacttgtgccgctgctagcattcgtcattcggggcgtaaacgtccaaagatgagccagatagtaagagcgttagaaggagaagtgtccttagatgctttaaacgaaggtgtgaagccaggacacagtaacgtttacgggtcattgggagcaagctcggattatagtcagacatcttacaatgcagacatgaagaaattcagacagatagctttgtcgagccaagaattcccagtcagtgactgtgaaggaacatctagtaatgattctagagatatgggaactaagagccctactcctccaaaatga

SEQ ID NO: 77261 - protein, 633 aa, Arabidopsis thaliana
  peptide (1)..(633): Ceres Seq. ID no. 12574353
MASSPESAPPTNSTSSPSPPSNTNSTTSSPPAPSPPSPTPPQGDSSSSPPPDSTSPPAPQAPNPPNSSNNSPSPPSQGGGGERGNGGNNGGNDTPPSRGSPPSPPSRSNGDNGGSRSSPPGDTGGSRSDNPPSSGGSSGGGGGGRSNTNTAIIVGVLVGAGLLMIVLIIVCLRRKKKRKDSFYPEPMKGNQYQYYGNNNNNNASQNYPNWHLNSQGQNQQSTGGWGGGGPSPPPPPRMPTSGEDSSMYSGPSRPVLPPPSPALALGFNKSTFTYQELAAATGGFTDANLLGQGGFGYVHKGVLPSGKEVAVKSLKAGSGQGEREFQAEVDIISRVHHRYLVSLVGYCIADGQRMLVYEFVPNKTLEYHLHGKNLPVMEFSTRLRIALGAAKGLAYLHEDCHPRIIHRDIKSANILLDFNFDAMVADFGLAKLTSDNNTHVSTRVMGTFGYLAPEYASSGKLTEKSDVFSYGVMLLELITGKRPVDNSITMDDTLVDWARPLMARALEDGNFNELADARLEGNYNPQEMARMVTCAAASIRHSGRKRPKMSQIVRALEGEVSLDALNEGVKPGHSNVYGSLGASSDYSQTSYNADMKKFRQIALSSQEFPVSDCEGTSSNDSRDMGTKSPTPPK

SEQ ID NO: 77262 - protein, 470 aa, Arabidopsis thaliana
  peptide (1)..(470): Ceres Seq. ID no. 12574354
MIVLIIVCLRRKKKRKDSFYPEPMKGNQYQYYGNNNNNNASQNYPNWHLNSQGQNQQSTGGWGGGGPSPPPPPRMPTSGEDSSMYSGPSRPVLPPPSPALALGFNKSTFTYQELAAATGGFTDANLLGQGGFGYVHKGVLPSGKEVAVKSLKAGSGQGEREFQAEVDIISRVHHRYLVSLVGYCIADGQRMLVYEFVPNKTLEYHLHGKNLPVMEFSTRLRIALGAAKGLAYLHEDCHPRIIHRDIKSANILLDFNFDAMVADFGLAKLTSDNNTHVSTRVMGTFGYLAPEYASSGKLTEKSDVFSYGVMLLELITGKRPVDNSITMDDTLVDWARPLMARALEDGNFNELADARLEGNYNPQEMARMVTCAAASIRHSGRKRPKMSQIVRALEGEVSLDALNEGVKPGHSNVYGSLGASSDYSQTSYNADMKKFRQIALSSQEFPVSDCEGTSSNDSRDMGTKSPTPPK

SEQ ID NO: 77263 - protein, 447 aa, Arabidopsis thaliana
  peptide (1)..(447): Ceres Seq. ID no. 12574355
MKGNQYQYYGNNNNNNASQNYPNWHLNSQGQNQQSTGGWGGGGPSPPPPPRMPTSGEDSSMYSGPSRPVLPPPSPALALGFNKSTFTYQELAAATGGFTDANLLGQGGFGYVHKGVLPSGKEVAVKSLKAGSGQGEREFQAEVDIISRVHHRYLVSLVGYCIADGQRMLVYEFVPNKTLEYHLHGKNLPVMEFSTRLRIALGAAKGLAYLHEDCHPRIIHRDIKSANILLDFNFDAMVADFGLAKLTSDNNTHVSTRVMGTFGYLAPEYASSGKLTEKSDVFSYGVMLLELITGKRPVDNSITMDDTLVDWARPLMARALEDGNFNELADARLEGNYNPQEMARMVTCAAASIRHSGRKRPKMSQIVRALEGEVSLDALNEGVKPGHSNVYGSLGASSDYSQTSYNADMKKFRQIALSSQEFPVSDCEGTSSNDSRDMGTKSPTPPK

SEQ ID NO: 77264 - DNA, 1894 bp, Arabidopsis thaliana
  misc_feature (1)..(1894): Ceres Seq. ID no. 12574404
  misc_feature (1)..(1894): Ortholog of  Ceres SEQ ID NO 15178460 as cited in SEQ ID NO 66107
acaaaaacccttttaatctctctctcgtgtagatctatcactctccatttcccttcttctctgtaaaccctttataaatctcacttccttcttcttcatcaatccttcctcagatctcttcttattcaaattcaattgagagatactctcttcttcttctttttctctatccagttccttctgtgcgaagttcttctgattaatttgagtttcttggaagcttttactcgatcttcatcggatcttagggttttgtttaaatccagatcttgggttttgttaaataatggcgactccttatcctggagcgacgcaggtgggttcgtactttgtggggcagtattatcaagtgttgcagcagcagccagatcttattcatcagttttattctgagcctagtagagctattcgtatcgatggtgattccaccgagactgctaattctttgctgcatattcataacatggttatgtcactgaatttcactgcgattgaagtgaagacgattaattcagtcgagtcgtgggaaggtggtgttcttgtggtggtttcaggatctgtgaaaaccaaggaatttagcaacagaaggagttttgtgcagaccttttttctcgctcctcaggaaaagggttattttgttctcagtgatgtatttctgtttgttgatgagggtactgtttactatcatcagccttcttatttatctgaaatcaagcatgaggctcagcttaatcctcctacccgtcatccagatccccaagtttctgactatgtgctggaggaagaggcaagcgattatgtgaacgcagtccaaatcaaagatgatcttgttgataagtacagtctgcaagaggaccaacatcaacctcagcatgaagactatgaagatgaagttgcgattgaggaaacacctagggaagaagttgcagttgatgtggtacatgaacatcgggctgcaccagtagaggaaccagttggtgaaaaatcaaagatgagttatgcttccattttaaaagttgcaaaggaagcagcaactgtacctgtagctgctacacaaccatcatataacaagagctctcaagatattaatgagtgggatcaaccaatgcggactccttcccctcagctggctgcgcctcttgcccctattcagcaatcaaactcatccacatatgtttccgactatggagcagaggcagaagatggctccggttttgaagactttgagttcaaatcagtgtacgttaggaatttgccttccgacatatctgcttctgaaatagaggaagagtttaagaacttcggtacaatcaagcctgatggtgtgttcctcagaacccgcaaggatgttatgggcgtatgttatgcatttgttgagtttgaggacatgacttccgttgagaatgcgattaaggcttctcctatatacttgggtggaaggcaagtatacattgaggaacgaagaccaaatcccgctggtgttcgcggagcaagaagaggaggaggacgtggaaggggtggttacccaacagaagcaccaagaggccggtttggtgggcgtgggtctggcagaggaaaccaggatggaggtgactacaggccaagaggaaatggttactaccgcggtggtggtcgctaaaagaaaaaagaatctcgtcaaagttttagtgctaccaaagaatgaaatgattcagttcttcttcctttatctacggaagaagtagtttgtaatttctattttgttgggtttggtttttggctcaaagaaacaaagattttggcttatatatgtttttctttaaatttgttatagatttagccatttagagcttttgactgttatctccctttgggaatggtttagttttggtataacatttcaatttttggtttc

SEQ ID NO: 77265 - protein, 450 aa, Arabidopsis thaliana
  peptide (1)..(450): Ceres Seq. ID no. 12574405
MATPYPGATQVGSYFVGQYYQVLQQQPDLIHQFYSEPSRAIRIDGDSTETANSLLHIHNMVMSLNFTAIEVKTINSVESWEGGVLVVVSGSVKTKEFSNRRSFVQTFFLAPQEKGYFVLSDVFLFVDEGTVYYHQPSYLSEIKHEAQLNPPTRHPDPQVSDYVLEEEASDYVNAVQIKDDLVDKYSLQEDQHQPQHEDYEDEVAIEETPREEVAVDVVHEHRAAPVEEPVGEKSKMSYASILKVAKEAATVPVAATQPSYNKSSQDINEWDQPMRTPSPQLAAPLAPIQQSNSSTYVSDYGAEAEDGSGFEDFEFKSVYVRNLPSDISASEIEEEFKNFGTIKPDGVFLRTRKDVMGVCYAFVEFEDMTSVENAIKASPIYLGGRQVYIEERRPNPAGVRGARRGGGRGRGGYPTEAPRGRFGGRGSGRGNQDGGDYRPRGNGYYRGGGR

SEQ ID NO: 77266 - protein, 391 aa, Arabidopsis thaliana
  peptide (1)..(391): Ceres Seq. ID no. 12574406
MVMSLNFTAIEVKTINSVESWEGGVLVVVSGSVKTKEFSNRRSFVQTFFLAPQEKGYFVLSDVFLFVDEGTVYYHQPSYLSEIKHEAQLNPPTRHPDPQVSDYVLEEEASDYVNAVQIKDDLVDKYSLQEDQHQPQHEDYEDEVAIEETPREEVAVDVVHEHRAAPVEEPVGEKSKMSYASILKVAKEAATVPVAATQPSYNKSSQDINEWDQPMRTPSPQLAAPLAPIQQSNSSTYVSDYGAEAEDGSGFEDFEFKSVYVRNLPSDISASEIEEEFKNFGTIKPDGVFLRTRKDVMGVCYAFVEFEDMTSVENAIKASPIYLGGRQVYIEERRPNPAGVRGARRGGGRGRGGYPTEAPRGRFGGRGSGRGNQDGGDYRPRGNGYYRGGGR

SEQ ID NO: 77267 - protein, 389 aa, Arabidopsis thaliana
  peptide (1)..(389): Ceres Seq. ID no. 12574407
MSLNFTAIEVKTINSVESWEGGVLVVVSGSVKTKEFSNRRSFVQTFFLAPQEKGYFVLSDVFLFVDEGTVYYHQPSYLSEIKHEAQLNPPTRHPDPQVSDYVLEEEASDYVNAVQIKDDLVDKYSLQEDQHQPQHEDYEDEVAIEETPREEVAVDVVHEHRAAPVEEPVGEKSKMSYASILKVAKEAATVPVAATQPSYNKSSQDINEWDQPMRTPSPQLAAPLAPIQQSNSSTYVSDYGAEAEDGSGFEDFEFKSVYVRNLPSDISASEIEEEFKNFGTIKPDGVFLRTRKDVMGVCYAFVEFEDMTSVENAIKASPIYLGGRQVYIEERRPNPAGVRGARRGGGRGRGGYPTEAPRGRFGGRGSGRGNQDGGDYRPRGNGYYRGGGR

SEQ ID NO: 77268 - DNA, 1242 bp, Arabidopsis thaliana
  misc_feature (1)..(1242): Ceres Seq. ID no. 12574431
  misc_feature (1)..(1242): Ortholog of  Ceres SEQ ID NO 13596554 as cited in SEQ ID NO 62818
gagcttcttgaagcagatcaagatcaagaaagaacacttttgtgaacttcttcttccccacatctcctaaaagcttcacacacaccaaaccaagcgtttcttttcttatctactcgattatcaacacatcttttcctgaaactccttccacatctttgtctgatcatggtgaaggaaacagtgtattatgatgttcttggtgtcactccctctgcttctgaggaagagattcgcaaggcttattacatcaaggcaagacaagttcatcctgacaagaatcaaggtgatcctctagctgctgaaaagtttcaggttcttggtgaagcttaccaggttctaagtgatcctgttcatcgtgaagcgtatgatcggactggaaaattctcagctcccaaagaaacaatggttgatccaacggctgttttcgctcttcttttcggaagtgaactattcgaggattatatcggtcacttggctgttgcatcaatggcttccactcaaatggcttctgaaatcgaaaactctgatcagtttcaagacaaactaaaggcaaatcaaaaaccatatgctgttcagaaagaaagagaagaaaacctttcaaggtttctcaaagattttctgagtcaatatgtccacggagacaaagaaggattcataagccgcgcagaatctgaagccaagagactttcagatgcagcttttggagcggatatgttgcatacaattggatatgtatacacaagacaagcagctcaagaacttgggaagagagctctttacttaggagttccatttgtagctgaatgggttaggaacaaaggtcattcttggaaatcacagattagtgcagctaaaggagctttacagttacttcagctgcaagaagagagtaaccggagattaaagaaagatgggactagtccagcaaatgagttagagtctcatattcagaccaacaaagaaacattgatgggatctttgtggaaacttaatgttgtcgacattgaagtgactctgttacatgtgtgtcagatgcaagaaaagcaatcgaagaacggtacaacatcaagaaaagaagatgaagacagcgacgatgatgacagtagcagcgatgacgattcttcacaaccactttcatacagaactcctctgcttactcaggggattggtagacttttcagatgtctctgcaatccagcattcgatgtagacgatgatgaaattgtatacaaaggcaaatga

SEQ ID NO: 77269 - protein, 358 aa, Arabidopsis thaliana
  peptide (1)..(358): Ceres Seq. ID no. 12574432
MVKETVYYDVLGVTPSASEEEIRKAYYIKARQVHPDKNQGDPLAAEKFQVLGEAYQVLSDPVHREAYDRTGKFSAPKETMVDPTAVFALLFGSELFEDYIGHLAVASMASTQMASEIENSDQFQDKLKANQKPYAVQKEREENLSRFLKDFLSQYVHGDKEGFISRAESEAKRLSDAAFGADMLHTIGYVYTRQAAQELGKRALYLGVPFVAEWVRNKGHSWKSQISAAKGALQLLQLQEESNRRLKKDGTSPANELESHIQTNKETLMGSLWKLNVVDIEVTLLHVCQMQEKQSKNGTTSRKEDEDSDDDDSSSDDDSSQPLSYRTPLLTQGIGRLFRCLCNPAFDVDDDEIVYKGK

SEQ ID NO: 77270 - protein, 279 aa, Arabidopsis thaliana
  peptide (1)..(279): Ceres Seq. ID no. 12574433
MVDPTAVFALLFGSELFEDYIGHLAVASMASTQMASEIENSDQFQDKLKANQKPYAVQKEREENLSRFLKDFLSQYVHGDKEGFISRAESEAKRLSDAAFGADMLHTIGYVYTRQAAQELGKRALYLGVPFVAEWVRNKGHSWKSQISAAKGALQLLQLQEESNRRLKKDGTSPANELESHIQTNKETLMGSLWKLNVVDIEVTLLHVCQMQEKQSKNGTTSRKEDEDSDDDDSSSDDDSSQPLSYRTPLLTQGIGRLFRCLCNPAFDVDDDEIVYKGK

SEQ ID NO: 77271 - protein, 251 aa, Arabidopsis thaliana
  peptide (1)..(251): Ceres Seq. ID no. 12574434
MASTQMASEIENSDQFQDKLKANQKPYAVQKEREENLSRFLKDFLSQYVHGDKEGFISRAESEAKRLSDAAFGADMLHTIGYVYTRQAAQELGKRALYLGVPFVAEWVRNKGHSWKSQISAAKGALQLLQLQEESNRRLKKDGTSPANELESHIQTNKETLMGSLWKLNVVDIEVTLLHVCQMQEKQSKNGTTSRKEDEDSDDDDSSSDDDSSQPLSYRTPLLTQGIGRLFRCLCNPAFDVDDDEIVYKGK

SEQ ID NO: 77272 - DNA, 1927 bp, Arabidopsis thaliana
  misc_feature (1)..(1927): Ceres Seq. ID no. 12574435
  misc_feature (1)..(1927): Ortholog of  Ceres SEQ ID NO 12612314 as cited in SEQ ID NO 51420
  misc_feature (1)..(1927): Ortholog of  Ceres SEQ ID NO 14306493 as cited in SEQ ID NO 53170
  misc_feature (1)..(1927): Ortholog of  Ceres SEQ ID NO 14311095 as cited in SEQ ID NO 53197
tacatataacacagtgagaaaacagagcaaaaacagagagatattacgatgtttttctctaaggatcttccttcacctacttcggttttcacagcttacgcatcaatggcgggttacatgatgatgataagatcaatggctcacgagctaatcccagctcccctccaagatttcatctacaggactctccggtctctcttcttccgttcttcttcctccactttgacgctaaccatcgatgacgacaacatgggtatgaacaacgagatctaccgagctgctcagacttatctctccaccaagatcagtcctgatgcagtcaggctcagaataagtaaaggccataaggataaacatgtcaacttgtatctcagcgacggagaaatcgtcaacgatgtgtacgaagatgtgcagctagtatggaggtttgttactgacggtggagacaagaaaggaggcggcggaggagtaggaggaagaggaggaggaggaggaagaagaggtggtatggacgatgacggtaaaagcgagtacttcgagctgagtttcgacaagaaacataaagatttgatattgaactcttatgtgccttacatcgagagtaaagctaaagagataagagacgagagaagaatcttgatgctgcattctctcaacagtcttagatgggaatcagttattcttgaacacccttcgacctttgagacaatggctatggaagatgatctcaaacgtgacgtcatcgaggatcttgatcggttcataagaaggaaagagttttacaagagagtagggaaagcttggaagaggggttacttgttgtacggtccaccgggtacggggaagtctagtcttgttgcagccatggctaattacctcaagtttgatgtttatgatcttcagcttgcgagtgtgatgcgtgactctgatctaaggaggctcttactagctacacgtaaccggtcgattcttgtcatagaagatatcgattgtgcagtggatttacccaacagaattgagcagcctgttgaaggcaagaaccgtggcgagtctcaggttagatttctactatgattggttttggtttaggattggccaattgaaccaaatttaccaaatcgaaccaaaccaaaatccgtatcaaccaaattttaatttagtgtaacaagactgactctgattagtatagagaattttagtatatttaaaattgtatttttttttgttttctatgaaaatgtgtgtttagggaccattgacgttatcggggctgctgaatttcatagacggactatggtcaagctgtggagacgagcggattataatattcacaacaaaccataaagataggcttgacccggcattgcttagaccaggacgtatggatatgcacatttacatgggacattgctcttttcaaggattcaagactttagcttctaactacttgggtttgagtgatgctgcgatgccacaccgtctatttccggagattgagcgtttgattgacggggaagtaatgacgccggcacaagtagcagaggagctgatgaagagtgaggatgctgacgtggcgctagagggtttggtgaatgttttagagaaaatgaggctaaaatctaaggaatcgaatccggtgatgatgaagcagaaagagagtagactggagatggaggagatgagactaaagagtgatactgagggttctccgaggaagaacagcaaaagatttaagaagcttgtattgttttggacataatccattaattagttcaaataagattatgaggaagcaaacaaaaatagacgtataagaggctaattacaactctttaagtgttttttaaaagaaatttcttgtatgtttattttctagggttgtgaaccattgtaagacccattaagagatatggaactttatttttcc

SEQ ID NO: 77273 - protein, 341 aa, Arabidopsis thaliana
  peptide (1)..(341): Ceres Seq. ID no. 12574436
MFFSKDLPSPTSVFTAYASMAGYMMMIRSMAHELIPAPLQDFIYRTLRSLFFRSSSSTLTLTIDDDNMGMNNEIYRAAQTYLSTKISPDAVRLRISKGHKDKHVNLYLSDGEIVNDVYEDVQLVWRFVTDGGDKKGGGGGVGGRGGGGGRRGGMDDDGKSEYFELSFDKKHKDLILNSYVPYIESKAKEIRDERRILMLHSLNSLRWESVILEHPSTFETMAMEDDLKRDVIEDLDRFIRRKEFYKRVGKAWKRGYLLYGPPGTGKSSLVAAMANYLKFDVYDLQLASVMRDSDLRRLLLATRNRSILVIEDIDCAVDLPNRIEQPVEGKNRGESQVRFLL

SEQ ID NO: 77274 - protein, 322 aa, Arabidopsis thaliana
  peptide (1)..(322): Ceres Seq. ID no. 12574437
MAGYMMMIRSMAHELIPAPLQDFIYRTLRSLFFRSSSSTLTLTIDDDNMGMNNEIYRAAQTYLSTKISPDAVRLRISKGHKDKHVNLYLSDGEIVNDVYEDVQLVWRFVTDGGDKKGGGGGVGGRGGGGGRRGGMDDDGKSEYFELSFDKKHKDLILNSYVPYIESKAKEIRDERRILMLHSLNSLRWESVILEHPSTFETMAMEDDLKRDVIEDLDRFIRRKEFYKRVGKAWKRGYLLYGPPGTGKSSLVAAMANYLKFDVYDLQLASVMRDSDLRRLLLATRNRSILVIEDIDCAVDLPNRIEQPVEGKNRGESQVRFLL

SEQ ID NO: 77275 - protein, 318 aa, Arabidopsis thaliana
  peptide (1)..(318): Ceres Seq. ID no. 12574438
MMMIRSMAHELIPAPLQDFIYRTLRSLFFRSSSSTLTLTIDDDNMGMNNEIYRAAQTYLSTKISPDAVRLRISKGHKDKHVNLYLSDGEIVNDVYEDVQLVWRFVTDGGDKKGGGGGVGGRGGGGGRRGGMDDDGKSEYFELSFDKKHKDLILNSYVPYIESKAKEIRDERRILMLHSLNSLRWESVILEHPSTFETMAMEDDLKRDVIEDLDRFIRRKEFYKRVGKAWKRGYLLYGPPGTGKSSLVAAMANYLKFDVYDLQLASVMRDSDLRRLLLATRNRSILVIEDIDCAVDLPNRIEQPVEGKNRGESQVRFLL

SEQ ID NO: 77276 - DNA, 1243 bp, Arabidopsis thaliana
  misc_feature (1)..(1243): Ceres Seq. ID no. 12574477
  misc_feature (1)..(1243): Ortholog of  Ceres SEQ ID NO 15177718 as cited in SEQ ID NO 0
aacaaagcaaacggctcatttctcagaaacaactcaaacatgggttccttcgacttgcctcacagttcatcgttcaagggagaaagtgaaatatttcttcggaatgtgttcgagaatatattgaaaacgtacctaaggaagaacccgacggcgaagacaatatgggaactggttcagtcgttggacaacgaaaagatctgctacgaccacttcactttcaggacactaaaggtcgatggttatggaatagactccttgtcgagttttttcatggcttatggatataaaattggtggtggacttgattttcccaagaagaaactacgagttctttggttttctccacctgatgttcacgttcctaatgatggtcacggtctaggcaacggccctttgccgcgacttgttatagctgaggttcttgtggacgaactaagccctgaatcacaggggataataaggaagtatttgaaacaagaaggtggcaagcaagcggttctttctagtactttggggtctttaatatgggagaagcctacatggaccgacttcaagcagcttgccaaagaaagcgaatttgcggcatggacgcttatccacggctacacaatgaatcatcttgcttttgcggttcatcgattcaaacatcgtttcagtgacatcaaattcgtcaaacagcgtcttgaggaaaagggattcaaactcaacagtgacggagaaatcctcaaagtgagtcaagatggtctactatttcaagtttcatcgatctcggaaaggcttccggtaacatttgcagatggagtaactgaaacaatcccagcttcatacattgaattcactcagcgtcaagttcttccagagttcaaagatgtgccgcttgatgagatcaaagaatttcatagacgtgaagcttttgaactcgataacgccaaccacgtaatggaaagcacccgtttcacaactaaattctagaaccagacttgtcttgctcgacttagtatatgccaaatttgtgcaactatatatgtgagtgtgtgtttgtgtgcaatctttccatatatatgcatgtgtgtatttgcgatatctttatgttgttattttactgtgaagggacaatgtaagcatatgttatctctcatgatggtaattgttgattagagtgaccaacttgtaaaatggatcacatgattgacgaatcatgggaaataaaatgtattttgtgattgaaatatgtgatatttgt

SEQ ID NO: 77277 - protein, 323 aa, Arabidopsis thaliana
  peptide (1)..(323): Ceres Seq. ID no. 12574478
NKANGSFLRNNSNMGSFDLPHSSSFKGESEIFLRNVFENILKTYLRKNPTAKTIWELVQSLDNEKICYDHFTFRTLKVDGYGIDSLSSFFMAYGYKIGGGLDFPKKKLRVLWFSPPDVHVPNDGHGLGNGPLPRLVIAEVLVDELSPESQGIIRKYLKQEGGKQAVLSSTLGSLIWEKPTWTDFKQLAKESEFAAWTLIHGYTMNHLAFAVHRFKHRFSDIKFVKQRLEEKGFKLNSDGEILKVSQDGLLFQVSSISERLPVTFADGVTETIPASYIEFTQRQVLPEFKDVPLDEIKEFHRREAFELDNANHVMESTRFTTKF

SEQ ID NO: 77278 - protein, 310 aa, Arabidopsis thaliana
  peptide (1)..(310): Ceres Seq. ID no. 12574479
MGSFDLPHSSSFKGESEIFLRNVFENILKTYLRKNPTAKTIWELVQSLDNEKICYDHFTFRTLKVDGYGIDSLSSFFMAYGYKIGGGLDFPKKKLRVLWFSPPDVHVPNDGHGLGNGPLPRLVIAEVLVDELSPESQGIIRKYLKQEGGKQAVLSSTLGSLIWEKPTWTDFKQLAKESEFAAWTLIHGYTMNHLAFAVHRFKHRFSDIKFVKQRLEEKGFKLNSDGEILKVSQDGLLFQVSSISERLPVTFADGVTETIPASYIEFTQRQVLPEFKDVPLDEIKEFHRREAFELDNANHVMESTRFTTKF

SEQ ID NO: 77279 - protein, 233 aa, Arabidopsis thaliana
  peptide (1)..(233): Ceres Seq. ID no. 12574480
MAYGYKIGGGLDFPKKKLRVLWFSPPDVHVPNDGHGLGNGPLPRLVIAEVLVDELSPESQGIIRKYLKQEGGKQAVLSSTLGSLIWEKPTWTDFKQLAKESEFAAWTLIHGYTMNHLAFAVHRFKHRFSDIKFVKQRLEEKGFKLNSDGEILKVSQDGLLFQVSSISERLPVTFADGVTETIPASYIEFTQRQVLPEFKDVPLDEIKEFHRREAFELDNANHVMESTRFTTKF

SEQ ID NO: 77280 - DNA, 2539 bp, Arabidopsis thaliana
  misc_feature (1)..(2539): Ceres Seq. ID no. 12574690
  misc_feature (1)..(2539): Ortholog of  Ceres SEQ ID NO 14310206 as cited in SEQ ID NO 20650
gaattacttttatccattttctctgtatatatatagaaagcaaaagaaagcattttcatcacctaccatcctctgttttcatttcctctgtttttcaaacttcctctgttctctcatggctccacttcacgaatctctgtcatcaatcaacgatgtaatcgaatccaaacctctttttgttccaataactaagccaatcttgcagccaaactcatttaacctatccgaagggtctctctgtgccaaagactctactccaatcctctttgatgttcctcaaaacgtaactttcacaccattctcatctcactccatatccactgatgctcctctcccaatcctcctccgagttcaagccaacgctcacaaaggagggtttctcggattcaccaaagaatcaccctctgatcgtctcacaaactccttgggaagattcgaagacagagagtttctcagtcttttccggttcaaaatgtggtggtcgacggcttggatcgggaaatcagggtcggatcttcaagccgagactcagtgggtgatgctaaagattcctgagatcgattcctacgtggccatcataccaaccattgaaggagcttttagggcttcacttactcctggtgagaaaggtaatgtcttgatttgtgcagagagtggctcaactaaagtaaaagagtcatctttcaaatccattgcctacattcacatttgtgacaacccctataacctcatgaaagaggcttttagtgcacttcgtgttcatatgaacactttcaagcttctagaagagaagaagcttccgaaaatcgtcgataagtttggatggtgcacttgggatgcttgctacttgaccgttgatcctgcaaccatttggactggagttaaggagtttgaagatggtggggtgtgtccgaagtttgtcatcattgatgatggatggcaaagtattaactttgatggtgatgagctagacaaagacgctgagaatcttgttcttggtggggagcaaatgactgcgaggcttaccagcttcaaggagtgtaagaagtttagaaactataaagaagagtctttgggttctgatgatgtttctggctcaggtatggcggctttcacaaaggatttgaggttaaggtttaagagtttagatgatatatatgtgtggcatgctctttgtggtgcttggaatggtgttaggcctgaaaccatgatggatttgaaggccaaggttgctccttttgagctttcacctagtctaggcgctacgatggctgatctcgcagtcgacaaggttgtagaagctgggattggtcttgttcatccttctaaagctcatgaattctacgactcgatgcactcttatcttgctagtgttggtgttacaggagccaagattgatgttttccaaaccttggagtcactagcagaagaacatggaggacgagtggagcttgctaaagcttactacgatggtctgaccgaatccatgatcaagaattttaatggaactgatgtcattgcgagtatgcaacagtgcaatgagttcttcttccttgccacaaagcaaatctctattggcagagttggtgatgatttttggtggcaagacccatatggtgacccacaaggagtatattggctacaaggagttcacatgattcactgttcttacaacagtatttggatgggtcaaatgattcaaccagattgggacatgttccaatcagaccatgtctgtgccgagtaccacgccgcatctcgagccatttgcggtgggcctgtctatctcagtgaccatcttggcaaagcctcacataactttgatctcatcaagaaacttgctttctttgatggtaccatcccaaggtgtgtccactatgctcttcccactagagattcgctcttcaagaaccctttgtttgacaaagagtcaatcctcaagatcttcaacttcaacaagtttggaggagtgattggaacatttaactgtcaaggtgctgggtggagcccagaggagcataggttcaaaggatacaaagaatgttacacgacagtttcgggaacagttcatgtctcggacattgaatgggatcagaatccagaagctgcaggctctcaggtgacctacactggagattacttggtttacaagcaacaatctgaagaaatccttttcatgaactcgaaatcagaagcgatgaagataacccttgagccatccgcgtttgacctgttgagtttcgtgccagtcacggaacttgtaagttcaggggttagattcgcacctctagggttgatcaacatgttcaactgcgtcggaacagtccaagacatgaaggttactggtgataacagcataagagtggacgtgaaaggcgaaggaagattcatggcgtattcgagttcagctccggtgaagtgttacttgaacgacaaggaagctgagtttaagtgggaagaagaaactggtaaactcagtttctttgttccttgggttgaagaatctggtggcatctctcatctgtctttcaccttttaa

SEQ ID NO: 77281 - protein, 845 aa, Arabidopsis thaliana
  peptide (1)..(845): Ceres Seq. ID no. 12574691
NYFYPFSLYIYRKQKKAFSSPTILCFHFLCFSNFLCSLMAPLHESLSSINDVIESKPLFVPITKPILQPNSFNLSEGSLCAKDSTPILFDVPQNVTFTPFSSHSISTDAPLPILLRVQANAHKGGFLGFTKESPSDRLTNSLGRFEDREFLSLFRFKMWWSTAWIGKSGSDLQAETQWVMLKIPEIDSYVAIIPTIEGAFRASLTPGEKGNVLICAESGSTKVKESSFKSIAYIHICDNPYNLMKEAFSALRVHMNTFKLLEEKKLPKIVDKFGWCTWDACYLTVDPATIWTGVKEFEDGGVCPKFVIIDDGWQSINFDGDELDKDAENLVLGGEQMTARLTSFKECKKFRNYKEESLGSDDVSGSGMAAFTKDLRLRFKSLDDIYVWHALCGAWNGVRPETMMDLKAKVAPFELSPSLGATMADLAVDKVVEAGIGLVHPSKAHEFYDSMHSYLASVGVTGAKIDVFQTLESLAEEHGGRVELAKAYYDGLTESMIKNFNGTDVIASMQQCNEFFFLATKQISIGRVGDDFWWQDPYGDPQGVYWLQGVHMIHCSYNSIWMGQMIQPDWDMFQSDHVCAEYHAASRAICGGPVYLSDHLGKASHNFDLIKKLAFFDGTIPRCVHYALPTRDSLFKNPLFDKESILKIFNFNKFGGVIGTFNCQGAGWSPEEHRFKGYKECYTTVSGTVHVSDIEWDQNPEAAGSQVTYTGDYLVYKQQSEEILFMNSKSEAMKITLEPSAFDLLSFVPVTELVSSGVRFAPLGLINMFNCVGTVQDMKVTGDNSIRVDVKGEGRFMAYSSSAPVKCYLNDKEAEFKWEEETGKLSFFVPWVEESGGISHLSFTF

SEQ ID NO: 77282 - protein, 807 aa, Arabidopsis thaliana
  peptide (1)..(807): Ceres Seq. ID no. 12574692
MAPLHESLSSINDVIESKPLFVPITKPILQPNSFNLSEGSLCAKDSTPILFDVPQNVTFTPFSSHSISTDAPLPILLRVQANAHKGGFLGFTKESPSDRLTNSLGRFEDREFLSLFRFKMWWSTAWIGKSGSDLQAETQWVMLKIPEIDSYVAIIPTIEGAFRASLTPGEKGNVLICAESGSTKVKESSFKSIAYIHICDNPYNLMKEAFSALRVHMNTFKLLEEKKLPKIVDKFGWCTWDACYLTVDPATIWTGVKEFEDGGVCPKFVIIDDGWQSINFDGDELDKDAENLVLGGEQMTARLTSFKECKKFRNYKEESLGSDDVSGSGMAAFTKDLRLRFKSLDDIYVWHALCGAWNGVRPETMMDLKAKVAPFELSPSLGATMADLAVDKVVEAGIGLVHPSKAHEFYDSMHSYLASVGVTGAKIDVFQTLESLAEEHGGRVELAKAYYDGLTESMIKNFNGTDVIASMQQCNEFFFLATKQISIGRVGDDFWWQDPYGDPQGVYWLQGVHMIHCSYNSIWMGQMIQPDWDMFQSDHVCAEYHAASRAICGGPVYLSDHLGKASHNFDLIKKLAFFDGTIPRCVHYALPTRDSLFKNPLFDKESILKIFNFNKFGGVIGTFNCQGAGWSPEEHRFKGYKECYTTVSGTVHVSDIEWDQNPEAAGSQVTYTGDYLVYKQQSEEILFMNSKSEAMKITLEPSAFDLLSFVPVTELVSSGVRFAPLGLINMFNCVGTVQDMKVTGDNSIRVDVKGEGRFMAYSSSAPVKCYLNDKEAEFKWEEETGKLSFFVPWVEESGGISHLSFTF

SEQ ID NO: 77283 - protein, 688 aa, Arabidopsis thaliana
  peptide (1)..(688): Ceres Seq. ID no. 12574693
MWWSTAWIGKSGSDLQAETQWVMLKIPEIDSYVAIIPTIEGAFRASLTPGEKGNVLICAESGSTKVKESSFKSIAYIHICDNPYNLMKEAFSALRVHMNTFKLLEEKKLPKIVDKFGWCTWDACYLTVDPATIWTGVKEFEDGGVCPKFVIIDDGWQSINFDGDELDKDAENLVLGGEQMTARLTSFKECKKFRNYKEESLGSDDVSGSGMAAFTKDLRLRFKSLDDIYVWHALCGAWNGVRPETMMDLKAKVAPFELSPSLGATMADLAVDKVVEAGIGLVHPSKAHEFYDSMHSYLASVGVTGAKIDVFQTLESLAEEHGGRVELAKAYYDGLTESMIKNFNGTDVIASMQQCNEFFFLATKQISIGRVGDDFWWQDPYGDPQGVYWLQGVHMIHCSYNSIWMGQMIQPDWDMFQSDHVCAEYHAASRAICGGPVYLSDHLGKASHNFDLIKKLAFFDGTIPRCVHYALPTRDSLFKNPLFDKESILKIFNFNKFGGVIGTFNCQGAGWSPEEHRFKGYKECYTTVSGTVHVSDIEWDQNPEAAGSQVTYTGDYLVYKQQSEEILFMNSKSEAMKITLEPSAFDLLSFVPVTELVSSGVRFAPLGLINMFNCVGTVQDMKVTGDNSIRVDVKGEGRFMAYSSSAPVKCYLNDKEAEFKWEEETGKLSFFVPWVEESGGISHLSFTF

SEQ ID NO: 77284 - DNA, 2569 bp, Arabidopsis thaliana
  misc_feature (1)..(2569): Ceres Seq. ID no. 12574741
  misc_feature (1)..(2569): Ortholog of  Ceres SEQ ID NO 13638156 as cited in SEQ ID NO 58588
ggttaaaaaattttcataagtgaacacagaagaagcggtggctctgagccggcgaaatctcctttctcatccctaaaattttcatgtccatcttgcctcctccgattatccaaggtcacaattcgtcttctccttcttcagattcctctctaaaccctagctctgagcatggcaacaactcttcttcttctctctctcctcttccctcctctcctccttcccggatctcttcttccaccggaactcgattctccggacattctgaatcctctcacaatttctccggtggctctagggaaccgagtgttgcagctgaggagggacatagccgtggatcttccaaagagatgacacaaaatggagcagggaaggagagtttttccccacctaatgcagataagcgtgaccattttcgatatgatggtcgaaggaataggtctagagggagaggtactggagctgctggttcttcttcttctcaattgcagcataattccggaccttttaattctcctagaggcggtgtttcgcatcataatccaactggtagaagagctaatatgataagtgggaatcatttactgaattttcagtatgatccgatttcgcaaccgcaatctaggggtcctcctccgcctcaaagaaggcaacaatataaggggaggccttttaacaaggatttgtttcttaaggccaattataagtttgttgtgttggacactggagatcattctcctgattcaatggatcctgataaaatgctgcagtgggatgatattatttgtgtaaggtattctactccgtctcctgtccagtgtccgatttgcttggagtatcctctatgtccgcagattacttcctgtgggcatattttctgtttcccgtgtattctacagtacctgttgactggtgttgataaccacaaggtggactgcttcaagaggtgtcctttgtgctttgtgatgatttctccaagagagttatacactgtttatattgagaacgtcaagcagtattctgttggagatcccatcgagtttgtacttttgactcgcaagaaagattcttttgctcctacccggaaaaatgagcatgacttggctgttcctaatggtgaaaatgagatatatgatccgttctcaaagttcactttcacccaagatgttgatctctctgtcagacaagcagtttcagagttagacagttggattgcaagagcagatcctcagctcgttgaagacttggagaagcatctttatgtaaatgccgctttagagcgtttggagcagagaaaattgtactggaatgagcataagctctctatttacagcaaagtgtgcacaacggctagaaatcagactcaatcattgtcacctcctgatgtttctcgagttggttatcaagcacccatggggggccatggagcgccagatagcggctccaatgatcaagataaatcaactgaagattcttcagcggataagtcagatggagaatctcaatcaagtttggaaaagggttgtgataatgatcttggtcatcctctagaagatcaagacgcaccgtcatcttcctcatgcaatggaagtaaaggtttcctgtctcaccaaattgacaccaaagacctgaaggacaacgacgcgtacaacttttatcagtctgttgatggtcagcacattatccttcacactttgaatgtgaagtgccttctgcatcactatggaagctatgactttcttccaccaagattgagtggaaagatactggaaatggaaaccattacccaatcagaagcgataaggagacgctaccgctttttaagtcatttttctttatcaactacacttcagatatgtgagattgatatgaaggaatccttgcctcctgatgcatttgctccatttatacatgaaattaagaagcgtgagaagcagcggaaagaacgtgcttggaaggatcgaaaaaataaaatcaaagctgaagtagctgcagctgcagagcttgtaccattgatggccagttttgggcagtcgtcttctagtgatgactttcccccattttccttggatgactttgaagctctgggaaactctgccccaatatcatcaagccctccaaacattggagagagaagttccttctcacatgtgacaaggctcggtttcgcagctggtcacgactccccaaacctgaataacgagccaacaaacgttcaaagcagcagcagcagcagtgaagtctcaaacgcaaccacaggtgcaagaaacacaaacataacatcctttgcgagtgtagcttcaagaacaacaacaccaatggcaccaaccgtcaaagagcccggtaagagagggaagaaacagagccgagtacttctatcgacaactagtgtacgccgttactgaaaaggcctatggatttgtgtatgtataataatcttttcatctaagaaaaactgagtaaagaaagaaccagagattatggtgagtgagtaagtgtaaaactcaaacttgggctttgtttctttttgcaacccatgtgactgataatgaaggtgtctctcattactact

SEQ ID NO: 77285 - protein, 772 aa, Arabidopsis thaliana
  peptide (1)..(772): Ceres Seq. ID no. 12574742
MSILPPPIIQGHNSSSPSSDSSLNPSSEHGNNSSSSLSPLPSSPPSRISSSTGTRFSGHSESSHNFSGGSREPSVAAEEGHSRGSSKEMTQNGAGKESFSPPNADKRDHFRYDGRRNRSRGRGTGAAGSSSSQLQHNSGPFNSPRGGVSHHNPTGRRANMISGNHLLNFQYDPISQPQSRGPPPPQRRQQYKGRPFNKDLFLKANYKFVVLDTGDHSPDSMDPDKMLQWDDIICVRYSTPSPVQCPICLEYPLCPQITSCGHIFCFPCILQYLLTGVDNHKVDCFKRCPLCFVMISPRELYTVYIENVKQYSVGDPIEFVLLTRKKDSFAPTRKNEHDLAVPNGENEIYDPFSKFTFTQDVDLSVRQAVSELDSWIARADPQLVEDLEKHLYVNAALERLEQRKLYWNEHKLSIYSKVCTTARNQTQSLSPPDVSRVGYQAPMGGHGAPDSGSNDQDKSTEDSSADKSDGESQSSLEKGCDNDLGHPLEDQDAPSSSSCNGSKGFLSHQIDTKDLKDNDAYNFYQSVDGQHIILHTLNVKCLLHHYGSYDFLPPRLSGKILEMETITQSEAIRRRYRFLSHFSLSTTLQICEIDMKESLPPDAFAPFIHEIKKREKQRKERAWKDRKNKIKAEVAAAAELVPLMASFGQSSSSDDFPPFSLDDFEALGNSAPISSSPPNIGERSSFSHVTRLGFAAGHDSPNLNNEPTNVQSSSSSSEVSNATTGARNTNITSFASVASRTTTPMAPTVKEPGKRGKKQSRVLLSTTSVRRY

SEQ ID NO: 77286 - protein, 684 aa, Arabidopsis thaliana
  peptide (1)..(684): Ceres Seq. ID no. 12574743
MTQNGAGKESFSPPNADKRDHFRYDGRRNRSRGRGTGAAGSSSSQLQHNSGPFNSPRGGVSHHNPTGRRANMISGNHLLNFQYDPISQPQSRGPPPPQRRQQYKGRPFNKDLFLKANYKFVVLDTGDHSPDSMDPDKMLQWDDIICVRYSTPSPVQCPICLEYPLCPQITSCGHIFCFPCILQYLLTGVDNHKVDCFKRCPLCFVMISPRELYTVYIENVKQYSVGDPIEFVLLTRKKDSFAPTRKNEHDLAVPNGENEIYDPFSKFTFTQDVDLSVRQAVSELDSWIARADPQLVEDLEKHLYVNAALERLEQRKLYWNEHKLSIYSKVCTTARNQTQSLSPPDVSRVGYQAPMGGHGAPDSGSNDQDKSTEDSSADKSDGESQSSLEKGCDNDLGHPLEDQDAPSSSSCNGSKGFLSHQIDTKDLKDNDAYNFYQSVDGQHIILHTLNVKCLLHHYGSYDFLPPRLSGKILEMETITQSEAIRRRYRFLSHFSLSTTLQICEIDMKESLPPDAFAPFIHEIKKREKQRKERAWKDRKNKIKAEVAAAAELVPLMASFGQSSSSDDFPPFSLDDFEALGNSAPISSSPPNIGERSSFSHVTRLGFAAGHDSPNLNNEPTNVQSSSSSSEVSNATTGARNTNITSFASVASRTTTPMAPTVKEPGKRGKKQSRVLLSTTSVRRY

SEQ ID NO: 77287 - protein, 613 aa, Arabidopsis thaliana
  peptide (1)..(613): Ceres Seq. ID no. 12574744
MISGNHLLNFQYDPISQPQSRGPPPPQRRQQYKGRPFNKDLFLKANYKFVVLDTGDHSPDSMDPDKMLQWDDIICVRYSTPSPVQCPICLEYPLCPQITSCGHIFCFPCILQYLLTGVDNHKVDCFKRCPLCFVMISPRELYTVYIENVKQYSVGDPIEFVLLTRKKDSFAPTRKNEHDLAVPNGENEIYDPFSKFTFTQDVDLSVRQAVSELDSWIARADPQLVEDLEKHLYVNAALERLEQRKLYWNEHKLSIYSKVCTTARNQTQSLSPPDVSRVGYQAPMGGHGAPDSGSNDQDKSTEDSSADKSDGESQSSLEKGCDNDLGHPLEDQDAPSSSSCNGSKGFLSHQIDTKDLKDNDAYNFYQSVDGQHIILHTLNVKCLLHHYGSYDFLPPRLSGKILEMETITQSEAIRRRYRFLSHFSLSTTLQICEIDMKESLPPDAFAPFIHEIKKREKQRKERAWKDRKNKIKAEVAAAAELVPLMASFGQSSSSDDFPPFSLDDFEALGNSAPISSSPPNIGERSSFSHVTRLGFAAGHDSPNLNNEPTNVQSSSSSSEVSNATTGARNTNITSFASVASRTTTPMAPTVKEPGKRGKKQSRVLLSTTSVRRY

SEQ ID NO: 77288 - DNA, 1597 bp, Arabidopsis thaliana
  misc_feature (1)..(1597): Ceres Seq. ID no. 12574761
  misc_feature (1)..(1597): Ortholog of  Ceres SEQ ID NO 15175898 as cited in SEQ ID NO 57344
aatactcaattctttcttcttcaattcatcacaacaaatcaaaaactccaagttcttacctttttcccatttacaatcggtaaatttctccgatcacgagatacaaatttcactttctgatatcttggatcttccgatcactttgaattttttggtttgttgattttttttttttttttgttccataaagttcgaattttttatagagaagaaaccatgaatgctttagctgcaacaaacagaaacttccgtcatgcatctcgaatcctgggtttggattcgaagatcgagagaagtcttatgatcccatttagagaaatcaaggttgagtgtacgattcctaaagacgatggcactctggtttcatacatcggatttagggttcaacatgacaatgctcgtggacccatgaaaggtggaatcagatatcatcctgaggttgatccagatgaagttaacgcactagctcagctgatgacttggaagactgctgtagcagatattccatatggtggtgctaaaggtggaattggatgtagtcctcgtgacttgagtttgagcgagcttgagaggttgactcgtgtgtttacacagaagattcatgatcttatcggtattcataccgatgtgcctgctcctgatatgggcactaacgctcaaaccatggcttggattcttgatgagtactccaagtttcatggtcattcccctgctgttgtcactggaaagcccattgatcttggtggttcattaggtagggaagctgccacaggtcgtggtgtagtatttgccaccgaagctcttcttgctgagtacgggaaatcgattcagggtttgacatttgttattcaaggttttgggaatgttggaacatgggctgcgaagctgatccacgagaaaggcggtaaagtggttgcagtaagcgacattactggtgcaatcaggaaccctgaaggtatcgacatcaacgctctcataaaacacaaggacgcaactggaagtctcaatgatttcaatggtggagacgctatgaattcagatgaattgctcattcatgagtgtgatgttctcattccatgcgctcttggtggtgtcctgaacaaggaaaatgctggagatgtgaaggcaaagtttatagtagaggcagctaaccatccaacagatccagatgctgatgagattctgtcgaagaaaggagtgattatacttccagatatctacgcaaacgcaggaggagtgacagtgagttacttcgagtgggtgcagaacattcaaggattcatgtgggaagaggaaaaagtgaacttggagctgcaaaaatacatgactcgagcctttcacaacatcaagacaatgtgccatactcattcttgcaacctccgtatgggagctttcactcttggagttaaccgagtcgctcgagccacccagttgcgtggttgggaagcttaattcagttgaatcccccttatatactctgtttcttgcttgctctgttttccatttttttttttttggtttcattgttactgaaaatcattgagctttccgaaatggaaaaggaaacaaatggattgaataaaaactaacaaattgg

SEQ ID NO: 77289 - protein, 411 aa, Arabidopsis thaliana
  peptide (1)..(411): Ceres Seq. ID no. 12574762
MNALAATNRNFRHASRILGLDSKIERSLMIPFREIKVECTIPKDDGTLVSYIGFRVQHDNARGPMKGGIRYHPEVDPDEVNALAQLMTWKTAVADIPYGGAKGGIGCSPRDLSLSELERLTRVFTQKIHDLIGIHTDVPAPDMGTNAQTMAWILDEYSKFHGHSPAVVTGKPIDLGGSLGREAATGRGVVFATEALLAEYGKSIQGLTFVIQGFGNVGTWAAKLIHEKGGKVVAVSDITGAIRNPEGIDINALIKHKDATGSLNDFNGGDAMNSDELLIHECDVLIPCALGGVLNKENAGDVKAKFIVEAANHPTDPDADEILSKKGVIILPDIYANAGGVTVSYFEWVQNIQGFMWEEEKVNLELQKYMTRAFHNIKTMCHTHSCNLRMGAFTLGVNRVARATQLRGWEA

SEQ ID NO: 77290 - protein, 383 aa, Arabidopsis thaliana
  peptide (1)..(383): Ceres Seq. ID no. 12574763
MIPFREIKVECTIPKDDGTLVSYIGFRVQHDNARGPMKGGIRYHPEVDPDEVNALAQLMTWKTAVADIPYGGAKGGIGCSPRDLSLSELERLTRVFTQKIHDLIGIHTDVPAPDMGTNAQTMAWILDEYSKFHGHSPAVVTGKPIDLGGSLGREAATGRGVVFATEALLAEYGKSIQGLTFVIQGFGNVGTWAAKLIHEKGGKVVAVSDITGAIRNPEGIDINALIKHKDATGSLNDFNGGDAMNSDELLIHECDVLIPCALGGVLNKENAGDVKAKFIVEAANHPTDPDADEILSKKGVIILPDIYANAGGVTVSYFEWVQNIQGFMWEEEKVNLELQKYMTRAFHNIKTMCHTHSCNLRMGAFTLGVNRVARATQLRGWEA

SEQ ID NO: 77291 - protein, 347 aa, Arabidopsis thaliana
  peptide (1)..(347): Ceres Seq. ID no. 12574764
MKGGIRYHPEVDPDEVNALAQLMTWKTAVADIPYGGAKGGIGCSPRDLSLSELERLTRVFTQKIHDLIGIHTDVPAPDMGTNAQTMAWILDEYSKFHGHSPAVVTGKPIDLGGSLGREAATGRGVVFATEALLAEYGKSIQGLTFVIQGFGNVGTWAAKLIHEKGGKVVAVSDITGAIRNPEGIDINALIKHKDATGSLNDFNGGDAMNSDELLIHECDVLIPCALGGVLNKENAGDVKAKFIVEAANHPTDPDADEILSKKGVIILPDIYANAGGVTVSYFEWVQNIQGFMWEEEKVNLELQKYMTRAFHNIKTMCHTHSCNLRMGAFTLGVNRVARATQLRGWEA

SEQ ID NO: 77292 - DNA, 2391 bp, Arabidopsis thaliana
  misc_feature (1)..(2391): Ceres Seq. ID no. 12574947
  misc_feature (1)..(2391): Ortholog of  Ceres SEQ ID NO 14302828 as cited in SEQ ID NO 65549
gagagcaaagacttgacctttttcacttccttctcactgatcgtcgaacaataaggccgtcgcatctcccagttatggctatggccggagaatcttccggcaaaaaaattggagactgtgacggtaaagtcgcggggaacagacagcgaaaggtgggtcttatttacgacgagacgatgtgcaaacacgacacacctgacggcgaggatcaccctgagtgtcccgaccgcatcagagttatctgggagaagcttcagctcgccggagtttctcaaagatgtgtggttcttggtagtagcaaagcagaagataagcatctccaattggttcacacaaaggaccatgttaatttagttaagagtattagcacaaaacagaaagattatcggagaaacaggattgcttcacagttgaattcgatttatctgaatggaggttcatctgaagccgcatatcttgcagctggttctgttgtaaagttggcagaaaaagttgcagaaggagagttagattgtggttttgctattgtcaggcccccagggcaccatgctgaggcagatgaagccatgggtttttgtttattcaacaatgttgccgttgctgctagttttttactaaacgaaagaccggatctaggggtcaagaaaattctgatcgttgattgggatgtccatcacggaaatggtacccagaagatgttttggaaagatcctcgtgtactatttttctctgttcataggcatgagtatgggggtttctatccagcgggtgatgatggcgattataacatggttggggaaggtccaggtgaagggtttaacataaatgttccatgggatcaaggacgatgtggagatgcagattatcttgctgcatgggaccatatcttgattcctgtggcgagggaatttaacccggatgttatttttctttcagctggatttgatgcagctattaatgatccgctagggggttgttgtgtgaccccatatggatattcagttatgttgaagaagctgatggagtttgcacaaggaaagatagtgctggcgttagagggagggtacaatcttgactcaattgcaaagtcttcacttgcatgtgtccaagttttgcttgaagacaaacaaattcaaggacctccggaagcatacccattcgagtcgacatggcgtgtcatacaagcggtgcgcaagaggctatgcacatattggccttcacttgcagatgaattatcgtggaagctaattaatcagaaaactcctactccaatcatccttatctcaagctccgactctgaaactgaagacaacgcccaaggactcctggatcaaatgtcgaaactcagcattgaaaaccctcaaggtacactacttgaaaaccaccaagtagaacctgcatctacatcttggagagctgatctcgcaaaggttgacgtttggtatgcctcttttggatccaacatgtggaaaccaaggtttctttgctatattcaagggggacaggtcgatggattgaaaaaggtatgtgttggctcaatggataaaagtccaccaaaggaaacagtgtgggaaacatttccacatagattgttctttggccgtgaatcttcagttggttggggtgtaggaggagttgctttcaccaacccccttgctaatctcattgatcaaactcacatgtgtttgtaccgtatcacgcttgagcagttcaatgacgttctgtctcaagaaaatggtttgaatgtggattcagattctccggtctttgatctagctgctttgcagttagtagataacaaaggatccattttagaagctcctttgaatagttggtatggaaatgttgtctgcttgggaaaagaacgcgacattcctatacttacaatgacttgcacgctttccgctgttgagaaattcaaatccggtgagatccctataagacctcctgcaaaagcttatgccaacactttaataaggggacttgtggaaggaggaagattatctaaagaagaagctgaggcttacatagacaaggctgtgtctaaacctctctagtgtataattatttactcagaaaccgcccgtttgaacacgatttggagcttcgggtttctgagttattcaattaggataaaaaccacaagtttaggaatattgtgagacctttgaatttgtcttttgaaagagaggactgtgtcctctgttagctgtgttgtgcttgctccctaagcaaactctcaatgtattttagttatcttcgggttttaggctttaccaagaagctgtattcggtaaatgtattaaagaaccctccaaactgctttatattgaccggagagaaacattcttattcttcggaatggtactttgaagtttgaagagttatttt

SEQ ID NO: 77293 - protein, 684 aa, Arabidopsis thaliana
  peptide (1)..(684): Ceres Seq. ID no. 12574948
EQRLDLFHFLLTDRRTIRPSHLPVMAMAGESSGKKIGDCDGKVAGNRQRKVGLIYDETMCKHDTPDGEDHPECPDRIRVIWEKLQLAGVSQRCVVLGSSKAEDKHLQLVHTKDHVNLVKSISTKQKDYRRNRIASQLNSIYLNGGSSEAAYLAAGSVVKLAEKVAEGELDCGFAIVRPPGHHAEADEAMGFCLFNNVAVAASFLLNERPDLGVKKILIVDWDVHHGNGTQKMFWKDPRVLFFSVHRHEYGGFYPAGDDGDYNMVGEGPGEGFNINVPWDQGRCGDADYLAAWDHILIPVAREFNPDVIFLSAGFDAAINDPLGGCCVTPYGYSVMLKKLMEFAQGKIVLALEGGYNLDSIAKSSLACVQVLLEDKQIQGPPEAYPFESTWRVIQAVRKRLCTYWPSLADELSWKLINQKTPTPIILISSSDSETEDNAQGLLDQMSKLSIENPQGTLLENHQVEPASTSWRADLAKVDVWYASFGSNMWKPRFLCYIQGGQVDGLKKVCVGSMDKSPPKETVWETFPHRLFFGRESSVGWGVGGVAFTNPLANLIDQTHMCLYRITLEQFNDVLSQENGLNVDSDSPVFDLAALQLVDNKGSILEAPLNSWYGNVVCLGKERDIPILTMTCTLSAVEKFKSGEIPIRPPAKAYANTLIRGLVEGGRLSKEEAEAYIDKAVSKPL

SEQ ID NO: 77294 - protein, 660 aa, Arabidopsis thaliana; identical to SEQ ID NO: 46370
  peptide (1)..(660): Ceres Seq. ID no. 12574949

SEQ ID NO: 77295 - protein, 658 aa, Arabidopsis thaliana; identical to SEQ ID NO: 46371
  peptide (1)..(658): Ceres Seq. ID no. 12574950

SEQ ID NO: 77296 - DNA, 1402 bp, Arabidopsis thaliana
  misc_feature (1)..(1402): Ceres Seq. ID no. 12574958
  misc_feature (1)..(1402): Ortholog of  Ceres SEQ ID NO 15175957 as cited in SEQ ID NO 20615
  misc_feature (1)..(1402): Ortholog of  Ceres SEQ ID NO 14301490 as cited in SEQ ID NO 66234
gattattttctcttctcgttgaaattgatcccttctaatatttttctttttcttcttcttcttcttcataatttgtatcaatcatttcaaagaaccattctctctgtatatctccttccagtttagctatataaaggagcggtttttaaaaatatcttagaactcgattgattttgatagcttatagccaatcaagatttcttaagctctgtgaaaaatgggatgctttgcgtcaacgccgaaagactcaggtgggaacagaagaaagccaacaagcatcggtgaggtttcagtatatgtacctggtttaaggatacccagagcggtggattttttgcagtcacttggtgatcaattaccgaagactttagtggaacgcttgacagctttaagaacgcgtatagtagtgatggctaatcaagaaggacctacaattacgagaactaggagaaagacacaacatggaggttcaacgctcttggatctccatcaagctttgctagattatctacctgttgtcttgggattaactaaagatgactcttacatgtttacttctaaccaggaaacagagatgtcaaacgtttggtatgaagttttatctgttttgcatctaatggcaatgctacaaatgtctcaagccaatttactgcttcttcctagaggttctagtgatggtcacaatcatccgaaagtatccgaagaaaacagacgaacttcgattgatatcttcttaaaagcagctggatatcttgattgtgccgttaagcatgttctcccccagttttctgctgagcaaaggagaagtttaccagttgacttagcagaaggaactctacgggctctttgcttgcaagcacttggccagggtgttgatatccaacttggcatggcgattgatagctcaaaggccactcttgcagtaaaacgaagactttcatgtgaaatggtgaaatattggcagcaggcacaagataatttaatgaatctcccgttagcaaatggttggggagaaaagcatggactctttgttaagtggaagtatgttgaagctaaggctgcggcttactactatcatggtttgattcttgatgaaggaaacacagagaagtcacatggcatggcagttgctgctttacaagctgcagatgaatgtttcaaagaaagtaagaaagcatccgaagcattcaacgcctctgcgcctacttcaagaacaccgcccctctttggaacaatgaaatatctaactgagaaaatcccgaaagatacttcgagtaaagtcaggataaaccgtgatctctactcctatgaaaaaatcatggagacagcaccaacacttcctgatttcgctttggcattgaaaccagatgagtatcaacttccactcgccgaagcttcgtag

SEQ ID NO: 77297 - protein, 394 aa, Arabidopsis thaliana
  peptide (1)..(394): Ceres Seq. ID no. 12574959
MGCFASTPKDSGGNRRKPTSIGEVSVYVPGLRIPRAVDFLQSLGDQLPKTLVERLTALRTRIVVMANQEGPTITRTRRKTQHGGSTLLDLHQALLDYLPVVLGLTKDDSYMFTSNQETEMSNVWYEVLSVLHLMAMLQMSQANLLLLPRGSSDGHNHPKVSEENRRTSIDIFLKAAGYLDCAVKHVLPQFSAEQRRSLPVDLAEGTLRALCLQALGQGVDIQLGMAIDSSKATLAVKRRLSCEMVKYWQQAQDNLMNLPLANGWGEKHGLFVKWKYVEAKAAAYYYHGLILDEGNTEKSHGMAVAALQAADECFKESKKASEAFNASAPTSRTPPLFGTMKYLTEKIPKDTSSKVRINRDLYSYEKIMETAPTLPDFALALKPDEYQLPLAEAS

SEQ ID NO: 77298 - protein, 330 aa, Arabidopsis thaliana
  peptide (1)..(330): Ceres Seq. ID no. 12574960
MANQEGPTITRTRRKTQHGGSTLLDLHQALLDYLPVVLGLTKDDSYMFTSNQETEMSNVWYEVLSVLHLMAMLQMSQANLLLLPRGSSDGHNHPKVSEENRRTSIDIFLKAAGYLDCAVKHVLPQFSAEQRRSLPVDLAEGTLRALCLQALGQGVDIQLGMAIDSSKATLAVKRRLSCEMVKYWQQAQDNLMNLPLANGWGEKHGLFVKWKYVEAKAAAYYYHGLILDEGNTEKSHGMAVAALQAADECFKESKKASEAFNASAPTSRTPPLFGTMKYLTEKIPKDTSSKVRINRDLYSYEKIMETAPTLPDFALALKPDEYQLPLAEAS

SEQ ID NO: 77299 - protein, 284 aa, Arabidopsis thaliana
  peptide (1)..(284): Ceres Seq. ID no. 12574961
MFTSNQETEMSNVWYEVLSVLHLMAMLQMSQANLLLLPRGSSDGHNHPKVSEENRRTSIDIFLKAAGYLDCAVKHVLPQFSAEQRRSLPVDLAEGTLRALCLQALGQGVDIQLGMAIDSSKATLAVKRRLSCEMVKYWQQAQDNLMNLPLANGWGEKHGLFVKWKYVEAKAAAYYYHGLILDEGNTEKSHGMAVAALQAADECFKESKKASEAFNASAPTSRTPPLFGTMKYLTEKIPKDTSSKVRINRDLYSYEKIMETAPTLPDFALALKPDEYQLPLAEAS

SEQ ID NO: 77300 - DNA, 1965 bp, Arabidopsis thaliana
  misc_feature (1)..(1965): Ceres Seq. ID no. 12574991
  misc_feature (1)..(1965): Ortholog of  Ceres SEQ ID NO 14314319 as cited in SEQ ID NO 57500
gtctctttgctttaataatttccttctcaccgaaacacacaccacaaccaattctcttctccttcttcctctttcacaaattcgtcatctgggtattcttaaatttctcacaaattcatttacttttttgttctgttccgagatttcaaggttcactatcgattctgaaactcttggaacaatccagattcttggttagcaggtggggaagcattaatcatgtatttatgatacactgctccattattattacgagagagttgaaagtttcctttttgactcgtttttaaaggcaaggaagaagaaagactttgtttttaaaatgccaatgtttcagccttctaagaacggtgggtttgatgggcatatcttagatctacactcggcggttaaagacggtgttcttggcggcggagatgggaaatttctggtggttgttaccgatgagaagaagaaattggatttgaaggagatgatttctgagctggaattacctgaaataccctctgttttcatctgtcctatctctctagagccgatgcaagatccagtgaccttgtgtactggtcaaacctacgagaggtccaacattctcaaatggttcaatatagggcattgtacttgcccaacgacgatgcaagagctttgggatgatttggtcactcctaacaagactcttcaccaattgatctacacttggttttcacagaagtatgttttgatgaagaaacgatctgaagatgtgcaaggacgtgctattgagattctgggtacgttgagaaaggctaaagggaaagcaaaggttcatgctttaagcgagcttaagcaagttgtgatggctcacgctattgctaagaagactgttgttgatgaaggtggagtctttgtgatctcttctcttttaagtccttttacttctcacgctgttggatctgaggctatagctattcttgttaatcttgagcttgactctgattccaaagctggattgatgcaaccagctagggtctcgttgatggttgatatgttgaatgatggttcgattgaaactaagatcaattgtgctagattgattggaaggttggtggaggagaaaggttttagagcagagcttgtttctagtcatagtttgcttgttggattaatgagattggttaaagataggagacgaagaaacggcgtttcgcctgcgttaacgctgctcaaatcggtttctgttcataaacaagttaggaacttgttggttaggattggtgcagttcctcaattggttgatgttttgccatgtttggatgtggagtgtttagagtcagctcttttcgtgttggattcgttatgtttagaaagcgaaggcagaattgctttgaaagattcggttaacacgattccgcataccgttaggttactgatgaaggtatcagagaaatgcacaaactatgcgatatcgattctttggtcagtttgcaaattagcttctgaagaatgttcatctcttgctgttgaagttggtttggctgcaaagcttttgcttgtgatacaaagtggatgtgatccagctttgaagcaacgttcagctgagctattgaagttatgtagtctacattattcagactcaatgtttatctccaaatgtaaactcacaagaactatccaataaaagactgatcaagttttcacctttcgggtcaaaatcacacaacggatctgccccatcttgttgatgtatatagaaatgaagaagctcaaggagtatgagagtaagaaacgagtttcgatgtgttgaattctattttgcaatgttatttgaataataatagttaagtagaagtaaactgtataaatctttttgttgtggttggttcattattcagtagaagaatagattgaagaaaggaatcatttttttggcctcttgtaagttactagctgtttgtgagtcataataattggagaaattattgatct

SEQ ID NO: 77301 - protein, 444 aa, Arabidopsis thaliana
  peptide (1)..(444): Ceres Seq. ID no. 12574992
MPMFQPSKNGGFDGHILDLHSAVKDGVLGGGDGKFLVVVTDEKKKLDLKEMISELELPEIPSVFICPISLEPMQDPVTLCTGQTYERSNILKWFNIGHCTCPTTMQELWDDLVTPNKTLHQLIYTWFSQKYVLMKKRSEDVQGRAIEILGTLRKAKGKAKVHALSELKQVVMAHAIAKKTVVDEGGVFVISSLLSPFTSHAVGSEAIAILVNLELDSDSKAGLMQPARVSLMVDMLNDGSIETKINCARLIGRLVEEKGFRAELVSSHSLLVGLMRLVKDRRRRNGVSPALTLLKSVSVHKQVRNLLVRIGAVPQLVDVLPCLDVECLESALFVLDSLCLESEGRIALKDSVNTIPHTVRLLMKVSEKCTNYAISILWSVCKLASEECSSLAVEVGLAAKLLLVIQSGCDPALKQRSAELLKLCSLHYSDSMFISKCKLTRTIQ

SEQ ID NO: 77302 - protein, 442 aa, Arabidopsis thaliana
  peptide (1)..(442): Ceres Seq. ID no. 12574993
MFQPSKNGGFDGHILDLHSAVKDGVLGGGDGKFLVVVTDEKKKLDLKEMISELELPEIPSVFICPISLEPMQDPVTLCTGQTYERSNILKWFNIGHCTCPTTMQELWDDLVTPNKTLHQLIYTWFSQKYVLMKKRSEDVQGRAIEILGTLRKAKGKAKVHALSELKQVVMAHAIAKKTVVDEGGVFVISSLLSPFTSHAVGSEAIAILVNLELDSDSKAGLMQPARVSLMVDMLNDGSIETKINCARLIGRLVEEKGFRAELVSSHSLLVGLMRLVKDRRRRNGVSPALTLLKSVSVHKQVRNLLVRIGAVPQLVDVLPCLDVECLESALFVLDSLCLESEGRIALKDSVNTIPHTVRLLMKVSEKCTNYAISILWSVCKLASEECSSLAVEVGLAAKLLLVIQSGCDPALKQRSAELLKLCSLHYSDSMFISKCKLTRTIQ

SEQ ID NO: 77303 - protein, 394 aa, Arabidopsis thaliana
  peptide (1)..(394): Ceres Seq. ID no. 12574994
MISELELPEIPSVFICPISLEPMQDPVTLCTGQTYERSNILKWFNIGHCTCPTTMQELWDDLVTPNKTLHQLIYTWFSQKYVLMKKRSEDVQGRAIEILGTLRKAKGKAKVHALSELKQVVMAHAIAKKTVVDEGGVFVISSLLSPFTSHAVGSEAIAILVNLELDSDSKAGLMQPARVSLMVDMLNDGSIETKINCARLIGRLVEEKGFRAELVSSHSLLVGLMRLVKDRRRRNGVSPALTLLKSVSVHKQVRNLLVRIGAVPQLVDVLPCLDVECLESALFVLDSLCLESEGRIALKDSVNTIPHTVRLLMKVSEKCTNYAISILWSVCKLASEECSSLAVEVGLAAKLLLVIQSGCDPALKQRSAELLKLCSLHYSDSMFISKCKLTRTIQ

SEQ ID NO: 77304 - DNA, 1143 bp, Arabidopsis thaliana
  misc_feature (1)..(1143): Ceres Seq. ID no. 12575106
  misc_feature (1)..(1143): Ortholog of  Ceres SEQ ID NO 14303381 as cited in SEQ ID NO 53959
ataatccccagacgaagacgaagccgaagataacggaacaatcaaatcaatcatacagaagcagctaatggcgttgagaatcaggaaggcgacgacgacacttctcttctccggtgggattactcatggaacggatcggatcgcgagaaccggagcattgctcagccgttggatctcctctgcttcgtcatcttccgctgttgtagcggatgatgaatctagtgggatttacggattgggaagtgtgttgaaagagtatgaagattataggagatctctctatggtgagatcactcataaggctttgcttgttgatgctgttggtactctccttgttcccgctcaacctactgctcagatatataagaatattggagagaagtacggagtggagtactcggaggctgagatacttactagatacagaagagcttatcagaaaccatggggtggatctcatcttagatatgtaaacgatgcaagacctttctggcagtatatagtgactgcatcaacaggctgctcggattcacagtactttgaagagctttacagctattttactacagaacaggcgtggaagttatgtgatccagatgcagggaaagtgtttaaggctattaaagaagcgggtgtaaaagttgcaatagtctccaacttcgatactcggttaagacctctcctacgtgcattgagatgtgaagattggtttgatgctgtagctgtttcagcagaagttgaagcggaaaaaccaaacccgactatcttcttaaaagcttgtgagttattagaagtgaatcccgaggatgcggttcatgtaggagatgaccgtaggaatgatgtatggggagctagagacgcaggctgtgacgcttggctctggggaagtgaagttacgtcatttaaacaggttgctcaacggataggagtgaaggtctgaagcaaaagcatatgagagaaatggttcagagacatgttcagacttcagttttagcttcttctttttttgtgtgagcagttttgtatattccatttctcttttgtagcataatgtgtgtaatatatgttgcggctaatgtagaaaaccagaaaacaatgtataataaaagatcaataataagcttcatgatcgttcttaatccg

SEQ ID NO: 77305 - protein, 290 aa, Arabidopsis thaliana
  peptide (1)..(290): Ceres Seq. ID no. 12575107
MALRIRKATTTLLFSGGITHGTDRIARTGALLSRWISSASSSSAVVADDESSGIYGLGSVLKEYEDYRRSLYGEITHKALLVDAVGTLLVPAQPTAQIYKNIGEKYGVEYSEAEILTRYRRAYQKPWGGSHLRYVNDARPFWQYIVTASTGCSDSQYFEELYSYFTTEQAWKLCDPDAGKVFKAIKEAGVKVAIVSNFDTRLRPLLRALRCEDWFDAVAVSAEVEAEKPNPTIFLKACELLEVNPEDAVHVGDDRRNDVWGARDAGCDAWLWGSEVTSFKQVAQRIGVKV

SEQ ID NO: 77306 - DNA, 946 bp, Arabidopsis thaliana
  misc_feature (1)..(946): Ceres Seq. ID no. 12575188
  misc_feature (1)..(946): Ortholog of  Ceres SEQ ID NO 14310350 as cited in SEQ ID NO 20670
  misc_feature (1)..(946): Ortholog of  Ceres SEQ ID NO 15177648 as cited in SEQ ID NO 58917
gatggaaaaagttttctccgacgaagaaatctccggtaaccatcactggtcggttaatggaatgacgtcgttgaatcgcagtgcttccgaatgggcattcaatcgtttcatacaagaatcctccgccgctgcagacgacggagaatctacgacggcgtgtggtgtttccgtctcctctcctcctaatgttcctgtagattcagaggaatacagagcatttctcaagagtaaacttaatcttgcttgtgctgctgtcgccatgaaaaggggaactttcatcaaacctcaggatacttctggtagatctgacaatggtggagccaatgaatcagaacaagcctctcttgcttcttccaaagctacaccaatgatgagcagtgctataacaagtggatctgagctctctggtgatgaagaagaagctgatggtgaaactaatatgaaccctactaatgttaaacgcgttaaaaggatgctctctaatagagaatcagctagacggtccagaagaagaaagcaagcacacttgagtgagctagagacacaagtttcacagcttcgtgtagagaattcaaaactcatgaagggtctcactgatgtaactcaaacattcaatgatgcatctgtagaaaacagagttttaaaagccaatattgagacactacgagcaaaggtgaaaatggctgaagagacagtgaagagactcactggctttaacccaatgttccacaatatgcctcagattgtttcaactgtctctcttccttcagagacatcaaattctccagacactacaagcagccaagtgactacaccagagatcattagctcggggaacaaaggcaaggccttgatagggtgcaagatgaacagaacagcttcgatgcgtagagttgagagcttggaacatctgcagaaacgtattcgaagcgttggggatcagtag

SEQ ID NO: 77307 - protein, 314 aa, Arabidopsis thaliana
  peptide (1)..(314): Ceres Seq. ID no. 12575189
MEKVFSDEEISGNHHWSVNGMTSLNRSASEWAFNRFIQESSAAADDGESTTACGVSVSSPPNVPVDSEEYRAFLKSKLNLACAAVAMKRGTFIKPQDTSGRSDNGGANESEQASLASSKATPMMSSAITSGSELSGDEEEADGETNMNPTNVKRVKRMLSNRESARRSRRRKQAHLSELETQVSQLRVENSKLMKGLTDVTQTFNDASVENRVLKANIETLRAKVKMAEETVKRLTGFNPMFHNMPQIVSTVSLPSETSNSPDTTSSQVTTPEIISSGNKGKALIGCKMNRTASMRRVESLEHLQKRIRSVGDQ

SEQ ID NO: 77308 - protein, 294 aa, Arabidopsis thaliana
  peptide (1)..(294): Ceres Seq. ID no. 12575190
MTSLNRSASEWAFNRFIQESSAAADDGESTTACGVSVSSPPNVPVDSEEYRAFLKSKLNLACAAVAMKRGTFIKPQDTSGRSDNGGANESEQASLASSKATPMMSSAITSGSELSGDEEEADGETNMNPTNVKRVKRMLSNRESARRSRRRKQAHLSELETQVSQLRVENSKLMKGLTDVTQTFNDASVENRVLKANIETLRAKVKMAEETVKRLTGFNPMFHNMPQIVSTVSLPSETSNSPDTTSSQVTTPEIISSGNKGKALIGCKMNRTASMRRVESLEHLQKRIRSVGDQ

SEQ ID NO: 77309 - protein, 228 aa, Arabidopsis thaliana
  peptide (1)..(228): Ceres Seq. ID no. 12575191
MKRGTFIKPQDTSGRSDNGGANESEQASLASSKATPMMSSAITSGSELSGDEEEADGETNMNPTNVKRVKRMLSNRESARRSRRRKQAHLSELETQVSQLRVENSKLMKGLTDVTQTFNDASVENRVLKANIETLRAKVKMAEETVKRLTGFNPMFHNMPQIVSTVSLPSETSNSPDTTSSQVTTPEIISSGNKGKALIGCKMNRTASMRRVESLEHLQKRIRSVGDQ

SEQ ID NO: 77310 - DNA, 1983 bp, Arabidopsis thaliana
  misc_feature (1)..(1983): Ceres Seq. ID no. 12575255
  misc_feature (1)..(1983): Ortholog of  Ceres SEQ ID NO 15174606 as cited in SEQ ID NO 54460
atccaaaatactgattagtgtctgttttaaatgatcctaccttataaaaacgacgacacatctctctctcgtcttcttcttcctctaaacctgtgaaaaactttggatcaatcaacaatggcggatctctctcttcctcccgattccctcttcctcggcttcgacagctctacccagtcaatgaaagcaactgtgttggattcgaacctgaacattatcaaaaccgaactcgttcatttcgattctgatcttcctcaatacaaaaccaaagacggggtttacagagacactactgtaaacggaagaatcgtatctccaactctcatgtgggtcgaagcatttgatctcattctccagaagctctctaacgccaatttcgatttcgccaaagttatcgctgtttcaggcagcgggcaacaacacggtagtgtgtattggtcaaaaggtagttctgaggtattgagatcattggattcaaagagatcattgaaagaacaactcgaaaacgctttttcggttaaggaatctcctatatggatggatagtagtactacattgcaatgtaaagagattgagaatgctgttggtggagctatggagttgtcgaagatcactggctctcgtgcttatgagcggtttactggtccgcagatacggaagctttttatgactcagggggaggtgtataagagcacggagaggatttcgcttgttagctcttttatggcgtctttgttggttggagattatgcttgtattgatgaaactgatgctgctgggatgaatttgatggatattgagaaacgttgttggtctaaagctgcgttagaggctacagcgacaggtttggaggagaaacttgggaagttagctccagcttatgctactgctggttctatttctcagtattttgttcagaggttcggttttgaaaagaactgtgtggttgtgcagtggtcgggagataatcctaatagcttggcaggtctaactcttagtactcctggagatctggcgatcagtcttggaaccagtgacacggtatttgggattaccaaagaacttcaacccagtcttgagggtcatgtgttacctaatcctgtggaccctgagagttatatggtgatgttggtttacaagaatgcttctctcacccgggaagaaattcgtgaccgttgtgctgagggatcttgggatgtttttaataagtatttgcagcaaacacagccactaaacaatgggaaactcggcttctactacactgaaaatgaaattctgcccccacttcccgttggctctcatcgttacattcttgagaacttctctggtgagtctcttgagggtgtgaaggaacaagaggtcggtgagttcgaccctccctcagaggttagggcattgattgaaggtcagtttctttcaaagcgggctcatactgagagatttggtatgccctcccctcccctccgaataatagcaaccggaggtgcatctgctaacgagaatatcttgagtctgatctcagcaatcttcggatgtgatgtatatactgtccaaaggcctgattcagcatcacttggagctgcactaagagctgctcatggctggctctgcaacaaaaaaggaagctttgtaccaatctcaaatctctacgaagggaaattggaaacaacatctctgaactgcaagctcaaggtaaaagcaggagacgcgaacattgcttccacctatggtttgttgatgaagaagaggatggaaatagagaacaagcttgtggagaagttaggccacttctgagaagaaaaaaactcactactcaataattcaaataacttaaagagttgaaagaataacaagttctatctactaaaactaaaagacaagtttgcttgttgctcaaaataaaagcagaatacgatcttacgatctctgagtaacaaatgattcgtaagacattgctcttaatctagtttatgtcatacactt

SEQ ID NO: 77311 - protein, 558 aa, Arabidopsis thaliana
  peptide (1)..(558): Ceres Seq. ID no. 12575256
MADLSLPPDSLFLGFDSSTQSMKATVLDSNLNIIKTELVHFDSDLPQYKTKDGVYRDTTVNGRIVSPTLMWVEAFDLILQKLSNANFDFAKVIAVSGSGQQHGSVYWSKGSSEVLRSLDSKRSLKEQLENAFSVKESPIWMDSSTTLQCKEIENAVGGAMELSKITGSRAYERFTGPQIRKLFMTQGEVYKSTERISLVSSFMASLLVGDYACIDETDAAGMNLMDIEKRCWSKAALEATATGLEEKLGKLAPAYATAGSISQYFVQRFGFEKNCVVVQWSGDNPNSLAGLTLSTPGDLAISLGTSDTVFGITKELQPSLEGHVLPNPVDPESYMVMLVYKNASLTREEIRDRCAEGSWDVFNKYLQQTQPLNNGKLGFYYTENEILPPLPVGSHRYILENFSGESLEGVKEQEVGEFDPPSEVRALIEGQFLSKRAHTERFGMPSPPLRIIATGGASANENILSLISAIFGCDVYTVQRPDSASLGAALRAAHGWLCNKKGSFVPISNLYEGKLETTSLNCKLKVKAGDANIASTYGLLMKKRMEIENKLVEKLGHF

SEQ ID NO: 77312 - protein, 537 aa, Arabidopsis thaliana
  peptide (1)..(537): Ceres Seq. ID no. 12575257
MKATVLDSNLNIIKTELVHFDSDLPQYKTKDGVYRDTTVNGRIVSPTLMWVEAFDLILQKLSNANFDFAKVIAVSGSGQQHGSVYWSKGSSEVLRSLDSKRSLKEQLENAFSVKESPIWMDSSTTLQCKEIENAVGGAMELSKITGSRAYERFTGPQIRKLFMTQGEVYKSTERISLVSSFMASLLVGDYACIDETDAAGMNLMDIEKRCWSKAALEATATGLEEKLGKLAPAYATAGSISQYFVQRFGFEKNCVVVQWSGDNPNSLAGLTLSTPGDLAISLGTSDTVFGITKELQPSLEGHVLPNPVDPESYMVMLVYKNASLTREEIRDRCAEGSWDVFNKYLQQTQPLNNGKLGFYYTENEILPPLPVGSHRYILENFSGESLEGVKEQEVGEFDPPSEVRALIEGQFLSKRAHTERFGMPSPPLRIIATGGASANENILSLISAIFGCDVYTVQRPDSASLGAALRAAHGWLCNKKGSFVPISNLYEGKLETTSLNCKLKVKAGDANIASTYGLLMKKRMEIENKLVEKLGHF

SEQ ID NO: 77313 - protein, 489 aa, Arabidopsis thaliana
  peptide (1)..(489): Ceres Seq. ID no. 12575258
MWVEAFDLILQKLSNANFDFAKVIAVSGSGQQHGSVYWSKGSSEVLRSLDSKRSLKEQLENAFSVKESPIWMDSSTTLQCKEIENAVGGAMELSKITGSRAYERFTGPQIRKLFMTQGEVYKSTERISLVSSFMASLLVGDYACIDETDAAGMNLMDIEKRCWSKAALEATATGLEEKLGKLAPAYATAGSISQYFVQRFGFEKNCVVVQWSGDNPNSLAGLTLSTPGDLAISLGTSDTVFGITKELQPSLEGHVLPNPVDPESYMVMLVYKNASLTREEIRDRCAEGSWDVFNKYLQQTQPLNNGKLGFYYTENEILPPLPVGSHRYILENFSGESLEGVKEQEVGEFDPPSEVRALIEGQFLSKRAHTERFGMPSPPLRIIATGGASANENILSLISAIFGCDVYTVQRPDSASLGAALRAAHGWLCNKKGSFVPISNLYEGKLETTSLNCKLKVKAGDANIASTYGLLMKKRMEIENKLVEKLGHF

SEQ ID NO: 77314 - DNA, 2264 bp, Arabidopsis thaliana
  misc_feature (1)..(2264): Ceres Seq. ID no. 12575298
  misc_feature (1)..(2264): Ortholog of  Ceres SEQ ID NO 14315774 as cited in SEQ ID NO 20630
ggcgcaacgttgtaacaaaaatcgtcctctcagttccaatctctctcagattctcctcctcatcacaattcctcactcctttgattcttgtcccagagtcacgtcctctcctattcgggtctctacagagtctaactctgacccgacccgacccaattcactaaatggaggacgaaccaaagctcccaaccgatgacggtccaactttcaacgaatcgtgtaaaatctcgtctgagatattgaccgccggtgatcggaaattacttaaagttgaactcctcaaagaggagaccacgctcgtatcgtggaagaagcttatggatgaggctagcaaagaaaacggcggcttgttcgtttcggctcccgaacggcttcttaatgccaaccctaacctcgagtttcgccttgcaccgggggcacaaacagagaatgaaatggtgaatcaacctcatcctaatcgtcttaactctgttatagccaagattgagagactttatatgggtaaagacggtagtgatggggaagagttagacggtgctcctgacgatgatgactatgacactgaagattcatttatcgatgatgctgaattggatgagtattttgaagttgataattcgccaattaaacatgatggattttttgtcaatagaggaaagttagaacgaattgaaccttcagctacatcgaaccagcagcaaccaaagaaaaggcgaaggaaggagtcagcaaaaccttgtggcgatgttgttgatgtatccagaaaacgagccaagatggctaagacggctgggggaaaggatcaatctgcttctcctgggccctcttcgaagaaaatttccaatgattcaaagacggtgcaagattcgttttcccctttgaaagcgcaaaatggcaatgattccttagttttggaaaatgtgaagcatactgataaagcgaatcaccagccaatgaatgccacgagtccgaagtcaaaggcagctggatcttctggcccccttcatccgaagtgcagcagcaaaagtgttcatgaacaatctaattcccctccaggaaaatctcggccaaatgtttcggcaaaatcagcagtagttcgtcagcaagttaacaatggcatgcctgacctggacattgcaacggaaagcaaaacatctattcaaatatctaaaaaaagcggttcaaatggccggcctaaatactcgacacttgagaaagccatcaggaatttggagaagttggtcgctgaatcaaggcctcctgctgccactgagaatcaagatgccgatatctcttcccaagcagtgaagaggggattgccaggagatgtaaaattgcatcttgctaaagttgctagaatcgcgtatgcgagccaaggtgaaatatcaggagagttaatcaatcgtctcatgggcattgtcggtcatctaatacagattagatcacttaaggtgaaagctcttccattccagaaagagctaacaagatctgtatttgttagtgaaggagttcaagctcttacggaaacaaatcaagaagctggaacatcagacgattttcaggatgttggatctcttggaaagtcacctgtgaagaagtttgtcatggatgtggcgctggaggaaaaattgtgtgatctatatgacgtgtttgttgagggaatggatgaacattcaggttcacaaatcagaaagctttattcagatctagctcaactgtggcccaatagtttagttgacaatcatgagatcaggcgtgccatttgccgggaaaaggaaaggcggagagcattggaaggaaacattgggaaggagatggatcaaacgaagataacaaagaagaaacagacacaattggtccctaaatctgagggtattacttatcccgacaagacttcaggtgttgaagttaaagcaagtgttgtcctaactgcaaccaccacgtccttagtggactgtcaacctgcagcagactcgtcctttgaaaggtcaaagcagcaacatgagaaattaaagcgaacttcgagcttaagcaatcctgcagcagaaggaaagaaagtcagaagaaagacagaaccagctctagaagaaactcacctgcccgcagagaaacccctcgttctggccctgaagcggcagacacatctaaaatccaagacacataaacaggtacaggtacatccacagtccaaggcacataaacaggcacaggtacatccaaaggccaagacacagactcctccagacctgaacctgccaagttag

SEQ ID NO: 77315 - protein, 699 aa, Arabidopsis thaliana
  peptide (1)..(699): Ceres Seq. ID no. 12575299
MEDEPKLPTDDGPTFNESCKISSEILTAGDRKLLKVELLKEETTLVSWKKLMDEASKENGGLFVSAPERLLNANPNLEFRLAPGAQTENEMVNQPHPNRLNSVIAKIERLYMGKDGSDGEELDGAPDDDDYDTEDSFIDDAELDEYFEVDNSPIKHDGFFVNRGKLERIEPSATSNQQQPKKRRRKESAKPCGDVVDVSRKRAKMAKTAGGKDQSASPGPSSKKISNDSKTVQDSFSPLKAQNGNDSLVLENVKHTDKANHQPMNATSPKSKAAGSSGPLHPKCSSKSVHEQSNSPPGKSRPNVSAKSAVVRQQVNNGMPDLDIATESKTSIQISKKSGSNGRPKYSTLEKAIRNLEKLVAESRPPAATENQDADISSQAVKRGLPGDVKLHLAKVARIAYASQGEISGELINRLMGIVGHLIQIRSLKVKALPFQKELTRSVFVSEGVQALTETNQEAGTSDDFQDVGSLGKSPVKKFVMDVALEEKLCDLYDVFVEGMDEHSGSQIRKLYSDLAQLWPNSLVDNHEIRRAICREKERRRALEGNIGKEMDQTKITKKKQTQLVPKSEGITYPDKTSGVEVKASVVLTATTTSLVDCQPAADSSFERSKQQHEKLKRTSSLSNPAAEGKKVRRKTEPALEETHLPAEKPLVLALKRQTHLKSKTHKQVQVHPQSKAHKQAQVHPKAKTQTPPDLNLPS

SEQ ID NO: 77316 - protein, 648 aa, Arabidopsis thaliana
  peptide (1)..(648): Ceres Seq. ID no. 12575300
MDEASKENGGLFVSAPERLLNANPNLEFRLAPGAQTENEMVNQPHPNRLNSVIAKIERLYMGKDGSDGEELDGAPDDDDYDTEDSFIDDAELDEYFEVDNSPIKHDGFFVNRGKLERIEPSATSNQQQPKKRRRKESAKPCGDVVDVSRKRAKMAKTAGGKDQSASPGPSSKKISNDSKTVQDSFSPLKAQNGNDSLVLENVKHTDKANHQPMNATSPKSKAAGSSGPLHPKCSSKSVHEQSNSPPGKSRPNVSAKSAVVRQQVNNGMPDLDIATESKTSIQISKKSGSNGRPKYSTLEKAIRNLEKLVAESRPPAATENQDADISSQAVKRGLPGDVKLHLAKVARIAYASQGEISGELINRLMGIVGHLIQIRSLKVKALPFQKELTRSVFVSEGVQALTETNQEAGTSDDFQDVGSLGKSPVKKFVMDVALEEKLCDLYDVFVEGMDEHSGSQIRKLYSDLAQLWPNSLVDNHEIRRAICREKERRRALEGNIGKEMDQTKITKKKQTQLVPKSEGITYPDKTSGVEVKASVVLTATTTSLVDCQPAADSSFERSKQQHEKLKRTSSLSNPAAEGKKVRRKTEPALEETHLPAEKPLVLALKRQTHLKSKTHKQVQVHPQSKAHKQAQVHPKAKTQTPPDLNLPS

SEQ ID NO: 77317 - protein, 609 aa, Arabidopsis thaliana
  peptide (1)..(609): Ceres Seq. ID no. 12575301
MVNQPHPNRLNSVIAKIERLYMGKDGSDGEELDGAPDDDDYDTEDSFIDDAELDEYFEVDNSPIKHDGFFVNRGKLERIEPSATSNQQQPKKRRRKESAKPCGDVVDVSRKRAKMAKTAGGKDQSASPGPSSKKISNDSKTVQDSFSPLKAQNGNDSLVLENVKHTDKANHQPMNATSPKSKAAGSSGPLHPKCSSKSVHEQSNSPPGKSRPNVSAKSAVVRQQVNNGMPDLDIATESKTSIQISKKSGSNGRPKYSTLEKAIRNLEKLVAESRPPAATENQDADISSQAVKRGLPGDVKLHLAKVARIAYASQGEISGELINRLMGIVGHLIQIRSLKVKALPFQKELTRSVFVSEGVQALTETNQEAGTSDDFQDVGSLGKSPVKKFVMDVALEEKLCDLYDVFVEGMDEHSGSQIRKLYSDLAQLWPNSLVDNHEIRRAICREKERRRALEGNIGKEMDQTKITKKKQTQLVPKSEGITYPDKTSGVEVKASVVLTATTTSLVDCQPAADSSFERSKQQHEKLKRTSSLSNPAAEGKKVRRKTEPALEETHLPAEKPLVLALKRQTHLKSKTHKQVQVHPQSKAHKQAQVHPKAKTQTPPDLNLPS

SEQ ID NO: 77318 - DNA, 1296 bp, Arabidopsis thaliana
  misc_feature (1)..(1296): Ceres Seq. ID no. 12575415
  misc_feature (1)..(1296): Ortholog of  Ceres SEQ ID NO 15227289 as cited in SEQ ID NO 58851
  misc_feature (1)..(1296): Ortholog of  Ceres SEQ ID NO 13584416 as cited in SEQ ID NO 63441
ataacgagagattttttatatataaaaaataaaggaagcacgagttcaccttaaaaatttgagtttctcttttcttgaccctgaagtttcgttttgatcaatttcacccatttctttgttcgtcgtcttttctttcaaaagggtttcatctttgtattataaaaatccaaactttatatcttcacaagcagcaaagatctctatttcaatcctctcatggaaactgcttctctttctttccctgtcccaaacacgagcttcggtgtaaacaaatctatgcctctcggtctaaaccagctcacaccataccaaattcatcagattcagaaccagcttaaccatagacgtagcacaatctcaaacctctctccaaaccgtatcagaatgaagaacttaacaccttctacctccaaaaccaagaatctctacagaggcgtaaggcaaaggcactgggggaaatgggtcgctgagatccgtttgcccaagaaccggacccgtctctggctcgggacattcgaaaccgccgaaaaagccgccttagcttacgaccaagctgcttttcagctccgtggagatatcgcgaagcttaacttcccaaacctcatacacgaagacatgaatcctctcccttcctctgttgataccaagcttcaagctatctgcaaaagtttgagaaaaacagaggaaatttgctctgtttctgatcaaacaaaggagtactctgtttactctgtttcagataaaacagagcttttcctgccaaaagcagagcttttcttgcctaaaagagagcatttggagacaaatgagctctctaatgagtcaccgagaagcgatgagacctcgttgttggatgagtcgcaggcggaatattcatcgtcggataaaacattcctggatttctcggatactgagtttgaagagattggaagtttcgggcttcggaagtttccttcggtggagattgattgggatgcaattagtaaactggccaattcttaaagtcttctattttatattaatcttctgtgcaactgaaattttcaacaagttgcagatgagtttattaggtttgaatctgtcctagttttctttgttggtcgtatagagttttactatgtagctaatctccatgtttggtttggcttggtaagtttttaaggtcctcgtcatcaacaaaccggagaaagtttatgtattcaaaagctatgtattatatcctcacatctacttatgagagtgagatcaaagtttgtaaaatgaagtcttgatttcttcttttagttctctcttttt

SEQ ID NO: 77319 - protein, 261 aa, Arabidopsis thaliana
  peptide (1)..(261): Ceres Seq. ID no. 12575416
METASLSFPVPNTSFGVNKSMPLGLNQLTPYQIHQIQNQLNHRRSTISNLSPNRIRMKNLTPSTSKTKNLYRGVRQRHWGKWVAEIRLPKNRTRLWLGTFETAEKAALAYDQAAFQLRGDIAKLNFPNLIHEDMNPLPSSVDTKLQAICKSLRKTEEICSVSDQTKEYSVYSVSDKTELFLPKAELFLPKREHLETNELSNESPRSDETSLLDESQAEYSSSDKTFLDFSDTEFEEIGSFGLRKFPSVEIDWDAISKLANS

SEQ ID NO: 77320 - protein, 241 aa, Arabidopsis thaliana
  peptide (1)..(241): Ceres Seq. ID no. 12575417
MPLGLNQLTPYQIHQIQNQLNHRRSTISNLSPNRIRMKNLTPSTSKTKNLYRGVRQRHWGKWVAEIRLPKNRTRLWLGTFETAEKAALAYDQAAFQLRGDIAKLNFPNLIHEDMNPLPSSVDTKLQAICKSLRKTEEICSVSDQTKEYSVYSVSDKTELFLPKAELFLPKREHLETNELSNESPRSDETSLLDESQAEYSSSDKTFLDFSDTEFEEIGSFGLRKFPSVEIDWDAISKLANS

SEQ ID NO: 77321 - protein, 205 aa, Arabidopsis thaliana
  peptide (1)..(205): Ceres Seq. ID no. 12575418
MKNLTPSTSKTKNLYRGVRQRHWGKWVAEIRLPKNRTRLWLGTFETAEKAALAYDQAAFQLRGDIAKLNFPNLIHEDMNPLPSSVDTKLQAICKSLRKTEEICSVSDQTKEYSVYSVSDKTELFLPKAELFLPKREHLETNELSNESPRSDETSLLDESQAEYSSSDKTFLDFSDTEFEEIGSFGLRKFPSVEIDWDAISKLANS

SEQ ID NO: 77322 - DNA, 1740 bp, Arabidopsis thaliana
  misc_feature (1)..(1740): Ceres Seq. ID no. 12575490
  misc_feature (1)..(1740): Ortholog of  Ceres SEQ ID NO 15175785 as cited in SEQ ID NO 56970
atggctttcgctgtctcggttcagtcacatttcgcaatcagagcgttaaaacgagaccacttcaagaacccttctcctcgtactttctgctcgtgttttaaatcgaggcctgactcgtcttaccttagtttaaaggaacgtacttgcttcgtttccaaaccgggtttagtcactactagatacagacatatattccaggtcggagctgagacgggaggagagttcgccgacagtggagaagtagctgattcgcttgcttctgatgcaccagagtcattttcttggtcttctgtgatactcccgtttatcttcccggctttgggaggattattgtttgggtatgacattggggctacctccggtgctacgctctcacttcagtcacctgcgcttagcggaactacatggtttaacttctcacctgttcagctaggacttgtggttagcggatccttgtatggagcccttcttggctcaatttctgtctatggcgttgctgatttccttggaagaaggcgggaacttattatagctgctgttctctatctcctcgggtctctgatcactggctgtgcccctgatcttaatattctcttagttggaaggcttctctatggctttggtattggtttggtgagctccggaaacctgaatcgttatgacatgcccatctcaaatccgtggaactttgatatctctgaaagaactcttcatcgtattgggaattttggtaagtgtctgatgtcaatctcttcccagtatgatttctgcgtaaatattgatttccttcttgtgcagttgggtttttctgttggaagcttccagattgatgtagttggagggtggcgttacatgtatggatttggtacgcctgttgctttgctgatgggactaggcatgtggagtctccctgcatctcctcgctggttgctgcttagagctgtccaaggtaaaggacaattacaagaatacaaagagaaggccatgcttgccctcagcaaattacgtggcagacctccaggtgataaaatctcagagaagttggtagatgatgcctatttatctgtgaaaacggcctatgaagatgagaaatctgggggaaacttcctggaagtattccaagggcctaatttgaaagctttgacaattggtggaggtttagtcctcttccaacagataactggacagcctagtgttctttattatgcgggttcgattcttcagactgctggattctctgctgctgctgatgcaactcgagtctctgttattattggtgttttcaagttactgatgacatgggtagctgttgcgaaagttgatgatctcggcagacgacctttactgattggaggtgtcagcggcattgcgttgtccttgtttctactgtcagcatactacaagtttctcggaggctttccccttgtcgctgttggtgcactgcttctctatgttggttgttaccagatctcatttggacccatcagctggctaatggtgtcagagattttcccgctccgcacaagagggagagggatcagtcttgcagttcttacaaactttggctccaatgctattgtgacatttgcattttcacctttaaaggaatttcttggagccgagaatcttttccttctctttgggggcatagcactggtatcactgctgtttgtaatactagtagttccagagaccaagggtctcagcttggaagaaattgaatcaaaaatcttgaagtga

SEQ ID NO: 77323 - protein, 579 aa, Arabidopsis thaliana
  peptide (1)..(579): Ceres Seq. ID no. 12575491
MAFAVSVQSHFAIRALKRDHFKNPSPRTFCSCFKSRPDSSYLSLKERTCFVSKPGLVTTRYRHIFQVGAETGGEFADSGEVADSLASDAPESFSWSSVILPFIFPALGGLLFGYDIGATSGATLSLQSPALSGTTWFNFSPVQLGLVVSGSLYGALLGSISVYGVADFLGRRRELIIAAVLYLLGSLITGCAPDLNILLVGRLLYGFGIGLVSSGNLNRYDMPISNPWNFDISERTLHRIGNFGKCLMSISSQYDFCVNIDFLLVQLGFSVGSFQIDVVGGWRYMYGFGTPVALLMGLGMWSLPASPRWLLLRAVQGKGQLQEYKEKAMLALSKLRGRPPGDKISEKLVDDAYLSVKTAYEDEKSGGNFLEVFQGPNLKALTIGGGLVLFQQITGQPSVLYYAGSILQTAGFSAAADATRVSVIIGVFKLLMTWVAVAKVDDLGRRPLLIGGVSGIALSLFLLSAYYKFLGGFPLVAVGALLLYVGCYQISFGPISWLMVSEIFPLRTRGRGISLAVLTNFGSNAIVTFAFSPLKEFLGAENLFLLFGGIALVSLLFVILVVPETKGLSLEEIESKILK

SEQ ID NO: 77324 - protein, 358 aa, Arabidopsis thaliana
  peptide (1)..(358): Ceres Seq. ID no. 12575492
MPISNPWNFDISERTLHRIGNFGKCLMSISSQYDFCVNIDFLLVQLGFSVGSFQIDVVGGWRYMYGFGTPVALLMGLGMWSLPASPRWLLLRAVQGKGQLQEYKEKAMLALSKLRGRPPGDKISEKLVDDAYLSVKTAYEDEKSGGNFLEVFQGPNLKALTIGGGLVLFQQITGQPSVLYYAGSILQTAGFSAAADATRVSVIIGVFKLLMTWVAVAKVDDLGRRPLLIGGVSGIALSLFLLSAYYKFLGGFPLVAVGALLLYVGCYQISFGPISWLMVSEIFPLRTRGRGISLAVLTNFGSNAIVTFAFSPLKEFLGAENLFLLFGGIALVSLLFVILVVPETKGLSLEEIESKILK

SEQ ID NO: 77325 - protein, 332 aa, Arabidopsis thaliana
  peptide (1)..(332): Ceres Seq. ID no. 12575493
MSISSQYDFCVNIDFLLVQLGFSVGSFQIDVVGGWRYMYGFGTPVALLMGLGMWSLPASPRWLLLRAVQGKGQLQEYKEKAMLALSKLRGRPPGDKISEKLVDDAYLSVKTAYEDEKSGGNFLEVFQGPNLKALTIGGGLVLFQQITGQPSVLYYAGSILQTAGFSAAADATRVSVIIGVFKLLMTWVAVAKVDDLGRRPLLIGGVSGIALSLFLLSAYYKFLGGFPLVAVGALLLYVGCYQISFGPISWLMVSEIFPLRTRGRGISLAVLTNFGSNAIVTFAFSPLKEFLGAENLFLLFGGIALVSLLFVILVVPETKGLSLEEIESKILK

SEQ ID NO: 77326 - DNA, 1156 bp, Arabidopsis thaliana
  misc_feature (1)..(1156): Ceres Seq. ID no. 12575658
  misc_feature (1)..(1156): Ortholog of  Ceres SEQ ID NO 13596090 as cited in SEQ ID NO 68377
aagttcggttcccttcttctctcctcctccaccttctctccattttcttacctctcaacaagtttacacaaacaaaaaaacaaaaaaaaaacaaaaaaatgacaagttgttttttttaaaattcttttcttagacaaagacagagacagagagaggggaagattttgggtttggngtttttctccttttcttcattgaaagttgtcttcttttttaatcttctttgattaaaatgggtaatgtgacgtcaaatgtggcggccaagttcgcattcttcccgccggagccagcaacatacggcgtaacgaaggatgacgagaccgggaagctggtcttcgccggagtgtcggctgacaagaacgtggaagtccaccaactcaccacaaagtccggcaacaaagttgttgccacgttttggagacacccttttgcgagattcacgcttctctattcccatggcaatgccgctgatcttggccaaatggtcgagctattcatcgaactccgtgctcatctccgcgtcaacatcatgaggtatatcttaaaaactttaatgccgtctgaattcaacacgtattatgacatagaggcagtgtacagttgcttgcggagcgattatgggatcaagcaagaggagataattctgtacggtcagtctgtaggaagcggtccaacgttgcacatggcttctcggttgaagaggcttagaggagttgttcttcacagcgccattctctctggaatcagagtcttgtatcctgtcaaaatgactctctggttcgatatattcaaagtaagaaaagcacacacaaaagatttgcttttggttgggttacatatatactctaacatagacaagattcgccatgtcaactcacaagtccttgtcatacatggcacaaatgacgagattgttgatttgtctcacgggaaacgactgtgggagctggcgaaggagaagtatgatccgttatgggtgaagggaggagggcattgcaacctcgagacttaccctgagtacatcaagcacctcaaaaagttcgtaaatgcaatggagaaactctctctaaccaatccaccacccaaacaactaactaatgagcccagtatcaccgagactaagcacaatcggtgcttgaaattcgggaaacggtag

SEQ ID NO: 77327 - protein, 307 aa, Arabidopsis thaliana
  peptide (1)..(307): Ceres Seq. ID no. 12575659
MGNVTSNVAAKFAFFPPEPATYGVTKDDETGKLVFAGVSADKNVEVHQLTTKSGNKVVATFWRHPFARFTLLYSHGNAADLGQMVELFIELRAHLRVNIMRYILKTLMPSEFNTYYDIEAVYSCLRSDYGIKQEEIILYGQSVGSGPTLHMASRLKRLRGVVLHSAILSGIRVLYPVKMTLWFDIFKVRKAHTKDLLLVGLHIYSNIDKIRHVNSQVLVIHGTNDEIVDLSHGKRLWELAKEKYDPLWVKGGGHCNLETYPEYIKHLKKFVNAMEKLSLTNPPPKQLTNEPSITETKHNRCLKFGKR

SEQ ID NO: 77328 - protein, 224 aa, Arabidopsis thaliana
  peptide (1)..(224): Ceres Seq. ID no. 12575660
MVELFIELRAHLRVNIMRYILKTLMPSEFNTYYDIEAVYSCLRSDYGIKQEEIILYGQSVGSGPTLHMASRLKRLRGVVLHSAILSGIRVLYPVKMTLWFDIFKVRKAHTKDLLLVGLHIYSNIDKIRHVNSQVLVIHGTNDEIVDLSHGKRLWELAKEKYDPLWVKGGGHCNLETYPEYIKHLKKFVNAMEKLSLTNPPPKQLTNEPSITETKHNRCLKFGKR

SEQ ID NO: 77329 - protein, 208 aa, Arabidopsis thaliana
  peptide (1)..(208): Ceres Seq. ID no. 12575661
MRYILKTLMPSEFNTYYDIEAVYSCLRSDYGIKQEEIILYGQSVGSGPTLHMASRLKRLRGVVLHSAILSGIRVLYPVKMTLWFDIFKVRKAHTKDLLLVGLHIYSNIDKIRHVNSQVLVIHGTNDEIVDLSHGKRLWELAKEKYDPLWVKGGGHCNLETYPEYIKHLKKFVNAMEKLSLTNPPPKQLTNEPSITETKHNRCLKFGKR

SEQ ID NO: 77330 - DNA, 2258 bp, Arabidopsis thaliana
  misc_feature (1)..(2258): Ceres Seq. ID no. 12575666
  misc_feature (1)..(2258): Ortholog of  Ceres SEQ ID NO 15179271 as cited in SEQ ID NO 0
agaattatcgggagaacttcagacatgctctgctccgaccgaatctcatcatctatcaatttcatgtgacttattaaattgttctgtattctaagaagtggttccgtagaagcggagcaatgccgatttctatggaacttccagttttctctactctccgagtaccattgttctctcgtttagctttacttcctacttttggagttccgttttcgtcccttggtgctacgacgcgattgaactgtacatctcgaaaggcgcgtcggatttgcgtgatgtgcttagtgagggattctgctccgatagagacgtgcgagagagctggagaagatgggtctgacgagttcattgaggttcttgtcatcggtagtcgcaaggagtctatcatggattcatgcttggattctccttttccttctcttcctctgcgattttggagtattagcaaggacagctctggaggtttagtgttacagcagaggctcaatcaccaagataatgccttgaagaccatgaatccaattgagctgttacagtcacgtccaagggccttcatccttgtggctagtgctggatatggttctgaccaggttgaagctattaatattcttagtgcagtaagatctgggggtaacttagctgttgctgtgctattaaagcctttcagctttgaaggccgaaagcgtctagaagaggttaacgagttggctagaaaactgcagcaacacaccaatttctgtatagatatcgacatagaggttttactacagaaggatttggtaactttggacgaggcgctgagaaatgcaaacaatgctgtgtctatggcaataaatgcagcttccgctctgataagtgggatgcatggaaacttcatcgatgtgatgcataaagatcttaaagaacttgaaggttcagaagttaaaacgattctagaaagttacaaagaggcaaaggttggttttggagttggtcacaaccttaagacttcgatattacgagctatatatgactgcccattctttcgacctggtctaaaggatctaaacgctattatatgcattgtggctagttcggtacctctccagaagaaagacgtgaaaacaattcttcgtactttccgtcaaactatggagtacactggagatattatagtatctactgttcatgagcctgatctggagcctaaactccaaaaagaaacaaatattggacttggagagacgccagtttcaattaaagattcagcagactctactgacgtaaaaacttccaatcagaatattgaggaatttgaaattgactctgaggacctcctggaagtttctgagaacggtgatgatagtgaatacccattaaaagagggggaaccatccagaaacagtcgtctggatcttaaagatgaaaatggtgctgaaagggagcctattgccaattggagtatggatcagggatatcagattgagcagaaatggcaagctgattctggagacactgcagtgcttagcctgggaattgtcaaccttcctgttggtgtgagaccttcgaagaaattgaacagtaatctcagtgttgccagtcaactctctaggaaggctgattccagagaagaatcatttttcaaccctaatggctcgacaaaagactctagtgatactgcatctaccctgctatctgagaaatatgctgattttacaaagcaaagaaatctatccgctcgagcatcgtctatgctggaagctgaacgagattcatcaaaaagatggagtcctattcttgagatgcagtacagaggaggacttttcaagggaagatgccaaggaggccttcccgaaggaaagacagacttcttagttaatccgaaagtaacagctgactattcccaccagggtcgtttggtacttggagatggaagcatatatgatggaatgtggcacaacggtaaaagatctggtctcggaacattctacttcaagaatggagacgtgttccaaggcacatggagagaagatttaatacacggaaagggttggttttatttccacaaaggtgatcgatggtttgcaaatttctggaaaggaaaagccagtggcgaaggccggttctattcaaagtccggtgagatattctttggacatttcaaagatggttggcgccacggacaattcctctgtatagatttggatggaacaagatactctgaaacttgggacgacggtgttctcattgaccggaaacaagtggacgccggagattga

SEQ ID NO: 77331 - protein, 712 aa, Arabidopsis thaliana
  peptide (1)..(712): Ceres Seq. ID no. 12575667
MPISMELPVFSTLRVPLFSRLALLPTFGVPFSSLGATTRLNCTSRKARRICVMCLVRDSAPIETCERAGEDGSDEFIEVLVIGSRKESIMDSCLDSPFPSLPLRFWSISKDSSGGLVLQQRLNHQDNALKTMNPIELLQSRPRAFILVASAGYGSDQVEAINILSAVRSGGNLAVAVLLKPFSFEGRKRLEEVNELARKLQQHTNFCIDIDIEVLLQKDLVTLDEALRNANNAVSMAINAASALISGMHGNFIDVMHKDLKELEGSEVKTILESYKEAKVGFGVGHNLKTSILRAIYDCPFFRPGLKDLNAIICIVASSVPLQKKDVKTILRTFRQTMEYTGDIIVSTVHEPDLEPKLQKETNIGLGETPVSIKDSADSTDVKTSNQNIEEFEIDSEDLLEVSENGDDSEYPLKEGEPSRNSRLDLKDENGAEREPIANWSMDQGYQIEQKWQADSGDTAVLSLGIVNLPVGVRPSKKLNSNLSVASQLSRKADSREESFFNPNGSTKDSSDTASTLLSEKYADFTKQRNLSARASSMLEAERDSSKRWSPILEMQYRGGLFKGRCQGGLPEGKTDFLVNPKVTADYSHQGRLVLGDGSIYDGMWHNGKRSGLGTFYFKNGDVFQGTWREDLIHGKGWFYFHKGDRWFANFWKGKASGEGRFYSKSGEIFFGHFKDGWRHGQFLCIDLDGTRYSETWDDGVLIDRKQVDAGD

SEQ ID NO: 77332 - protein, 708 aa, Arabidopsis thaliana
  peptide (1)..(708): Ceres Seq. ID no. 12575668
MELPVFSTLRVPLFSRLALLPTFGVPFSSLGATTRLNCTSRKARRICVMCLVRDSAPIETCERAGEDGSDEFIEVLVIGSRKESIMDSCLDSPFPSLPLRFWSISKDSSGGLVLQQRLNHQDNALKTMNPIELLQSRPRAFILVASAGYGSDQVEAINILSAVRSGGNLAVAVLLKPFSFEGRKRLEEVNELARKLQQHTNFCIDIDIEVLLQKDLVTLDEALRNANNAVSMAINAASALISGMHGNFIDVMHKDLKELEGSEVKTILESYKEAKVGFGVGHNLKTSILRAIYDCPFFRPGLKDLNAIICIVASSVPLQKKDVKTILRTFRQTMEYTGDIIVSTVHEPDLEPKLQKETNIGLGETPVSIKDSADSTDVKTSNQNIEEFEIDSEDLLEVSENGDDSEYPLKEGEPSRNSRLDLKDENGAEREPIANWSMDQGYQIEQKWQADSGDTAVLSLGIVNLPVGVRPSKKLNSNLSVASQLSRKADSREESFFNPNGSTKDSSDTASTLLSEKYADFTKQRNLSARASSMLEAERDSSKRWSPILEMQYRGGLFKGRCQGGLPEGKTDFLVNPKVTADYSHQGRLVLGDGSIYDGMWHNGKRSGLGTFYFKNGDVFQGTWREDLIHGKGWFYFHKGDRWFANFWKGKASGEGRFYSKSGEIFFGHFKDGWRHGQFLCIDLDGTRYSETWDDGVLIDRKQVDAGD

SEQ ID NO: 77333 - protein, 660 aa, Arabidopsis thaliana
  peptide (1)..(660): Ceres Seq. ID no. 12575669
MCLVRDSAPIETCERAGEDGSDEFIEVLVIGSRKESIMDSCLDSPFPSLPLRFWSISKDSSGGLVLQQRLNHQDNALKTMNPIELLQSRPRAFILVASAGYGSDQVEAINILSAVRSGGNLAVAVLLKPFSFEGRKRLEEVNELARKLQQHTNFCIDIDIEVLLQKDLVTLDEALRNANNAVSMAINAASALISGMHGNFIDVMHKDLKELEGSEVKTILESYKEAKVGFGVGHNLKTSILRAIYDCPFFRPGLKDLNAIICIVASSVPLQKKDVKTILRTFRQTMEYTGDIIVSTVHEPDLEPKLQKETNIGLGETPVSIKDSADSTDVKTSNQNIEEFEIDSEDLLEVSENGDDSEYPLKEGEPSRNSRLDLKDENGAEREPIANWSMDQGYQIEQKWQADSGDTAVLSLGIVNLPVGVRPSKKLNSNLSVASQLSRKADSREESFFNPNGSTKDSSDTASTLLSEKYADFTKQRNLSARASSMLEAERDSSKRWSPILEMQYRGGLFKGRCQGGLPEGKTDFLVNPKVTADYSHQGRLVLGDGSIYDGMWHNGKRSGLGTFYFKNGDVFQGTWREDLIHGKGWFYFHKGDRWFANFWKGKASGEGRFYSKSGEIFFGHFKDGWRHGQFLCIDLDGTRYSETWDDGVLIDRKQVDAGD

SEQ ID NO: 77334 - DNA, 1689 bp, Arabidopsis thaliana
  misc_feature (1)..(1689): Ceres Seq. ID no. 12575749
  misc_feature (1)..(1689): Ortholog of  Ceres SEQ ID NO 15179924 as cited in SEQ ID NO 57437
  misc_feature (1)..(1689): Ortholog of  Ceres SEQ ID NO 15171286 as cited in SEQ ID NO 58206
  misc_feature (1)..(1689): Ortholog of  Ceres SEQ ID NO 14302451 as cited in SEQ ID NO 66180
aaattctctctaattcgaatctctcaaagttcaaatttcaaattccgaagaagaagaagaagaaacactcgaaggtttttgtgatggatccatgtccatttgtacggctaacaatagattcactagctttgagactaccggagacagcgacgaacaagcaaatcggcggcgaagtacatccttcttctacgccgtgttactgcaaactccggatcaaacatttcccttcacagaaagcacttctccctctctcttccttctccgacgcttcatctccaccggaatcttccacttcagctccgggatttcacctcgacgccgacgcgatccgacgaatttccggtaagaagatctcactccgtgtctctgtttacgccggtcgtactggtcacacttgcggcgtcgcttcagggaaacttctaggtaaagtcgaagtagcggtggatctcgcggcggcgttgtctagaaccgtcgcgtttcataacggatggaagaaactcggtggagatggagataaaccgtcggctagattacatctattggtttgtgctgaaccggatcctcggtttgtgtttcaatttggaggtgaaccggaatgtagtcctgtggtttaccagattcaagataatctcaaacaacctgtcttcagctgcaaattcagctccgatcgtaacggaagatctcggtctctaccatcaggatttacatatagtagtagaggatggattacaagaacattatcaggtgaccagtgggaaaagaaacaagcgagagaacgtaaaggttggatgataacgatccatgatctttcgggatcacctgtagcagcagcttcaatgatcactcctttcgtggcatctccagggtctgatcgtgtttctagatcaaaccctggtgcgtggctaatccttaggcctcatgggacttgtgtcagtagttggaaaccgtggggacgtcttgaggcttggcgtgagagaggagctattgatggattgggttacaagttcgagctcgtgagggataacagtactagcaccggcattcctattgcagaagggacaatgagcacaaaacaaggaggaaagttcagcattgacaggagagtctcaggccagggagagtctccggcaatatcatcgccggtgaaagggttcgtgatgggttcgagcgtcgaaggagaagggaaagtgagcaagcctgtggtccacgtgggagcacagcatgtgacttgcatggccgacgcagctctcttcgttgctctctctgccgccgttgatctaagtgtcgacgcgtgtcagctcttctctcgtaagcttcgtaaagagctctgtcacgacgaccaaagctccctcacgtgaaaatatgttatctcatcagtgaagatacatacgtacattttgacttgacaaaagaccaatccatgaacttatgacaaagctctcttcgtcgctagctatctcggtttttcattttttttgagggatcaatttgatatgaaagtcgacaaagctgtacagacaacaatgatctttgtgttgtttgcaactttgtatcatatttatttattttttaattctttttcttctgattctctccatatgtgtgttgattatttttattatttcatatcttcattctttttaatacattggggttattcttataccaaatatactcactttctttgtg

SEQ ID NO: 77335 - protein, 451 aa, Arabidopsis thaliana
  peptide (1)..(451): Ceres Seq. ID no. 12575750
ILSNSNLSKFKFQIPKKKKKKHSKVFVMDPCPFVRLTIDSLALRLPETATNKQIGGEVHPSSTPCYCKLRIKHFPSQKALLPLSSFSDASSPPESSTSAPGFHLDADAIRRISGKKISLRVSVYAGRTGHTCGVASGKLLGKVEVAVDLAAALSRTVAFHNGWKKLGGDGDKPSARLHLLVCAEPDPRFVFQFGGEPECSPVVYQIQDNLKQPVFSCKFSSDRNGRSRSLPSGFTYSSRGWITRTLSGDQWEKKQARERKGWMITIHDLSGSPVAAASMITPFVASPGSDRVSRSNPGAWLILRPHGTCVSSWKPWGRLEAWRERGAIDGLGYKFELVRDNSTSTGIPIAEGTMSTKQGGKFSIDRRVSGQGESPAISSPVKGFVMGSSVEGEGKVSKPVVHVGAQHVTCMADAALFVALSAAVDLSVDACQLFSRKLRKELCHDDQSSLT

SEQ ID NO: 77336 - protein, 424 aa, Arabidopsis thaliana
  peptide (1)..(424): Ceres Seq. ID no. 12575751
MDPCPFVRLTIDSLALRLPETATNKQIGGEVHPSSTPCYCKLRIKHFPSQKALLPLSSFSDASSPPESSTSAPGFHLDADAIRRISGKKISLRVSVYAGRTGHTCGVASGKLLGKVEVAVDLAAALSRTVAFHNGWKKLGGDGDKPSARLHLLVCAEPDPRFVFQFGGEPECSPVVYQIQDNLKQPVFSCKFSSDRNGRSRSLPSGFTYSSRGWITRTLSGDQWEKKQARERKGWMITIHDLSGSPVAAASMITPFVASPGSDRVSRSNPGAWLILRPHGTCVSSWKPWGRLEAWRERGAIDGLGYKFELVRDNSTSTGIPIAEGTMSTKQGGKFSIDRRVSGQGESPAISSPVKGFVMGSSVEGEGKVSKPVVHVGAQHVTCMADAALFVALSAAVDLSVDACQLFSRKLRKELCHDDQSSLT

SEQ ID NO: 77337 - DNA, 1695 bp, Arabidopsis thaliana
  misc_feature (1)..(1695): Ceres Seq. ID no. 12575777
  misc_feature (1)..(1695): Ortholog of  Ceres SEQ ID NO 15178728 as cited in SEQ ID NO 67280
gatgttactcttgtctgaatcttcctcaaatctactcatgtagacctccctatctcgatctaaatttccgccaaactttttttaatcccaaagattctttaaacagaatcatcatcaatcatgaaagaaatcaagaagacgatgacgaagcagatgacggcaagacgtgacgacacgccgttacacacggcggttagagaaggcaaaacggaccttcttttggagatgatcggagaacacgacggcgtggagctgaaagagttgttggccgagcaaaaccagtccggtgaaacggctttgtacgttgcggctgagtacggttacaccgacatggttaagattctgatgaaacactccgactctgtcttagccggaaccaaagccaagaacggcttcgatgcctttcacatcgccgccaaaaacggaaatctacaggttcttgatgtgttaatagaggcaaatccagaactctcatttacatttgattcatccaaaaccacggcgcttcataccgcggcttcacagggtcatggagagattgtttgtttcttgttggataaaggtgtggacttagctgctattgcgagaagcaatggtaaaaccgctttgcactctgcagctaggaacgggcacacggtgattgtgaagaagttgattgaaaagaaggctggtatggttacaagagtcgacaagaaaggtcaaaccgctcttcatatggcggttaaaggacaaaacactgagattgtggatgtgttgatggaagcagatggttcgttgatcaattccgcggataataaaggaaacactccattgcatatagcagtccgtaaaaacagagcagagattgttcagacagttttaaagtattgtgaagtcagtagagtggcggttaataaatcaggagaaacagctcttgatatcgctgagaaaaccggactacatgagatcgtaccgcttctgcaaaagatcggtatgcagaacgcaagatccatcaagccagctgaaaaagtggaaccatcaggctcttctaggaaactgaaagaaacagttagtgaaataggccatgaggtgcatactcagcttgaacaaaccgggagaacgagaagagagatccaaggaatcgctaaacgggtcaacaaaatgcacacggaaggactcaacaacgcgataaactccactaccctagtagccattctcatagcaaccgttgcttttgcagctatcttcaacgttccaggccagtacacggacgaccctaaagacgtacctccaggatattcactcggagaagcaagagcagctccaagacccgagttcttgatattcgtcgtgtttgattctttcgcgcttttcatctctttagcggtggttgtggttcagacatcagtggtggttatagagaggagagcaaagaagcaaatgatggctataatcaacaagctcatgtggatggcttgcattatgatctcagtagcgttcgtatcactgtcttttgttgtcgtgggagagaaagagaagcctttggcggttggagtaaccgccattggagctttgatcatggtttcaacactagggactatgtgttattgggtgattgctaaccggattgaaggatctaagtcatctccagcttccatgatgtcagatcctgagttagctgattccaaacataaccggaaactttatgcggtttga

SEQ ID NO: 77338 - protein, 524 aa, Arabidopsis thaliana
  peptide (1)..(524): Ceres Seq. ID no. 12575778
MKEIKKTMTKQMTARRDDTPLHTAVREGKTDLLLEMIGEHDGVELKELLAEQNQSGETALYVAAEYGYTDMVKILMKHSDSVLAGTKAKNGFDAFHIAAKNGNLQVLDVLIEANPELSFTFDSSKTTALHTAASQGHGEIVCFLLDKGVDLAAIARSNGKTALHSAARNGHTVIVKKLIEKKAGMVTRVDKKGQTALHMAVKGQNTEIVDVLMEADGSLINSADNKGNTPLHIAVRKNRAEIVQTVLKYCEVSRVAVNKSGETALDIAEKTGLHEIVPLLQKIGMQNARSIKPAEKVEPSGSSRKLKETVSEIGHEVHTQLEQTGRTRREIQGIAKRVNKMHTEGLNNAINSTTLVAILIATVAFAAIFNVPGQYTDDPKDVPPGYSLGEARAAPRPEFLIFVVFDSFALFISLAVVVVQTSVVVIERRAKKQMMAIINKLMWMACIMISVAFVSLSFVVVGEKEKPLAVGVTAIGALIMVSTLGTMCYWVIANRIEGSKSSPASMMSDPELADSKHNRKLYAV

SEQ ID NO: 77339 - protein, 517 aa, Arabidopsis thaliana
  peptide (1)..(517): Ceres Seq. ID no. 12575779
MTKQMTARRDDTPLHTAVREGKTDLLLEMIGEHDGVELKELLAEQNQSGETALYVAAEYGYTDMVKILMKHSDSVLAGTKAKNGFDAFHIAAKNGNLQVLDVLIEANPELSFTFDSSKTTALHTAASQGHGEIVCFLLDKGVDLAAIARSNGKTALHSAARNGHTVIVKKLIEKKAGMVTRVDKKGQTALHMAVKGQNTEIVDVLMEADGSLINSADNKGNTPLHIAVRKNRAEIVQTVLKYCEVSRVAVNKSGETALDIAEKTGLHEIVPLLQKIGMQNARSIKPAEKVEPSGSSRKLKETVSEIGHEVHTQLEQTGRTRREIQGIAKRVNKMHTEGLNNAINSTTLVAILIATVAFAAIFNVPGQYTDDPKDVPPGYSLGEARAAPRPEFLIFVVFDSFALFISLAVVVVQTSVVVIERRAKKQMMAIINKLMWMACIMISVAFVSLSFVVVGEKEKPLAVGVTAIGALIMVSTLGTMCYWVIANRIEGSKSSPASMMSDPELADSKHNRKLYAV

SEQ ID NO: 77340 - protein, 513 aa, Arabidopsis thaliana
  peptide (1)..(513): Ceres Seq. ID no. 12575780
MTARRDDTPLHTAVREGKTDLLLEMIGEHDGVELKELLAEQNQSGETALYVAAEYGYTDMVKILMKHSDSVLAGTKAKNGFDAFHIAAKNGNLQVLDVLIEANPELSFTFDSSKTTALHTAASQGHGEIVCFLLDKGVDLAAIARSNGKTALHSAARNGHTVIVKKLIEKKAGMVTRVDKKGQTALHMAVKGQNTEIVDVLMEADGSLINSADNKGNTPLHIAVRKNRAEIVQTVLKYCEVSRVAVNKSGETALDIAEKTGLHEIVPLLQKIGMQNARSIKPAEKVEPSGSSRKLKETVSEIGHEVHTQLEQTGRTRREIQGIAKRVNKMHTEGLNNAINSTTLVAILIATVAFAAIFNVPGQYTDDPKDVPPGYSLGEARAAPRPEFLIFVVFDSFALFISLAVVVVQTSVVVIERRAKKQMMAIINKLMWMACIMISVAFVSLSFVVVGEKEKPLAVGVTAIGALIMVSTLGTMCYWVIANRIEGSKSSPASMMSDPELADSKHNRKLYAV

SEQ ID NO: 77341 - DNA, 2189 bp, Arabidopsis thaliana
  misc_feature (1)..(2189): Ceres Seq. ID no. 12575781
  misc_feature (1)..(2189): Ortholog of  Ceres SEQ ID NO 13584744 as cited in SEQ ID NO 69137
aaagtaatgctgtctctcttctcttcaaaattattgttaacctctcgtaactaaaatcttccatggtagtagtaacaaagaagaccatgaagattcaaattcatctcctttactcgttcttgttcctctgtttctctactctcactctatcttctgagcccagaaaccctgaagttgaggcgttgataagtataaggaacaatttgcatgatcctcatggagctttgaacaattgggacgagttttcagttgatccttgtagctgggctatgatcacttgctctcccgacaacctcgtcattggactaggagcgccgagccagtctctctcgggaggtttatctgagtctatcggaaatctcacaaatctccgacaagtgtcattgcaaaataacaacatctccggcaaaattccaccggagctcggttttctacccaaattacaaaccttggatctttccaacaaccgattctccggtgacatccctgtttccatcgaccagctaagcagccttcaatatctgagactcaacaacaactctttgtctgggcccttccctgcttctttgtcccaaattcctcacctctccttcttggacttgtcttacaacaatctcagtggccctgttcctaaattcccagcaaggactttcaacgttgctggtaatcctttgatttgtagaagcaacccacctgagatttgttctggatcaatcaatgcaagtccactttctgtttctttgagctcttcatcaggacgcaggtctaatagattggcaatagctcttagtgtaagccttggctctgttgttatactagtccttgctctcgggtccttttgttggtaccgaaagaaacaaagaaggctactgatccttaacttaaacgataaacaagaggaagggcttcaaggacttgggaatctaagaagcttcacattcagagaactccatgtttatacagatggtttcagttccaagaacattctcggcgctggtggattcggtaatgtgtacagaggcaagcttggagatgggacaatggtggcagtgaaacggttgaaggatattaatggaacctcaggggattcacagtttcgtatggagctagagatgattagcttagctgttcataagaatctgcttcggttaattggttattgcgcaacttctggtgaaaggcttcttgtttacccttacatgcctaatggaagcgtcgcctctaagcttaaatctaaaccggcattggactggaacatgaggaagaggatagcaattggtgcagcgagaggtttgttgtatctacatgagcaatgtgatcccaagatcattcatagagatgtaaaggcagctaatattctcttagacgagtgctttgaagctgttgttggtgactttggactcgcaaagctccttaaccatgcggattctcatgtcacaactgcggtccgtggtacggttggccacattgcacctgaatatctctccactggtcagtcttctgagaaaaccgatgtgtttgggttcggtatactattgctcgagctcataaccggactgagagctcttgagtttggtaaaaccgttagccagaaaggagctatgcttgaatgggtgaggaaattacatgaagagatgaaagtagaggaactattggatcgagaactcggaactaactacgataagattgaagttggagagatgttgcaagtggctttgctatgcacacaatatctgccagctcatcgtcctaaaatgtctgaagttgttttgatgcttgaaggcgatggattagccgagagatgggctgcttcgcataaccattcacatttctaccatgccaatatctctttcaagacaatctcttctctgtctactacttctgtctcaaggcttgacgcacattgcaatgatccaacttatcaaatgtttggatcttcggctttcgatgatgacgatgatcatcagcctttagattcctttgccatggaactatccggtccaagataacacaatgaaagaaagatatcatttttacgatggatcaaacaatccaatgaaaaaagctctacacttttataatatagacatgtatatggtggtgaaaattgatgaaaaatatctctacagtttgagattatgtgttcgttatgttgatgatgtatatattaacttttaattgtgagtttc

SEQ ID NO: 77342 - protein, 648 aa, Arabidopsis thaliana
  peptide (1)..(648): Ceres Seq. ID no. 12575782
MVVVTKKTMKIQIHLLYSFLFLCFSTLTLSSEPRNPEVEALISIRNNLHDPHGALNNWDEFSVDPCSWAMITCSPDNLVIGLGAPSQSLSGGLSESIGNLTNLRQVSLQNNNISGKIPPELGFLPKLQTLDLSNNRFSGDIPVSIDQLSSLQYLRLNNNSLSGPFPASLSQIPHLSFLDLSYNNLSGPVPKFPARTFNVAGNPLICRSNPPEICSGSINASPLSVSLSSSSGRRSNRLAIALSVSLGSVVILVLALGSFCWYRKKQRRLLILNLNDKQEEGLQGLGNLRSFTFRELHVYTDGFSSKNILGAGGFGNVYRGKLGDGTMVAVKRLKDINGTSGDSQFRMELEMISLAVHKNLLRLIGYCATSGERLLVYPYMPNGSVASKLKSKPALDWNMRKRIAIGAARGLLYLHEQCDPKIIHRDVKAANILLDECFEAVVGDFGLAKLLNHADSHVTTAVRGTVGHIAPEYLSTGQSSEKTDVFGFGILLLELITGLRALEFGKTVSQKGAMLEWVRKLHEEMKVEELLDRELGTNYDKIEVGEMLQVALLCTQYLPAHRPKMSEVVLMLEGDGLAERWAASHNHSHFYHANISFKTISSLSTTSVSRLDAHCNDPTYQMFGSSAFDDDDDHQPLDSFAMELSGPR

SEQ ID NO: 77343 - protein, 640 aa, Arabidopsis thaliana
  peptide (1)..(640): Ceres Seq. ID no. 12575783
MKIQIHLLYSFLFLCFSTLTLSSEPRNPEVEALISIRNNLHDPHGALNNWDEFSVDPCSWAMITCSPDNLVIGLGAPSQSLSGGLSESIGNLTNLRQVSLQNNNISGKIPPELGFLPKLQTLDLSNNRFSGDIPVSIDQLSSLQYLRLNNNSLSGPFPASLSQIPHLSFLDLSYNNLSGPVPKFPARTFNVAGNPLICRSNPPEICSGSINASPLSVSLSSSSGRRSNRLAIALSVSLGSVVILVLALGSFCWYRKKQRRLLILNLNDKQEEGLQGLGNLRSFTFRELHVYTDGFSSKNILGAGGFGNVYRGKLGDGTMVAVKRLKDINGTSGDSQFRMELEMISLAVHKNLLRLIGYCATSGERLLVYPYMPNGSVASKLKSKPALDWNMRKRIAIGAARGLLYLHEQCDPKIIHRDVKAANILLDECFEAVVGDFGLAKLLNHADSHVTTAVRGTVGHIAPEYLSTGQSSEKTDVFGFGILLLELITGLRALEFGKTVSQKGAMLEWVRKLHEEMKVEELLDRELGTNYDKIEVGEMLQVALLCTQYLPAHRPKMSEVVLMLEGDGLAERWAASHNHSHFYHANISFKTISSLSTTSVSRLDAHCNDPTYQMFGSSAFDDDDDHQPLDSFAMELSGPR

SEQ ID NO: 77344 - protein, 579 aa, Arabidopsis thaliana
  peptide (1)..(579): Ceres Seq. ID no. 12575784
MITCSPDNLVIGLGAPSQSLSGGLSESIGNLTNLRQVSLQNNNISGKIPPELGFLPKLQTLDLSNNRFSGDIPVSIDQLSSLQYLRLNNNSLSGPFPASLSQIPHLSFLDLSYNNLSGPVPKFPARTFNVAGNPLICRSNPPEICSGSINASPLSVSLSSSSGRRSNRLAIALSVSLGSVVILVLALGSFCWYRKKQRRLLILNLNDKQEEGLQGLGNLRSFTFRELHVYTDGFSSKNILGAGGFGNVYRGKLGDGTMVAVKRLKDINGTSGDSQFRMELEMISLAVHKNLLRLIGYCATSGERLLVYPYMPNGSVASKLKSKPALDWNMRKRIAIGAARGLLYLHEQCDPKIIHRDVKAANILLDECFEAVVGDFGLAKLLNHADSHVTTAVRGTVGHIAPEYLSTGQSSEKTDVFGFGILLLELITGLRALEFGKTVSQKGAMLEWVRKLHEEMKVEELLDRELGTNYDKIEVGEMLQVALLCTQYLPAHRPKMSEVVLMLEGDGLAERWAASHNHSHFYHANISFKTISSLSTTSVSRLDAHCNDPTYQMFGSSAFDDDDDHQPLDSFAMELSGPR

SEQ ID NO: 77345 - DNA, 1813 bp, Arabidopsis thaliana
  misc_feature (1)..(1813): Ceres Seq. ID no. 12575844
  misc_feature (1)..(1813): Ortholog of  Ceres SEQ ID NO 14316025 as cited in SEQ ID NO 65242
gttataccaaattttagcgtaaagacaatctcttgaaggagaaaaggaaaacaatctctctttctgtgacctttcgcaacttgtcaaagcaccacgaccttctctctacggagttgagatcaatccccccaaatctcggtgtggttcctctagggtttttgatcggaatcggaatcgataatctaaccggcatgaggccaatcctattgccggatccacccagtctatctaccggcgtccctgatattttcgaacaaggcggttcccataacgtcgtcagacgcgccgtcgtcatcggaaacggtttccctggctccgagaatcagtgtatcggtctcgttcgtgcgctcggcttatctgataatcaccttctctaccgagtgacaaggcctaaaggaggactaaatgagtggctgcactggctcccagttggttttcacaagaagttggactttatcctcaggcatatttacctctactccagattgatgcttggatccaaacaaagtaaatacatctcatctgtaccctcagagaatggtggtaatgtaggtttggcctctattctagaggctgatgtgaagggcattgtaaatttggcccgtcagacctatgaaaaggatggcccgttgatcgtgattgcatgtggaagagatactatttctattgctagctcgataagacgtttggcttctgaaaacgtcttcgttgttcagatacaacatcctagatcacatttaaataggtttgacatggtgatcacgcctcgtcacgactactatcctctaacactcgaagcgcaggagcaggtccctagatttatgcgtagttggataactccacgtgaacctcctcaggatcatgtagtcttgactactggagctctacaccagatcgattatgcctcactccgtaaagcagctagtgcctggcatgatgaatttgctgctcttccgaagcctttagttgtggttaacatcggctggcctagaagtaactgtcggtatggagcagacctcgcaaaacagctaacagactcccttcttaatgtccttgctacctgtggaagtgtcagaattactctttcctacaaaacccctgcaaaggtttcaagagtaatcttcaaagaacttggagataaccccaaagtttacatatggaatggccaagaaccaaatccttacatggggcatctagcttggggtgatgcttttgtggtgacagcagattcagtcagtctgataagcgaagcttgtagcaccgggaaaccagtgtacgttgttggagccgatcactgtaaatggaagattgcagaattccaaaagtctttgagggagcgaggagttgtccgctcatttacaggtttcgaagatatgtcggaaagttggagttatccgccattgaatgacacagcagaggcagctacgagaatacggcgtgaattggctgcacgtggatggagtttacggtcttgaattatatactcttctttgctgtaccacttatttgcggaatcacattttgtccaaagctggagaaacagaagcctaagagaatcggatgttgtgcagaaagaaagaatagttgaagatatcatttaaaaagggtcattttactctagcttgccctaaaattttgctgataatgttttaccaataggccaaatactaaaaaaaatctctgttacttaatcggagaggcctttgtgagataaaagaaagcggaaaggttttttttaatctttttaacgtttgtattgttttgtcgacgagatttgaccgtttgagtgtgtataaaaaatcaatgtttcacg

SEQ ID NO: 77346 - protein, 427 aa, Arabidopsis thaliana
  peptide (1)..(427): Ceres Seq. ID no. 12575845
MRPILLPDPPSLSTGVPDIFEQGGSHNVVRRAVVIGNGFPGSENQCIGLVRALGLSDNHLLYRVTRPKGGLNEWLHWLPVGFHKKLDFILRHIYLYSRLMLGSKQSKYISSVPSENGGNVGLASILEADVKGIVNLARQTYEKDGPLIVIACGRDTISIASSIRRLASENVFVVQIQHPRSHLNRFDMVITPRHDYYPLTLEAQEQVPRFMRSWITPREPPQDHVVLTTGALHQIDYASLRKAASAWHDEFAALPKPLVVVNIGWPRSNCRYGADLAKQLTDSLLNVLATCGSVRITLSYKTPAKVSRVIFKELGDNPKVYIWNGQEPNPYMGHLAWGDAFVVTADSVSLISEACSTGKPVYVVGADHCKWKIAEFQKSLRERGVVRSFTGFEDMSESWSYPPLNDTAEAATRIRRELAARGWSLRS

SEQ ID NO: 77347 - protein, 328 aa, Arabidopsis thaliana; identical to SEQ ID NO: 46192
  peptide (1)..(328): Ceres Seq. ID no. 12575846

SEQ ID NO: 77348 - protein, 240 aa, Arabidopsis thaliana; identical to SEQ ID NO: 46193
  peptide (1)..(240): Ceres Seq. ID no. 12575847

SEQ ID NO: 77349 - DNA, 2390 bp, Arabidopsis thaliana
  misc_feature (1)..(2390): Ceres Seq. ID no. 12575958
  misc_feature (1)..(2390): Ortholog of  Ceres SEQ ID NO 14315862 as cited in SEQ ID NO 60207
  misc_feature (1)..(2390): Ortholog of  Ceres SEQ ID NO 13660129 as cited in SEQ ID NO 67547
gtctactctaaaccatttctgtgacactctttgttacagacttcaatgtttaagttatggccgatcatttgattctttctcttcaagctcctccttttctcatcttcccttgttctcttcaccgttcatggagatttcccggtggaatcagatattccgttcctgagttccgattgtcctctcagctacagttggctaattccatttcaccttcaaagtcttcagcttcctcttcttctccaccggagaattctgctccagagaagttcgatctcgtgtccagcactcagcttaaagatggaagtcatgtctttcggttcggggatgcaagtgagattgagaaatatctcgaggctgaagaaaaagcgagatgtgttgaggtagaaacgcaaaatgctaagattgctgaagaagccagtgaagtttcaaggaaacaaaagaaattggtcagttctattattgaaacaagtactgagaaagaggaaacagctgctccttccgatcttagcaatgtcattaaaataaaggatcgtaaaagggttcgttctcctactaagaagaagaaagaaactgtgaatgtatcacggagcgaagataaaattgatgccaagagtgctagtgtttccaatctgagctccatagttagtgtagcagaagctattccaattagctctactgaagaagaagctgttgttgagaaggaaatcacggctaagtcatataatgtagagcctctttcttctgaagccatgaagaaagtttctgtcaataaaataggagactgtgagacaaatggttatcaagagaatcgtatggaggttcaggcaagaccgtcattgtctacacaacaggaaattacgcctgtatccaccattgaaattgatgacaatttggatgtgacggaaaagcctattgaagctgaggagaatcttgtcgcggaaccaacagctacagatgatttgtctcctgatgaactcctttcaacttcagaagcaacacatcgcagcgttgatgagattgctcaaaaacctgtaattgatacgtctgaggaaaaccttctgaacacttttgaagctgaggagaatcctgtagttgaaccaacagctacagctgctgtctcttctgatgaactcatttcaacttcagaagcaacacgtcacagcgttgatgagatcgctcaaaagcctattattgatacgtctgagaaaaaccctatggaaacttttgttgaaccagaagcagtgcatagtagcgttgacgagagcactgaaaagcttgtagttgttacgtctgatgtggaaaatgatggagaaaatgtagcttcaaccacagaagatgaaataactgtgagggacacaataactgatagtggtagcatatccaataatgatgacacaaaagtggaagatctccaacttcctgtacctgaaacggccagtcttgaacccattaaagcggcttctggcagggaagaacttgtgtccaaagcattttacttggactctggttttgcttcactccaaagcccctttaaggcattggcaggtcgggaagatgcttattttatctctcaccacaattggataggtattgctgatggagtctctcagtggtcatttgaaggaatcaataagggaatgtatgctcaagaactcatgagcaactgtgaaaagattatttccaatgaaactgctaagataagtgacccagttcaagttctccatagaagtgtcaatgagactaagtcctctggatcatcaacagccttaattgctcatcttgacaataatgaactccacatagccaatattggagattcgggattcatggtcattagggatggcacagtattgcagaattcgtctccaatgtttcatcatttttgttttcccttgcatattacgcaaggctgtgatgtcctaaaacttgcagaggtttaccatgtgaacctggaagaaggcgatgttgtcatcgcagcaactgatgggctctttgataacttatacgaaaaagaaatcgtttcaatagtttgcgggtcactgaaacagagtctggaacctcagaaaatagcagagttggtagctgcaaaagcacaagaagtaggacgatctaagacagagagaacgccatttgctgacgcagctaaagaagaaggatacaatggacacaaaggtggtaaacttgatgctgttaccgtcatcatttcattcgtgaaaattgtctctacataaatatgcatcttcctattaattgtaaataatggagagagccgcacacattcacaacaccattctagtttttccaaaaatttcattgaaacgatgtacactggagtaagtttgcattcctgagctatatatgtgagccggatcagtcctggatctgacccg

SEQ ID NO: 77350 - protein, 724 aa, Arabidopsis thaliana
  peptide (1)..(724): Ceres Seq. ID no. 12575959
MADHLILSLQAPPFLIFPCSLHRSWRFPGGIRYSVPEFRLSSQLQLANSISPSKSSASSSSPPENSAPEKFDLVSSTQLKDGSHVFRFGDASEIEKYLEAEEKARCVEVETQNAKIAEEASEVSRKQKKLVSSIIETSTEKEETAAPSDLSNVIKIKDRKRVRSPTKKKKETVNVSRSEDKIDAKSASVSNLSSIVSVAEAIPISSTEEEAVVEKEITAKSYNVEPLSSEAMKKVSVNKIGDCETNGYQENRMEVQARPSLSTQQEITPVSTIEIDDNLDVTEKPIEAEENLVAEPTATDDLSPDELLSTSEATHRSVDEIAQKPVIDTSEENLLNTFEAEENPVVEPTATAAVSSDELISTSEATRHSVDEIAQKPIIDTSEKNPMETFVEPEAVHSSVDESTEKLVVVTSDVENDGENVASTTEDEITVRDTITDSGSISNNDDTKVEDLQLPVPETASLEPIKAASGREELVSKAFYLDSGFASLQSPFKALAGREDAYFISHHNWIGIADGVSQWSFEGINKGMYAQELMSNCEKIISNETAKISDPVQVLHRSVNETKSSGSSTALIAHLDNNELHIANIGDSGFMVIRDGTVLQNSSPMFHHFCFPLHITQGCDVLKLAEVYHVNLEEGDVVIAATDGLFDNLYEKEIVSIVCGSLKQSLEPQKIAELVAAKAQEVGRSKTERTPFADAAKEEGYNGHKGGKLDAVTVIISFVKIVST

SEQ ID NO: 77351 - protein, 493 aa, Arabidopsis thaliana
  peptide (1)..(493): Ceres Seq. ID no. 12575960
MKKVSVNKIGDCETNGYQENRMEVQARPSLSTQQEITPVSTIEIDDNLDVTEKPIEAEENLVAEPTATDDLSPDELLSTSEATHRSVDEIAQKPVIDTSEENLLNTFEAEENPVVEPTATAAVSSDELISTSEATRHSVDEIAQKPIIDTSEKNPMETFVEPEAVHSSVDESTEKLVVVTSDVENDGENVASTTEDEITVRDTITDSGSISNNDDTKVEDLQLPVPETASLEPIKAASGREELVSKAFYLDSGFASLQSPFKALAGREDAYFISHHNWIGIADGVSQWSFEGINKGMYAQELMSNCEKIISNETAKISDPVQVLHRSVNETKSSGSSTALIAHLDNNELHIANIGDSGFMVIRDGTVLQNSSPMFHHFCFPLHITQGCDVLKLAEVYHVNLEEGDVVIAATDGLFDNLYEKEIVSIVCGSLKQSLEPQKIAELVAAKAQEVGRSKTERTPFADAAKEEGYNGHKGGKLDAVTVIISFVKIVST

SEQ ID NO: 77352 - protein, 472 aa, Arabidopsis thaliana
  peptide (1)..(472): Ceres Seq. ID no. 12575961
MEVQARPSLSTQQEITPVSTIEIDDNLDVTEKPIEAEENLVAEPTATDDLSPDELLSTSEATHRSVDEIAQKPVIDTSEENLLNTFEAEENPVVEPTATAAVSSDELISTSEATRHSVDEIAQKPIIDTSEKNPMETFVEPEAVHSSVDESTEKLVVVTSDVENDGENVASTTEDEITVRDTITDSGSISNNDDTKVEDLQLPVPETASLEPIKAASGREELVSKAFYLDSGFASLQSPFKALAGREDAYFISHHNWIGIADGVSQWSFEGINKGMYAQELMSNCEKIISNETAKISDPVQVLHRSVNETKSSGSSTALIAHLDNNELHIANIGDSGFMVIRDGTVLQNSSPMFHHFCFPLHITQGCDVLKLAEVYHVNLEEGDVVIAATDGLFDNLYEKEIVSIVCGSLKQSLEPQKIAELVAAKAQEVGRSKTERTPFADAAKEEGYNGHKGGKLDAVTVIISFVKIVST

SEQ ID NO: 77353 - DNA, 2225 bp, Arabidopsis thaliana
  misc_feature (1)..(2225): Ceres Seq. ID no. 12576005
  misc_feature (1)..(2225): Ortholog of  Ceres SEQ ID NO 15180386 as cited in SEQ ID NO 0
agaaccttctttttccggcgagggaagagcttcctcagccctaatcgctaaatcgatgaaattatgctcccaacgtttaacggtttaaagatcattccaaaaactcaaccttttgcgtgtctcctctcgccatgaccctaatctcaagatttttgatctctagagtgattagtagaactctgttttcgaatcagaataatagaacagctattaatgtttctgtaaagttgccacaattcagaattcagagtaatggatatcacacattgggtcttcttcataatgttaaaggaaggtttttaggtagtaatcatcatcagcttgcgcgtaggagctattcgattgcagttgcgagtaatgtagttaagcaacatgctcaagtctcttggggaaggcttgtacagagagtaactctgagtcgtagttggaacttacctcggataagtcagattgctcaagcgtgtagcttgtctttagcccgttcgcacttcttgttacctggtttattggctcttacctatagacaagtggcgtatgcgcaaagggtggttccaaatcctgtggtctattctccttcacacatttctccttataggagttcgataaacttccctatcgttctctcgtctttagtgttttctgcggtcaagggtgttgttctgatcgggagagctctttatttagcaattttgttttctccaaatgttattatggcgttgttgggatttgcttgcgggcctcgttacagacagctgcagtatgaggtcctccatcgaactctggagaaagcaggtcctgcttttatcaaatttggtcaatggattgctacgcgacctgatcggtttaataaggatttgtgtttgcagctttcaaagcttcacagtaatgctcctgagcacagttttgcgttcaccaaaaagagcattgaaaatgcatttggtcgtaaactctctgagatatttgaggaatttgatgaggcgccagtggcatctgggagtatagctcaagtacaccgagcttccttgaagtttcagtatgcaggacaaaaggtgaagtcctcggaagttgctgtgaaagttagacatccttgtgttgaggaaacgatgaagcgagattttgtgataattaatttcgtggcgaggctaaccacttttattccggggttaaattggcttagattggacgagtgtgtgcaacagtttagtgtctacatgttgtcccaagttgatctctcaagggaagcttctcatttgagtcggtttatatataacttccgtggatggaaagatgtctcttttcctaagcccatctatcctctaatacatcccgctgttttagtcgagacgtatgagcacggagagagtgtggctcgttatgttgatggctccgaaggacaagaaaaacttaaggctaaagtagctcatatcggaactaatgctctcttgaaaatgctcctggtcgacaacttcattcatgctgatatgcatcctgggaatattcttgtccggccaaacaatactagaagaggtctattcagatcgaggaagccacacatcgttttcctagatgtgggcatgactgcagaactttcaaaaactgaccgagataacctactcggatttttcaaggccgttgcacgtagagacggccggactgctgctgaacgaacacttaaattatctaaacaacagaattgtcctgatccacaggcctttatcaaggaagtagaagaagcatttacattctggggaacagaggaaggggatctagtccatccagcggattgtatgcacgaactattcgagaaaatgaggagtcatagagttaatatcgacggcaatgtgtccaccgtcatgtttacaacattagttctcgagggttggcaacggaaactggatccaggatacgatgtgatgcgtacgctacaaacaatgctgctgaaaacggattggatgaaatcactttcttacacgatcgatggacttatggctccgtagattgaaaaggttcaatctttgattcttttacccatttaacacttgagagccacatttttgttttgttgccttaggatgtgaagaagaaccaaaacatatattttagagaaaaacaaaggaaaagtcctttactgttttgtcttcttcttatcttttgcttattctttgattattctttttgctagaaattggaattcttcatcattctaaaacagagaatttgtattt

SEQ ID NO: 77354 - protein, 621 aa, Arabidopsis thaliana
  peptide (1)..(621): Ceres Seq. ID no. 12576006
MTLISRFLISRVISRTLFSNQNNRTAINVSVKLPQFRIQSNGYHTLGLLHNVKGRFLGSNHHQLARRSYSIAVASNVVKQHAQVSWGRLVQRVTLSRSWNLPRISQIAQACSLSLARSHFLLPGLLALTYRQVAYAQRVVPNPVVYSPSHISPYRSSINFPIVLSSLVFSAVKGVVLIGRALYLAILFSPNVIMALLGFACGPRYRQLQYEVLHRTLEKAGPAFIKFGQWIATRPDRFNKDLCLQLSKLHSNAPEHSFAFTKKSIENAFGRKLSEIFEEFDEAPVASGSIAQVHRASLKFQYAGQKVKSSEVAVKVRHPCVEETMKRDFVIINFVARLTTFIPGLNWLRLDECVQQFSVYMLSQVDLSREASHLSRFIYNFRGWKDVSFPKPIYPLIHPAVLVETYEHGESVARYVDGSEGQEKLKAKVAHIGTNALLKMLLVDNFIHADMHPGNILVRPNNTRRGLFRSRKPHIVFLDVGMTAELSKTDRDNLLGFFKAVARRDGRTAAERTLKLSKQQNCPDPQAFIKEVEEAFTFWGTEEGDLVHPADCMHELFEKMRSHRVNIDGNVSTVMFTTLVLEGWQRKLDPGYDVMRTLQTMLLKTDWMKSLSYTIDGLMAP

SEQ ID NO: 77355 - protein, 428 aa, Arabidopsis thaliana; identical to SEQ ID NO: 46436
  peptide (1)..(428): Ceres Seq. ID no. 12576007

SEQ ID NO: 77356 - DNA, 1821 bp, Arabidopsis thaliana
  misc_feature (1)..(1821): Ceres Seq. ID no. 12576075
  misc_feature (1)..(1821): Ortholog of  Ceres SEQ ID NO 13504578 as cited in SEQ ID NO 59850
tctgcgtcgcccggcggcggaaatgtgcgcttggggcgatgcgtttaattctcaccgtcatgtgctcattcattccttacctttattcatcttctcctcaccgtccttgctcttccccaatctctcgtcctcctcctcgaatccgtccttgtcgtctcagtcgtttcgccaccgcattagtcgctacctccgctcttcttctcgcttccgtcgcttggctttctctcgtcttctcaccaaccacttcccgttgttggcatcttcttaaagattgggaagacaatcatctctggaacaaacggtaccatcatccaattgtaactcctcctccgccgccgccgtcgccgccgtctcttccagctcttccgttattcgatcatgaatttagaaatcgtagtctctcagagattgataaacttgatctgtctatgaatcacttgatgtttggtattgctggatcttcacagctttgggaacgtcgtaaggaacttgtgagattatggtggaaaccttctcagatgcgtggacatgtctggcttgaagagcaagtttctcctgaggaaggtgatgattctcttcctcctataattgtctctgaagacagctctcgttttcgttacactaatcctactggtcatccttctggacttcgaatctctcgtattgctatggagtcttttcgtctctctctccctaatgttcggtggtttgttcttggtgatgatgatactatcttcaatgttcataatcttcttgctgtgttaagcaagtatgatccttcggagatggtttatattggaaacccctcggagagccactctgctaactcttactttagtcataacatggcttttggaggcggtggcattgccattagctaccctttagcggaagctctctcccggattcacgacgattgtctcgatagatacccgaagctatacggtagtgatgatcgtctccacgcctgcatcactgaactcggagttcctttgtccagagagcctggctttcaccagtgggatattaagggaaatgctcatggtctcttgtcctctcatcctattgcaccatttgtctcaattcatcacgttgaagctgttaatcctctctatccgggattatctacattagatagtttgaaactcttgacaagagctatgagtttggatcctaggagtgttttgcagcgatcgatctgctatgatcatactcacaaactgacatttgcgatatctcttggttatgttgtacaagttttcccaagtattctcctaccacgggatcttgagcgagctgaactttctttctctgcttggaacgggataagtcaacccagtgagtttgatcttgacataaagcttccaatttcgtctctctgtaagaagcctatcctcttcttcttgaaagaggttggccaagaaggtaatgctacacttggaacgtactcaagatccttggtaaaggatgatttgaagacgaagcttctatgttttccacgctctctacctctgcacaaagtggataaaatccaggtctcagggtttcctctgagtaaaaattggcacttggcgccgagacggttgtgttgcagagcaaccccaactactactaacgagcctctcagattaacagttgggcagtgtggtaagataattttgggttccacgattagttctcaatgaacacttatggtgaatactggatctctctaagcatgttgtttcagctctatcctgtacttgtacataggtaagatccagaaccttgactgttgtctgacctagaatgctaatatgcccaaaattgaatttgtcactc

SEQ ID NO: 77357 - protein, 560 aa, Arabidopsis thaliana
  peptide (1)..(560): Ceres Seq. ID no. 12576076
CVARRRKCALGAMRLILTVMCSFIPYLYSSSPHRPCSSPISRPPPRIRPCRLSRFATALVATSALLLASVAWLSLVFSPTTSRCWHLLKDWEDNHLWNKRYHHPIVTPPPPPPSPPSLPALPLFDHEFRNRSLSEIDKLDLSMNHLMFGIAGSSQLWERRKELVRLWWKPSQMRGHVWLEEQVSPEEGDDSLPPIIVSEDSSRFRYTNPTGHPSGLRISRIAMESFRLSLPNVRWFVLGDDDTIFNVHNLLAVLSKYDPSEMVYIGNPSESHSANSYFSHNMAFGGGGIAISYPLAEALSRIHDDCLDRYPKLYGSDDRLHACITELGVPLSREPGFHQWDIKGNAHGLLSSHPIAPFVSIHHVEAVNPLYPGLSTLDSLKLLTRAMSLDPRSVLQRSICYDHTHKLTFAISLGYVVQVFPSILLPRDLERAELSFSAWNGISQPSEFDLDIKLPISSLCKKPILFFLKEVGQEGNATLGTYSRSLVKDDLKTKLLCFPRSLPLHKVDKIQVSGFPLSKNWHLAPRRLCCRATPTTTNEPLRLTVGQCGKIILGSTISSQ

SEQ ID NO: 77358 - protein, 548 aa, Arabidopsis thaliana
  peptide (1)..(548): Ceres Seq. ID no. 12576077
MRLILTVMCSFIPYLYSSSPHRPCSSPISRPPPRIRPCRLSRFATALVATSALLLASVAWLSLVFSPTTSRCWHLLKDWEDNHLWNKRYHHPIVTPPPPPPSPPSLPALPLFDHEFRNRSLSEIDKLDLSMNHLMFGIAGSSQLWERRKELVRLWWKPSQMRGHVWLEEQVSPEEGDDSLPPIIVSEDSSRFRYTNPTGHPSGLRISRIAMESFRLSLPNVRWFVLGDDDTIFNVHNLLAVLSKYDPSEMVYIGNPSESHSANSYFSHNMAFGGGGIAISYPLAEALSRIHDDCLDRYPKLYGSDDRLHACITELGVPLSREPGFHQWDIKGNAHGLLSSHPIAPFVSIHHVEAVNPLYPGLSTLDSLKLLTRAMSLDPRSVLQRSICYDHTHKLTFAISLGYVVQVFPSILLPRDLERAELSFSAWNGISQPSEFDLDIKLPISSLCKKPILFFLKEVGQEGNATLGTYSRSLVKDDLKTKLLCFPRSLPLHKVDKIQVSGFPLSKNWHLAPRRLCCRATPTTTNEPLRLTVGQCGKIILGSTISSQ

SEQ ID NO: 77359 - protein, 541 aa, Arabidopsis thaliana
  peptide (1)..(541): Ceres Seq. ID no. 12576078
MCSFIPYLYSSSPHRPCSSPISRPPPRIRPCRLSRFATALVATSALLLASVAWLSLVFSPTTSRCWHLLKDWEDNHLWNKRYHHPIVTPPPPPPSPPSLPALPLFDHEFRNRSLSEIDKLDLSMNHLMFGIAGSSQLWERRKELVRLWWKPSQMRGHVWLEEQVSPEEGDDSLPPIIVSEDSSRFRYTNPTGHPSGLRISRIAMESFRLSLPNVRWFVLGDDDTIFNVHNLLAVLSKYDPSEMVYIGNPSESHSANSYFSHNMAFGGGGIAISYPLAEALSRIHDDCLDRYPKLYGSDDRLHACITELGVPLSREPGFHQWDIKGNAHGLLSSHPIAPFVSIHHVEAVNPLYPGLSTLDSLKLLTRAMSLDPRSVLQRSICYDHTHKLTFAISLGYVVQVFPSILLPRDLERAELSFSAWNGISQPSEFDLDIKLPISSLCKKPILFFLKEVGQEGNATLGTYSRSLVKDDLKTKLLCFPRSLPLHKVDKIQVSGFPLSKNWHLAPRRLCCRATPTTTNEPLRLTVGQCGKIILGSTISSQ

SEQ ID NO: 77360 - DNA, 1550 bp, Arabidopsis thaliana
  misc_feature (1)..(1550): Ceres Seq. ID no. 12576131
  misc_feature (1)..(1550): Ortholog of  Ceres SEQ ID NO 15178236 as cited in SEQ ID NO 67053
acttggattcctacttcttcttcttcttcctctgattctctcccattccaatcaatctctagggttcttcttcagcaatacttcagaagctggttttggccatggaacccaatgggtacaggaaagaaagaagaaaggaacaacatttggggagaatgaatggtggtggtggtgatgttgagactgatcttgatccatggactgcatgggcttacaagcctcgcactatctctcttctccttattggcgcttgttttctcatttgggctagtggagctcttgatcctgacagcactacatctgatgatcttgtcacttctgtcaaaaggggagtgtgggctatgatcgctgtctttcttgcttactctttgctccaggccccttcaacggttctaatcaggccccatcctgcaatctggcgcttagttcatggaatggccgtcatttacttagttgcacttacttttttgctctttcagagacgtgatgatgcacggcagttcatgaagtttctccaccctgaccttggaatagaacttcctgagaaatcatacggtgctgattgccgtatatatgtgcctgatcacccaacaaacaggacacagtatttgatgagtttttcttggctcacatctttggttggtgggggaaagcaattctgatccggaaccagccgcttctttgggtgctttcaattggttttgagttattggaggttacttttcggcatatgttaccaaatttcaacgagtgctggtgggacagtattgttcttgatatcttgatatgcaactggtttggtatctgggcaggaatgtatacagttcgatattttgatggaaaaacatatgagtgggttggcattagccgccagcctaacattattggcaaagtgaaaaggacactggggcagttcacaccagctcactgggacaaagacgagtggcatccgctgcagggaccttggcgttttattcaagtactcactctttgcatcatattcttgacagtggagctgaacacattctttctcaagtttagcctgtggatcccccctcgaaacccagtgattctctataggctgatcttgtggtggctcatagcgataccaacaacacgggagtacaattcatatcttcaagacagaaaacctgtgaaaaaggtgggagcattctgttggctgtcactggggatatgcatagtagaacttctcatctgcatcaagtttggaagtggattgtacccaacagaaatgccattgtgggtagtgacactatggggaagtgtgggacttggacttgtggccttcttgctgtcttggacatggaagatccagaagatcctcgcgcaaaagagacgttaagcgcatcattattgttgcagcagagacgagagagaaatagaggtgagacagtgaaatgccattgtggtttttttttgtaaatagggagaagaaggaacgatgtaaatgcaattttctttagggatagtgtgtgatattcaacatttacgaagattccatcaattctttcatgcatcaaaagttcttt

SEQ ID NO: 77361 - protein, 210 aa, Arabidopsis thaliana; identical to SEQ ID NO: 42223
  peptide (1)..(210): Ceres Seq. ID no. 12576132

SEQ ID NO: 77362 - protein, 186 aa, Arabidopsis thaliana
  peptide (1)..(186): Ceres Seq. ID no. 12576133
MEPNGYRKERRKEQHLGRMNGGGGDVETDLDPWTAWAYKPRTISLLLIGACFLIWASGALDPDSTTSDDLVTSVKRGVWAMIAVFLAYSLLQAPSTVLIRPHPAIWRLVHGMAVIYLVALTFLLFQRRDDARQFMKFLHPDLGIELPEKSYGADCRIYVPDHPTNRTQYLMSFSWLTSLVGGGKQF

SEQ ID NO: 77363 - protein, 182 aa, Arabidopsis thaliana; identical to SEQ ID NO: 42225
  peptide (1)..(182): Ceres Seq. ID no. 12576134

SEQ ID NO: 77364 - DNA, 1229 bp, Arabidopsis thaliana
  misc_feature (1)..(1229): Ceres Seq. ID no. 12576135
  misc_feature (1)..(1229): Ortholog of  Ceres SEQ ID NO 14303612 as cited in SEQ ID NO 63208
agaagatttgatttttcttattcctcttcaaaggcaaacaatttacacagctatatatatatttttagggtttttgagtatctcgcgaggttttacatagatttctccattatgccttgtgttgggttgcgcgaatcgattatttgtttctcttgattcatttgcatgtcataagagcttcgggagaaaaaaattgcttctttaggattcgatgatgaatcagaagactgttttggctgtgacggatgatgtggtgttacctgttagctctgttttagctataatgaaagagcttggaaaggaagtgattgagagttttgatcctctgattattactcaagcatccacaataaatcagtttcctttggatgcttcctctgtggaggcggtattagccatttccaaaacatctgatttcccaagtgataaaatatgtggtgagttctcaagaatcttgaagcctggcggcacggtttctgtgtgcaaagttttggagggtgaaacgggagaaattcaacagaccattcaaaggagagtgacattggctggttttcttgagccacagtgtcttgatttgaaatcaattaaattgtctacgttcagtttatcctttgggattaaggcaaagaaaccttcttggaagattggttcatcatttgctctcaaaaagcctgtaacaaatctctttaagattgatctagatgacgacgtggatcttattgatgaagattctcttttaacagaggaggacttgatgaagccacagcttcctgttgccagcggttgtgagaccactaaaaaagcttgcaagaactgcgtctgtggtagagctgaaattgaggagaaagctgtgaagctgggcctcacagaggatcaaatcgagaatccacaatcatcatgcggcagctgtgggctcggtgatgccttccgctgcggtacatgcccttacaagggtctgccacccttcaaattaggcgagaaggtaaccctatctcaaaacttccttgaagctgacatataagcatgtgaaaggcatcttcatacatgggtgtttctcgccgaggccaaaaccttttgctaatcgcagagtagtttcatcatttactttgtgccctttcgtataatttgtttgttggtacttcttttattttgtggctctaaaagcttgtagaatattgtttgggttgcccacaaagcacacaccttagtatcaatgaagaacggttttg

SEQ ID NO: 77365 - protein, 269 aa, Arabidopsis thaliana; identical to SEQ ID NO: 27278
  peptide (1)..(269): Ceres Seq. ID no. 12576136

SEQ ID NO: 77366 - protein, 268 aa, Arabidopsis thaliana; identical to SEQ ID NO: 36494
  peptide (1)..(268): Ceres Seq. ID no. 12576137

SEQ ID NO: 77367 - protein, 245 aa, Arabidopsis thaliana
  peptide (1)..(245): Ceres Seq. ID no. 12576138
MKELGKEVIESFDPLIITQASTINQFPLDASSVEAVLAISKTSDFPSDKICGEFSRILKPGGTVSVCKVLEGETGEIQQTIQRRVTLAGFLEPQCLDLKSIKLSTFSLSFGIKAKKPSWKIGSSFALKKPVTNLFKIDLDDDVDLIDEDSLLTEEDLMKPQLPVASGCETTKKACKNCVCGRAEIEEKAVKLGLTEDQIENPQSSCGSCGLGDAFRCGTCPYKGLPPFKLGEKVTLSQNFLEADI

SEQ ID NO: 77368 - DNA, 1532 bp, Arabidopsis thaliana
  misc_feature (1)..(1532): Ceres Seq. ID no. 12576189
  misc_feature (1)..(1532): Ortholog of  Ceres SEQ ID NO 15170986 as cited in SEQ ID NO 55328
ataatatatgggtttttctttccttcttcatttatgaaacgcaaaaaacattattcccctctgtggtctctctctcacgagcatcgtttcttcatcgatctcatagttaccggcgttgttttgaggccactaccgtcgtctctctccgtaatcgtctccaacatcatcatcttctcaatttcgaagcattttattctctaataggatttggtcccttaaaagatggtttcttgtttgaaacctcaactggtttatcaagaatgtgagtttcagtcttgttcctttctttgtcaaataaagtgaggagaggagagtcaagaaatcgacttcaatctctttgtcaattgctcagtgctctctctatatctgggttcgtgttcgtctggaagagacctggaaaaacaattcaggaagacgattagttgtgttcgtgttcgtccctaatccctaaaggactcaggaatgaatctttctccgttcaagagagatatcgatgagctgatagacgagtttgtggaggatgatttgacaacctttgctgatatgaagagtgtctggctatctagaaagttttctcatatatatgaagctagtcctaacagcaacctagcctttttcatgcagtcactatatgttcataccattggtcacatggttagtattgattctttttcacggagacttggaggtctttactgtctctattgccttcatgagatccaaccctttaaacccaagttcagaatctatatctcacttcaagagcttgggaaatttagggatcttgtagttgaggcaaaagataaaggtgtagagatagctgctgctgtggcaaaaaaaatgcttgatgagaacatgttaatatttggagctgtggatgagacatctgcaaccaagacaattcatcaattaaccgagctacagaacgcacgtgtgcggtttgcctatgagaagttaatctgtgacactagtattaaccaatttattcatttggatatgggtaaggaagttgatctgaattccctagataaaatgtctatagaatatgcagaggccaagaagcgtgcagtcgaaggtgcaggagaaataatggagattgatgacataaagcatatatcagaagagaaagagttgatgggagagagaatggagaaattgaaagaggaatgggattcacaaagactttacttttatgaacaaaccaagcttgatggttttactacgacaccaaaacagttgacaaatgtggaacatgatgaagatgatgggtttgatgagcttgatcgcttactttctcaaagctagtgttgccattgcaatcactgatcgatatcagagtcaggtttgtaggagagagctacacacacactctcacaaaatcaagagagcatgtttgattaggagaatatattggttagtaaattctgtatctaacaaggagattaagaaaattttaattacggtttttcttacgattggaaattatgtagtttgtcatattctcagagtatatgtgatttgataatcttaag

SEQ ID NO: 77369 - protein, 280 aa, Arabidopsis thaliana; identical to SEQ ID NO: 43560
  peptide (1)..(280): Ceres Seq. ID no. 12576190

SEQ ID NO: 77370 - protein, 253 aa, Arabidopsis thaliana; identical to SEQ ID NO: 43561
  peptide (1)..(253): Ceres Seq. ID no. 12576191

SEQ ID NO: 77371 - protein, 228 aa, Arabidopsis thaliana; identical to SEQ ID NO: 43562
  peptide (1)..(228): Ceres Seq. ID no. 12576192

SEQ ID NO: 77372 - DNA, 1337 bp, Arabidopsis thaliana
  misc_feature (1)..(1337): Ceres Seq. ID no. 12576197
  misc_feature (1)..(1337): Ortholog of  Ceres SEQ ID NO 14310713 as cited in SEQ ID NO 53582
aaaaaaatatcgcttctctcgagaggggaaggaaagttcatttctttttgtccaattctttcaacttctcgttccaatcccctcaattctccgtttcaccgaacgcacttcgaacccttaattgctttttgcgggtcaagtttcgattcgagcgttttagggtttcgtatctgaatcggtcgacaagataaacccttttgtgggggtttcctctagatttcgaaaacagagggatagctttcgtttggatggaaattctctgaaactaaactacatagtgatatggagacacaaattcatcaacttgagcaggaagcatataccgctgttttaagggcttttaaagcgcagtctgatgcgatttcttgggaaaaagaaagcttgataaccgaattgcgtaaagaattgagagtatctgatgatgaacatcgagagcttctcagtagggtcaataaggatgatactatccagaggataagagattggagacagggaggcgcaagccaaattactagacatgcaactattcagccttttgatgttcttcctagtcccactttctcagctgcccgaaagaaacagaaaacatttccatcttataatccatcaattggtgcgactggaaataggtcattcaataatcgtctggtatccagtggcatatcaggaaatgaatctgctgaagctctgatcggaagaaaagtgtggacaaaatggcctgaagataaccacttctatgaagcaattataacccagtacaatgcagatgagggtcggcatgctttggtgtatgatatacacgcagctaatgaaacgtgggaatgggttgatctcaaggagataccaccggaagacataagatgggatggggaggagagtggggtagctttaaacattggacatggaagtgcatccttccgtggcaacagaagaggccaaatccatggtggtagagggagaggaccaagaattcatcaaccaagaagggaacttgtaccgccaccaacacaacagaatggtagtggtgggcggagaacttcctctgatgatattgagttgttcaacacagactcgcttgtgaaggaggtggagagagttttcgattctacgcatcctgatccactcgagctcgacaaggccaagaaaatgctcaaggaacatgaacaggcactcattgctgccattgcaaggcttgctgatacttcggatggcgaaatgggtaataataacaaaagcacgctacgtttagtttgcaacctcagaataatatattatttaccattgaatttttgtgttatgatgataatatcaagcataattacaaacttaatcctagg

SEQ ID NO: 77373 - protein, 351 aa, Arabidopsis thaliana
  peptide (1)..(351): Ceres Seq. ID no. 12576198
METQIHQLEQEAYTAVLRAFKAQSDAISWEKESLITELRKELRVSDDEHRELLSRVNKDDTIQRIRDWRQGGASQITRHATIQPFDVLPSPTFSAARKKQKTFPSYNPSIGATGNRSFNNRLVSSGISGNESAEALIGRKVWTKWPEDNHFYEAIITQYNADEGRHALVYDIHAANETWEWVDLKEIPPEDIRWDGEESGVALNIGHGSASFRGNRRGQIHGGRGRGPRIHQPRRELVPPPTQQNGSGGRRTSSDDIELFNTDSLVKEVERVFDSTHPDPLELDKAKKMLKEHEQALIAAIARLADTSDGEMGNNNKSTLRLVCNLRIIYYLPLNFCVMMIISSIITNLIL

SEQ ID NO: 77374 - DNA, 1302 bp, Arabidopsis thaliana
  misc_feature (1)..(1302): Ceres Seq. ID no. 12576205
  misc_feature (1)..(1302): Ortholog of  Ceres SEQ ID NO 14311981 as cited in SEQ ID NO 55703
  misc_feature (1)..(1302): Ortholog of  Ceres SEQ ID NO 15226227 as cited in SEQ ID NO 63433
atctttcttcacactttctttcactttcccgggaaaacagccgagaaaataaaagaaacgaagaaaagtttgttcctttgtggggatcaaagaagaatgtactcggcgattcggtcttcgcttcctctagatggcagcttgggagactactctgacggaaccaatcttcccatcgacgcttgtctggtcctaaccactgaccccaagcctcgccttcgttggacctctgagctccatgaaagattcgttgacgccgtcactcagctcggcggacccgacaaagcaacgcctaaaactataatgagaacaatgggagtgaagggtctcactctttaccatctcaaatctcatcttcaggttttgatgctactaccttcaatatcaaattatgcttctttggctacttataacaaacaaagttcattgctttttgactgtgttgttctctggttttttgctcggtagaaattccgcttggggaggcaatcttgtaaagaatcaattgacaactctaaggatgtttcttgtgttgcggagagtcaggacactggttcatcttcaacatcatccttaagattggctgctcaagaacagaacgagagttaccaggtcactgaagctttgcgtgcccagatggaagtccaaagaagactacacgagcaactagaggtgcaaaggcgactccagttaaggatcgaggcacaagggaagtacctgcaatcaattctagagaaagcttgcaaggctatagaggagcaagctgttgcatttgctgggttagaggcagctagagaagagctttcagagctagccataaaggcctccatcaccaatgggtgccaaggaacaacaagcaccttcgacacaaccaaaatgatgattccatccttatccgagcttgcagtagcaatagagcacaagaacaactgttcagcagagagctctctgacttccagcactgtaggaagtccggtatcagctgcgttgatgaagaagagacaacgaggagtgtttggaaatggagatagtgtggttgttggtcatgatgctggatgggttatgcctagtagtagcattggatgaagttagcaagagagagagagagagcgagaccagattttagcttatttaattttgctatgttgtatttaactctaaactctgtcatcaaacttgtcttagcgtctatgtatatatttgttgaatctgtagcctctcttttagtttgtgtatttgcttcaactttttctaagcttgccttcttttttcttttttggacaaacctaaatatagaatttatgt

SEQ ID NO: 77375 - protein, 154 aa, Arabidopsis thaliana
  peptide (1)..(154): Ceres Seq. ID no. 12576206
IFLHTFFHFPGKTAEKIKETKKSLFLCGDQRRMYSAIRSSLPLDGSLGDYSDGTNLPIDACLVLTTDPKPRLRWTSELHERFVDAVTQLGGPDKATPKTIMRTMGVKGLTLYHLKSHLQVLMLLPSISNYASLATYNKQSSLLFDCVVLWFFAR

SEQ ID NO: 77376 - protein, 149 aa, Arabidopsis thaliana
  peptide (1)..(149): Ceres Seq. ID no. 12576207
MEVQRRLHEQLEVQRRLQLRIEAQGKYLQSILEKACKAIEEQAVAFAGLEAAREELSELAIKASITNGCQGTTSTFDTTKMMIPSLSELAVAIEHKNNCSAESSLTSSTVGSPVSAALMKKRQRGVFGNGDSVVVGHDAGWVMPSSSIG

SEQ ID NO: 77377 - protein, 122 aa, Arabidopsis thaliana
  peptide (1)..(122): Ceres Seq. ID no. 12576208
MYSAIRSSLPLDGSLGDYSDGTNLPIDACLVLTTDPKPRLRWTSELHERFVDAVTQLGGPDKATPKTIMRTMGVKGLTLYHLKSHLQVLMLLPSISNYASLATYNKQSSLLFDCVVLWFFAR

SEQ ID NO: 77378 - DNA, 2039 bp, Arabidopsis thaliana
  misc_feature (1)..(2039): Ceres Seq. ID no. 12576217
  misc_feature (1)..(2039): Ortholog of  Ceres SEQ ID NO 13586919 as cited in SEQ ID NO 0
aaactccaacagcatcatcatcatcatcatccttcaaattatttttcctattttgaaaaatttatttgaaatctcataatttacgttaatggagattgctccatctacaagtagattcaagctctacgatcaattcgagcttctggagtttcctgacaagtacgtcgtcaaacccatcgaatcgcctgaggaaggcttctccgtcaatcggcgcgatggcaatatcaaacctcttgatgaaaacgcatcttctgggagtcctactagagtctctactatctatggcgtaggaggaactattaggctcttagcaggaacatacttgctagttataacgtctcgggaggaagttggaaattttctcggtttaccgatttttagagttacggctatgaaattcttaccttgcaatgaggctttgaggtttgctactgctcaagaaaaaaaggacgaaacatattttaggactctgttacaagcacttgagacaacccctggattgtatttttcgtatgaaacagatctaacattgaatcttcaaagaaggtgcaagctagctgaaggttggaatcgtaagcctatgtggaagcaggctgaccctcgatatgtttggaactggcatcttttggaggacttaattgaatgcaaactggatggttttattattcctatacttcaaggaaattaccaagttgctgagctaaagctcaagaattctcctgctgtggtatcgataatgtccaggcgctgtacacgacgtctaggtacacgtatgtggagaagaggagccaatcttgaaggggacgctgctaattttgtcgaatctgaacaaatagtggagattaatggtttcaagttctcattattgcaggttcgaggttcaatcccacttctttgggagcagatcgttgatttgagttataagccacggcttaagataaataagcatgaagagacgccaaaagttgtacagcgccatttccatgatctttgccaaagatatggagaaattatggcagttgacctaacagatcagcatggagatgaaggtgcattaagcaaagcatatgccaccgagatggagaagcttcctgatgtgagatatgtctcctttgacttccatcaagtctgtggaactacaaacttcgacaacctgggggtactgtatgagcagattggggatgaatttgaaaagcaaggatatttccttgtagacgcagacgagaacatcctagaagagcagaaaggagttatcagatctaactgcatcgactgtcttgaccgcacaaatgttacccagagtttcatgggccaaaaaagtctgaatctacaacttcaaaggatcggagtgtgcgattccacagagtgtatatccacgttcgaagatgattacacaaagttcagaacaatttgggctgagcaaggggacgaggttagtttgcaatatgccgggacatatgctcttaagggcgacctcgtaaggtacgggaaacagactatgactggagctatcaaagatggcctcagtgcaatgtcgagatattatctgaataatttccaagatggtgtaaggcaggatgctttggacctcataagtggtcgctacacagtgggcacacacagcccttcacaactccagcccattggatcacaaccgtcttttctgccggtagcatcagcattgttgataggtggtgtaacagtgacatctttcacaattcatcaagcgggaagaaacacgcagcagtatctggcgtcggctttgtgggctggagtgactgcaggagttgtggcgatgatcaaagccaatggaaggcacttgacttcaaggcctcgtctttgccatctaatttgattccatttgaattgagattatttgcgtctcacattcttcccaaaacccacacccactgtccctctttgctttctcgttcaacgtccgcacaaaccaaaaatcgaactaaaagtctatattactgaacttctttattcaatgcaatcagttttataacccaaaataatataagaagatttcttcc

SEQ ID NO: 77379 - protein, 588 aa, Arabidopsis thaliana
  peptide (1)..(588): Ceres Seq. ID no. 12576218
MEIAPSTSRFKLYDQFELLEFPDKYVVKPIESPEEGFSVNRRDGNIKPLDENASSGSPTRVSTIYGVGGTIRLLAGTYLLVITSREEVGNFLGLPIFRVTAMKFLPCNEALRFATAQEKKDETYFRTLLQALETTPGLYFSYETDLTLNLQRRCKLAEGWNRKPMWKQADPRYVWNWHLLEDLIECKLDGFIIPILQGNYQVAELKLKNSPAVVSIMSRRCTRRLGTRMWRRGANLEGDAANFVESEQIVEINGFKFSLLQVRGSIPLLWEQIVDLSYKPRLKINKHEETPKVVQRHFHDLCQRYGEIMAVDLTDQHGDEGALSKAYATEMEKLPDVRYVSFDFHQVCGTTNFDNLGVLYEQIGDEFEKQGYFLVDADENILEEQKGVIRSNCIDCLDRTNVTQSFMGQKSLNLQLQRIGVCDSTECISTFEDDYTKFRTIWAEQGDEVSLQYAGTYALKGDLVRYGKQTMTGAIKDGLSAMSRYYLNNFQDGVRQDALDLISGRYTVGTHSPSQLQPIGSQPSFLPVASALLIGGVTVTSFTIHQAGRNTQQYLASALWAGVTAGVVAMIKANGRHLTSRPRLCHLI

SEQ ID NO: 77380 - protein, 487 aa, Arabidopsis thaliana
  peptide (1)..(487): Ceres Seq. ID no. 12576219
MKFLPCNEALRFATAQEKKDETYFRTLLQALETTPGLYFSYETDLTLNLQRRCKLAEGWNRKPMWKQADPRYVWNWHLLEDLIECKLDGFIIPILQGNYQVAELKLKNSPAVVSIMSRRCTRRLGTRMWRRGANLEGDAANFVESEQIVEINGFKFSLLQVRGSIPLLWEQIVDLSYKPRLKINKHEETPKVVQRHFHDLCQRYGEIMAVDLTDQHGDEGALSKAYATEMEKLPDVRYVSFDFHQVCGTTNFDNLGVLYEQIGDEFEKQGYFLVDADENILEEQKGVIRSNCIDCLDRTNVTQSFMGQKSLNLQLQRIGVCDSTECISTFEDDYTKFRTIWAEQGDEVSLQYAGTYALKGDLVRYGKQTMTGAIKDGLSAMSRYYLNNFQDGVRQDALDLISGRYTVGTHSPSQLQPIGSQPSFLPVASALLIGGVTVTSFTIHQAGRNTQQYLASALWAGVTAGVVAMIKANGRHLTSRPRLCHLI

SEQ ID NO: 77381 - protein, 424 aa, Arabidopsis thaliana
  peptide (1)..(424): Ceres Seq. ID no. 12576220
MWKQADPRYVWNWHLLEDLIECKLDGFIIPILQGNYQVAELKLKNSPAVVSIMSRRCTRRLGTRMWRRGANLEGDAANFVESEQIVEINGFKFSLLQVRGSIPLLWEQIVDLSYKPRLKINKHEETPKVVQRHFHDLCQRYGEIMAVDLTDQHGDEGALSKAYATEMEKLPDVRYVSFDFHQVCGTTNFDNLGVLYEQIGDEFEKQGYFLVDADENILEEQKGVIRSNCIDCLDRTNVTQSFMGQKSLNLQLQRIGVCDSTECISTFEDDYTKFRTIWAEQGDEVSLQYAGTYALKGDLVRYGKQTMTGAIKDGLSAMSRYYLNNFQDGVRQDALDLISGRYTVGTHSPSQLQPIGSQPSFLPVASALLIGGVTVTSFTIHQAGRNTQQYLASALWAGVTAGVVAMIKANGRHLTSRPRLCHLI

SEQ ID NO: 77382 - DNA, 1596 bp, Arabidopsis thaliana
  misc_feature (1)..(1596): Ceres Seq. ID no. 12576227
  misc_feature (1)..(1596): Ortholog of  Ceres SEQ ID NO 13659759 as cited in SEQ ID NO 67663
aagaagctattggatcgctgacagataatccgatcagattcagagagttttatcgatcagatcattttttctcaatgacgaaaaaggcggtgcttattgggatcaattacccaggaaccaaggcggagttacggggatgcgtcaacgatgttcgtcgtatgtacaaatgtctcgttgaacggtacggcttctccgaggagaacatcaccgttctcatcgacaccgatgaatcctctactcagcctactggcaagaacatccgccgcgcgcttgctgatctcgtcgaatctgccgattccggcgacgttcttgtcgttcattacagtggacacggtacgaggttgccggctgagactggtgaagacgatgacactggtttcgacgagtgtattgttccttgcgacatgaatctgattactgatgatgattttagagatcttgtggacaaggttcctccaggttgcagaatgacaatcatttcagactcttgtcacagtggtggcctaatcgacgaagccaaggagcagattggagagagcactaagaaagaagccgaggacgaagatgaatctgaagaatcttcttcaagattcgggtttaggaagttcttgcgcagcaaagtggaaggcgccatcgagtctcgagggtttcacattggagggaacaagaaggatgaagatgaggcggaagaaatcgagactaaggagattgagcttgaagacggagaaacgatccatgccaaagacaaatctcttcctctgcagaccttgattgatattctcaagcagcaaacagggaatgataatatcgaagttgggaaaatcaggccaagcctttttgatgcgtttggtgatgattcgagcccgaaagtgaagaagtttatgaaagtgatcttaggtaagcttcaggctggaaatggagaagaaggtggattaatgggaatgcttggcaaattggcttcagggtttcttgagggtaaactaaacgatgaagactatgtgaaacccgctatgcagacacacgttgggagtaaagaagaggtttatgctggtggatcaagaggttcggttccgcttccagacagcgggatactgatcagcggttgccaaaccgatcagacctctgctgatgcgactccagcggggaaaccaactgaggcttatggagcgatgagcaattcgatacagacgatattggaggagacagacggtgagatatcaaacagagaaatggttacaagggctaggaaggcattgaagaagcaagggtttactcagcagccaggtttgtattgccatgatggttatgccaacgctcctttcatctgttgaaaacagaggttttattgaatgttttttactacgtacgacacgttgattgaagtttctggtcggaaaaataagcctgttttttttttttgctgtttgatggcatttatgtaatttacaagttatgtgtgttgtgttctgtgaaacactaaaattcttcttgttttattgagatctattatgttggttgtgaaattattttttgtttttcttttcttgttaactctctgtattctgcacatcaataagaaaaagttttttttaacgg

SEQ ID NO: 77383 - protein, 442 aa, Arabidopsis thaliana
  peptide (1)..(442): Ceres Seq. ID no. 12576228
EAIGSLTDNPIRFREFYRSDHFFSMTKKAVLIGINYPGTKAELRGCVNDVRRMYKCLVERYGFSEENITVLIDTDESSTQPTGKNIRRALADLVESADSGDVLVVHYSGHGTRLPAETGEDDDTGFDECIVPCDMNLITDDDFRDLVDKVPPGCRMTIISDSCHSGGLIDEAKEQIGESTKKEAEDEDESEESSSRFGFRKFLRSKVEGAIESRGFHIGGNKKDEDEAEEIETKEIELEDGETIHAKDKSLPLQTLIDILKQQTGNDNIEVGKIRPSLFDAFGDDSSPKVKKFMKVILGKLQAGNGEEGGLMGMLGKLASGFLEGKLNDEDYVKPAMQTHVGSKEEVYAGGSRGSVPLPDSGILISGCQTDQTSADATPAGKPTEAYGAMSNSIQTILEETDGEISNREMVTRARKALKKQGFTQQPGLYCHDGYANAPFIC

SEQ ID NO: 77384 - protein, 418 aa, Arabidopsis thaliana; identical to SEQ ID NO: 41313
  peptide (1)..(418): Ceres Seq. ID no. 12576229

SEQ ID NO: 77385 - protein, 390 aa, Arabidopsis thaliana; identical to SEQ ID NO: 41314
  peptide (1)..(390): Ceres Seq. ID no. 12576230

SEQ ID NO: 77386 - DNA, 1690 bp, Arabidopsis thaliana
  misc_feature (1)..(1690): Ceres Seq. ID no. 12576262
  misc_feature (1)..(1690): Ortholog of  Ceres SEQ ID NO 15176457 as cited in SEQ ID NO 55547
  misc_feature (1)..(1690): Ortholog of  Ceres SEQ ID NO 13594349 as cited in SEQ ID NO 58161
  misc_feature (1)..(1690): Ortholog of  Ceres SEQ ID NO 13663419 as cited in SEQ ID NO 66561
aagagtagactagagtcttcttggttgtgatattcttttccaatttcgtaattttagaaaagctgtagaagatggcgagtgtgtcgtggcgggctgtggctgtagctatggtggtggtgttgctgtcattgcagtggtttgcaaaagggtacccggaagaagatttggtggtgaggctgccaggtcaaccaactgttgggttcaaacaatacgcaggttatgtcgatgtcgatgtgaaagctggtcggagtctgttctattactatgtggaggctgtgaaacaacctgactcaaagccattgaccctttggctcaatggaggtccaggttgttcttcaattggtggaggagctttcactgagttgggtccattttaccccactggcgatggccgtggccttcgtgttaactccatgtcttggaacaaagcgtcgcacctgctttttgtggagtcacctgctggagtaggatggtcttactctaataaaagctctgattacaacaccggggataagtctactgcaaacgatatgcttgtgttcttgttgagatggtttgagaagttcccaaagttgaagtctcgggatctctttcttactggcgaaagctatgcaggacattacatacctcaactggctgatgcgattctcagctacaattcacactcaagtggattcaaattcaacatcaaaggcgttgctattgggaatccacttctgaagcttgacagagacagtccagctacctacgagttcttctggtcgcatggcatgatctctgatgaactaaaactcacaatcacgagtcaatgtgactttgatgattacacatttgctagcccccataacgtaagcacggcctgcaatgaagctattagtgaaactgaaaacattatcactgagtatgtcaacaactatgatgttctcctcgatgtatgttatccgtctatcgtccagcaagagctgaggctcaagaaaatggctactaaaatgagcatgggagtggatgtgtgtatgacctatgaaagacggttctactttaatcttccagaggtacaaaaggcgcttcatgcgaaccgtactcatctgccttattcatggtcaatgtgcagcggcgtgttaaactactctgatatcgatgggaacatcgacatgcttccgattctgaagagaattatactgaacaaaactcctatttggatcttcagtggagatcaagattctgtagttccattcgggggttcaagaactctcgtaagagaacttgctcaagatctcaacttcaagacaacagttccctatggagcctggttccacaaaagccaggttggaggctgggccatagagtatggaaaactactgacgtttgcaacggtgagaggagcggctcatatggtaccgtatgcacagccctcacgagctctacatttgttcagtagctttgtaagtggccggagattacccaacaacacacattcttctactgatgaatgaaagagcagaggtatatcttttgtaagaaaaatgtagtttttgtatttaattgatctgtctcaggccttagattagtagagatagaaacatgtaaaagtttgtgttgtggtttggttggatcttcaagtgtagtttgttttagttatctcaaacgttgacaacaattctctttagttaattaatcttagttattgaat

SEQ ID NO: 77387 - protein, 473 aa, Arabidopsis thaliana
  peptide (1)..(473): Ceres Seq. ID no. 12576263
MASVSWRAVAVAMVVVLLSLQWFAKGYPEEDLVVRLPGQPTVGFKQYAGYVDVDVKAGRSLFYYYVEAVKQPDSKPLTLWLNGGPGCSSIGGGAFTELGPFYPTGDGRGLRVNSMSWNKASHLLFVESPAGVGWSYSNKSSDYNTGDKSTANDMLVFLLRWFEKFPKLKSRDLFLTGESYAGHYIPQLADAILSYNSHSSGFKFNIKGVAIGNPLLKLDRDSPATYEFFWSHGMISDELKLTITSQCDFDDYTFASPHNVSTACNEAISETENIITEYVNNYDVLLDVCYPSIVQQELRLKKMATKMSMGVDVCMTYERRFYFNLPEVQKALHANRTHLPYSWSMCSGVLNYSDIDGNIDMLPILKRIILNKTPIWIFSGDQDSVVPFGGSRTLVRELAQDLNFKTTVPYGAWFHKSQVGGWAIEYGKLLTFATVRGAAHMVPYAQPSRALHLFSSFVSGRRLPNNTHSSTDE

SEQ ID NO: 77388 - protein, 461 aa, Arabidopsis thaliana
  peptide (1)..(461): Ceres Seq. ID no. 12576264
MVVVLLSLQWFAKGYPEEDLVVRLPGQPTVGFKQYAGYVDVDVKAGRSLFYYYVEAVKQPDSKPLTLWLNGGPGCSSIGGGAFTELGPFYPTGDGRGLRVNSMSWNKASHLLFVESPAGVGWSYSNKSSDYNTGDKSTANDMLVFLLRWFEKFPKLKSRDLFLTGESYAGHYIPQLADAILSYNSHSSGFKFNIKGVAIGNPLLKLDRDSPATYEFFWSHGMISDELKLTITSQCDFDDYTFASPHNVSTACNEAISETENIITEYVNNYDVLLDVCYPSIVQQELRLKKMATKMSMGVDVCMTYERRFYFNLPEVQKALHANRTHLPYSWSMCSGVLNYSDIDGNIDMLPILKRIILNKTPIWIFSGDQDSVVPFGGSRTLVRELAQDLNFKTTVPYGAWFHKSQVGGWAIEYGKLLTFATVRGAAHMVPYAQPSRALHLFSSFVSGRRLPNNTHSSTDE

SEQ ID NO: 77389 - protein, 359 aa, Arabidopsis thaliana
  peptide (1)..(359): Ceres Seq. ID no. 12576265
MSWNKASHLLFVESPAGVGWSYSNKSSDYNTGDKSTANDMLVFLLRWFEKFPKLKSRDLFLTGESYAGHYIPQLADAILSYNSHSSGFKFNIKGVAIGNPLLKLDRDSPATYEFFWSHGMISDELKLTITSQCDFDDYTFASPHNVSTACNEAISETENIITEYVNNYDVLLDVCYPSIVQQELRLKKMATKMSMGVDVCMTYERRFYFNLPEVQKALHANRTHLPYSWSMCSGVLNYSDIDGNIDMLPILKRIILNKTPIWIFSGDQDSVVPFGGSRTLVRELAQDLNFKTTVPYGAWFHKSQVGGWAIEYGKLLTFATVRGAAHMVPYAQPSRALHLFSSFVSGRRLPNNTHSSTDE

SEQ ID NO: 77390 - DNA, 1508 bp, Arabidopsis thaliana
  misc_feature (1)..(1508): Ceres Seq. ID no. 12576266
  misc_feature (1)..(1508): Ortholog of  Ceres SEQ ID NO 13661082 as cited in SEQ ID NO 60959
agatgcagtcttcttcatcaatggaggtttttgattcgccccaagctctcgcgattcctgatgttcttcagtaatttcttgcaatccttataaacaaagagcgtggagaatcgtttcagaggaaagaaaactaaaaatggcgactcttttcaacaaatttcagcaggctgttggagttcttgccaagagtaccacatttgctaagaacccaaggcaactgcagtttgaagcagacgttaacaaactctttatgtatacaagctataaccggttgggacgagaagctgaggagactgatgcagaggagatcattgagatggctggtaaagccactttatctgagcagcagaagcaagttcaagagaacattcactaccaagttgaaaaattctgctctttgatggatggaatccttcttcctgatgttaggaggaacgagtcggggtcacaatcaacaagccctcgtcctcctcgtagaagtggtcttactttcgccattggtagtaataatgcttttccacatgcagatcagccccttgttcccgagacaaagcctttgaaactcaatgacgtctcacagagattaatggatcaaatgggttacaccctcgagaccaaaccgtctgtaatacctcacaaagacgctggtcaaggttgttttatcaaaggcgaggcagatgttggaaccgtcttagccttttaccctggagttatttactctcctgctttctacaagtacatacccgggtacccgaaggttgattcacagaactcatatctcatcaccaggtatgatgggactgtaataaatgctcaaccttggggtcttgggggagaatcaagggaagcatggaacgggtcctacacacctgcggtcaaagcaaacaccaaaaccgcagaaaacgggtcagacaggttatggaaagcgttgagcaagcctctcgaaggttcgggtaaaggaaaagaggttcttgagaggagaaatccgttggcttttggtcacttagctaaccacccagcgaaagagatgactccaaacgttatgatatgtccttatgacttccctttgatggcgaaagatctgcggccttacattccgaatatatcttttggggattctggagaaataaagatgaaaagatttggaagtttctggtttaagacagggagtaaaaacgggttagaagctccggttctgaagacactggtcttggtggcaacgaggtcgttgtgtaatgaggaacttttgctgaattacaggctgagcaactctaagagacgaccagattggtatactccggttaacgaggaggaagataggagaagatggagctaaatttctcttttatgttttaatgaaacttgaaaggctctgtttcaaaacatgctcctcggttttctttagactattagcgggacgtcgtttcgctgattgtgtcactatttttgtttttcgattatttttggaagacattttattctaatattttatgttgttctgttgttac

SEQ ID NO: 77391 - protein, 399 aa, Arabidopsis thaliana; identical to SEQ ID NO: 42747
  peptide (1)..(399): Ceres Seq. ID no. 12576267

SEQ ID NO: 77392 - protein, 361 aa, Arabidopsis thaliana; identical to SEQ ID NO: 42748
  peptide (1)..(361): Ceres Seq. ID no. 12576268

SEQ ID NO: 77393 - protein, 339 aa, Arabidopsis thaliana; identical to SEQ ID NO: 42749
  peptide (1)..(339): Ceres Seq. ID no. 12576269

SEQ ID NO: 77394 - DNA, 1164 bp, Arabidopsis thaliana
  misc_feature (1)..(1164): Ceres Seq. ID no. 12576285
  misc_feature (1)..(1164): Ortholog of  Ceres SEQ ID NO 13596643 as cited in SEQ ID NO 62565
  misc_feature (1)..(1164): Ortholog of  Ceres SEQ ID NO 13597550 as cited in SEQ ID NO 65037
ctattcttctcgacgacgaaagaaaacaccgaagcaacgaggaagaagaagattataatctaatctctccttcgtgtagtttagcgaagagtgatgcgattttcttctggcggtgtttgatttcgtattctcgagttgttgtgggggagagattgattagaattagagatgatgagtttcgtgatttcagatgaatttctggggacatttgtgccgattctggtgtattgggtgtattcagggatgtacatttgcttaggatctttggataaatatagattgcattcgaagatagatgaggatgagaagaatctcgtttctaaatctgccgtcgttaagggcgttcttcttcaacagactcttcaggctattatctccgttattctcttcaagataacaggaagtgatgcagatgctgctacgacacagcaattttccattctacttctggctaggcagtttatcatcgctatgcttgtaattgacacttggcaatatttcattcatcgatatatgcacctcaacaagttcttatacaagcacatccactctcagcatcatcgccttattgtgccttattcgtatggagctctatacaaccatccactagaaggtcttctcttggacactattggtggtgctttgtctttcctcttctctggtatgtccccaagaacagccatctttttcttctccttcgctaccatcaaaacagtagatgatcattgtggactatggcttccgggaaatccatttcacatcttcttcagtaataactctgcttaccatgatgttcaccaccaactctatggaaccaaatacaacttctcgcagccattctttgttatgtgggataggattctcggcacttacttgccttattcattggagaaaagagccaatggaggatttgaaacacggccaatcaaagtatccaaagatgagtaatttctctttctttcttttggggcttcttgtcaatgctaagtcatcattttgctcgttagagaaccactgtaacctttgcgtacttgtaattgtacatacaattccaatctatccttttttcgatctgcgggcatatgtttctgtgtaagccagcagtaaatttatcttgtaatagccaaaacttcagatcttctctgttattattatctgctttat

SEQ ID NO: 77395 - protein, 259 aa, Arabidopsis thaliana
  peptide (1)..(259): Ceres Seq. ID no. 12576286
MMSFVISDEFLGTFVPILVYWVYSGMYICLGSLDKYRLHSKIDEDEKNLVSKSAVVKGVLLQQTLQAIISVILFKITGSDADAATTQQFSILLLARQFIIAMLVIDTWQYFIHRYMHLNKFLYKHIHSQHHRLIVPYSYGALYNHPLEGLLLDTIGGALSFLFSGMSPRTAIFFFSFATIKTVDDHCGLWLPGNPFHIFFSNNSAYHDVHHQLYGTKYNFSQPFFVMWDRILGTYLPYSLEKRANGGFETRPIKVSKDE

SEQ ID NO: 77396 - protein, 258 aa, Arabidopsis thaliana
  peptide (1)..(258): Ceres Seq. ID no. 12576287
MSFVISDEFLGTFVPILVYWVYSGMYICLGSLDKYRLHSKIDEDEKNLVSKSAVVKGVLLQQTLQAIISVILFKITGSDADAATTQQFSILLLARQFIIAMLVIDTWQYFIHRYMHLNKFLYKHIHSQHHRLIVPYSYGALYNHPLEGLLLDTIGGALSFLFSGMSPRTAIFFFSFATIKTVDDHCGLWLPGNPFHIFFSNNSAYHDVHHQLYGTKYNFSQPFFVMWDRILGTYLPYSLEKRANGGFETRPIKVSKDE

SEQ ID NO: 77397 - protein, 234 aa, Arabidopsis thaliana
  peptide (1)..(234): Ceres Seq. ID no. 12576288
MYICLGSLDKYRLHSKIDEDEKNLVSKSAVVKGVLLQQTLQAIISVILFKITGSDADAATTQQFSILLLARQFIIAMLVIDTWQYFIHRYMHLNKFLYKHIHSQHHRLIVPYSYGALYNHPLEGLLLDTIGGALSFLFSGMSPRTAIFFFSFATIKTVDDHCGLWLPGNPFHIFFSNNSAYHDVHHQLYGTKYNFSQPFFVMWDRILGTYLPYSLEKRANGGFETRPIKVSKDE

SEQ ID NO: 77398 - DNA, 1744 bp, Arabidopsis thaliana
  misc_feature (1)..(1744): Ceres Seq. ID no. 12576289
  misc_feature (1)..(1744): Ortholog of  Ceres SEQ ID NO 14308723 as cited in SEQ ID NO 58758
agattttggttttgtgttgagaacaactccaaagagacgagaagcagcgaatcgtacgagcagagagatatatgtttcattacgtcgatgatggattctgctttatatcatcctcgaatctttttcgctcacagcttcatcaatggcttgtatagttctcctaggtttgctaatacttgctggagattggttagtcgttcaagttgggagatcaaggctagtgagaatagtgatcgcaatgtgttcgatgaaaatcctgttaggaaaaccgacgggtcgttgtttgattctgcttcgtttgagacagttgacgcggaaatcacgcctgagactgatgatttcttcgtgagtgacgcagagggtgatccagattgtcctactcaaggttattcctctattgaacttgctcttcaagctctacgcaaaggaaagtttgtgatcgttgttgacgatgaaaccggagatgttgaagggaatctgatcatggctgcaactcttacgagtccaaaagacatagcttttctgattaagaatggttcaggtattgtctcagttggtatgaagaaagaaaaccttgaaagattaagccttacacttatgtcacctgaaatggaagacgaagattcctctgctccaactttcaccatcactgtggatgcaaaatctggaacatcaactggagtatcagcttcagacagggcgatgacggttcttgcactttcgtctctcgatgctaaaccagatgatttcaggaggcctggtcatgtattccctctcaagtacagagatggtggagttttaaggagagctggtcacaccgaagcttcagtggatctaatgatattggctggtttacgtcccctctctgttctttcagctattcttgatcaagaagatgggtctatggcttcactgccgtatatgaaaaagcttgctacggaacatgatatccccattgtatcgttgactgatttaatcagatatcgaagaaagcgagataagcttgttgagagaatcacagtgtctcgtttgcctaccaaatggggtcttttccaagcttattgttatcgatctaaactcgatggaaccgaaaatatcgccctcgttaagggaaacgttggaaatggtgaggacattctggtgcgagtgcattcagagtgcttgacaggagacatttttggctcagcacggtgtgactgtggaaaccaattggacttagccatggagttaatcgagaaagagggaagaggagttgttgtgtatctccgtggccacgaaggaagaggcattggccttggtcacaagcttagagcttataacttgcaggacgaaggacacgacactgttcaggccaatgttgaacttggcctatccattgattctcgtgaatacggtatcggtgctcagatgctacgagacataggagtgagaacaatgagactaatgacgaataaccctgccaaattcactggtctgaaagggtacggactcgctgtagttggccgtgtgccggtggtgacaccaatcaccaaggagaacagaagatatatggagaccaaacgcaagaagatgggtcacatttatatctctgataacaacgatcagccattagcttgacccaaaagcttttgatagaaacacacacttttgaattttgtatttataaattgattcattcttatgtaatcatcaaccacaattactttttttctggaagatttgacataaaatcgaattatagttt

SEQ ID NO: 77399 - protein, 538 aa, Arabidopsis thaliana
  peptide (1)..(538): Ceres Seq. ID no. 12576290
RFWFCVENNSKETRSSESYEQRDICFITSMMDSALYHPRIFFAHSFINGLYSSPRFANTCWRLVSRSSWEIKASENSDRNVFDENPVRKTDGSLFDSASFETVDAEITPETDDFFVSDAEGDPDCPTQGYSSIELALQALRKGKFVIVVDDETGDVEGNLIMAATLTSPKDIAFLIKNGSGIVSVGMKKENLERLSLTLMSPEMEDEDSSAPTFTITVDAKSGTSTGVSASDRAMTVLALSSLDAKPDDFRRPGHVFPLKYRDGGVLRRAGHTEASVDLMILAGLRPLSVLSAILDQEDGSMASLPYMKKLATEHDIPIVSLTDLIRYRRKRDKLVERITVSRLPTKWGLFQAYCYRSKLDGTENIALVKGNVGNGEDILVRVHSECLTGDIFGSARCDCGNQLDLAMELIEKEGRGVVVYLRGHEGRGIGLGHKLRAYNLQDEGHDTVQANVELGLSIDSREYGIGAQMLRDIGVRTMRLMTNNPAKFTGLKGYGLAVVGRVPVVTPITKENRRYMETKRKKMGHIYISDNNDQPLA

SEQ ID NO: 77400 - protein, 509 aa, Arabidopsis thaliana
  peptide (1)..(509): Ceres Seq. ID no. 12576291
MMDSALYHPRIFFAHSFINGLYSSPRFANTCWRLVSRSSWEIKASENSDRNVFDENPVRKTDGSLFDSASFETVDAEITPETDDFFVSDAEGDPDCPTQGYSSIELALQALRKGKFVIVVDDETGDVEGNLIMAATLTSPKDIAFLIKNGSGIVSVGMKKENLERLSLTLMSPEMEDEDSSAPTFTITVDAKSGTSTGVSASDRAMTVLALSSLDAKPDDFRRPGHVFPLKYRDGGVLRRAGHTEASVDLMILAGLRPLSVLSAILDQEDGSMASLPYMKKLATEHDIPIVSLTDLIRYRRKRDKLVERITVSRLPTKWGLFQAYCYRSKLDGTENIALVKGNVGNGEDILVRVHSECLTGDIFGSARCDCGNQLDLAMELIEKEGRGVVVYLRGHEGRGIGLGHKLRAYNLQDEGHDTVQANVELGLSIDSREYGIGAQMLRDIGVRTMRLMTNNPAKFTGLKGYGLAVVGRVPVVTPITKENRRYMETKRKKMGHIYISDNNDQPLA

SEQ ID NO: 77401 - protein, 508 aa, Arabidopsis thaliana
  peptide (1)..(508): Ceres Seq. ID no. 12576292
MDSALYHPRIFFAHSFINGLYSSPRFANTCWRLVSRSSWEIKASENSDRNVFDENPVRKTDGSLFDSASFETVDAEITPETDDFFVSDAEGDPDCPTQGYSSIELALQALRKGKFVIVVDDETGDVEGNLIMAATLTSPKDIAFLIKNGSGIVSVGMKKENLERLSLTLMSPEMEDEDSSAPTFTITVDAKSGTSTGVSASDRAMTVLALSSLDAKPDDFRRPGHVFPLKYRDGGVLRRAGHTEASVDLMILAGLRPLSVLSAILDQEDGSMASLPYMKKLATEHDIPIVSLTDLIRYRRKRDKLVERITVSRLPTKWGLFQAYCYRSKLDGTENIALVKGNVGNGEDILVRVHSECLTGDIFGSARCDCGNQLDLAMELIEKEGRGVVVYLRGHEGRGIGLGHKLRAYNLQDEGHDTVQANVELGLSIDSREYGIGAQMLRDIGVRTMRLMTNNPAKFTGLKGYGLAVVGRVPVVTPITKENRRYMETKRKKMGHIYISDNNDQPLA

SEQ ID NO: 77402 - DNA, 1427 bp, Arabidopsis thaliana
  misc_feature (1)..(1427): Ceres Seq. ID no. 12576297
  misc_feature (1)..(1427): Ortholog of  Ceres SEQ ID NO 14306059 as cited in SEQ ID NO 52249
  misc_feature (1)..(1427): Ortholog of  Ceres SEQ ID NO 15170479 as cited in SEQ ID NO 52835
  misc_feature (1)..(1427): Ortholog of  Ceres SEQ ID NO 13596087 as cited in SEQ ID NO 68336
aaagaaaaaaaacaaacacaaaacacgcttctcttgttgagaagctagcaaaacaacactaaacctgaaacaaacgtaaatccgccgcaacaacccagttttttccgacggcgtacaagcttcctccgccgtaacgccgtcgtttaataccaagaagcttgattaggtttccgtagtgtgtgatttttttaaggttctgaacactgatgtcaaacccattgaaagagtcaagagaggatattgcaaattctactcctcacatgagggataatgagtatgttcggctagttgtggctcatgaagcctccccagctgaaaccgtgttgtctctatcgcaatcagaggtgcagagtaagaaatttatgtggtggttaaaagctttgggaatatgtgcagttgctctcttgcttacgcttgttttcggaaaatggggagttccgtttgtgtttcaaaaggttcttattccaattttgcaatgggaagcaactgcgtttggccgtcctatgctcgcgattgtccttgttgtttccttggctttgtttcctgtgttcttgataccttctggtccttccatgtggttagctgggatgatttttggttatggtctcggttttgttattatcatggttggaaccaccattggcatggttctcccttacttaatcgggcttatgttccgtgatcgcctccatcaatggttaaaaagatggcctcgtcaagctgctgttctaagactagctgcagaaggaagctggttccatcaattcagagtcgtggcaatctttcgggtttccccatttccttacacgatttttaactacgcaatcgtcgtgacaagcatgagattctggccttacttcttcggatccatagcaggaatgataccagaagctttcatctacatttacagcggtcggttaatcagaacattcgcagatgtgcaatacggacatcaacgtttgacaacagtggagattgtgtacaatgtaatctccttagtcattgcggttgtgaccactgttgctttcactgtgtacgcgaaaagagctttgagagagcttcaaaacgcagaagctaatgaagatgaagaagttcaagtaagaaaagtgagattcgagatgaagaacgtagttcagcacgaagaagataatcatcagcgtttgccttagccgaaagttgacacaaagctaagataggtttgtataaagctttgaacgttgacatgttcttcagcaggatttagagtaaataacaaaaggggtaaaaaaagtctgatatagtaggaagactaagactagtcaagattggatttatattagtgtgactgattccaattattgaaacaaataaaagaagcatttaggctaaaatagtgtatgaaaatatggatgctcatgctctctttgatctagtagtgtatattttaa

SEQ ID NO: 77403 - protein, 320 aa, Arabidopsis thaliana
  peptide (1)..(320): Ceres Seq. ID no. 12576298
MSNPLKESREDIANSTPHMRDNEYVRLVVAHEASPAETVLSLSQSEVQSKKFMWWLKALGICAVALLLTLVFGKWGVPFVFQKVLIPILQWEATAFGRPMLAIVLVVSLALFPVFLIPSGPSMWLAGMIFGYGLGFVIIMVGTTIGMVLPYLIGLMFRDRLHQWLKRWPRQAAVLRLAAEGSWFHQFRVVAIFRVSPFPYTIFNYAIVVTSMRFWPYFFGSIAGMIPEAFIYIYSGRLIRTFADVQYGHQRLTTVEIVYNVISLVIAVVTTVAFTVYAKRALRELQNAEANEDEEVQVRKVRFEMKNVVQHEEDNHQRLP

SEQ ID NO: 77404 - protein, 302 aa, Arabidopsis thaliana
  peptide (1)..(302): Ceres Seq. ID no. 12576299
MRDNEYVRLVVAHEASPAETVLSLSQSEVQSKKFMWWLKALGICAVALLLTLVFGKWGVPFVFQKVLIPILQWEATAFGRPMLAIVLVVSLALFPVFLIPSGPSMWLAGMIFGYGLGFVIIMVGTTIGMVLPYLIGLMFRDRLHQWLKRWPRQAAVLRLAAEGSWFHQFRVVAIFRVSPFPYTIFNYAIVVTSMRFWPYFFGSIAGMIPEAFIYIYSGRLIRTFADVQYGHQRLTTVEIVYNVISLVIAVVTTVAFTVYAKRALRELQNAEANEDEEVQVRKVRFEMKNVVQHEEDNHQRLP

SEQ ID NO: 77405 - protein, 268 aa, Arabidopsis thaliana
  peptide (1)..(268): Ceres Seq. ID no. 12576300
MWWLKALGICAVALLLTLVFGKWGVPFVFQKVLIPILQWEATAFGRPMLAIVLVVSLALFPVFLIPSGPSMWLAGMIFGYGLGFVIIMVGTTIGMVLPYLIGLMFRDRLHQWLKRWPRQAAVLRLAAEGSWFHQFRVVAIFRVSPFPYTIFNYAIVVTSMRFWPYFFGSIAGMIPEAFIYIYSGRLIRTFADVQYGHQRLTTVEIVYNVISLVIAVVTTVAFTVYAKRALRELQNAEANEDEEVQVRKVRFEMKNVVQHEEDNHQRLP

SEQ ID NO: 77406 - DNA, 1276 bp, Arabidopsis thaliana
  misc_feature (1)..(1276): Ceres Seq. ID no. 12576308
  misc_feature (1)..(1276): Ortholog of  Ceres SEQ ID NO 12610385 as cited in SEQ ID NO 55938
  misc_feature (1)..(1276): Ortholog of  Ceres SEQ ID NO 13661939 as cited in SEQ ID NO 61170
  misc_feature (1)..(1276): Ortholog of  Ceres SEQ ID NO 14309041 as cited in SEQ ID NO 0
  misc_feature (1)..(1276): Ortholog of  Ceres SEQ ID NO 14309611 as cited in SEQ ID NO 0
attgttgcgtgtttggttatctcttctttcttctctctcacctaaatcaagggatttgttctgatcaactttgaacagaatttacaacaaatccctagaaaaatctgacccttccttcttcctcaggaagatttaagatacttgttgataaggatattcggaagaagcttttgaaatttttggcaaaggtctcatttgatccgacttttctggtaatttttttccctttattgtttgtttttccaacagatctgaacatttttgttacgattaatcaaatttctgtgttcttaaattggatttggggaaattttgagtagcgagatagatcttatcaaagctgggttaaatcgaatttttgtttatagaaaagctgggtttagatcgaaatgaatcatttttgattatatagaagctgtgttttattggaatttgatcaattttgattgtatcgaagctgcgttaaatcgaaatgattgattatattgaagctgggtttgatcgaattgaatcggttatttgattatcatgttatgaattgaagacaaccttaaaaaatgagtcttctggtgtcagatgataaattgtttttgttgtttgtttagttgaaggtgaaatagatacaaaaaaaatgggctcagaggaaaacaacagcacaagctttccaccaacagagccaaagctctgtgataacggatgtggattcttcgggtcaccatccaacatgaatctctgctcgaaatgttacagaagcttaagagccgaggaagatcaaaccgcggtagcgaaagctgcggtgaagaactctttaaagcttccatcttgcagtatcattgcacctggacaaaaacatcctctggaaattaaaccagctcatttggaaaccgttgttgtaaccgctgagccgtcttctgtacctgtagccgcggaacaggacgaggctgagccgtcgagacctgttagaccgaacaacaggtgtttcagctgtaacaagaaggttggtgtaatggggtttaagtgcaaatgcggtagcacgttttgcgggagtcataggtacccggagaagcatgagtgtagcttcgatttcaaagaagttggacgtgatgcaattgcaaaggctaatcctttggttaaggcggataaagttcagaggatttgaagaaaacaaactttgttatttttaagtattttcgttgtcttctgcatttgatcagtttctgcctgggatgttcgatgtttggtttccatgaatcaaaatgaaaattgctgttcttgc

SEQ ID NO: 77407 - protein, 175 aa, Arabidopsis thaliana; identical to SEQ ID NO: 25636
  peptide (1)..(175): Ceres Seq. ID no. 12576309

SEQ ID NO: 77408 - protein, 144 aa, Arabidopsis thaliana; identical to SEQ ID NO: 25637
  peptide (1)..(144): Ceres Seq. ID no. 12576310

SEQ ID NO: 77409 - DNA, 976 bp, Arabidopsis thaliana
  misc_feature (1)..(976): Ceres Seq. ID no. 12576315
  misc_feature (1)..(976): Ortholog of  Ceres SEQ ID NO 14305963 as cited in SEQ ID NO 52290
  misc_feature (1)..(976): Ortholog of  Ceres SEQ ID NO 14307492 as cited in SEQ ID NO 59504
  misc_feature (1)..(976): Ortholog of  Ceres SEQ ID NO 13597255 as cited in SEQ ID NO 63874
  misc_feature (1)..(976): Ortholog of  Ceres SEQ ID NO 12356503 as cited in SEQ ID NO 0
tctctctctctctctctctctctctaccgtccttctagggtttctttgatcacattcaaatttgtcgcctttaatctcaatcctgtaagaatcagaggatatggattccaattggatcaattgtccctctgttttctcctcatcctcttcttcttccagacgctgtcaatcccgatcagacttgtatttaggaggagggtacgaggatcttgaaggagaagacgatttgaaggcagagtttatatgccctttttgcgctgaagattttgacattgttgggctttgttgtcacattgatgaagaacatcctgttgaagccaagaatggggtctgtcctgtatgcactaagagggtgggattggatatcgttggccatattacgacgcaacatgcgaatttctttaaggtacagcgaaggagaaggttgcgaagaggaggatatagctctacctatctcgccttgaaaaaggaactccgggaagcaaacctacagtctcttcttggtggatcttcaagtttcacttcttcaaccaatatcgattctgatccgttgctgtcatcctttatgtttaattctccttcagtgaaccagtctgcaaacaaatctgctacacctgtgactgtaggaaacgcggctacaaaagtctcgattaaggaatctctcaaaagagacattcaagaagctccactttcaggtgaagatcaggagaaggcgaaaaagagtgagtttgtgcgaggcttgttgttgtcaaccatgcttgaagacgatttctaatttctcgttataaatccattgccttgttgtggttggtgcatgagacttgaggatctcaggttggaattgttaggagtggtttcaatgtatgatgcaaaatattgtaagttataagaggatgcagagttgcatccatatataattgtcatttgtaccttggaacctttatgtgcataaccggaaacagagtactttcctttc

SEQ ID NO: 77410 - protein, 224 aa, Arabidopsis thaliana
  peptide (1)..(224): Ceres Seq. ID no. 12576316
MDSNWINCPSVFSSSSSSSRRCQSRSDLYLGGGYEDLEGEDDLKAEFICPFCAEDFDIVGLCCHIDEEHPVEAKNGVCPVCTKRVGLDIVGHITTQHANFFKVQRRRRLRRGGYSSTYLALKKELREANLQSLLGGSSSFTSSTNIDSDPLLSSFMFNSPSVNQSANKSATPVTVGNAATKVSIKESLKRDIQEAPLSGEDQEKAKKSEFVRGLLLSTMLEDDF

SEQ ID NO: 77411 - DNA, 1596 bp, Arabidopsis thaliana
  misc_feature (1)..(1596): Ceres Seq. ID no. 12576321
  misc_feature (1)..(1596): Ortholog of  Ceres SEQ ID NO 13597407 as cited in SEQ ID NO 64106
aaggataagaatcaaagaaagaagatggaatctgaaagactcgaatcacatcttctgaataagcaagaagaagaagcttcttccttcacttctggtcttcttctcagcacatccgtcgttgtcgctggatccttctgttatggctgcgccatgtcatattcgtcgcctgctcagtccaaaatcatggaagaactgggactttccgttgcagattattcgtttttcacttcggtaatgacattaggaggaatgattaccgccgtgttcagcggtaaaatctctgctctcgttggtcgtcgacagacaatgtggatctcagatgtttgctgtatttttggttggctcgctgtagcgtttgcacatgatattataatgcttaatactggacgactcttcttggggtttggggttggtctcattagttatgtggttcctgtgtatatagcagaaattacacccaaaacatttcgtggaggattttcttattccaatcagcttctacaatgtcttgggatttcactcatgttcttcaccggaaactttttccattggcgaacattagctcttttaagtgcaatcccaagtgctttccaagtgatatgtttattttttattcctgaatctcctagatggctggcgatgtatggtcaagatcaagagcttgaagtttcgttgaaaaaactaaggggagaaaatagtgatattctaaaggaagctgctgaaatcagagaaacagtggaaatatccagaaaagagtctcaaagtggaataagagacttgttccatatcggaaacgcacattcgttaatctttcgttgaaaatggttagattggattgggtttaatgctcttgcaacaattttgtgggagtgcggcgataagtgcttatgctgctcgaattttcgacaaagccggttttccaagcgacataggaacaaccatcctcgcagtgattctgataccgcaatctatagttgtcatgttaaccgttgaccgatggggacgccgaccacttcttatgatttcttctatcggaatgtgcatatgctcattttttattggcctttcatactaccttcagaagaatggtgaatttcagaagttatgttccgttatgttaatcgtcggtttagtgggttatgtctcatcctttggcattggcctaggtggattaccatgggttataatgtctgagatatttccggtgaatgtgaaaatcaccgccggtagccttgtaacgatgtcaaattggttttttaattggattatcatctatagttttaatttcatgatacagtggagcgcttccggaacatatttcatattttctggagtttctctggtgacgatcgtattcatatggacattggtgcctgagacgaaaggccgaacactcgaagagattcaaacatcattagtccgactttcgtaaaatctaagtatggattatacgtaatgttaagtctcttgaatagtctttttaaccgctgtcaaaaagaaaagaaaagaatagtctttttaaccgtatattaatgtttggttaaataagcgttttctctcactttgattaaatagtaataatggctatgattttac

SEQ ID NO: 77412 - protein, 272 aa, Arabidopsis thaliana
  peptide (1)..(272): Ceres Seq. ID no. 12576322
KDKNQRKKMESERLESHLLNKQEEEASSFTSGLLLSTSVVVAGSFCYGCAMSYSSPAQSKIMEELGLSVADYSFFTSVMTLGGMITAVFSGKISALVGRRQTMWISDVCCIFGWLAVAFAHDIIMLNTGRLFLGFGVGLISYVVPVYIAEITPKTFRGGFSYSNQLLQCLGISLMFFTGNFFHWRTLALLSAIPSAFQVICLFFIPESPRWLAMYGQDQELEVSLKKLRGENSDILKEAAEIRETVEISRKESQSGIRDLFHIGNAHSLIFR

SEQ ID NO: 77413 - protein, 264 aa, Arabidopsis thaliana
  peptide (1)..(264): Ceres Seq. ID no. 12576323
MESERLESHLLNKQEEEASSFTSGLLLSTSVVVAGSFCYGCAMSYSSPAQSKIMEELGLSVADYSFFTSVMTLGGMITAVFSGKISALVGRRQTMWISDVCCIFGWLAVAFAHDIIMLNTGRLFLGFGVGLISYVVPVYIAEITPKTFRGGFSYSNQLLQCLGISLMFFTGNFFHWRTLALLSAIPSAFQVICLFFIPESPRWLAMYGQDQELEVSLKKLRGENSDILKEAAEIRETVEISRKESQSGIRDLFHIGNAHSLIFR

SEQ ID NO: 77414 - protein, 222 aa, Arabidopsis thaliana
  peptide (1)..(222): Ceres Seq. ID no. 12576324
MSYSSPAQSKIMEELGLSVADYSFFTSVMTLGGMITAVFSGKISALVGRRQTMWISDVCCIFGWLAVAFAHDIIMLNTGRLFLGFGVGLISYVVPVYIAEITPKTFRGGFSYSNQLLQCLGISLMFFTGNFFHWRTLALLSAIPSAFQVICLFFIPESPRWLAMYGQDQELEVSLKKLRGENSDILKEAAEIRETVEISRKESQSGIRDLFHIGNAHSLIFR

SEQ ID NO: 77415 - DNA, 828 bp, Arabidopsis thaliana
  misc_feature (1)..(828): Ceres Seq. ID no. 12576325
  misc_feature (1)..(828): Ortholog of  Ceres SEQ ID NO 14307370 as cited in SEQ ID NO 54127
  misc_feature (1)..(828): Ortholog of  Ceres SEQ ID NO 13596338 as cited in SEQ ID NO 68005
  misc_feature (1)..(828): Ortholog of  Ceres SEQ ID NO 14302128 as cited in SEQ ID NO 0
  misc_feature (1)..(828): Ortholog of  Ceres SEQ ID NO 15179357 as cited in SEQ ID NO 0
gtccgaattctccaagtctctcatcatcacacccactccaacaaactttctacgagagaaaaaaacaaaaagaaaaacaaacaatggagaatcttgtaggtcttcttcgaattcatgtgaaaagaggtgtgaatctcgccattagagacatctcaagcagtgatccttacatcgtcgttcactgcggtaaacagaagttgaaaacacgcgtggtgaaacatagtgtaaaccccgagtggaacgacgacttgacactttccgtgactgatccgaatctcccgattaaacttacggtttatgactatgacttgctctccgcggatgacaagatgggagaagccgagttccacattggtccatttattgaagctattaaatttgcccatcagctcggaccaggacttcctaatgggaccataataaagaagatagagccgagcagaaaaaattgtttgtctgaatcaagccacattgtgttgaaccaaggcaagattgtccagaatatgttccttagactccagcacgtggagtgtggagaggttgagctacagctcgagtggatcgatgtcccgggttcaaggggtatttaggtcaaatcatatcgatccgatctttattagtcccttgtgcatatggttagaaactagaactatggtgcagtttaaaactggtcaatgaaagaatctcaaactggcttgtgtaataaactcatttcgttttttttttctcttgtttgattccaaaaagtttgcaattccatgaggagtaagtgtaaacatttggatatctacataaatatcctgtcttattagcgtgaattgtgtagac

SEQ ID NO: 77416 - protein, 195 aa, Arabidopsis thaliana
  peptide (1)..(195): Ceres Seq. ID no. 12576326
PNSPSLSSSHPLQQTFYERKKQKEKQTMENLVGLLRIHVKRGVNLAIRDISSSDPYIVVHCGKQKLKTRVVKHSVNPEWNDDLTLSVTDPNLPIKLTVYDYDLLSADDKMGEAEFHIGPFIEAIKFAHQLGPGLPNGTIIKKIEPSRKNCLSESSHIVLNQGKIVQNMFLRLQHVECGEVELQLEWIDVPGSRGI

SEQ ID NO: 77417 - protein, 168 aa, Arabidopsis thaliana
  peptide (1)..(168): Ceres Seq. ID no. 12576327
MENLVGLLRIHVKRGVNLAIRDISSSDPYIVVHCGKQKLKTRVVKHSVNPEWNDDLTLSVTDPNLPIKLTVYDYDLLSADDKMGEAEFHIGPFIEAIKFAHQLGPGLPNGTIIKKIEPSRKNCLSESSHIVLNQGKIVQNMFLRLQHVECGEVELQLEWIDVPGSRGI

SEQ ID NO: 77418 - DNA, 1684 bp, Arabidopsis thaliana
  misc_feature (1)..(1684): Ceres Seq. ID no. 12576352
  misc_feature (1)..(1684): Ortholog of  Ceres SEQ ID NO 14312300 as cited in SEQ ID NO 58632
  misc_feature (1)..(1684): Ortholog of  Ceres SEQ ID NO 13654989 as cited in SEQ ID NO 63117
  misc_feature (1)..(1684): Ortholog of  Ceres SEQ ID NO 13584744 as cited in SEQ ID NO 69137
tgtttgtcactaagctctctctctctccttcttcttcgacttttttttttcttcctctcttctctttggttttttggtgttgggttttatctgggttcctgatttcttcaacgaggaaggaaggaagaagaagagaaaagggacaagcgagaattactcttttctccttcaatttccgatgggttgtttcggatgcagtaagaaatcgagcaaacgatccgagactaacaaagatactgtcataaatagaaaaattgtcggtggtactacgagcgttgctaagagtgataagcgagacgatcagactcagcccagttcagattcaacaaaagtcagtccatatagagatgtaaacaatgaaggaggagttggtaaggaagatcagttatctttggatgtgaagggtttgaatctaaatgaccaagtcacagggaagaaagcacagacttttacttttcaagaacttgcagaagctacgggaaactttagatcggattgttttcttggtgaaggaggtttcggaaaagttttcaagggaactatagagaaattggatcaggttgttgcaatcaagcaacttgatcgtaatggggttcaaggaatcagggaatttgtggttgaggtattgactctaagtcttgctgaccatccgaatcttgtgaagcttattgggttttgtgctgagggtgatcagagactactggtgtacgagtatatgccgcaaggatcccttgaagatcatctacatgttctcccttctggtaaaaagcctcttgactggaacacccggatgaaaatagcagctggtgcagcaagaggtttagagtatctgcatgacagaatgacgccccctgtgatttaccgagatcttaaatgttcgaatattttgcttggtgaagactatcaaccgaaactatctgactttgggttggctaaagtaggaccaagcggggataaaacccatgtctcgacaagggttatgggaacgtacggatactgtgctcctgactacgctatgacgggtcagctcacatttaaatccgatatatacagttttggagtagtccttctcgagcttatcaccggaaggaaagcgattgacaatacaaaaacgcgtaaagatcagaatttggttggatgggcacgaccattgttcaaagacaggaggaacttcccaaaaatggttgatccattgcttcagggacaatacccagttagaggactgtaccaagcactagcaatatcagcaatgtgcgttcaagagcagcctaccatgagaccagtggtatctgatgtagtattggctctcaacttcttagcctcttctaaatatgatccgaatagccctagcagcagcagcgggaagaacccttcttttcacagagacagagatgatgaagagaaaagaccacacctcgtcaaggaaactgaatgtgaagggtcctcataggatatccaataagagagtggtaaaaaatcaaatctaattttggcttcaccaagaaattggggaaaaatataaaaccaactcaggtacatttttaacatctattgtggatgtaaatcttgactcggcttctttgtatgtagaatgtttctgttctgtagaaaaggaaaaaaaaaaaaaaccattttgttttgggacatatatacatatattgaacaaaaacaaatatcgttggtc

SEQ ID NO: 77419 - protein, 423 aa, Arabidopsis thaliana; identical to SEQ ID NO: 24904
  peptide (1)..(423): Ceres Seq. ID no. 12576353

SEQ ID NO: 77420 - protein, 244 aa, Arabidopsis thaliana; identical to SEQ ID NO: 24905
  peptide (1)..(244): Ceres Seq. ID no. 12576354

SEQ ID NO: 77421 - protein, 219 aa, Arabidopsis thaliana
  peptide (1)..(219): Ceres Seq. ID no. 12576355
MKIAAGAARGLEYLHDRMTPPVIYRDLKCSNILLGEDYQPKLSDFGLAKVGPSGDKTHVSTRVMGTYGYCAPDYAMTGQLTFKSDIYSFGVVLLELITGRKAIDNTKTRKDQNLVGWARPLFKDRRNFPKMVDPLLQGQYPVRGLYQALAISAMCVQEQPTMRPVVSDVVLALNFLASSKYDPNSPSSSSGKNPSFHRDRDDEEKRPHLVKETECEGSS

SEQ ID NO: 77422 - DNA, 2455 bp, Arabidopsis thaliana
  misc_feature (1)..(2455): Ceres Seq. ID no. 12576356
  misc_feature (1)..(2455): Ortholog of  Ceres SEQ ID NO 13598023 as cited in SEQ ID NO 66487
acaacaaatatctctctctctctcgctctctctcgctctctctttcttcttcttcatcttctttcatggctgttactggctgggcaatcacaatctgaattctttcttcctccttgtctctctgattttcgccgagttttgggggctcttgttgttacacgatgagtctggtggttggtcagtctctgggtttaactctagtcggtgatggtctttcgttacgcaattccaaaataaatgtcggaaaatcaaagtttttctcggtaaatcggaggagattggcgcgtgcggccctggtacaagctaggcctaaggaagacggagcggcggcaagtccttccccatcgtcgagaccggcgtcagttgtgcagtaccgacgagctgatctcgcggatgatcttcaagccgaggcacgagctttgggtcgtgctattgatgcttctatttactctccggagctcatcgccaggaaacatggctctcagcctttcaaggctttgcggagaagtttggagatattgggagctttgggtggtttcgctttgaaattggggattgaccagaagcagggcaacttagagaagaacatgaagaagagagcaatcgagctccggcggatcttcactcgtctcggacctacttttgttaaattgggtcaaggtttgtccacccgacccgacctctgtccacccgattaccttgaagaacttgcagagcttcaggatgctttgccaaccttccctgatgcagaggcatttgcttgcattgagagagagttggatttgtcgctagagaccattttctcgtctgtatctcctgagccaatcgcagcagctagtcttggccaggtttacaaagctcagctgaggtattcaggtcaggttgttgctgtcaaagttcaacgccctgggatcgaagaagccattggccttgatttttaccttattagaggagttgggaaactcattaacaagtatgtagacttcatcactaccgatgtccttacccttatcgatgagttcgcctgcagagtttatcaggagctaaactatgtccaggaggcccaaaatgccagaaggtttaaaaaattgtatgcagataaagcagatgttcttgtgcctgatatattctgggattacacgagccgcaaggtgctaacaatggaatgggttgagggaactaaactgaatgagcaacttgccattgagagtcagggattgaaggttctggatctcgtgaatacaggaatccagtgtagcctaaggcaactcttggagtatggctttttccatgctgaccctcatcctggtaatctcttggcaacacctgatggaaaacttgcctttctagactttggcatgatgagtgagacaccagaggaagctagatttgctatcataggccatgttgtccatttagtgaaccgagattatgaagccatggcacgagattactatgctctgaagttcttgtcccctgatgtggatgttactcctatcataccagctctcagagacttctttgacgatgcacttaattataccgtgagcgagctcaatttcaaaactttggttgatggtctaggtgctgtcttctaccagtatccatttaatgtcccgccctactatgctttgattttgaggtcgcttactgtgcttgaaggtttggcactctacgcagatcctaatttcaaagtactagctgcttcatacccatattttgccaaaaggcttctcactgatccaaacccgtatctaagagatgcccttatcgagctactattcaaagacggaaaatttaggtggaatagactcgagaaccttctacaacagggaagtaaagatagagacttctcagcaaaggatgctctacaaccagttttgaagcttttgctggatccaaatggcgaagaacttcgattgttagtaattaaagaagctgtacgagtcagtgaagcaattgcgctgggcactgttgttgatacatacaattcccttcctgagtttctgagatctcttgtcttcaatggaaatgggaatggccctcttacaatgagtaccgcggaacttcaaagtacgcttgagcttcgggatcaggtctccagaatctggggccttcttcaatcttcagaaagctttgatcctgctattttgcaaccaatactacaggtgttacaacaaccagaggcacgaagacttggaggacgtgttgcaggcggtgtaggccaacgtcttgcagctcggtttctgcaacaacttcttcgagccacaacaccatcttctgcaccatccccataggtcctcttttcttctcagtgaaatggtaaattgtatattaaggcgagacactcgcaaaccacagaattgtttcatgttacagtaatatagtatcattctttctctttgtattgtactagtgaaaaaggaccaaagtataaccaatgagaaatacctcc

SEQ ID NO: 77423 - protein, 711 aa, Arabidopsis thaliana
  peptide (1)..(711): Ceres Seq. ID no. 12576357
MSLVVGQSLGLTLVGDGLSLRNSKINVGKSKFFSVNRRRLARAALVQARPKEDGAAASPSPSSRPASVVQYRRADLADDLQAEARALGRAIDASIYSPELIARKHGSQPFKALRRSLEILGALGGFALKLGIDQKQGNLEKNMKKRAIELRRIFTRLGPTFVKLGQGLSTRPDLCPPDYLEELAELQDALPTFPDAEAFACIERELDLSLETIFSSVSPEPIAAASLGQVYKAQLRYSGQVVAVKVQRPGIEEAIGLDFYLIRGVGKLINKYVDFITTDVLTLIDEFACRVYQELNYVQEAQNARRFKKLYADKADVLVPDIFWDYTSRKVLTMEWVEGTKLNEQLAIESQGLKVLDLVNTGIQCSLRQLLEYGFFHADPHPGNLLATPDGKLAFLDFGMMSETPEEARFAIIGHVVHLVNRDYEAMARDYYALKFLSPDVDVTPIIPALRDFFDDALNYTVSELNFKTLVDGLGAVFYQYPFNVPPYYALILRSLTVLEGLALYADPNFKVLAASYPYFAKRLLTDPNPYLRDALIELLFKDGKFRWNRLENLLQQGSKDRDFSAKDALQPVLKLLLDPNGEELRLLVIKEAVRVSEAIALGTVVDTYNSLPEFLRSLVFNGNGNGPLTMSTAELQSTLELRDQVSRIWGLLQSSESFDPAILQPILQVLQQPEARRLGGRVAGGVGQRLAARFLQQLLRATTPSSAPSP

SEQ ID NO: 77424 - protein, 569 aa, Arabidopsis thaliana
  peptide (1)..(569): Ceres Seq. ID no. 12576358
MKKRAIELRRIFTRLGPTFVKLGQGLSTRPDLCPPDYLEELAELQDALPTFPDAEAFACIERELDLSLETIFSSVSPEPIAAASLGQVYKAQLRYSGQVVAVKVQRPGIEEAIGLDFYLIRGVGKLINKYVDFITTDVLTLIDEFACRVYQELNYVQEAQNARRFKKLYADKADVLVPDIFWDYTSRKVLTMEWVEGTKLNEQLAIESQGLKVLDLVNTGIQCSLRQLLEYGFFHADPHPGNLLATPDGKLAFLDFGMMSETPEEARFAIIGHVVHLVNRDYEAMARDYYALKFLSPDVDVTPIIPALRDFFDDALNYTVSELNFKTLVDGLGAVFYQYPFNVPPYYALILRSLTVLEGLALYADPNFKVLAASYPYFAKRLLTDPNPYLRDALIELLFKDGKFRWNRLENLLQQGSKDRDFSAKDALQPVLKLLLDPNGEELRLLVIKEAVRVSEAIALGTVVDTYNSLPEFLRSLVFNGNGNGPLTMSTAELQSTLELRDQVSRIWGLLQSSESFDPAILQPILQVLQQPEARRLGGRVAGGVGQRLAARFLQQLLRATTPSSAPSP

SEQ ID NO: 77425 - protein, 378 aa, Arabidopsis thaliana
  peptide (1)..(378): Ceres Seq. ID no. 12576359
MEWVEGTKLNEQLAIESQGLKVLDLVNTGIQCSLRQLLEYGFFHADPHPGNLLATPDGKLAFLDFGMMSETPEEARFAIIGHVVHLVNRDYEAMARDYYALKFLSPDVDVTPIIPALRDFFDDALNYTVSELNFKTLVDGLGAVFYQYPFNVPPYYALILRSLTVLEGLALYADPNFKVLAASYPYFAKRLLTDPNPYLRDALIELLFKDGKFRWNRLENLLQQGSKDRDFSAKDALQPVLKLLLDPNGEELRLLVIKEAVRVSEAIALGTVVDTYNSLPEFLRSLVFNGNGNGPLTMSTAELQSTLELRDQVSRIWGLLQSSESFDPAILQPILQVLQQPEARRLGGRVAGGVGQRLAARFLQQLLRATTPSSAPSP

SEQ ID NO: 77426 - DNA, 1810 bp, Arabidopsis thaliana
  misc_feature (1)..(1810): Ceres Seq. ID no. 12576367
  misc_feature (1)..(1810): Ortholog of  Ceres SEQ ID NO 14311305 as cited in SEQ ID NO 53731
  misc_feature (1)..(1810): Ortholog of  Ceres SEQ ID NO 13501807 as cited in SEQ ID NO 67558
aaactagtgaaaattttgtcgccaccgtcgcaggtttgttctgtattttggttagagtgttaaaaaactattggaagatgggttctggtcaatggcatatggagaagaggtctactttaaagaatgattcgtttgtaaaagaatacaatccagtcacggaaactgggagtctctctatcattgttcttggtgcttctggtgatcttgctaagaagaagacttttcctgcacttttcaatctatttcatcagggatttcttaatccagatgaagttcatatatttggatatgcaaggagtaagattactgatgaggagcttagagataaaatccgcggatatcttgttgatgagaagaatgcatctaagaaaacagaagctttgtccaagtttctaaagctgattaagtatgtgagtggaccttatgattctgaggaagggtttaagagattagacaaggcgattttggagcacgagatatctaaaaagactgctgaaggatcttcgaggagattgttttatcttgcacttcctccgtctgtataccctcctgtaagcaagatgatcaaggcatggtgcactaacaaatctgatcttggtggatggactaggattgttgttgagaaaccatttggaaaggatttggaatctgcagagcagctgagttctcagattggagccttgtttgaagaaccacagatttatcgtattgatcactatctgggaaaagagttagttcaaaacatgttggttcttcggtttgccaatcgcttgtttttgccactatggaaccgcgacaatattgcaaacgtacagatcgttttcagagaagattttggaactgaaggtcgcggtggatattttgatgaatacggaatcattcgtgatattattcaaaaccacttgctccaggttctttgccttgtcgccatggagaaaccaatctctcttaaacccgagcacatccgggatgagaaagtgaaggttcttcaatctgtgattcccataaaagatgaagaggtggttcttggacaatatgaaggatatagagatgatccaactgttccaaatgactcaaacactccaacgtttgccacaacaattcttcgcattaacaatgaaagatgggaaggtgttccttttatactgaaggccggaaaggcaatgagttcaaagaaggcagatattcgcattcagtttaaagatgttcctggcgacatattcaaatgtcaaaaccaagggaggaacgagtttgttatacgcttgcagccttcagaggccatgtacatgaagctaactgtgaagcaaccgggtctggagatgcaaaccgtgcagagtgaactagacctatcgtacaagcagcgttaccaagatgtctcaattccagaggcttacgaacgccttattcttgacacaatcagaggcgaccaacaacactttgttcgcagagacgaattaaaggcagcttgggaaatcttcactccactgcttcacaggatcgacaagggagaagtgaaatcggtcccatacaaacaaggtagccgtggcccagcggaagcagatcagctacttaagaaagctggttatatgcagactcatggctacatttggatccctcctacattgtaaatggtataatcatagagatgatgatgatgagtacacacaaaataagagggttttttttcttttttttccttgcttgctgaataaaaactcttcaccagtttggagtttgtttaagtgaatcttatgtatactagtgatcttcactaggacattgtttgtttatgccttgtagtttttgttgt

SEQ ID NO: 77427 - protein, 541 aa, Arabidopsis thaliana
  peptide (1)..(541): Ceres Seq. ID no. 12576368
TSENFVATVAGLFCILVRVLKNYWKMGSGQWHMEKRSTLKNDSFVKEYNPVTETGSLSIIVLGASGDLAKKKTFPALFNLFHQGFLNPDEVHIFGYARSKITDEELRDKIRGYLVDEKNASKKTEALSKFLKLIKYVSGPYDSEEGFKRLDKAILEHEISKKTAEGSSRRLFYLALPPSVYPPVSKMIKAWCTNKSDLGGWTRIVVEKPFGKDLESAEQLSSQIGALFEEPQIYRIDHYLGKELVQNMLVLRFANRLFLPLWNRDNIANVQIVFREDFGTEGRGGYFDEYGIIRDIIQNHLLQVLCLVAMEKPISLKPEHIRDEKVKVLQSVIPIKDEEVVLGQYEGYRDDPTVPNDSNTPTFATTILRINNERWEGVPFILKAGKAMSSKKADIRIQFKDVPGDIFKCQNQGRNEFVIRLQPSEAMYMKLTVKQPGLEMQTVQSELDLSYKQRYQDVSIPEAYERLILDTIRGDQQHFVRRDELKAAWEIFTPLLHRIDKGEVKSVPYKQGSRGPAEADQLLKKAGYMQTHGYIWIPPTL

SEQ ID NO: 77428 - protein, 516 aa, Arabidopsis thaliana
  peptide (1)..(516): Ceres Seq. ID no. 12576369
MGSGQWHMEKRSTLKNDSFVKEYNPVTETGSLSIIVLGASGDLAKKKTFPALFNLFHQGFLNPDEVHIFGYARSKITDEELRDKIRGYLVDEKNASKKTEALSKFLKLIKYVSGPYDSEEGFKRLDKAILEHEISKKTAEGSSRRLFYLALPPSVYPPVSKMIKAWCTNKSDLGGWTRIVVEKPFGKDLESAEQLSSQIGALFEEPQIYRIDHYLGKELVQNMLVLRFANRLFLPLWNRDNIANVQIVFREDFGTEGRGGYFDEYGIIRDIIQNHLLQVLCLVAMEKPISLKPEHIRDEKVKVLQSVIPIKDEEVVLGQYEGYRDDPTVPNDSNTPTFATTILRINNERWEGVPFILKAGKAMSSKKADIRIQFKDVPGDIFKCQNQGRNEFVIRLQPSEAMYMKLTVKQPGLEMQTVQSELDLSYKQRYQDVSIPEAYERLILDTIRGDQQHFVRRDELKAAWEIFTPLLHRIDKGEVKSVPYKQGSRGPAEADQLLKKAGYMQTHGYIWIPPTL

SEQ ID NO: 77429 - protein, 509 aa, Arabidopsis thaliana
  peptide (1)..(509): Ceres Seq. ID no. 12576370
MEKRSTLKNDSFVKEYNPVTETGSLSIIVLGASGDLAKKKTFPALFNLFHQGFLNPDEVHIFGYARSKITDEELRDKIRGYLVDEKNASKKTEALSKFLKLIKYVSGPYDSEEGFKRLDKAILEHEISKKTAEGSSRRLFYLALPPSVYPPVSKMIKAWCTNKSDLGGWTRIVVEKPFGKDLESAEQLSSQIGALFEEPQIYRIDHYLGKELVQNMLVLRFANRLFLPLWNRDNIANVQIVFREDFGTEGRGGYFDEYGIIRDIIQNHLLQVLCLVAMEKPISLKPEHIRDEKVKVLQSVIPIKDEEVVLGQYEGYRDDPTVPNDSNTPTFATTILRINNERWEGVPFILKAGKAMSSKKADIRIQFKDVPGDIFKCQNQGRNEFVIRLQPSEAMYMKLTVKQPGLEMQTVQSELDLSYKQRYQDVSIPEAYERLILDTIRGDQQHFVRRDELKAAWEIFTPLLHRIDKGEVKSVPYKQGSRGPAEADQLLKKAGYMQTHGYIWIPPTL

SEQ ID NO: 77430 - DNA, 951 bp, Arabidopsis thaliana
  misc_feature (1)..(951): Ceres Seq. ID no. 12576375
  misc_feature (1)..(951): Ortholog of  Ceres SEQ ID NO 15178873 as cited in SEQ ID NO 1103
  misc_feature (1)..(951): Ortholog of  Ceres SEQ ID NO 15173557 as cited in SEQ ID NO 60031
  misc_feature (1)..(951): Ortholog of  Ceres SEQ ID NO 13590940 as cited in SEQ ID NO 68653
acgacactcgcaacttcttccttatcgacacctacactctcctgctacaatggcgactttcctaacaaatgttgtttcaatcaaacctacaatcttctcattccagtccgaatccttcactcctttgcatacacgggtcaatgtattctcctcgaaaccctttccttctctcgctggaactttctcccggagctctagaacgagattcattccttatgctgtaacggagacggaagaaaaacccgccgctttggaccctagttcagaagctgccaggcgtgtgtatatcggtaacatacccaggacggtgaccaatgagcagctcactaaacttgttgaagaacacggtgctgttgaaaaagttcaggtgatgtatgataagtattcaggaagaagccgtcgatttgggtttgctacaatgaaatcagttgaagatgctaatgctgtggttgagaaattgaatggcaataccgttgaagggcgtgagataaaggttaacattacagagaaacctatagcatcatcacctgatttatcagttcttcagtctgaggattcagcatttgtagatagcccttacaaagtgtatgttgggaatctagcaaagactgttacaaaagagatgcttgagaatttgttttctgagaaagggaaagtagtaagtgctaaggtttcaagagtacctggaacttccaaatccaccgggtttggattcgttacgttttcttctgaagaagatgtggaagcagccattgttgctcttaacaattcgttgctggaaggacagaagattcgggtgaataaggcttagcctattggatcataaagaatgtgaaaagaatcgctttgaagagtttttgtaatgcaaatcattagagcttagtgtatcatcttgtattcattctaagttgaaaatgaaaccatatcttttcaaaagcttatagttgtggt

SEQ ID NO: 77431 - protein, 269 aa, Arabidopsis thaliana; identical to SEQ ID NO: 24385
  peptide (1)..(269): Ceres Seq. ID no. 12576376

SEQ ID NO: 77432 - protein, 253 aa, Arabidopsis thaliana; identical to SEQ ID NO: 24386
  peptide (1)..(253): Ceres Seq. ID no. 12576377

SEQ ID NO: 77433 - protein, 146 aa, Arabidopsis thaliana; identical to SEQ ID NO: 24387
  peptide (1)..(146): Ceres Seq. ID no. 12576378

SEQ ID NO: 77434 - DNA, 1551 bp, Arabidopsis thaliana
  misc_feature (1)..(1551): Ceres Seq. ID no. 12576409
  misc_feature (1)..(1551): Ortholog of  Ceres SEQ ID NO 13598488 as cited in SEQ ID NO 63862
  misc_feature (1)..(1551): Ortholog of  Ceres SEQ ID NO 13659640 as cited in SEQ ID NO 67101
agctcccacaccatcaaacttactacatctgagttattatgttgaaacaagagagtaacgacataggtagtggagagaacaacagggcacgaccctgtgacacatgccggtcaaacgcctgcaccgtgtattgccatgcagattctgcctacttgtgcatgagctgtgatgctcaagttcactctgccaatcgcgttgcttcccgccataaacgtgtccgggtctgcgagtcatgtgagcgtgctccggctgcttttttgtgtgaggcagatgatgcctctctatgcacagcctgtgattcagaggttcattctgcaaacccacttgctagacgccatcagcgagttccaattctaccaatttctggaaactctttcagctccatgaccactactcaccaccaaagcgagaaaacaatgaccgatccagagaagagactggtggtggatcaagaggaaggtgaagaaggtgataaggatgccaaggaggttgcttcgtggctgttccctaattcagacaaaaataacaataaccaaaacaatgggttattgtttagtgatgagtatctaaaccttgtggattacaactcgagtatggactacaaattcacaggtgaatacagtcaacaccaacaaaactgcagcgtaccacagacgagctacgggggagatagagttgttccgcttaaacttgaagaatcaaggggccaccagtgccataaccaacagaattttcagttcaatatcaaatatggctcctcagggactcactacaacgacaatggttccattaaccataacgtaaggcttttgtatatttgttaccccttcaatttagcatcttcccataacgcagcagggtgaattctttcatcatacacacaaatccactgatccactgccaacagttgatctatagcacatagaaatttcaccagaagtctataataaaaacaatatatgcttccttttgcatcgactctctttagtcctcttaccagggggattgagaatgtctttgtttctgtcattaggcatacatttcatccatggaaactggtgttgtgccggagtcaacagcatgtgtcacaacagcttcacacccaagaacgcccaaagggacagtagagcaacaacctgaccctgcaagccagatgataacagtaacacaactcagtccaatggacagagaagccagggtcctgagatacagagagaagaggaagacaaggaaatttgagaagacaataaggtatgcttcgaggaaggcatatgcagagataagaccgcgggtcaatggccggttcgcaaagagagaaatcgaagccgaggagcaagggttcaacacgatgctaatgtacaacacaggatatgggattgttccttcattctgatactcctgtggcaaaaagaaaaactagattgcaagctgtaaattacttttagtttgagattatgttaggtttggtgaaattcttagcttcaagaagtattactactgttgtgcaaatgggtttgtagttttggctaattaaaactatagtattcttct

SEQ ID NO: 77435 - protein, 274 aa, Arabidopsis thaliana
  peptide (1)..(274): Ceres Seq. ID no. 12576410
MLKQESNDIGSGENNRARPCDTCRSNACTVYCHADSAYLCMSCDAQVHSANRVASRHKRVRVCESCERAPAAFLCEADDASLCTACDSEVHSANPLARRHQRVPILPISGNSFSSMTTTHHQSEKTMTDPEKRLVVDQEEGEEGDKDAKEVASWLFPNSDKNNNNQNNGLLFSDEYLNLVDYNSSMDYKFTGEYSQHQQNCSVPQTSYGGDRVVPLKLEESRGHQCHNQQNFQFNIKYGSSGTHYNDNGSINHNVRLLYICYPFNLASSHNAAG

SEQ ID NO: 77436 - protein, 234 aa, Arabidopsis thaliana
  peptide (1)..(234): Ceres Seq. ID no. 12576411
MSCDAQVHSANRVASRHKRVRVCESCERAPAAFLCEADDASLCTACDSEVHSANPLARRHQRVPILPISGNSFSSMTTTHHQSEKTMTDPEKRLVVDQEEGEEGDKDAKEVASWLFPNSDKNNNNQNNGLLFSDEYLNLVDYNSSMDYKFTGEYSQHQQNCSVPQTSYGGDRVVPLKLEESRGHQCHNQQNFQFNIKYGSSGTHYNDNGSINHNVRLLYICYPFNLASSHNAAG

SEQ ID NO: 77437 - protein, 159 aa, Arabidopsis thaliana
  peptide (1)..(159): Ceres Seq. ID no. 12576412
MTTTHHQSEKTMTDPEKRLVVDQEEGEEGDKDAKEVASWLFPNSDKNNNNQNNGLLFSDEYLNLVDYNSSMDYKFTGEYSQHQQNCSVPQTSYGGDRVVPLKLEESRGHQCHNQQNFQFNIKYGSSGTHYNDNGSINHNVRLLYICYPFNLASSHNAAG

SEQ ID NO: 77438 - DNA, 1219 bp, Arabidopsis thaliana
  misc_feature (1)..(1219): Ceres Seq. ID no. 12576429
  misc_feature (1)..(1219): Ortholog of  Ceres SEQ ID NO 13594918 as cited in SEQ ID NO 55747
gcgggaaaatcttgcatctgcctcagaaaattttctggggagctttcaccaattagttcttctcgtctctctctctctctttggttaatgtttctacagattctctcctcctaattcagagacgacaaaacgctataaacaacatttttacagtcatatggcagtcatatgtctccggttaatgcggaggttgaggagatgagatcagagtcgccggtggttaatgataaggcgttagatatttctgatgatgatcatgatgatgagaatgaaccgcttattgtttctggtgaatgtcgtatttgttctgatgagtctcctgttgagaatcttgagagcccttgtgcttgcagtggcagcctaaagtatgctcatagaaaatgtgttcagcgttggtgcaatgaaaagggaaacattatatgcgagatttgtcaccagccttatcaacctggatataccgctccaccacctccacttcagcctgaagaaacaactattgacattggtggaggatggacaatctcaggtttggatgtgcatgatcctcgtctccttgcaattgctgaagctgaacgtcggtatttagagtctgaatatgtggaatatacagcttcaagtgcaagcggggccgcattctgtcgctcagctgctctaatattaatggctcttcttctcttacgacacgcactgaccataacagatgatactgatggcgaagaagacgacccatcttcgatactatctcttgtcctgctccgagctgctggatttcttcttccatgctatatcatggcttgggccatcagtattctacagcgccgaagacagagacaggaagctgcagctttggctacacagtttgcgttggtgcttcagtcagggcagcctagaacagttcacttcacggtatcaccgggaatatcatcatccgccgtggctcatgcgactacatctacacaacaacagcatgacgatcctgtctgaattctgatctaatgtcacaagcatggagccattacaaggtacgatgtaaatcaaatgaagaatttggtgtccgtaaattgtatgagtaaaggattgaaatcatttgaattcgtggaaggttagatctttcattttacttgtagccaaaaatgtcaaataggttttgcacaaatttgtaaattctgctttactatttttcacacattgtcttgaaacttgagtgtatttttttttt

SEQ ID NO: 77439 - protein, 271 aa, Arabidopsis thaliana
  peptide (1)..(271): Ceres Seq. ID no. 12576430
MSPVNAEVEEMRSESPVVNDKALDISDDDHDDENEPLIVSGECRICSDESPVENLESPCACSGSLKYAHRKCVQRWCNEKGNIICEICHQPYQPGYTAPPPPLQPEETTIDIGGGWTISGLDVHDPRLLAIAEAERRYLESEYVEYTASSASGAAFCRSAALILMALLLLRHALTITDDTDGEEDDPSSILSLVLLRAAGFLLPCYIMAWAISILQRRRQRQEAAALATQFALVLQSGQPRTVHFTVSPGISSSAVAHATTSTQQQHDDPV

SEQ ID NO: 77440 - protein, 261 aa, Arabidopsis thaliana
  peptide (1)..(261): Ceres Seq. ID no. 12576431
MRSESPVVNDKALDISDDDHDDENEPLIVSGECRICSDESPVENLESPCACSGSLKYAHRKCVQRWCNEKGNIICEICHQPYQPGYTAPPPPLQPEETTIDIGGGWTISGLDVHDPRLLAIAEAERRYLESEYVEYTASSASGAAFCRSAALILMALLLLRHALTITDDTDGEEDDPSSILSLVLLRAAGFLLPCYIMAWAISILQRRRQRQEAAALATQFALVLQSGQPRTVHFTVSPGISSSAVAHATTSTQQQHDDPV

SEQ ID NO: 77441 - DNA, 937 bp, Arabidopsis thaliana
  misc_feature (1)..(937): Ceres Seq. ID no. 12576432
  misc_feature (1)..(937): Ortholog of  Ceres SEQ ID NO 12558659 as cited in SEQ ID NO 20727
  misc_feature (1)..(937): Ortholog of  Ceres SEQ ID NO 15175034 as cited in SEQ ID NO 62432
  misc_feature (1)..(937): Ortholog of  Ceres SEQ ID NO 12619999 as cited in SEQ ID NO 66123
  misc_feature (1)..(937): Ortholog of  Ceres SEQ ID NO 13656436 as cited in SEQ ID NO 69154
aaaacccaattccctaatcccaaaattcgatctctcatctgatggctggttacagagccgatgaagagtacgattacctcttcaagctcgtgttgatcggcgactctggtgtcggcaaatcgaatctgctctctcggttcaccaagaacgagttcaatctcgaatccaagtctactattggtgttgagttcgctaccaaaaccactaaagtcgaaggcaaagtcgtcaaagctcagatttgggatactgctggtcaagagagataccgagcaatcacaagcgcttattacagaggagctgttggtgctttgcttatttacgacgtgacaaggcacgcaacatttgagaatgcagcaagatggctaagggaactaagaggacacacagacccaaacatagtggtgatgcttatagggaacaagtgcgatctgcgtcacttggtggcagtcaaaacagaagaggctaaagcctttgctgagagagaatccctctatttcatggagacttcagctctagacgcaaccaatgttgaaaacgcattcacggaagtgctcactcagatccacaagatagtgagcaaaagaagtgttgatggaggaggagagtcggctgatttaccgggaaaaggagagacgataaacgttaaagaagacggatcggttcttaagagaatgggttgctgctctaactagagtggggggattgtagatttggcttgatttggttagggtgagacaacaaatgataatctctttgggtcttgcaatcaaaaaagaaataagaaacgattacttttaagatcatgtgtatgctttggtaactttggcctgtaaggtcctttaaaatttaagtacatgattggtaatttgttttcaacactcccaccacttgtaatttgtaaacttgtaataaactgaagaaatgcaaatcatcacct

SEQ ID NO: 77442 - protein, 216 aa, Arabidopsis thaliana; identical to SEQ ID NO: 20728
  peptide (1)..(216): Ceres Seq. ID no. 12576433

SEQ ID NO: 77443 - DNA, 1158 bp, Arabidopsis thaliana
  misc_feature (1)..(1158): Ceres Seq. ID no. 12576440
  misc_feature (1)..(1158): Ortholog of  Ceres SEQ ID NO 13654989 as cited in SEQ ID NO 63117
  misc_feature (1)..(1158): Ortholog of  Ceres SEQ ID NO 13584744 as cited in SEQ ID NO 69137
acagcttgaaagatctggagattgcgacacgtggcttctctgatgataacatgatcggtgaaggagggtacggtgtcgtttacagagctgatttctctgacggttctgtcgccgccgtcaagaatctccttaacaacaagggtcaggcggagaaggagttcaaagttgaagtagaagcaattgggaaagtaagacataagaacttggttggtctgatgggatattgtgctgacagtgctcaaagtcaaaggatgcttgtgtatgaatatattgataatggaaacttggagcagtggttacacggtgatgtaggtccggtgagtcctcttacgtgggatatccgcatgaagatagccattggaacagcaaaaggattagcctatttacatgaagggcttgaacctaaggttgtgcaccgtgatgtgaaatctagtaacatcttgctcgataagaaatggaacgcgaaagtgtctgattttggtttggccaagttattaggatctgaaacaagctacgtgacaactcgtgtgatgggaacttttggatatgtttcaccggaatatgcaagtactggtatgctcaatgagtgtagtgatgtctacagtttcggtgttctgctcatggagatcattacaggaaggagcccagttgattattcaagaccgcctggcgagatgaacttagtggattggttcaaaggaatggttgcaagtagacgtggagaagaagttatagaccctaaaatcaagacatcacctcctccaagagctttgaaaagagctttgcttgtttgtttgcgttgcatagaccttgactctagtaaacgaccaaagatgggacaaatcattcacatgcttgaggctgaagattttccattccgtcctgaacacagatcaaaccaggaaagatcgaagtaagaaagattattgggcaaacaataatgtcttggggaagaccacacttgagcgttgatgctattcattacacagccatatattgatagatgtttccatgtttgttcttatattgagaggattgatatgcaaaagagaaaattggaaaagtgaaattagatatatgaggatgaaattcagatttatcgcttgtaatttgtaaatatatcatatattgtataataaaacagtgaactctaagaac

SEQ ID NO: 77444 - protein, 304 aa, Arabidopsis thaliana
  peptide (1)..(304): Ceres Seq. ID no. 12576441
SLKDLEIATRGFSDDNMIGEGGYGVVYRADFSDGSVAAVKNLLNNKGQAEKEFKVEVEAIGKVRHKNLVGLMGYCADSAQSQRMLVYEYIDNGNLEQWLHGDVGPVSPLTWDIRMKIAIGTAKGLAYLHEGLEPKVVHRDVKSSNILLDKKWNAKVSDFGLAKLLGSETSYVTTRVMGTFGYVSPEYASTGMLNECSDVYSFGVLLMEIITGRSPVDYSRPPGEMNLVDWFKGMVASRRGEEVIDPKIKTSPPPRALKRALLVCLRCIDLDSSKRPKMGQIIHMLEAEDFPFRPEHRSNQERSK

SEQ ID NO: 77445 - protein, 288 aa, Arabidopsis thaliana
  peptide (1)..(288): Ceres Seq. ID no. 12576442
MIGEGGYGVVYRADFSDGSVAAVKNLLNNKGQAEKEFKVEVEAIGKVRHKNLVGLMGYCADSAQSQRMLVYEYIDNGNLEQWLHGDVGPVSPLTWDIRMKIAIGTAKGLAYLHEGLEPKVVHRDVKSSNILLDKKWNAKVSDFGLAKLLGSETSYVTTRVMGTFGYVSPEYASTGMLNECSDVYSFGVLLMEIITGRSPVDYSRPPGEMNLVDWFKGMVASRRGEEVIDPKIKTSPPPRALKRALLVCLRCIDLDSSKRPKMGQIIHMLEAEDFPFRPEHRSNQERSK

SEQ ID NO: 77446 - protein, 233 aa, Arabidopsis thaliana
  peptide (1)..(233): Ceres Seq. ID no. 12576443
MGYCADSAQSQRMLVYEYIDNGNLEQWLHGDVGPVSPLTWDIRMKIAIGTAKGLAYLHEGLEPKVVHRDVKSSNILLDKKWNAKVSDFGLAKLLGSETSYVTTRVMGTFGYVSPEYASTGMLNECSDVYSFGVLLMEIITGRSPVDYSRPPGEMNLVDWFKGMVASRRGEEVIDPKIKTSPPPRALKRALLVCLRCIDLDSSKRPKMGQIIHMLEAEDFPFRPEHRSNQERSK

SEQ ID NO: 77447 - DNA, 845 bp, Arabidopsis thaliana
  misc_feature (1)..(845): Ceres Seq. ID no. 12576463
  misc_feature (1)..(845): Ortholog of  Ceres SEQ ID NO 13594828 as cited in SEQ ID NO 56431
  misc_feature (1)..(845): Ortholog of  Ceres SEQ ID NO 14316363 as cited in SEQ ID NO 57222
  misc_feature (1)..(845): Ortholog of  Ceres SEQ ID NO 15177754 as cited in SEQ ID NO 57945
  misc_feature (1)..(845): Ortholog of  Ceres SEQ ID NO 13594354 as cited in SEQ ID NO 58082
  misc_feature (1)..(845): Ortholog of  Ceres SEQ ID NO 14316408 as cited in SEQ ID NO 58228
  misc_feature (1)..(845): Ortholog of  Ceres SEQ ID NO 13528075 as cited in SEQ ID NO 60188
  misc_feature (1)..(845): Ortholog of  Ceres SEQ ID NO 13600483 as cited in SEQ ID NO 0
attgttcttgaacatctccgaagctaactccgaacatcaaaactgtatcttcttctcctcctcctccttggcccttttcacaaagtttcagggacaaagagtttttgttgtcagtaacttcaagctctaagctatggctgtcaccaagatttatattgtgtactattccttgcacggccacgtcgagacaatggcacgagaggtacttcggggagtaaactctgttccagacgtggaagcaacactttggcaagtgccagagacattaccggagaaaatattggagaaagtgaaggccgttccaagaccggacgatgtgccggatattcgaccagaacaactggcggaagccgacggattcatgtttggctttccttctaggtttggagtgatggcatcacaggtcatgactttctttgacaatacaaatgatctctggactacacaggctctcgctgggaaacctgcaggaatcttctggagtacgggtttccacggtggaggccaagaactaactgcgttgacggcagtgacaaaactggctcatcacgggatgatatttgtaccggtaggatacacattcggtaaaagtatgtacgagatgggagaggtgaaaggtggttcgccttatggctcagggacttatgcagctgatggatcacgcgagccaacagagctggagattcagcaggcaaattaccatggcaagtactttgcaggaatagccaagaaactcaagaaacggtctcctgtctaaattctaaaccatatcaactctgtgtttcctatactaaacaatctgtaaatgtaaaggtgaacactgaaaataagatcgacatatacag

SEQ ID NO: 77448 - protein, 207 aa, Arabidopsis thaliana; identical to SEQ ID NO: 30130
  peptide (1)..(207): Ceres Seq. ID no. 12576464

SEQ ID NO: 77449 - protein, 188 aa, Arabidopsis thaliana; identical to SEQ ID NO: 30131
  peptide (1)..(188): Ceres Seq. ID no. 12576465

SEQ ID NO: 77450 - protein, 131 aa, Arabidopsis thaliana; identical to SEQ ID NO: 30132
  peptide (1)..(131): Ceres Seq. ID no. 12576466

SEQ ID NO: 77451 - DNA, 1023 bp, Arabidopsis thaliana
  misc_feature (1)..(1023): Ceres Seq. ID no. 12576477
  misc_feature (1)..(1023): Ortholog of  Ceres SEQ ID NO 12557497 as cited in SEQ ID NO 43
  misc_feature (1)..(1023): Ortholog of  Ceres SEQ ID NO 15177850 as cited in SEQ ID NO 51765
  misc_feature (1)..(1023): Ortholog of  Ceres SEQ ID NO 14303417 as cited in SEQ ID NO 54923
  misc_feature (1)..(1023): Ortholog of  Ceres SEQ ID NO 15169084 as cited in SEQ ID NO 59115
  misc_feature (1)..(1023): Ortholog of  Ceres SEQ ID NO 12635723 as cited in SEQ ID NO 0
acaaaccgcaaacgcgacagaactaactaacgacgccggagatggccgccacttcaaccgccgctgctgcttcttcaatcatgggtacccgggtggtttccgacattagctccaattcaagccggttcacagcccggttcggattcggaaccaagaaagcatctcccaaaaaggctaagacggttatctcagaccggcctctatggttcccaggcgcaaaatcacccgaatatctcgacggttcacttgtcggggactacgggttcgatccttttggtttaggcaaaccggcggagtatctccaattcgatttggattccttggaccagaacttagccaagaacttatacggagaagtgatcgggactcgtaccgaggcggtggaccccaaatcgacgccgtttcagccatatagtgaagtcttcgggctacaaagattcagagaatgtgagctgattcacggtcggtgggcaatgctcgccactcttggcgctatcaccgtcgaatggctcaccggtgttacttggcaagacgccggcaaggtagagctagtggatggatcatcttacttaggacagccattgccgttctctatctcgacattgatatggatcgaagtgttagtgatcggctacattgagttccaacgaaacgctgaactggactcggagaagcgtttgtatccaggaggcaagttctttgacccgttaggactagcgtctgacccggtgaagaaggctcagcttcagctagctgagatcaaacatgctcgtttagccatggttggattcttgggttttgcggttcaggcggctgcaaccggtaaaggaccgctcaacaactgggcgactcaccttagtgacccacttcacaccaccattatcgataccttctcttcctcctgatgtggtggcttttagcttctactggtgtcatgtaatgatgtggtggcttttagcttctactggtgtcatgtaatgatgtaacgtcgttattttaaagaaaatttggcaccttttgtat

SEQ ID NO: 77452 - protein, 287 aa, Arabidopsis thaliana; identical to SEQ ID NO: 34996
  peptide (1)..(287): Ceres Seq. ID no. 12576478

SEQ ID NO: 77453 - protein, 274 aa, Arabidopsis thaliana; identical to SEQ ID NO: 34997
  peptide (1)..(274): Ceres Seq. ID no. 12576479

SEQ ID NO: 77454 - protein, 143 aa, Arabidopsis thaliana; identical to SEQ ID NO: 34998
  peptide (1)..(143): Ceres Seq. ID no. 12576480

SEQ ID NO: 77455 - DNA, 2217 bp, Arabidopsis thaliana
  misc_feature (1)..(2217): Ceres Seq. ID no. 12576507
  misc_feature (1)..(2217): Ortholog of  Ceres SEQ ID NO 15176298 as cited in SEQ ID NO 58961
atctcgtttcagtgactcctgcaaaccgtccactccatgtggattgcacaaaaagttctataaagaaaatatagcttttagactttggtcctagattcaactaatctctttttctatttcttctgtgttcttctctgaagcttccattgtgtaggacttatgctcttttctcctacttagggaaagtgcattaattcgtatctatctaggcacagagattgttgataacttatcgtactttaaatggaaaattctatgaacaacagaggacatggacacaatcaagaacatgcagacaacttgccagaatcaaagagacagaagcttcctgctttggcaagtgtcatagtggaagctgtcaaggtagatagtctgcagaggctatgctcgtctttggaaccattatttcgaagaattgtcagtgaagaggtggaacgtgccatatcaaggttggagaactcgaaatctacttcaagatctacagaaccgaataagattcaaggcctcgatggaagaaatctgcaacttcggttcagaacacgaatgcctcctcatttattcacaggtgggaaagtcgagggagagcaaggctcagccattcacgtggttcttatagatgcaaacaccggaaatgtaatccaaacaggagaagaatcaatgacaaagctgaatattgtcgtgttagatggagacttcaatgatgaagacgacaaagattggacgagagaacattttgagagctttgaagtgaaggaacgcgaaggaaaacgtcccatcttgactggtgacagacatgtgataattaaagaaggtgtaggaactcttggaaaacttactttcactgacaattcgagctggattaggagcagaaagtttagacttggtgttaagcctgcaacgggatttcacatccgtgaagctaaaacagaaccatttgctgttaaagatcacagaggagaacatgagtatcttaaaactttggactgacttgataagcagagagagatagagtttcttggattgtctaccttaatcttggattattttttggcggtgttttttgcagtatacaagaaacattatccaccggttttacatgatgaagtctggagattggataaaatagcgaaagatggagcgctacacaagaagctactaaaatctaacattgtgactgttgaagacttcctacagatactcatgaaggatccgcagaaactaagaagcttacttgggagtggaatgtcaaatagaatgtgggataacacggtagagcacgcaaagacttgtgtcttaggtgggaaactttacgcctattacacagatcaaacacaccagacagctgttgtctttaatcatatatatgaatttcaaggcctaattgccaatggccacttcttgtcttcggaatctcttaaccatgaccaaaagatttctgcagacactttggtgaagactgcttacgagaactggcataaagtggttgagtatggcggtaagctcttgaattgcttaccagttgctaagaagggaataaaaagcttgccagagccaaaaatggctcagaaccatcaaacgcagcagaaggctctgcaatgccaacagactgtgaatggctactcatcagatcctcagcatctgatagagtatccttttgtccaacaaccttgctatcagttacgagactacacatcgatggagagttcttcagtttcaggctcatataatggaggccttgaagatattttcacggaggaaattcgagcgaggagttctgagatgctcgagacggataacatgcagagattgctcaagacatttgggatatcaggcgggtttggtaacagggatgagtccatttacggtttcagtgatcagtacgaagctcagatagacaagggttatatgagagaaggaggtagaggcgcagggaaagctgtagtgggatggcttaagctcaaagctgcattgagatggggtatctttatacgcaagaaagctgcagagaggaggcctcaaattgtggagatcgactaagaaagtactacaaaaaaattccgagagcttttcttttgtataaataaacttgaagcaattacttttttaaagaggatcaaccagtatatccttccatatctaagcattggagaaaaaggttaaacgactggttatcagtcagacaaagagtcttaataccgaaagtctcagtattcgtcc

SEQ ID NO: 77456 - protein, 278 aa, Arabidopsis thaliana
  peptide (1)..(278): Ceres Seq. ID no. 12576508
MKDPQKLRSLLGSGMSNRMWDNTVEHAKTCVLGGKLYAYYTDQTHQTAVVFNHIYEFQGLIANGHFLSSESLNHDQKISADTLVKTAYENWHKVVEYGGKLLNCLPVAKKGIKSLPEPKMAQNHQTQQKALQCQQTVNGYSSDPQHLIEYPFVQQPCYQLRDYTSMESSSVSGSYNGGLEDIFTEEIRARSSEMLETDNMQRLLKTFGISGGFGNRDESIYGFSDQYEAQIDKGYMREGGRGAGKAVVGWLKLKAALRWGIFIRKKAAERRPQIVEID

SEQ ID NO: 77457 - protein, 264 aa, Arabidopsis thaliana
  peptide (1)..(264): Ceres Seq. ID no. 12576509
MSNRMWDNTVEHAKTCVLGGKLYAYYTDQTHQTAVVFNHIYEFQGLIANGHFLSSESLNHDQKISADTLVKTAYENWHKVVEYGGKLLNCLPVAKKGIKSLPEPKMAQNHQTQQKALQCQQTVNGYSSDPQHLIEYPFVQQPCYQLRDYTSMESSSVSGSYNGGLEDIFTEEIRARSSEMLETDNMQRLLKTFGISGGFGNRDESIYGFSDQYEAQIDKGYMREGGRGAGKAVVGWLKLKAALRWGIFIRKKAAERRPQIVEID

SEQ ID NO: 77458 - protein, 260 aa, Arabidopsis thaliana
  peptide (1)..(260): Ceres Seq. ID no. 12576510
MWDNTVEHAKTCVLGGKLYAYYTDQTHQTAVVFNHIYEFQGLIANGHFLSSESLNHDQKISADTLVKTAYENWHKVVEYGGKLLNCLPVAKKGIKSLPEPKMAQNHQTQQKALQCQQTVNGYSSDPQHLIEYPFVQQPCYQLRDYTSMESSSVSGSYNGGLEDIFTEEIRARSSEMLETDNMQRLLKTFGISGGFGNRDESIYGFSDQYEAQIDKGYMREGGRGAGKAVVGWLKLKAALRWGIFIRKKAAERRPQIVEID

SEQ ID NO: 77459 - DNA, 1390 bp, Arabidopsis thaliana
  misc_feature (1)..(1390): Ceres Seq. ID no. 12576511
  misc_feature (1)..(1390): Ortholog of  Ceres SEQ ID NO 14302154 as cited in SEQ ID NO 0
aacctaatttcacttcgtctctctctcgcgctcccaatttctccgccggcgggaaaaccatgtcgcacttcggaaggtcaggtccaccggatatcagcgacacctactcacttctcgtccttaacatcaccttccgtacgactgctgatgatctctatcctctattcgcaaagtatggaaaggtcgttgatgtgtttattcccagagatcgaaggactggtgattcgcgtggttttgcgtttgttcggtataagtataaagacgaagctcacaaagcagtggaaaggcttgatggaagagttgttgatggcagagaaataactgttcagtttgcgaaatatgggccaaatgctgaaaaaatttccaaaggaagagttgtggaaccaccgccgaagtcacgaagatctagaagccgtagtcctaggcggagtcgtagtcctaggaggagccgtagcccgcctagacgtcgtagtcccagaagaagccgcagtcctcgtaggaggtcccgagatgactatagggaaaaagactaccggaagcggagcaggagcagaagctatgacaggcgtgaaaggcatgaggagaaggatagagatcatcgtcgtcgcactaggtctcgtagtgccagcccagatgaaaaacgcagagtcagaggccgttatgataatgagagccgcagtcacagtcgttccttgagtgcatctcctgctcgccgcagccctagaagttcctccccacagaaaacctctcctgctagagaagtttctcctgataagcgtagcaatgagaggtctccatctcctcgtcgcagcctcagcccaagaagccctgctttgcaaaaggcctctccttctaaggagatgtctcctgaaaggcgtagcaatgagaggtccccatctcctggtagccctgctcctctgcgcaaagttgatgctgcttctcgaagtcaatctccttatgctgcggaatgactgcagccacttgtgaaagtgatacggtgtatgatgaaaaacacgtttgcttgtactgatgatgtttcatcattaagcactggaacgtctaccctctgtagtattacttgctttcctctggttcgagaaaagaattgactgggaagatggcacaaccatgttgagattgtagctgttgatggctgtttatgaaactgtagatgatcgatgctgtttatgaaaccgtagatgatcgatgctggtcacagctatctgctttaactagtatcatccttgtgtcgctaatgcttagaagggctggttcgttgagttttcaatcttaagttgagaaatcaaagttcagttgagtttcacttatctcttgtctatcttctgtttaagattcttatcaaaagtacctaatgcaaagataaattacc

SEQ ID NO: 77460 - protein, 322 aa, Arabidopsis thaliana
  peptide (1)..(322): Ceres Seq. ID no. 12576512
PNFTSSLSRAPNFSAGGKTMSHFGRSGPPDISDTYSLLVLNITFRTTADDLYPLFAKYGKVVDVFIPRDRRTGDSRGFAFVRYKYKDEAHKAVERLDGRVVDGREITVQFAKYGPNAEKISKGRVVEPPPKSRRSRSRSPRRSRSPRRSRSPPRRRSPRRSRSPRRRSRDDYREKDYRKRSRSRSYDRRERHEEKDRDHRRRTRSRSASPDEKRRVRGRYDNESRSHSRSLSASPARRSPRSSSPQKTSPAREVSPDKRSNERSPSPRRSLSPRSPALQKASPSKEMSPERRSNERSPSPGSPAPLRKVDAASRSQSPYAAE

SEQ ID NO: 77461 - protein, 303 aa, Arabidopsis thaliana; identical to SEQ ID NO: 35347
  peptide (1)..(303): Ceres Seq. ID no. 12576513

SEQ ID NO: 77462 - DNA, 1705 bp, Arabidopsis thaliana
  misc_feature (1)..(1705): Ceres Seq. ID no. 12576546
  misc_feature (1)..(1705): Ortholog of  Ceres SEQ ID NO 14311535 as cited in SEQ ID NO 51559
  misc_feature (1)..(1705): Ortholog of  Ceres SEQ ID NO 15176200 as cited in SEQ ID NO 55188
atacacacaattcaatatttgacttcacatagagagagatagagagatggcgacggaaacggaagttgtagctccggtaacggtaagcaacggcggaagcaaaggatgttgcaagtacggtggtcctggttacgcgactcctctcgccgctatgtctggtccatcggagaaacttatctacgtaaccgccgtctacaccggaactggaatagataaaccggattatttggcgacggtggatgtagatccaagctcgccttcgtattcaagtgttattcatagattaccaatgccttttgttggtgatgagcttcatcattctggttggaactcttgtagttcttgccatggtgatgcttctgttgatagacgttatctcgtgttaccgtctcttatatctggtcgcatttatgcgattgatactaaggaaaacccgagggctccgtctttgtataagtatgttgatcctaaagagattgctgataagactggattggcgtttcctcacacggctcattgcctcgccacgggcgagatcttggtgtcctgtcttggagatgaagaggggaatgctaaggggaatgggtttcttcttcttgactctgattttaacatcaagaataggtgggagaaaccaggacatagtcctttgtatgggtatgatttttggtaccaacctcggcacaagaccatgatcagcacatcttggggagcacctaaagccttctctaaaggtttcaatcttcagcacgttgctgatggcttgtatggaagtcatctacatgtttatagttggccaggaggtgaaataaaacaattaattgaccttggaccgactggtctcttacctttggagattagattcttgcatgatccatctaaagatacagggtttgttgggagtgccttgtcgagtaatatgataagatttttcaagaacagtgatgaaacatggagccatgaggttgttatatcggttaaaccgttgaaagtcgaaaactggatacttccagaaatgccggggctaatcaccgacttcttgatctccctcgatgaccgatttatttactttgtgaactggctccatggagacattcgtcagtacaacatagaggaccctaaaaaccctgtattaacagggcaaatttgggttggaggattactacaaaagggcagtcctgttaaggcggttggagaagacggaaacactttccaattcgaggttcctcagatcaaggggaaatctttacgaggtggacctcaaatgattcagctgagcctcgatgggaaacgattgtatgcaacaaactcgctgtttagcgcatgggatcgtcagttttatcctgaaatcatggagaaaggctcacacataattcagattgatgttgatacagaaaaaggtggtctcaccataaaccctgatttctttgtggactttggtgatgaaccagacggtccttcactagcccacgagatgagatatccaggtggagactgcacttccgatatctggatttgaatttggctttgtttagagtgtgttttgtgttaagtttaaattgagttttattatttgttgtgtgtttagtagagttgaataaaaaagggagtaagatgactcagacaattaacacttgtttgtacattttgactcctatgtgtcttaagtaataaaactttctacaattcgacttaacacttggtt

SEQ ID NO: 77463 - protein, 490 aa, Arabidopsis thaliana
  peptide (1)..(490): Ceres Seq. ID no. 12576547
MATETEVVAPVTVSNGGSKGCCKYGGPGYATPLAAMSGPSEKLIYVTAVYTGTGIDKPDYLATVDVDPSSPSYSSVIHRLPMPFVGDELHHSGWNSCSSCHGDASVDRRYLVLPSLISGRIYAIDTKENPRAPSLYKYVDPKEIADKTGLAFPHTAHCLATGEILVSCLGDEEGNAKGNGFLLLDSDFNIKNRWEKPGHSPLYGYDFWYQPRHKTMISTSWGAPKAFSKGFNLQHVADGLYGSHLHVYSWPGGEIKQLIDLGPTGLLPLEIRFLHDPSKDTGFVGSALSSNMIRFFKNSDETWSHEVVISVKPLKVENWILPEMPGLITDFLISLDDRFIYFVNWLHGDIRQYNIEDPKNPVLTGQIWVGGLLQKGSPVKAVGEDGNTFQFEVPQIKGKSLRGGPQMIQLSLDGKRLYATNSLFSAWDRQFYPEIMEKGSHIIQIDVDTEKGGLTINPDFFVDFGDEPDGPSLAHEMRYPGGDCTSDIWI

SEQ ID NO: 77464 - protein, 455 aa, Arabidopsis thaliana
  peptide (1)..(455): Ceres Seq. ID no. 12576548
MSGPSEKLIYVTAVYTGTGIDKPDYLATVDVDPSSPSYSSVIHRLPMPFVGDELHHSGWNSCSSCHGDASVDRRYLVLPSLISGRIYAIDTKENPRAPSLYKYVDPKEIADKTGLAFPHTAHCLATGEILVSCLGDEEGNAKGNGFLLLDSDFNIKNRWEKPGHSPLYGYDFWYQPRHKTMISTSWGAPKAFSKGFNLQHVADGLYGSHLHVYSWPGGEIKQLIDLGPTGLLPLEIRFLHDPSKDTGFVGSALSSNMIRFFKNSDETWSHEVVISVKPLKVENWILPEMPGLITDFLISLDDRFIYFVNWLHGDIRQYNIEDPKNPVLTGQIWVGGLLQKGSPVKAVGEDGNTFQFEVPQIKGKSLRGGPQMIQLSLDGKRLYATNSLFSAWDRQFYPEIMEKGSHIIQIDVDTEKGGLTINPDFFVDFGDEPDGPSLAHEMRYPGGDCTSDIWI

SEQ ID NO: 77465 - protein, 409 aa, Arabidopsis thaliana
  peptide (1)..(409): Ceres Seq. ID no. 12576549
MPFVGDELHHSGWNSCSSCHGDASVDRRYLVLPSLISGRIYAIDTKENPRAPSLYKYVDPKEIADKTGLAFPHTAHCLATGEILVSCLGDEEGNAKGNGFLLLDSDFNIKNRWEKPGHSPLYGYDFWYQPRHKTMISTSWGAPKAFSKGFNLQHVADGLYGSHLHVYSWPGGEIKQLIDLGPTGLLPLEIRFLHDPSKDTGFVGSALSSNMIRFFKNSDETWSHEVVISVKPLKVENWILPEMPGLITDFLISLDDRFIYFVNWLHGDIRQYNIEDPKNPVLTGQIWVGGLLQKGSPVKAVGEDGNTFQFEVPQIKGKSLRGGPQMIQLSLDGKRLYATNSLFSAWDRQFYPEIMEKGSHIIQIDVDTEKGGLTINPDFFVDFGDEPDGPSLAHEMRYPGGDCTSDIWI

SEQ ID NO: 77466 - DNA, 1465 bp, Arabidopsis thaliana
  misc_feature (1)..(1465): Ceres Seq. ID no. 12576558
  misc_feature (1)..(1465): Ortholog of  Ceres SEQ ID NO 13595870 as cited in SEQ ID NO 62101
  misc_feature (1)..(1465): Ortholog of  Ceres SEQ ID NO 13590241 as cited in SEQ ID NO 63878
  misc_feature (1)..(1465): Ortholog of  Ceres SEQ ID NO 13657939 as cited in SEQ ID NO 66349
  misc_feature (1)..(1465): Ortholog of  Ceres SEQ ID NO 13660597 as cited in SEQ ID NO 67655
aagaaaacaaaattactttaaaacagaaaaaaagttgataaattgcttcagtgtcaaattctgagatctgtaaaagatgagcgacggagacgacgctgctagacgccgtaccgcggcggtgactgattaccggaagaagctccttcatcacaaggagctcgaatcccgtgtccgaacagctagggagaatttaagagcagctaagaaggaattcaacaaaactgaggatgatttgaagtctcttcaaagcgttggccagattattggagaagtactacgtcctcttgataacgagcgattgattgttaaggcaagtagtggccctcgttatgtggtgggttgtcgtagcaaggtggacaaggaaaagcttacttctggaactcgagttgtcctggatatgactacgctgacaattatgcgagcccttcctcgtgaagttgatcctgttgtttataacatgttgcatgaagatccaggcaacattagttactcagctgtgggtggtttaggtgatcagatcagagaacttagggaatctattgagctgcctctcatgaatcctgaacttttccttagagttgggattaaacctcctaagggtgtccttctgtatggacctccgggtactggaaaaactctactagctagggctattgccagcaatatcgacgccaacttcttgaaggttgtatctagtgcaatcatagacaaatacattggagaaagtgctaggttgattcgagaaatgtttaactatgctcgtgaacatcagccttgtatcattttcatggatgaaatcgatgctattggtggacgccgttttagtgaaggaactagtgctgatcgtgaaattcaaagaacacttatggagttacttaaccagcttgatgggtttgaccaacttggaaaggtgaaaatgataatggccaccaacaggccggatgttcttgatccagcacttctccgtccgggtaggttagatagaaagatcgagatcccgttgccaaatgaacaatcaagaatggaaatcctcaagatccacgcatctggcattgccaagcatggagaaatagactatgaggctatcgtgaaacttggagagggtttcaatggtgccgatctgcgtaacatatgcactgaagctggaatgttcgcaatcagagcagagcgtgactatgtaatacatgaagacttcatgaaggctgtgagaaagctgagcgaggccaagaagcttgagtcgagctctcactataacgcggattttgggaaagagtaagaaaagaataagctcagagaagaagagagggcctaaagggcagtgaaaaactctgttattcactttgaaaaaacaagctgatgattctgtttcagtttctcaatgttttgttttgaggttctagtaaacacaaaaattcttgttttagtaatgacaactattttctgtttgtcctatatttttttattt

SEQ ID NO: 77467 - protein, 399 aa, Arabidopsis thaliana; identical to SEQ ID NO: 23999
  peptide (1)..(399): Ceres Seq. ID no. 12576559

SEQ ID NO: 77468 - protein, 292 aa, Arabidopsis thaliana; identical to SEQ ID NO: 24000
  peptide (1)..(292): Ceres Seq. ID no. 12576560

SEQ ID NO: 77469 - protein, 286 aa, Arabidopsis thaliana; identical to SEQ ID NO: 24001
  peptide (1)..(286): Ceres Seq. ID no. 12576561

SEQ ID NO: 77470 - DNA, 1612 bp, Arabidopsis thaliana
  misc_feature (1)..(1612): Ceres Seq. ID no. 12576586
  misc_feature (1)..(1612): Ortholog of  Ceres SEQ ID NO 14314792 as cited in SEQ ID NO 56837
gaccgctcctctcgatctctgatctccctgtcttctgtctacgcttcgtcgccggccgatttctcccagactcgtcttaccgcctccggtcgaaaccctagattcccggaggacgaaattcgttttttcgccggaactaaattaaggagatttgagaggctatgggtacaacaacgacaacaagcgctgtgtatatccatgttatcgaggatgtcgtcaacaaagttcgtgaggagttcattaacaacggaggtcctggcgagagtgttctcagcgagcttcaaggaatttgggagacgaagatgatgcaagccggagtcttgaatggaccaatagagaggtcatcggctcagaagccaacacctggtggtccactgactcatgatttgaatgttccttatgaaggtacagaggagtacgagactcccactgctgaaatgctcttccctcctacaccattgcagactccccttccaacgccgcttcccggtactgctgataactcatccatgtataacatccctaccggctcaagtgattatcccactcctggaactgagaatggagtcaacattgatgttaaagcaagacctagtccttatatgccaccgccttctccgtggacaaatcctagacttgatgtcaatgttggtaagtactagttttaccagtactttatgtctccgtgaaaagaaaaatgtctcagtttcttgtttggggtataaatgtctggcctgctgctagcttatgtggatggccgtgatgagcctgagagaggaaactctaaccagcagtttacgcaggatttatttgtgccatcctctgggaaacgaaaacgtgatgattcttctggacattatcaaaatggtggatctatacctcaacaggatggtgcaggcgatgctatccctgaggcaaactttgagtgtgatgcattccgcataacctctattggcgatagaaaggtaccacgagacttcttcagctcatcatcgaagattcctcaggttgatgggccaatgcctgacccttatgatgaaatgctctctacaccaaatatatatagttatcaaggacccagtgaagagtttaacgaggccagaactcctgctccaaacgagatccaaacgagcactcctgttgctgtacaaaacgatatcattgaagatgatgaagagctgttgaacgaagatgatgatgatgacgagttggacgacctagaaagtggcgaggatatgaacacacaacacctggttttagctcaatttgacaaggtgacgcgcacaaagagcaggtggaagtgcagtctgaaagacgggatcatgcatataaacgataaggacattctcttcaacaaagcagcaggcgagtttgacttctgatcttaacactagcaatgatgcttctaggaaagtccttcaaatgtccagtgtctttctttttaccttatgatttaagaccgaccgagagagacatgagtattcatgggaaagtgtactctggttggcttgttgtacaaaaagaaaagttttttctgtcgaagaaggcgtatcaactttcaccttgtttcatgaactcttattgtctttcacgcaatggaaaattaacttcc

SEQ ID NO: 77471 - protein, 218 aa, Arabidopsis thaliana
  peptide (1)..(218): Ceres Seq. ID no. 12576587
MSGLLLAYVDGRDEPERGNSNQQFTQDLFVPSSGKRKRDDSSGHYQNGGSIPQQDGAGDAIPEANFECDAFRITSIGDRKVPRDFFSSSSKIPQVDGPMPDPYDEMLSTPNIYSYQGPSEEFNEARTPAPNEIQTSTPVAVQNDIIEDDEELLNEDDDDDELDDLESGEDMNTQHLVLAQFDKVTRTKSRWKCSLKDGIMHINDKDILFNKAAGEFDF

SEQ ID NO: 77472 - protein, 166 aa, Arabidopsis thaliana
  peptide (1)..(166): Ceres Seq. ID no. 12576588
MGTTTTTSAVYIHVIEDVVNKVREEFINNGGPGESVLSELQGIWETKMMQAGVLNGPIERSSAQKPTPGGPLTHDLNVPYEGTEEYETPTAEMLFPPTPLQTPLPTPLPGTADNSSMYNIPTGSSDYPTPGTENGVNIDVKARPSPYMPPPSPWTNPRLDVNVGKY

SEQ ID NO: 77473 - protein, 120 aa, Arabidopsis thaliana
  peptide (1)..(120): Ceres Seq. ID no. 12576589
MPDPYDEMLSTPNIYSYQGPSEEFNEARTPAPNEIQTSTPVAVQNDIIEDDEELLNEDDDDDELDDLESGEDMNTQHLVLAQFDKVTRTKSRWKCSLKDGIMHINDKDILFNKAAGEFDF

SEQ ID NO: 77474 - DNA, 1773 bp, Arabidopsis thaliana
  misc_feature (1)..(1773): Ceres Seq. ID no. 12576590
  misc_feature (1)..(1773): Ortholog of  Ceres SEQ ID NO 14311882 as cited in SEQ ID NO 51638
  misc_feature (1)..(1773): Ortholog of  Ceres SEQ ID NO 14308803 as cited in SEQ ID NO 55038
  misc_feature (1)..(1773): Ortholog of  Ceres SEQ ID NO 13595437 as cited in SEQ ID NO 56562
ttgttgttatcctcacagtaaatgcttttgcttgagagagagtctgttagaggttttttgtttgtttctgtttccttctgtcacccagaaaactaaaaagcaaacaaattcaagaagagagagagagagagatagcctcaaaaccaagtcctaaccattgttgatagaagagaaagcttttcttttcttgttgcttatggtgaaagaatgaaagagagagaggaggagaagtaagaagcagagaaagtgtttagagctttgcatgttcctttctctccaagtttatatcttcatcggtttcacaagttcacttaaaaagttgaaaagagtctttcttcttcaactattgtaaatgcgaaatggatcgaagagatgcaatgggattatccgggtcaggttcttactatatccatagaggattatccgggtcgggtcctccaacgtttcatggatcaccacagcaacagcaaggtcttcgtcacttacctaatcaaaactctccattcgggtcaggctccactggtttcggatctccttctttacacggtgatccttctctggcaacagcagccggaggagccggagctcttcctcatcatatcggcgttaatatgattgctcctcctccacctcccagtgaaactccgatgaaacgaaagagaggacggcctagaaaatacggtcaagacggctctgtttctttggctctgtcgtcttcctctgtttcgaccattactcccaacaactctaacaaacgcggccgtggtcgacctccgggctccggcaagaaacagagaatggcttccgttggtgaactgatgccttcatcttctggaatgagcttcacgccacatgttatcgcggtttcaataggagaagatattgcatcaaaggttatagctttctctcaacaaggtccgagagccatttgcgttttatctgcaagtggtgcagtctctactgcaacacttattcaaccatcagcatctcccggagccattaaatacgagggccggtttgaaatcctagcgttatcaacatcttatatagtggcaactgatggaagcttccgtaaccgaactggaaacttatcggtttcgcttgctagccccgatgggcgtgtgattggcggtgccattggtgggcctttaatagctgcaagtcctgttcaggttattgtagggagctttatatgggcagctccaaagatcaagagcaagaaacgagaagaagaagcttctgaagttgttcaagaaactgatgatcaccacgttctggacaataataacaacacgatttcgcctgtccctcagcagcagccaaaccaaaacctgatttggtcaacaggttcaaggcaaatggatatgcgtcatgctcatgctgatattgatttaatgcgcggttgatgatagcgagaaagaactctgtgtatataaagcatggaatctaggaagaagaagaaggaatataagctaacctctgaacaaaagtatgtggaaatgttagggaaaaagattatgtggaaatgttagggaaaaagattaactctattagtgtacctctcatatctctaagcttgtttggttttactgtttctgtgactctgaagatttgcagagttcctttctttctctgttttagattgttcagtctttatgtaatttgcttgcaattctgattctacagcttagattcagtacattgtgtagaagtttacatgggaacctgaaaattgggcatttcatgggccttcatatgatccaatttattttc

SEQ ID NO: 77475 - protein, 348 aa, Arabidopsis thaliana; identical to SEQ ID NO: 36793
  peptide (1)..(348): Ceres Seq. ID no. 12576591

SEQ ID NO: 77476 - protein, 342 aa, Arabidopsis thaliana; identical to SEQ ID NO: 36794
  peptide (1)..(342): Ceres Seq. ID no. 12576592

SEQ ID NO: 77477 - protein, 264 aa, Arabidopsis thaliana; identical to SEQ ID NO: 36795
  peptide (1)..(264): Ceres Seq. ID no. 12576593

SEQ ID NO: 77478 - DNA, 1765 bp, Arabidopsis thaliana
  misc_feature (1)..(1765): Ceres Seq. ID no. 12576594
  misc_feature (1)..(1765): Ortholog of  Ceres SEQ ID NO 13599859 as cited in SEQ ID NO 1323
  misc_feature (1)..(1765): Ortholog of  Ceres SEQ ID NO 13596244 as cited in SEQ ID NO 69307
acttattccaaaagcaaacaaaatccaacactgtctcgttatctttctcttcactctttgatataaagaaggatcatcaaagctttcattttgagatctgggctcagacaaagattcttttttttttattctctccccagctccaaattctcagtgaagcataattgctctcgtacgtgggggttttgctcaatgtaaagaagttaaagattcaaacttttttttcacaatgggagagaatctgcatttgtctccacgacaccgatcttctctaaagaagccattgttgattgttttgttagtctgtatcacaagtgtgcttttggtgatcacttacatgtatccacaacacaacaacagtaagagctctgcttgtgcgggtttgtctagtagaggctgtcaagctgcgctctctggatggcttcctgttcatgtcaggaaattcactgatgaagaagtagcagctcgagttgtgatcaaagatatactgagactacctcctgctctaaccgctaaatcgaaaatcgcttttatgtttttgactcctggtactttgccatttgagaagctttgggataagtttttccagggtcaagaaggaagattctctatttacatccacccttccaggttacgaccagttcacattagccgtcacttttcagaccgtgaaattcatagtgatcatgtcacttggggaaggatttctatggttgatgctgagagacggcttctagcaaatgctcttgaagatcctgataaccagcactttgttcttctttcagaaagttgtataccgttgcatacatttgactacacctatcgatatttgatgcacgcaaatgtcagcttcattgatagttttgaggatcttggtcctcatgggactggcagacacatggatcacatgttacctgagatcccaaggcaagatttcagaaagggtgcacagtggttcacaatgaagcgtcaacacgctgtaatagtgatggctgatggtctctactactcgaaattccgggagtattgcagacctggagtagaagcaaacaagaactgcatcgcggatgaacattacctgccaacattctttcatatgcttgatcctggaggaatctcgaactggtcagtcacatatgttgattggtctgagcgtagatggcatccaaagacatatagagcacgcgatgtctcactcaagctcttgaaaaatatcacgtctgacgacatgagtgtacatgtaacaagcgttggcaagcgcggagaagagctgcgttggccttgtacatggaagggaattagacgaccatgttatctatttgcaaggaagcttcactcagatgctctttacaaactggtcagactctttccaaattacacaagcacagtggtctaagccagagacaaattcttgaaactaaaccatacgattcttgaaaccggaactaaacacttccagatatgccgagattggatcgcaatttactgtaaatttttgctttctcttgctgagatttagtgtctctttacatggtactctacttttattaaggtttagtataagaagaaagttagaagcagaaattttttggtcaaggagagatttggttatcgtgattttagccattgttcggttagtgttaagcggtatatgttgttgtaaaagctataagtagtttagcacaacgggttaagaattttggctgtgttcagttctttgacatctaaacataatgataccaatatgaaaaatactttttgctcg

SEQ ID NO: 77479 - protein, 388 aa, Arabidopsis thaliana; identical to SEQ ID NO: 43707
  peptide (1)..(388): Ceres Seq. ID no. 12576595

SEQ ID NO: 77480 - protein, 352 aa, Arabidopsis thaliana; identical to SEQ ID NO: 43708
  peptide (1)..(352): Ceres Seq. ID no. 12576596

SEQ ID NO: 77481 - protein, 287 aa, Arabidopsis thaliana; identical to SEQ ID NO: 43709
  peptide (1)..(287): Ceres Seq. ID no. 12576597

SEQ ID NO: 77482 - DNA, 2655 bp, Arabidopsis thaliana
  misc_feature (1)..(2655): Ceres Seq. ID no. 12576610
  misc_feature (1)..(2655): Ortholog of  Ceres SEQ ID NO 13595870 as cited in SEQ ID NO 62101
  misc_feature (1)..(2655): Ortholog of  Ceres SEQ ID NO 13590241 as cited in SEQ ID NO 63878
ggttcttccccaaacacaacgaagaagtcttttgtttccgatatagatcgaggaacttcgatttatcagacattaacaccaatttttaagatatcgtgaaggagagatttgattgatggcttggaggcgcatcatcaccaaggtttcgagtcatgaaagggaattgagcagtttaagaagcttacttgttagagcttactcctcttttcctagagtgggagttactggagctgtgggtggtggtggagcttctttaccgcgaacgaggtttcaatcgagttatgttggtagctttgctcgcagagtccgtgatagagaagaagttaatgaggttgcacatctgagagaacttattcgaagaaatgatcctgaggctgttatcagaatgtttgaaagccaaccttctttgcatgcgaatgcctctgcgttatcggaatacattaaggcattggttaaagttgataggctcgatcaaagtgagctggttcgaacattgcaaagaggtattgctggtgttgcaagggaggaagagacttttggaggtcttggggcatttagaaacgtaggaaaaccaacaaaagatggtgtccttggaactgctagtgcaccgatccatacgatatccacagaaaggactcactttaaagaacagctatggagtacaatccgaactattggagttggttttttactcatttctggtattggagctcttatcgaggacagaggaattggcaaaggacttggtttgcacgaagaagtgcaacctagtatggattcgagcaccaaattttctgatgtaaagggtgttgatgaagcaaaggctgagctagaggaaattgtgcattatcttcgcgaccccaaagtaaattcacagtgctagagtgtttttctaaggttcactcgtctgggaggaaagcttcctaagggtgtgttgcttgtcggtcctcctgggacaggaaaaactatgcttgctagagctattgctggagaagctggagtgcctttcttctcctgcagtggtagtgagtttgaagagatgtttgttggagttggagccagaagagtgagagatctttttagtgctgcaaagaagtgctccccgtgtattatatttatcgatgaaatagatgctattggaggaagtcgcaatcccaaggaccagcaatacatgaagatgacattgaaccagatgctcgttgagttggatgggtttaaacagaatgaaggaattattgtggtcgcagcaacaaatttcccagagtctttggataaggccctggttagacctgggaggtttgatcgtcatattgttgtacctaacccagacgtggaaggtcgacgccagattttggagtctcacatgtcaaaggtacttaaggctgaagatgtcgatttaatgatcatcgctagaggaacgcctggattttctggcgctgatttggctaatctggtcaatgttgctgctttaaaagctgcaatggacggttctaaagatgtgacaatgtctgatcttgagtttgccaaagacagaatcatgatgggaagtgagaggaaatctgcagttatatctgacgagtcaagaaagctaactgctttccatgaaggtggtcatgcccttgttgccattcacaccgaaggtgctcttccagtccacaaagcaaccattgtgcctcgtggtatggctcttggcatggtttctcaactaccagataaagatgagacgagcatttctaggaaacagatgcttgctaggcttgatgtttgtatgggaggccgggtagccgaagagttgatttttggggaaagtgaagtaacttcgggtgcatcttctgatcttgagcaggcaaccaaactcgcgagagcaatggtcacgaaattcggtatgagcaaagaggtgggtcttgtggcacataactacgacgacaatgggaaaagcatgagcaccgagacaaggcttctcattgagagtgaagtgaaacaacttctggaaaaggcttataacaatgcaaaaacaatcctcacggtttacaacaaagagcttcatgcccttgcaaatgctttgcttcagcacgaaactctgtccggtaagcagattaaagaattgcttaccgatctcaactctccactgctgcaaaagcgtcaagaagtggttacaaagcaaagcaacccggttcctccatcaacccctagctcagcatcatcagcagccgcagcagctgccgcagctgcagccgccgccgccgcagcagctgcaacagccgcaaccaaaggtaaagacatggcgccagtatcgtaaaaataaaggagctagcgtttggtagagaaggcgttttcatgtatttgtgtatgttggggtaattgaattgggaataactctttattttgagagtttttagaatcagtgagaggctggtgagggttaagagcattaagcttaggacaatgagattaacatctcaggtttttctctatctctatctcgtacacacggaatctcgctgcgaaatggtatgtgttcactttttctctaaatgttttcggaatctcgtgggatgttatttagaagtttggctcgtacagtttcaggttacactaaattctaaagcctgcttgtaagactcaatgcaataaattttatagtctcttgttatt

SEQ ID NO: 77483 - protein, 443 aa, Arabidopsis thaliana
  peptide (1)..(443): Ceres Seq. ID no. 12576611
MLARAIAGEAGVPFFSCSGSEFEEMFVGVGARRVRDLFSAAKKCSPCIIFIDEIDAIGGSRNPKDQQYMKMTLNQMLVELDGFKQNEGIIVVAATNFPESLDKALVRPGRFDRHIVVPNPDVEGRRQILESHMSKVLKAEDVDLMIIARGTPGFSGADLANLVNVAALKAAMDGSKDVTMSDLEFAKDRIMMGSERKSAVISDESRKLTAFHEGGHALVAIHTEGALPVHKATIVPRGMALGMVSQLPDKDETSISRKQMLARLDVCMGGRVAEELIFGESEVTSGASSDLEQATKLARAMVTKFGMSKEVGLVAHNYDDNGKSMSTETRLLIESEVKQLLEKAYNNAKTILTVYNKELHALANALLQHETLSGKQIKELLTDLNSPLLQKRQEVVTKQSNPVPPSTPSSASSAAAAAAAAAAAAAAAAATAATKGKDMAPVS

SEQ ID NO: 77484 - protein, 419 aa, Arabidopsis thaliana
  peptide (1)..(419): Ceres Seq. ID no. 12576612
MFVGVGARRVRDLFSAAKKCSPCIIFIDEIDAIGGSRNPKDQQYMKMTLNQMLVELDGFKQNEGIIVVAATNFPESLDKALVRPGRFDRHIVVPNPDVEGRRQILESHMSKVLKAEDVDLMIIARGTPGFSGADLANLVNVAALKAAMDGSKDVTMSDLEFAKDRIMMGSERKSAVISDESRKLTAFHEGGHALVAIHTEGALPVHKATIVPRGMALGMVSQLPDKDETSISRKQMLARLDVCMGGRVAEELIFGESEVTSGASSDLEQATKLARAMVTKFGMSKEVGLVAHNYDDNGKSMSTETRLLIESEVKQLLEKAYNNAKTILTVYNKELHALANALLQHETLSGKQIKELLTDLNSPLLQKRQEVVTKQSNPVPPSTPSSASSAAAAAAAAAAAAAAAAATAATKGKDMAPVS

SEQ ID NO: 77485 - protein, 375 aa, Arabidopsis thaliana
  peptide (1)..(375): Ceres Seq. ID no. 12576613
MKMTLNQMLVELDGFKQNEGIIVVAATNFPESLDKALVRPGRFDRHIVVPNPDVEGRRQILESHMSKVLKAEDVDLMIIARGTPGFSGADLANLVNVAALKAAMDGSKDVTMSDLEFAKDRIMMGSERKSAVISDESRKLTAFHEGGHALVAIHTEGALPVHKATIVPRGMALGMVSQLPDKDETSISRKQMLARLDVCMGGRVAEELIFGESEVTSGASSDLEQATKLARAMVTKFGMSKEVGLVAHNYDDNGKSMSTETRLLIESEVKQLLEKAYNNAKTILTVYNKELHALANALLQHETLSGKQIKELLTDLNSPLLQKRQEVVTKQSNPVPPSTPSSASSAAAAAAAAAAAAAAAAATAATKGKDMAPVS

SEQ ID NO: 77486 - DNA, 1590 bp, Arabidopsis thaliana
  misc_feature (1)..(1590): Ceres Seq. ID no. 12576637
  misc_feature (1)..(1590): Ortholog of  Ceres SEQ ID NO 14316522 as cited in SEQ ID NO 58267
aaatctctgatccgccatgagaggagctctcttgagaaatgcatctctctgcgctcgcagaatcattctttctcctcgtataacccatcagatctcccccaatgttccctttctcgctccaatcgccgctcctgctgctcccaagttcagatttttctcctccgaatccggtgagaactcgactacggcccctgagtcttcgccgactgattcacccgagaagaaagatctcgttgtagaagatgtaagcaacaaagagcttaaaagccgtatagagaagtatttcaatgagggtaatgaagatgctttacccggagttattgaagcacttctacagagaagacttgtagacaaacacgcagagactgatgatgaattgttggaaaaaatcgagtctctacctttcaaagatgatgtcaaggatgaagattttgaatccgatttcgaggaagcacattctactgacgaagaacttgaggatttgtacaattctcccgagtatgtagctgaaaagatgaggaagaatgagtttttcaacatggatgataagaagtgggatcacatgattagagaaggtatccaacatgggtgtcttactgatactaaagaatgcgaggagattcttgaggatatgctcaaatgggaccagcttcttcctgatgacttgaagaaaaaggttgaagcaaagtttaatgagcttggagatatgtgtgaaagaggtgaaattgaggctgaagcagcttatgagctttttaaggaatttgaagatgagatggtaattcagtatggggatcagatggaagctgagggtcctccccaatttggtgaaacagatgcttccgataggaatactgacttggatgatccccctggtaaaggcccaatcctcaggtggcaatcaaggatagtttttgctcctggaggtgatgcgtggcatccaaagaacaggaaagttaaaatgtctgttacagtgaaagagcttgggctctcaaagcatcaggctaaaaggctaagggaacttgtagggaaaagataccattcggggaaagacgagcttacaatcaccagcgagaggtttgaacaccgagaggaaaacaggaaagactgcttaagaactctttacgggttgatagaagaagctgggaaagccaacaagatcgctgaagacataagaacttcatatgtaaaacaaagactccgtgccaatccagcttttatgcagaaactacaagccaagatcataaggtctaaagaatcagatgccatcaacgcttgaacaaaacttttcccgatccatgaagaatctttgatggtaactcctatcttagtttggtttgcttgttgtatctcatgaagacatgaaccttggctgtgctgttggtgtctattagagactagttaacgttttctcagaattatgaatctctcctaaagttaaggtttcagatatgtttacgggttcagaatgaaagtaaccaaaggaaagaattggtacaatttttgtttgggttttgtatcagatgtctttctaatttttaaagaaattcaatcagtaagataagaaatggaaactaaataaattattgcttc

SEQ ID NO: 77487 - protein, 419 aa, Arabidopsis thaliana; identical to SEQ ID NO: 28427
  peptide (1)..(419): Ceres Seq. ID no. 12576638

SEQ ID NO: 77488 - protein, 253 aa, Arabidopsis thaliana; identical to SEQ ID NO: 28428
  peptide (1)..(253): Ceres Seq. ID no. 12576639

SEQ ID NO: 77489 - protein, 245 aa, Arabidopsis thaliana; identical to SEQ ID NO: 28429
  peptide (1)..(245): Ceres Seq. ID no. 12576640

SEQ ID NO: 77490 - DNA, 1826 bp, Arabidopsis thaliana
  misc_feature (1)..(1826): Ceres Seq. ID no. 12576641
  misc_feature (1)..(1826): Ortholog of  Ceres SEQ ID NO 13600220 as cited in SEQ ID NO 0
aaaccaaacggtcaaacctcactcaccatgagacaccttagctcacctccatggcctctcctccttctcctcctcctctcttctttcacctccggcgaatcctctctgtccgcagaaaaaaacaaattgcacaccggtggtctcagtagacagagttttcctaaaggattcgtgtttggaaccgccacgtcagcttatcaagtcgaaggcgagactcatcaagacggtcgtggcccaagcatttgggatgccttcgtcaagattcctgggaagatcgccaagaatgccacggctgagataacagtggaccagtatcaccgttacaaggaagatgtggatttgatgaagaaactgaacttcgatgcttacagattttccatttcatggtccaggatattccctgagggaagtggtaaagtcaactggaaaggagttgcttattacaatagattgattgattacatggttcaaaaagggattacaccttatgctaatctgtaccactacgatcttccattggctttggaaaacaagtataaaggcttgcttggtagacaagtagtgtaagcaccaatatgcaaagctcttttatgcattcctcaaaagttacaaactttgataatgcaaattttacaggaaagattttgcggattacgctgagttttgttacaagacatttggtgatagagtgaaaaattggatgacgttcaacgagccgcgtgtggtagctgctttaggttatgataatggtattttcgcaccgggtagatgctcaaaagcatttggaaattgcactgaaggaaactccgcgacagagccatacatagttactcatcaccttatcttggcccacgcagcagcagtccaaagataccgcaaatattaccaagcgaaacaaaagggaagggttgggatacttttagatttcgtttggtatgagccgcttactagaagtaaagcagataatcttgcagctcaaagagcaagagacttccatatcggatggtttattcacccattagtatatggagagtatccaaagacaatgcagaacattgtgaaagagaggcttccaaagttcacggagaaagaagtgaaaatggtgaaaggttccatagattttgtgggaataaaccaatacacgacttattacatgtccgaaccacatcccaccaccaaacctaaggatttgggttatcaacaagattggaatgtggaatttggctttgctaagttggggaagccaataggtccaagggcttactcgtcttggttatacaacgtaccatggggaatgtacaaggccttgatgtatatgaaggaacgttacggcaaccctactatgatcctctctgaaaacggtatggatgacccgggaaacgttactctagctcaaggactacatgacaccacgagaatcaagtattacaaagattacttaaccaaccttaagaaagctagggatgatggagccaatgtggttggatattttgcgtggtcattgctagataatttcgaatggttatcaggatatacttcaaggtttgggatcgtttatgttgattacaaaacattgaagaggtaccccaagatgtctgctcagtggtttaagcaacttctgaaacgaaacaacaaatgatctcaatgtatcaatgccgggtggatttagtttttaaaaaggttggaattgatgattgaagaaataatggggccggtttagtcactttgtttattataaggggggtgaattgtaacttgaactctctccttcttcagttctttgacttttcaacacaaataaaataaaagtttaagaataaatttgc

SEQ ID NO: 77491 - protein, 312 aa, Arabidopsis thaliana
  peptide (1)..(312): Ceres Seq. ID no. 12576642
MTFNEPRVVAALGYDNGIFAPGRCSKAFGNCTEGNSATEPYIVTHHLILAHAAAVQRYRKYYQAKQKGRVGILLDFVWYEPLTRSKADNLAAQRARDFHIGWFIHPLVYGEYPKTMQNIVKERLPKFTEKEVKMVKGSIDFVGINQYTTYYMSEPHPTTKPKDLGYQQDWNVEFGFAKLGKPIGPRAYSSWLYNVPWGMYKALMYMKERYGNPTMILSENGMDDPGNVTLAQGLHDTTRIKYYKDYLTNLKKARDDGANVVGYFAWSLLDNFEWLSGYTSRFGIVYVDYKTLKRYPKMSAQWFKQLLKRNNK

SEQ ID NO: 77492 - protein, 197 aa, Arabidopsis thaliana
  peptide (1)..(197): Ceres Seq. ID no. 12576643
MQNIVKERLPKFTEKEVKMVKGSIDFVGINQYTTYYMSEPHPTTKPKDLGYQQDWNVEFGFAKLGKPIGPRAYSSWLYNVPWGMYKALMYMKERYGNPTMILSENGMDDPGNVTLAQGLHDTTRIKYYKDYLTNLKKARDDGANVVGYFAWSLLDNFEWLSGYTSRFGIVYVDYKTLKRYPKMSAQWFKQLLKRNNK

SEQ ID NO: 77493 - protein, 188 aa, Arabidopsis thaliana
  peptide (1)..(188): Ceres Seq. ID no. 12576644
KPNGQTSLTMRHLSSPPWPLLLLLLLSSFTSGESSLSAEKNKLHTGGLSRQSFPKGFVFGTATSAYQVEGETHQDGRGPSIWDAFVKIPGKIAKNATAEITVDQYHRYKEDVDLMKKLNFDAYRFSISWSRIFPEGSGKVNWKGVAYYNRLIDYMVQKGITPYANLYHYDLPLALENKYKGLLGRQVV

SEQ ID NO: 77494 - DNA, 955 bp, Arabidopsis thaliana
  misc_feature (1)..(955): Ceres Seq. ID no. 12576645
  misc_feature (1)..(955): Ortholog of  Ceres SEQ ID NO 13599189 as cited in SEQ ID NO 637
gacgtataatttccccaatttctcagagagactcaaaatcaccaccaccaccaaatcgccgccatgtttaaacaagcttctcgtctcctctcccgatctgtcgccgccgcatcttccaaatcggtgacgactcgtgccttttcaacggaacttccatcgacgctcgattccactttcgtcgaggcatggaagaaagtcgcaccgaatatggacccaccgcagactccttctgctttcatgaaacctcgtccttccactccttcttctatcccgacgaagctcaccgtcaattttgtcctcccttacacatctgagcttaccgggaaagaggtcgacatggtcatcattcccgcatcaacaggacaaatgggtgtcttgcccggacacgttccaacaattgctgagctaaaacctggcatcatgtccgtccatgaaggcactgacgtgaagaaatacttcttgagcagtggttttgcattcctccacgcaaattccgtcgctgacataatcgcggtggaagctgtgccgcttgaccacattgaccctagccaagtccaaaagggtttagctgagttccaacagaaacttgcttctgccacaacagatcttgagaaagcagaggcacagattggtgttgaagttcacagtgccatcaacgcagctctctcgggctaaaagaaggtttctttctttatttcttcgaagaaacaaaaaaaaaactaaatcatttggcttttcaagtgattagtgaagtccctttttactactgcaaaggatggaatattgattcttcttgtttaatcgtgttggacttttgtttgaataaatgattttgtttaacgggcacaaaaacccacaaaagtttcttgtgttcatatctctgcacctttgtttttgtgtatgactttgttgtgttgagaaactaagttggaatttctttaaggtttcgtttact

SEQ ID NO: 77495 - protein, 203 aa, Arabidopsis thaliana; identical to SEQ ID NO: 21744
  peptide (1)..(203): Ceres Seq. ID no. 12576646

SEQ ID NO: 77496 - protein, 155 aa, Arabidopsis thaliana; identical to SEQ ID NO: 21745
  peptide (1)..(155): Ceres Seq. ID no. 12576647

SEQ ID NO: 77497 - protein, 145 aa, Arabidopsis thaliana; identical to SEQ ID NO: 21746
  peptide (1)..(145): Ceres Seq. ID no. 12576648

SEQ ID NO: 77498 - DNA, 1554 bp, Arabidopsis thaliana
  misc_feature (1)..(1554): Ceres Seq. ID no. 12576649
  misc_feature (1)..(1554): Ortholog of  Ceres SEQ ID NO 15224517 as cited in SEQ ID NO 64862
gagtttccagtaaacccttctctgaatcgctgccgcttcttcgatagactaaaagaatccaaacctcagtagccatggaaggcgaagagaagaatgattatagaaacgaggaagaagatttcaatacaccacaacaactacaaaagaagcaaaggaaagggaaaaaaatagcaacggaaacagaggatgaaaacgaagaagacaagagagttactctcaaagtcacgcaagtcgccgagagacccgatagaatctctccgatcgtcgcctatttctctacaggatacgatccttgtaaagtagatccaaaaacaggcaagagagttcatgaaactcccaaggttactgtttacaagcataaggatgattctaagaagaggattcaggttgttgtaagtcctccaggcgcaagagttgagttcgtcggaactaattacacaggcgagcaagctgctatgcagacgaatacttatagagttggtgtttttaatagagaggctaaaactttgaggattcttcctgttgctcacaataagataatcagattggagcctagagttaaagctcaagaaacaaatgaggaagaagcttcaggaagtgctgtcgtcaaagaacttgaagaactaaaaacaggagaacgcgatcgttataatacaaaaaaagctgttactcgggataagaagaagcgtgccttatatatgggagatgatgctgcgactcagaaggtccttgatgggaaactaagtgagttaggtgttaacacagctgctcttgaaggcaccagttctactgttgcacgcaacattcctccttacaataccgctgcaacgactgcaaatgaagcttatcccttagaaaagatcattgaaaagggggattggagttttcttgaagatatttactggcttctgcaacaggaaactgaagcagcaactgaggcttaccctgtatttgtccgcaacagattgtacagattgcgagatatcaaggacgatatgaaaaagcagacggtttgtggtgctgcaacgcttctcacccatctggttaagttcaaggacagaaactcaatgaatggttacgattccgctaaagaccacaagatgccagacatcttccgtcaaaaattcaacagcatgttcaaggattctgaatcagataggatacctgttgacaagatcaaccttctgataagctacgttcttgtgctatcccttcacgtggataatttcatgaccgatccagaagacatagcaaaagatctgaggataagcacagttgagctgaggaaacattttctacagcttggctgcaaattcctgaagcagaattctactacggttgctaccttaccgacccctctcaatttcccggaggttaaccggaggcgcagggcacgaaagtgatgacgatctaggagaagattttgttctatctttacatattttctgctattttaatgatatttctttgacggtctgttgagatattataaattgttttagttcctaagacatctgtttcttgggtttaatgatatatgatgttttggcattt

SEQ ID NO: 77499 - protein, 442 aa, Arabidopsis thaliana
  peptide (1)..(442): Ceres Seq. ID no. 12576650
MEGEEKNDYRNEEEDFNTPQQLQKKQRKGKKIATETEDENEEDKRVTLKVTQVAERPDRISPIVAYFSTGYDPCKVDPKTGKRVHETPKVTVYKHKDDSKKRIQVVVSPPGARVEFVGTNYTGEQAAMQTNTYRVGVFNREAKTLRILPVAHNKIIRLEPRVKAQETNEEEASGSAVVKELEELKTGERDRYNTKKAVTRDKKKRALYMGDDAATQKVLDGKLSELGVNTAALEGTSSTVARNIPPYNTAATTANEAYPLEKIIEKGDWSFLEDIYWLLQQETEAATEAYPVFVRNRLYRLRDIKDDMKKQTVCGAATLLTHLVKFKDRNSMNGYDSAKDHKMPDIFRQKFNSMFKDSESDRIPVDKINLLISYVLVLSLHVDNFMTDPEDIAKDLRISTVELRKHFLQLGCKFLKQNSTTVATLPTPLNFPEVNRRRRARK

SEQ ID NO: 77500 - protein, 315 aa, Arabidopsis thaliana
  peptide (1)..(315): Ceres Seq. ID no. 12576651
MQTNTYRVGVFNREAKTLRILPVAHNKIIRLEPRVKAQETNEEEASGSAVVKELEELKTGERDRYNTKKAVTRDKKKRALYMGDDAATQKVLDGKLSELGVNTAALEGTSSTVARNIPPYNTAATTANEAYPLEKIIEKGDWSFLEDIYWLLQQETEAATEAYPVFVRNRLYRLRDIKDDMKKQTVCGAATLLTHLVKFKDRNSMNGYDSAKDHKMPDIFRQKFNSMFKDSESDRIPVDKINLLISYVLVLSLHVDNFMTDPEDIAKDLRISTVELRKHFLQLGCKFLKQNSTTVATLPTPLNFPEVNRRRRARK

SEQ ID NO: 77501 - protein, 234 aa, Arabidopsis thaliana
  peptide (1)..(234): Ceres Seq. ID no. 12576652
MGDDAATQKVLDGKLSELGVNTAALEGTSSTVARNIPPYNTAATTANEAYPLEKIIEKGDWSFLEDIYWLLQQETEAATEAYPVFVRNRLYRLRDIKDDMKKQTVCGAATLLTHLVKFKDRNSMNGYDSAKDHKMPDIFRQKFNSMFKDSESDRIPVDKINLLISYVLVLSLHVDNFMTDPEDIAKDLRISTVELRKHFLQLGCKFLKQNSTTVATLPTPLNFPEVNRRRRARK

SEQ ID NO: 77502 - DNA, 2122 bp, Arabidopsis thaliana
  misc_feature (1)..(2122): Ceres Seq. ID no. 12576653
  misc_feature (1)..(2122): Ortholog of  Ceres SEQ ID NO 13600595 as cited in SEQ ID NO 629
gtggccgtctctgataaaaaagacaaaggaaggaggcatcgatgtgatccaaacgtacgttttctggaacctccatgagcctaagcttggacagtatgattttagtggaagaaacgatttagtgaagtttattaaagaaattagatcacaaggtctctatgtctgtctacgtattggacccttcatcgaagccgagtggaattacgggggattgccattttggttacgggatgtacccggtatggtataccgaaccgacaatgagcccttcaagttccacatgcaaaaattcaccgctaagatcgtagatttgatgaaatctgagggcttatatgcttctcaaggaggtccaattattctttctcagatcgagaacgagtatgcaaacgtggagggggctttccatgagaaaggagcatcgtacatcaagtgggcaggtcaaatggcggtcgggcttaagaccggagtgccatggatcatgtgcaagtcgcccgacgctcctgatcccgtgatcaatacctgcaacgggatgaaatgcggcgagacttttcctggaccaaactcacccaataagccgaaaatgtggactgaggattggacttcattgtttatggaaaagagccttatattagatctgctgaggatattgctttccatgccgctcttttcgttgcaaaaaatggaagttacatcaactattacatgtaccatggtggaacaaactttggaaggacttcatcttcgtatttcattacaggatactatgatcaagctcctctcgacgaatacggtcttttaagacagcctaagtacggtcatttgaaggagcttcacgctgcgataaaatcctctgcaaatcctctgcttcaaggaaagcaaacgattctctccttgggaccaatgcaacaagcttatgtctttgaagacgcgaacaatggatgcgttgcgtttctggtaaacaatgacgctaaagccagtcaaatacaattcagaaacaatgcgtatagcttgagtcccaagtcaattggtattcttcagaactgcaaaaacctaatttatgaaactgcaaaagtgaatgtgaagatgaatacgagagttacaacgccggttcaagtgttcaacgttcccgataactggaatttgtttagagaaacaatccctgcattcccaggcacatctttgaagacaaatgctttgttggaacacactaatttgacaaaggacaaaactgattatctttggtacacttcaagctttaagctggattcaccctgcacgaacccgtctatctacacagaatcatcaggacatgttgtccacgtgttcgtcaacaatgcactagcaggatctggacatggaagcagagacataagggtagttaaactacaagctccggttagcttaatcaatggacaaaacaatatatcgatcctcagcggcatggttggtctaccggactctggagcttacatggagaggagatcttatggactaaccaaagtacaaattagctgtggcgggacaaaacccatcgatttgagtagatctcaatggggttactcggtgggtttgcttggagagaaagttaggttatatcaatggaagaatttaaatagagtgaagtggagtatgaataaagctggactaattaagaaccgccccctcgcttggtacaagacaacgtttgatgggccgaatggagatgggcccgtgggcctacacatgtcgagtatgggtaaaggagaaatttgggtgaatggtgaaagcattggtcgttattgggtctcgtttctcacccctgctggacaaccttctcaatctatatatcatattcctcgggcgttcttaaaaccatctggaaatttattggtggtatttgaagaggaaggtggtgatcctcttgggatatctttgaatacaatatcggttgttggttcgagtcaagctcaatctcaattctcctgaagattatttttttaaaaatggtttttgggtaattgggggtgttttataaaccaaacaatacattatattgaaatgatacaatacacaaattgaatgaaatatacaggtttcataaatcttagtgtcacatgtaaagaaacttcagatatatcagttt

SEQ ID NO: 77503 - protein, 420 aa, Arabidopsis thaliana
  peptide (1)..(420): Ceres Seq. ID no. 12576654
MYHGGTNFGRTSSSYFITGYYDQAPLDEYGLLRQPKYGHLKELHAAIKSSANPLLQGKQTILSLGPMQQAYVFEDANNGCVAFLVNNDAKASQIQFRNNAYSLSPKSIGILQNCKNLIYETAKVNVKMNTRVTTPVQVFNVPDNWNLFRETIPAFPGTSLKTNALLEHTNLTKDKTDYLWYTSSFKLDSPCTNPSIYTESSGHVVHVFVNNALAGSGHGSRDIRVVKLQAPVSLINGQNNISILSGMVGLPDSGAYMERRSYGLTKVQISCGGTKPIDLSRSQWGYSVGLLGEKVRLYQWKNLNRVKWSMNKAGLIKNRPLAWYKTTFDGPNGDGPVGLHMSSMGKGEIWVNGESIGRYWVSFLTPAGQPSQSIYHIPRAFLKPSGNLLVVFEEEGGDPLGISLNTISVVGSSQAQSQFS

SEQ ID NO: 77504 - protein, 354 aa, Arabidopsis thaliana
  peptide (1)..(354): Ceres Seq. ID no. 12576655
MQQAYVFEDANNGCVAFLVNNDAKASQIQFRNNAYSLSPKSIGILQNCKNLIYETAKVNVKMNTRVTTPVQVFNVPDNWNLFRETIPAFPGTSLKTNALLEHTNLTKDKTDYLWYTSSFKLDSPCTNPSIYTESSGHVVHVFVNNALAGSGHGSRDIRVVKLQAPVSLINGQNNISILSGMVGLPDSGAYMERRSYGLTKVQISCGGTKPIDLSRSQWGYSVGLLGEKVRLYQWKNLNRVKWSMNKAGLIKNRPLAWYKTTFDGPNGDGPVGLHMSSMGKGEIWVNGESIGRYWVSFLTPAGQPSQSIYHIPRAFLKPSGNLLVVFEEEGGDPLGISLNTISVVGSSQAQSQFS

SEQ ID NO: 77505 - protein, 293 aa, Arabidopsis thaliana
  peptide (1)..(293): Ceres Seq. ID no. 12576656
MNTRVTTPVQVFNVPDNWNLFRETIPAFPGTSLKTNALLEHTNLTKDKTDYLWYTSSFKLDSPCTNPSIYTESSGHVVHVFVNNALAGSGHGSRDIRVVKLQAPVSLINGQNNISILSGMVGLPDSGAYMERRSYGLTKVQISCGGTKPIDLSRSQWGYSVGLLGEKVRLYQWKNLNRVKWSMNKAGLIKNRPLAWYKTTFDGPNGDGPVGLHMSSMGKGEIWVNGESIGRYWVSFLTPAGQPSQSIYHIPRAFLKPSGNLLVVFEEEGGDPLGISLNTISVVGSSQAQSQFS

SEQ ID NO: 77506 - DNA, 806 bp, Arabidopsis thaliana
  misc_feature (1)..(806): Ceres Seq. ID no. 12576667
  misc_feature (1)..(806): Ortholog of  Ceres SEQ ID NO 13582073 as cited in SEQ ID NO 56218
ccacgcgtccgggttctctgactccgtcgtctctttctccgtcgccaccgttcctaaaacgtctcccgtctncttctaatggcgatcaatcgtagctccgatcatgaatccgacgaaaacacccgtctttaccatccttaccagaactaccaggtcccgatcaaatctcagtatctatacaagcttccgacttctccggaatttctattcacggaagagtctctcaagcagcgtcgatcatggggagaaaatctcactttctacacagggacgggttatctagccggctctgtagccggtgcttcagctgggatcttctctggtatcaagagtttcgaaaatggagacacgacgaagctgaaaatcaacaggattttgaattcgtctggtcaggcaggtcgtacttggggtaatagggttgggattgttgggttgatctacgcagggattgagagtggtgtggtggcggtaactgataaggacgatgtttggaccagtgttgtcgctggtctgggaactggagcggtctttagggcagcacgaggagtgagatctgcggctgtggctggtgcttttggcggaagtgcggctggtgcagttgtggcggggaagcaggttttcaagcggtatgctcacatatgaagaaccggagtgatctttagagccccacctatatgggaaaatcataaaaatcaaagctttttcgggtttctagggtagaattctggtttacattttagcgtatgttaacctgcgaacctttctttatagatataataataacaataataaaggttttacttttg

SEQ ID NO: 77507 - protein, 187 aa, Arabidopsis thaliana
  peptide (1)..(187): Ceres Seq. ID no. 12576668
MAINRSSDHESDENTRLYHPYQNYQVPIKSQYLYKLPTSPEFLFTEESLKQRRSWGENLTFYTGTGYLAGSVAGASAGIFSGIKSFENGDTTKLKINRILNSSGQAGRTWGNRVGIVGLIYAGIESGVVAVTDKDDVWTSVVAGLGTGAVFRAARGVRSAAVAGAFGGSAAGAVVAGKQVFKRYAHI

SEQ ID NO: 77508 - DNA, 2303 bp, Arabidopsis thaliana
  misc_feature (1)..(2303): Ceres Seq. ID no. 12576673
  misc_feature (1)..(2303): Ortholog of  Ceres SEQ ID NO 15177678 as cited in SEQ ID NO 0
ttttgtacgccattagattgaaccctaaaaactctattattggattggatcatcatcgttaaagctccacgccttgtcccaatttcctctttggttctttccttctggtaagaatccgctctctttctctctttcttttttcttcatatggtacgtcatcggcgacatcaattggctcgatttgattcacctgtagctatcaatcaatccctgatctgtttaggtttgatctcctctgttttttcctagggcttgttattgttgtttctcgaaaaagaagaagaagcgatggtattgggattttagggattattgcggtttgttgtatatatatatatagaagctgagggattttgtgttgtgaagaacatcgaatcctgtttttttccgtaagaaagttcttagatttctccaagtgaaagaagatgtcatcagctggtgttgcgttaagtccggttcgtagcgagccattgattatgcctctggttcgtgccaattcttgtcttgattcttatcctgacgacaccatcatgatttaccttacacttcctggatcggtgataccaatgcgagtgcttgagtctgattccattgagtctgttaagcttcggattcagtcttaccgcggctttgttgtgaggaatcagaagcttgttttcggtggtcgagagctagctagaagcaattctaatatgcgtgattatggtgttagtgaaggcaacattctccacttggttcttaagctctctgatcttcaggttcttgatgttaagactacctgtgggaaacactgcaggtttcatgtcgagagagggagaaacattgggtatgtgaagaagcagatttcgaaaaagcgtggagactttgttgatcctgatgaacaggagattctttacgaaggtgagaagttggaagaccagagtcttattaatgacatttgtagaaacgatgactcggttttgcatctgcttgtgcggagatctgctaaagttcgagttaagccggtggagaagaactttgagttgtctattgttgccccacaagcaaaagataagaagggtcgtgaagctaagagcattgtgccaccaaaaaagctttctttggagccggtagttgttaactccaaggctaaagtacctctggtggttaaagatatgattcagtctgcttctgatggacttaaaagtgggaattctccggtcaggtcaagcgaaggtacgggaggagcttatttcatgcagggtccatctggcaacaaatttgtgggtgtgtttaagccaatagatgaggaaccaatggctgagaacaatcctcagggtttaccactttcgccaaacggtgaaggtttgaagaaaggaacaaaggttggagaaggtgcattaagggaagtcgctgcatacattttggatcatcccaaaagtggaaacaaatctatgtttggtgaagagataggttttgctggtgtacctcccacagctatgattgaatgtttgcatccagggtttaaccatcccaaaggaatcaaaaccaagattggatcacttcagatgtttactgagaacgatggcagctgtgaagatatgggtccactttcatttccagtagaagaagttcataagatttctgtgttggatattagactggccaacgcagacagacatggtgggaacattttgatgaccaaggacgaaagcgggaagctcgttttggttcctatagaccatggatactgcttgcctgaaagctttgaagattgcacgtttgagtggctatattggccacaagcccggaaaccgtactctgcagagacccaagagtacataagatcactggacgcagaggaagatattgatctactaaagtttcatggatggaaaatgccggcagagacggctcaaacgctcagaatctcaacgatgctactgaagaaaggagtggaaagaggactaacagcatttgagattggaaccataatgtgcagagaaacacttagcaagaagtctctggtggaggaaatggtagaggaagctcaagaagctgtgcttccagggacgagcgaagctgcattcctcgaagccctatccgatgtgatggattaccatctcgatcactctcaggaacactaaaaatggttcttgtttaattcaaaactctggtatatactctttggtttgctttttataaacctgttggcttttgtatttttaaaactttttcatttctgtcattctttggacatgttcaaggtgttttgttaacttcactcagacatatttcatggtaatgacaatttaagtgtttac

SEQ ID NO: 77509 - protein, 566 aa, Arabidopsis thaliana; identical to SEQ ID NO: 44429
  peptide (1)..(566): Ceres Seq. ID no. 12576674

SEQ ID NO: 77510 - protein, 549 aa, Arabidopsis thaliana; identical to SEQ ID NO: 44430
  peptide (1)..(549): Ceres Seq. ID no. 12576675

SEQ ID NO: 77511 - protein, 531 aa, Arabidopsis thaliana; identical to SEQ ID NO: 44431
  peptide (1)..(531): Ceres Seq. ID no. 12576676

SEQ ID NO: 77512 - DNA, 2433 bp, Arabidopsis thaliana
  misc_feature (1)..(2433): Ceres Seq. ID no. 12576688
  misc_feature (1)..(2433): Ortholog of  Ceres SEQ ID NO 15226371 as cited in SEQ ID NO 0
ctctcctcttcttcggatcgtcttttactttgtgaacgatggaccaacaaccggagaggcgagaaggccggagttttccggagcgtaaaggacagaagcggaagctagaggaaggagccgccgccgtagaagatcgagagatctctgccgtcagcaccgacggaggccaagcgcttcttagcgaggttgctgctcaagtctcggtactaaactctgccttctcttggcaagagtccgatcgcgctgctgccaagcgagccactcaagttctggctgagctagccaaaaacgaggatttagtgaacgtgattgtcgacggaggtgctgttccagctcttatgacgcatctacaggcgccaccatacaacgacggggacttggctgagaagccgtacgaacacgaagttgagaagggaagcgcttttgcgcttggtcttcttgctattaagccagagtatcagaaactgatagtagacaaaggtgccttacctcatttagtgaatttgttgaagagaaacaaagatggttctagctctcgagctgtgaatagtgttatcagaagagcggctgatgccatcaccaatcttgctcatgagaacagcagtatcaagacccgtgttagggtagaaggcggtattccacctctcgtggagttgcttgaattttctgattcaaaggtccagagagcagcagcaggggcattgagaacccttgcatttaaaaatgatgataacaagaatcagatagttgaatgcaatgctcttcccacacttattctaatgctaggatcagaggatgctgctatacattatgaagcggttggagttataggcaatctagtacactcgtctccacacattaaaaaagaggttcttactgccggggcgttgcaacctgtcattggtcttcttagctcctgttgccctgagagtcaaagagaggcggctttattacttgggcagtttgcctcaactgattctgattgtaaggtgcacattgtgcaaaggggtgctgtccgtcctttaattgagatgcttcagtccccggatgtccagttgaaggaaatgtcggcctttgcactgggtagattggcacaggatgcccacaatcaagctggtattgcccatagtggtggtttaggacctttattgaagcttctcgattcaagaaatggatcattgcaacacaatgctgcatttgctctttatggccttgccgataatgaggataatgtgtcagattttatcagggtgggaggtatccaaaagctacaggatggagagtttattgttcaagcaactaaagattgtgtttccaaaacactaaagagattggaggagaagattcatggaagagttctgagacatctgttgtacctaatgcgcatttcagagaagtctatccaaagacgagttgctcttgcccttgctcatctctgttcacccgaggatcaacgaaccatattcatagatgacaacgggttggagttgctactcggtcttcttggttctttaaacactaagcagcaacttgacggtgcagcagcgttgtacaaattagcaaataaatctatggcactttctccagttgatgctgctcctccttctccaacacaaagggtttatctcggagagcaatatgtaaataatgctacgctgtctgatgtaacctttctagtcgaaggaaggacattctatgcacacagaatttgtctgctggcatcctcagatgcatttcgtgcaatgtttgatggtggttacagagaaaaagacgctagagatattgagattccaaatatcaaatgggaggtgtttgagttaatgatgaggtttatatacactggatctgtcgacataacaaatgagatatcaaaagatcttctaagagcagcggatcagtatctcttggagggcctgaaacgactctgtgaatacacaattgctcaggatattacgttggaaagtataggagacatgtacgagctatcagaagcattccatgcgatgtcgctgaggcaagcttgtatcatgttcatcctggagcatttcgataaactgagttcaatgccttggcagaacgagctggtgcagagaacaataccagagataagagagtacttttgtagagccctaacaaagtctactacaaacctgcaaagcttgaggttgtagaatgcggaagaagaagactgcacttaactagaggtaagtagacaaggaattatatagagagaaagagagagagagatcaagagccgccattagaggtctttatcgtcctgtactgggttgtcttagttatttgctgtgctttttggttcgttttggtcattttgtattgtattaattaatctcctctgatcacaatcggtcttgaatgaaatcgctaccctttgtatccaaaaataccattgtggtataacttccactattc

SEQ ID NO: 77513 - protein, 710 aa, Arabidopsis thaliana
  peptide (1)..(710): Ceres Seq. ID no. 12576689
MDQQPERREGRSFPERKGQKRKLEEGAAAVEDREISAVSTDGGQALLSEVAAQVSVLNSAFSWQESDRAAAKRATQVLAELAKNEDLVNVIVDGGAVPALMTHLQAPPYNDGDLAEKPYEHEVEKGSAFALGLLAIKPEYQKLIVDKGALPHLVNLLKRNKDGSSSRAVNSVIRRAADAITNLAHENSSIKTRVRVEGGIPPLVELLEFSDSKVQRAAAGALRTLAFKNDDNKNQIVECNALPTLILMLGSEDAAIHYEAVGVIGNLVHSSPHIKKEVLTAGALQPVIGLLSSCCPESQREAALLLGQFASTDSDCKVHIVQRGAVRPLIEMLQSPDVQLKEMSAFALGRLAQDAHNQAGIAHSGGLGPLLKLLDSRNGSLQHNAAFALYGLADNEDNVSDFIRVGGIQKLQDGEFIVQATKDCVSKTLKRLEEKIHGRVLRHLLYLMRISEKSIQRRVALALAHLCSPEDQRTIFIDDNGLELLLGLLGSLNTKQQLDGAAALYKLANKSMALSPVDAAPPSPTQRVYLGEQYVNNATLSDVTFLVEGRTFYAHRICLLASSDAFRAMFDGGYREKDARDIEIPNIKWEVFELMMRFIYTGSVDITNEISKDLLRAADQYLLEGLKRLCEYTIAQDITLESIGDMYELSEAFHAMSLRQACIMFILEHFDKLSSMPWQNELVQRTIPEIREYFCRALTKSTTNLQSLRL

SEQ ID NO: 77514 - protein, 610 aa, Arabidopsis thaliana
  peptide (1)..(610): Ceres Seq. ID no. 12576690
MTHLQAPPYNDGDLAEKPYEHEVEKGSAFALGLLAIKPEYQKLIVDKGALPHLVNLLKRNKDGSSSRAVNSVIRRAADAITNLAHENSSIKTRVRVEGGIPPLVELLEFSDSKVQRAAAGALRTLAFKNDDNKNQIVECNALPTLILMLGSEDAAIHYEAVGVIGNLVHSSPHIKKEVLTAGALQPVIGLLSSCCPESQREAALLLGQFASTDSDCKVHIVQRGAVRPLIEMLQSPDVQLKEMSAFALGRLAQDAHNQAGIAHSGGLGPLLKLLDSRNGSLQHNAAFALYGLADNEDNVSDFIRVGGIQKLQDGEFIVQATKDCVSKTLKRLEEKIHGRVLRHLLYLMRISEKSIQRRVALALAHLCSPEDQRTIFIDDNGLELLLGLLGSLNTKQQLDGAAALYKLANKSMALSPVDAAPPSPTQRVYLGEQYVNNATLSDVTFLVEGRTFYAHRICLLASSDAFRAMFDGGYREKDARDIEIPNIKWEVFELMMRFIYTGSVDITNEISKDLLRAADQYLLEGLKRLCEYTIAQDITLESIGDMYELSEAFHAMSLRQACIMFILEHFDKLSSMPWQNELVQRTIPEIREYFCRALTKSTTNLQSLRL

SEQ ID NO: 77515 - protein, 463 aa, Arabidopsis thaliana
  peptide (1)..(463): Ceres Seq. ID no. 12576691
MLGSEDAAIHYEAVGVIGNLVHSSPHIKKEVLTAGALQPVIGLLSSCCPESQREAALLLGQFASTDSDCKVHIVQRGAVRPLIEMLQSPDVQLKEMSAFALGRLAQDAHNQAGIAHSGGLGPLLKLLDSRNGSLQHNAAFALYGLADNEDNVSDFIRVGGIQKLQDGEFIVQATKDCVSKTLKRLEEKIHGRVLRHLLYLMRISEKSIQRRVALALAHLCSPEDQRTIFIDDNGLELLLGLLGSLNTKQQLDGAAALYKLANKSMALSPVDAAPPSPTQRVYLGEQYVNNATLSDVTFLVEGRTFYAHRICLLASSDAFRAMFDGGYREKDARDIEIPNIKWEVFELMMRFIYTGSVDITNEISKDLLRAADQYLLEGLKRLCEYTIAQDITLESIGDMYELSEAFHAMSLRQACIMFILEHFDKLSSMPWQNELVQRTIPEIREYFCRALTKSTTNLQSLRL

SEQ ID NO: 77516 - DNA, 2120 bp, Arabidopsis thaliana
  misc_feature (1)..(2120): Ceres Seq. ID no. 12576716
  misc_feature (1)..(2120): Ortholog of  Ceres SEQ ID NO 12556893 as cited in SEQ ID NO 30
  misc_feature (1)..(2120): Ortholog of  Ceres SEQ ID NO 13584538 as cited in SEQ ID NO 64739
aaaaaaaaaaaaaaatccaaattcaacactctcacacttcgatatctccgccttcattctcctcagagccaactgtcctgagatttcgatttcgatttctccgatctctcttcctccgtcgccggcgaaaccatgtctcagtctattcaattctccactccttcacacactcctcaccttctccatctccctcactcacaattcaaccgtcctctctcctctatctccttccgtcgcttccctctaacaaccatcaaatacacttccatcagagcctcctcgtcatcatctccttcaccggatctcgattcatcgtcctcatcatcatcctcgcaagtacttctctcacctaacggtactggtgctgtgaagtctgatgagagatccgttgtcgctacggcggttacgactgatacgtctgggattgaggttgatactgtgacggaagctgagcttaaggagaatggatttagaagtacgaggaggacgaagctgatctgtacgatcggaccggcgacttgtggatttgagcagcttgaggcgcttgctgtgggaggtatgaatgtggcaaggcttaatatgtgtcacggtacgcgtgattggcaccgcggtgtgattcgtagtgttcggaggcttaatgaggagaaaggctttgcggttgctattatgatggatactgaaggtagtgagattcatatgggagatcttggtggtgaagcttcagctaaagcagaggatggtgaggtttggactttcactgttagagcttttgattcttctcgtcctgaacgtaccattagtgttagctacgatggtttcgctgaagatgtaagagttggggatgaacttttggttgatggtgggatggtgagatttgaagtgattgagaagattggtcctgatgttaagtgtctatgtaccgatcctggattgttgcttcctcgagctaacttgacgttttggagagatggaagtcttgtacgagagcgtaatgccatgcttccaacaatttcttccaaggactggttggatattgattttggaattgctgaaggtgtggatttcattgctgtatcgtttgtcaagtcggctgaagtcattaatcaccttaaaagttatcttgctgctcgttcccgtggaggggaaattggagtgattgcaaagatcgagagtatcgattcactgaccaatttggaagaaattattctagcatcagatggggccatggttgcaagaggagatctgggagctcagatacctcttgagcaagttccagcagctcaacagagaatcgtccaagtatgcagagctcttaacaaacccgtcattgtcgcttcacagctattggagtccatgattgagtacccaactccaaccagagcagaagttgccgacgtgtctgaagcagtaagacaaagatcagatgcattgatgctctctggagaatcagctatgggacaattcccagacaaggcgctcacggttctaaggactgtcagtttaagaatcgagagatggtggagggaagagaaacgccatgagtctgtaccgcttcaagccataggctcttcattttcagacaaaatctcagaagagatctgtaactcagctgctaaaatggctaacaatcttggagtggacgcggttttcgtttacacaacgagcggacacatggcatcactggtctcccgatgtcgcccggactgcccgatctttgctttcacaaccacaacctcagtgagaagacgcttaaacctacaatggggacttatcccattccgtctcagcttctcagacgacatggaaagcaacttgaacaaaacattctcgttactgaaatcaagaggtatgatcaaatctggtgacctcgtgatcgcagtctcggacatgctgcaatcaatccaggtaatgaacgtcccgtaattctctctctttatacaatttcgcaatcccgcaaaagagtgttttgtttcctacttttgttactgtttttagactactcttacattagattccagaggcatcatcatcttcggtttgttaacaacagtaatgtgtaagctttgtttgtagtgtgtactgtttgtttttggttttcaataatatcagtaatcttattc

SEQ ID NO: 77517 - protein, 596 aa, Arabidopsis thaliana; identical to SEQ ID NO: 29225
  peptide (1)..(596): Ceres Seq. ID no. 12576717

SEQ ID NO: 77518 - protein, 454 aa, Arabidopsis thaliana; identical to SEQ ID NO: 29226
  peptide (1)..(454): Ceres Seq. ID no. 12576718

SEQ ID NO: 77519 - protein, 447 aa, Arabidopsis thaliana; identical to SEQ ID NO: 29227
  peptide (1)..(447): Ceres Seq. ID no. 12576719

SEQ ID NO: 77520 - DNA, 1072 bp, Arabidopsis thaliana
  misc_feature (1)..(1072): Ceres Seq. ID no. 12576740
  misc_feature (1)..(1072): Ortholog of  Ceres SEQ ID NO 13594430 as cited in SEQ ID NO 60181
  misc_feature (1)..(1072): Ortholog of  Ceres SEQ ID NO 13597809 as cited in SEQ ID NO 64598
  misc_feature (1)..(1072): Ortholog of  Ceres SEQ ID NO 12617960 as cited in SEQ ID NO 69051
  misc_feature (1)..(1072): Ortholog of  Ceres SEQ ID NO 13589401 as cited in SEQ ID NO 0
  misc_feature (1)..(1072): Ortholog of  Ceres SEQ ID NO 15179361 as cited in SEQ ID NO 0
acacgcttttattcgtcacagtctcctcccacactcttcaatcagtaaagagttttaggtttttttttcttcttctcggaggtttgtagaatcaacaaaaatggtggaagaccacaagcacgaggaatcgatcttggagaagattgttgagaagatccatggccacggtgactcgtcttctctgtccgattccgacgacgataagaaatctacatcgtcttcgtcgtcgtccttcaagtcaaagatttaccgacttttcggaagggagaaacctgttcacaaggttctcggtggtggaaaacctgctgatatattcctttggaggaacaagaaggtatctggtggagtcttgggtgctgtaactgcgtcttgggtcttattcgagttattcgaataccatctcctcgcttttctctgtcactttgcgatttttgctcttgcagcattgttcttgtggtctaatgcttgtacattcatccacaagtcaactcctcacatcccggaagttcacatccctgaagatcctattcttcaacttgtttctggattaaggattgaaatcaatcgtggtttgacccttcttaggaacattgcatcaggaaaagatgtcaagaaatttatcctggtaattgctggcttgtgggttttgtccattattggcagctgctacaacttcttgacattgttctacactgctactgtccttctcttcaccattcctgtactctacgagaagtatgaggacaaagtagatgcctatggggagaaggcgatgagggagatcaaaaagcaatatgcagtacttgatgagaaggtattgcgtaaggtcataagcaagattccaagaggagctctgaacaagaagaaggattaaggaatgtgagttactctctcattggaatcgtagtaatggttcaagacatgttttgttagaagctgttggttgataaaccctttgatctcttgttattattatgttcattataaatttgggggttttaactaaaaatatttagattatgagagaacacggatggatgataattattgttgttagttatttgtcttagtt

SEQ ID NO: 77521 - protein, 257 aa, Arabidopsis thaliana; identical to SEQ ID NO: 28439
  peptide (1)..(257): Ceres Seq. ID no. 12576741

SEQ ID NO: 77522 - DNA, 1819 bp, Arabidopsis thaliana
  misc_feature (1)..(1819): Ceres Seq. ID no. 12576742
  misc_feature (1)..(1819): Ortholog of  Ceres SEQ ID NO 14311001 as cited in SEQ ID NO 53717
  misc_feature (1)..(1819): Ortholog of  Ceres SEQ ID NO 14314945 as cited in SEQ ID NO 58031
  misc_feature (1)..(1819): Ortholog of  Ceres SEQ ID NO 13595833 as cited in SEQ ID NO 59877
  misc_feature (1)..(1819): Ortholog of  Ceres SEQ ID NO 13654452 as cited in SEQ ID NO 65792
  misc_feature (1)..(1819): Ortholog of  Ceres SEQ ID NO 13573778 as cited in SEQ ID NO 0
gttgtaagaatcgaattctctccttccctcatctcatctcctacctagatctctctcttctcttcctctcatttccttctcccttactaaatttccttctctaatctctactttgtccaaaagcatttaactttaaccggaaaaatcttacatttttttcctcctggatctctctctctatatctgcagattcacactacagctgatttagatctatttcgtaagtgggtctttcaaagtcgtctcctttgatctactttgattcaggggtcgttgatttggtgataagtcagtagaaatggataaggagaaatctccagcacctccttgtggaggtcttcctcctccatctccatcaggtcgatgctctgcattctcagaagctggtcccattggtcatggttcagatgctaatcgaatgagtcatgatattagccgtatgcttgataacccacctaagaagattggacatcggcgagctcattctgaaatacttactctccctgatgatttgagctttgatagtgatcttggtgtggttggtaatgctgctgatggagcttctttctctgatgagactgaagaagatttgctctctatgtatcttgatatggataagtttaattcttctgctacatcttctgcccaagttggtgagccatcaggaactgcttggaaaaatgagacaatgatgcagacaggcacaggctcaacttccaatcctcagaatacggttaatagtcttggcgaaaggccaagaatcaggcatcaacatagccaatctatggatggttcaatgaatatcaatgagatgcttatgtcgggaaatgaagatgattctgctattgatgctaagaagtctatgtctgctactaaacttgctgagcttgctctcattgatcctaaacgtgctaagaggatatgggcaaacaggcagtccgcagcacgatcaaaagaaaggaagacgagatacatatttgagcttgagagaaaagtacagactttgcaaacagaggctacaactctctcagcccagttgaccctcttacagagagacacaaatggcttgactgttgaaaacaatgagctgaagctgcggttacaaacaatggagcagcaggttcacttgcaggatgaactaaacgaagcactaaaggaggaaatccagcatctgaaggtgttgactggccaagttgctccatcagcgttgaactatgggtcgtttggatcaaaccagcagcaattctattccaacaatcagtcaatgcaaacaatcttagctgcaaaacagttccagcaacttcagattcattcacagaagcagcaacaacaacaacaacaacaacaacagcaacaccaacagcagcagcagcaacagcaacagtatcagtttcaacagcaacagatgcaacagcttatgcagcagcggcttcaacagcaagaacaacaaaatggagtaagactcaagccttcacaagcccagaaagagaactgaggaatatgaatatgtcccacggtattggcgttttggtacgtagaagaaaccttttggtaaggtcattgaagataaacatttgggtaagcccaaagaaacagagttccgtgcattgcaaatatgcaatgcactgcaattattagttgtttggatttgatatagagactgagtctcgaaaccatagtatgtaaaaatataatcacgttcaaaagctgttaatttgttataatcttataacaattgtgttttaagatacaaacctactttgtgttatgatatttgttcactattggttttggtatatatccaaatcatttttcaggg

SEQ ID NO: 77523 - protein, 398 aa, Arabidopsis thaliana; identical to SEQ ID NO: 40516
  peptide (1)..(398): Ceres Seq. ID no. 12576743

SEQ ID NO: 77524 - protein, 358 aa, Arabidopsis thaliana; identical to SEQ ID NO: 40517
  peptide (1)..(358): Ceres Seq. ID no. 12576744

SEQ ID NO: 77525 - protein, 351 aa, Arabidopsis thaliana; identical to SEQ ID NO: 40518
  peptide (1)..(351): Ceres Seq. ID no. 12576745

SEQ ID NO: 77526 - DNA, 1583 bp, Arabidopsis thaliana
  misc_feature (1)..(1583): Ceres Seq. ID no. 12576746
  misc_feature (1)..(1583): Ortholog of  Ceres SEQ ID NO 14314464 as cited in SEQ ID NO 52405
  misc_feature (1)..(1583): Ortholog of  Ceres SEQ ID NO 15177592 as cited in SEQ ID NO 58436
  misc_feature (1)..(1583): Ortholog of  Ceres SEQ ID NO 13655251 as cited in SEQ ID NO 62888
  misc_feature (1)..(1583): Ortholog of  Ceres SEQ ID NO 13597194 as cited in SEQ ID NO 63661
  misc_feature (1)..(1583): Ortholog of  Ceres SEQ ID NO 14302883 as cited in SEQ ID NO 66384
  misc_feature (1)..(1583): Ortholog of  Ceres SEQ ID NO 13662855 as cited in SEQ ID NO 69059
ccaatacatggatccattttgacgtcatctttatcactatctctctattatataaatctcttcgtacccttttaccgattcttcaccgtgatcgcttaatcagacctcaatttcgttgttaaagaacaaagctttaagcagccatggatccaaaccaacgtatcgcgagaatctctgctcatctcaatcctcctaatcttcataatcagattgctgacgggtcaggtttgaatcgggtggcttgtcgggcaaaaggtggatcacccggattcaaagtggcgatacttggagcagctggtggaattggacaacctcttgcgatgttgatgaagatgaatcctttggtttcggttcttcatctctatgatgttgctaatgctcctggtgttactgctgatattagtcatatggatactagtgccgttgttcgtggatttctcgggcagccgcagttagaggaagcacttacgggtatggatttagtgatcatacctgctggtgttccgaggaaaccagggatgacgagggatgatctgtttaacattaatgctgggattgtgaggacactctctgaagctatagctaaatgttgtcctaaagcaattgtgaatataatcagtaatccggtgaactccacggtgccaatcgcagctgaggttttcaagaaagctggaacctttgatccaaagaaactcatgggtgtcactatgcttgatgttgttagagctaatacctttgtggcggaagtaatgagtcttgatccccgtgaagttgaagttccggttgttggaggacacgcaggagttacgattttaccactgctttcgcaggtgaaacctccttgctcgttcactcaaaaagagattgaatatctcacagaccgcatccaaaacggtggcactgaagttgttgaggctaaagctggagcaggttctgcaacactatccatggcatatgcagcagtggagtttgcagatgcttgcctcaggggtctacgaggtgatgcaaacatcgttgagtgcgcatatgtggcatcccatgtgactgagcttcccttcttcgcatcgaaggtgcgtctgggacgatgtgggatcgatgaagtgtacggccttggaccattgaacgaatatgagaggatgggattagagaaggcaaagaaagagctttcagtaagtattcataaaggtgttacctttgcgaagaaataaagagactcgatcgtgaataaacacacttaagcgatggttttggaatagtcagagttttggaataagaataatgcctcacaataaaagctcttgcggtcttcttggatccaatcttaaaggttcaagaaactcatctcctttaggtaaaatcttcgattgttttatcgttccatcgaaccactttgttcttagatacaagaacgtttatgatttatgtagttgggctataaaagtgagaacagagcaataatcttgcaacattttttctcatcttcttggtgtgttttttttttgttggttttcatctttttgttcttgctcatgagagcatctttagaaggctattgttgggaagtaaataagtttgcatcgcgg

SEQ ID NO: 77527 - protein, 354 aa, Arabidopsis thaliana
  peptide (1)..(354): Ceres Seq. ID no. 12576747
MDPNQRIARISAHLNPPNLHNQIADGSGLNRVACRAKGGSPGFKVAILGAAGGIGQPLAMLMKMNPLVSVLHLYDVANAPGVTADISHMDTSAVVRGFLGQPQLEEALTGMDLVIIPAGVPRKPGMTRDDLFNINAGIVRTLSEAIAKCCPKAIVNIISNPVNSTVPIAAEVFKKAGTFDPKKLMGVTMLDVVRANTFVAEVMSLDPREVEVPVVGGHAGVTILPLLSQVKPPCSFTQKEIEYLTDRIQNGGTEVVEAKAGAGSATLSMAYAAVEFADACLRGLRGDANIVECAYVASHVTELPFFASKVRLGRCGIDEVYGLGPLNEYERMGLEKAKKELSVSIHKGVTFAKK

SEQ ID NO: 77528 - protein, 295 aa, Arabidopsis thaliana
  peptide (1)..(295): Ceres Seq. ID no. 12576748
MLMKMNPLVSVLHLYDVANAPGVTADISHMDTSAVVRGFLGQPQLEEALTGMDLVIIPAGVPRKPGMTRDDLFNINAGIVRTLSEAIAKCCPKAIVNIISNPVNSTVPIAAEVFKKAGTFDPKKLMGVTMLDVVRANTFVAEVMSLDPREVEVPVVGGHAGVTILPLLSQVKPPCSFTQKEIEYLTDRIQNGGTEVVEAKAGAGSATLSMAYAAVEFADACLRGLRGDANIVECAYVASHVTELPFFASKVRLGRCGIDEVYGLGPLNEYERMGLEKAKKELSVSIHKGVTFAKK

SEQ ID NO: 77529 - protein, 293 aa, Arabidopsis thaliana
  peptide (1)..(293): Ceres Seq. ID no. 12576749
MKMNPLVSVLHLYDVANAPGVTADISHMDTSAVVRGFLGQPQLEEALTGMDLVIIPAGVPRKPGMTRDDLFNINAGIVRTLSEAIAKCCPKAIVNIISNPVNSTVPIAAEVFKKAGTFDPKKLMGVTMLDVVRANTFVAEVMSLDPREVEVPVVGGHAGVTILPLLSQVKPPCSFTQKEIEYLTDRIQNGGTEVVEAKAGAGSATLSMAYAAVEFADACLRGLRGDANIVECAYVASHVTELPFFASKVRLGRCGIDEVYGLGPLNEYERMGLEKAKKELSVSIHKGVTFAKK

SEQ ID NO: 77530 - DNA, 1463 bp, Arabidopsis thaliana
  misc_feature (1)..(1463): Ceres Seq. ID no. 12576754
  misc_feature (1)..(1463): Ortholog of  Ceres SEQ ID NO 13596554 as cited in SEQ ID NO 62818
gattcttacggttctgtttttttttttgtttaaagttttgtaattttcagtgagttcttagctgaaaagtgtcgattttgggggtacccacccacgagatttgattagtttccctagttttgtgaaagattgaatctgatgacaggcacgccaagtgcatccagataaaaaccctaatgatcctcaggctgctcataatttccaggtattgggagaggcctaccaagtgctaagtgatccagggcaacgtcaggcctatgacacatctgggaagtcagggatttcaactgagatcattgatcctgcggctatatttgctatgctttttgggagtgaactctttgaagaatacatagggcagcttgctatggcatcaatggcttcacttgatatcttcactgaaggggatcagattgatactaaaaagattatagaaaaaatgagggctgttcagaaagaaagagaagacaaacttgctcagattcttaaggaccgcctcaacctatatatgacgaacaaagatgaatttactagcaatgctgaagctgaagtaacaagactctcaaatgcagcatacggggtggaaatgttgaacacaatcggatatatatatgtcagacaagcggcaaaagagcttgggaagaaagctatttatctcggtgtgccattcgtagctgaatggtttaggacgaaaggtcacttcatcaaatcccaagtaacagctgcaacaggtgcatacgctttattccagctgcaagaggaaatgaaaaggcaactaagtgctgaaggcaattataccgagaaggaacttgaagagtacatgaagacccataagaaagtaatgattgattctctgtggaagctcaatgttgctgatatcgaaagcactatctcccgtgtttgtgagcaggtacttcaagatcccactgccaagagagaggagcttcgtgcaagggccaaggggttaaaaactctgggaaagatcttccagaagaacaagatagccagtgagagtgatcctttagtaagagccgaacttcacaaactaaacggaaatggtcaagaacatgatcattcatccacatcaccaaaatctgatgaagcatctcgctctaccgttggacctcaggaaccgcaaagcccttatgtggaagcaccgaaacttggagaagagcaaatcaactattacttcccaaggcctgcgccgcctccaggagcacagagacactcttaaactggcaatggattgattcacagatgaacgaaaaggttattttttcctttttttgctatataatataagtctttatgcatatttgatatatttgcaggcgttggtattaccattatgtaatttttattattgttagaagaagaaattattggatctttgaaaaaagcacatgttatctcatcttagacaatgtataatgtttttattctatttatatatttgatgtttg

SEQ ID NO: 77531 - protein, 304 aa, Arabidopsis thaliana; identical to SEQ ID NO: 24956
  peptide (1)..(304): Ceres Seq. ID no. 12576755

SEQ ID NO: 77532 - protein, 288 aa, Arabidopsis thaliana; identical to SEQ ID NO: 24957
  peptide (1)..(288): Ceres Seq. ID no. 12576756

SEQ ID NO: 77533 - protein, 285 aa, Arabidopsis thaliana
  peptide (1)..(285): Ceres Seq. ID no. 12576757
MASLDIFTEGDQIDTKKIIEKMRAVQKEREDKLAQILKDRLNLYMTNKDEFTSNAEAEVTRLSNAAYGVEMLNTIGYIYVRQAAKELGKKAIYLGVPFVAEWFRTKGHFIKSQVTAATGAYALFQLQEEMKRQLSAEGNYTEKELEEYMKTHKKVMIDSLWKLNVADIESTISRVCEQVLQDPTAKREELRARAKGLKTLGKIFQKNKIASESDPLVRAELHKLNGNGQEHDHSSTSPKSDEASRSTVGPQEPQSPYVEAPKLGEEQINYYFPRPAPPPGAQRHS

SEQ ID NO: 77534 - DNA, 1569 bp, Arabidopsis thaliana
  misc_feature (1)..(1569): Ceres Seq. ID no. 12576762
  misc_feature (1)..(1569): Ortholog of  Ceres SEQ ID NO 14308061 as cited in SEQ ID NO 55155
  misc_feature (1)..(1569): Ortholog of  Ceres SEQ ID NO 13654238 as cited in SEQ ID NO 67874
ggtgaaaggcgaggagatataggggagagagaatcccattcccatattcagagcacaaacaaaaaagcttcaatttttggggacaaagtttttatcttttcgttgtttggaatttgggggaggaagaaggaaaggtgtaaggatagggtcgtgcgtgtcaacgagaggtgctgctggacgtgaagcctcctcctccgcatcggcgaggaggcttccgtcgcagcaccacctcagcggtagccttagctcttctggctacggcggagaaccgtcggatcaatctgatatcggcggtgcgaagatgaaagggcttttcaagtctaagccacgcactcctgctgaccttgttcgacaaacccgcgatctccttctcttctccgatcgatctacctctttgcctgacctccgagattccaaacgcgacgaaaagatggcggaattaagccggaatatccgtgacatgaagtcgattctctacgggaacagcgaagcagagcctgtggcagaagcttgtgcacagttgactcaagaattctttaaagaggatactctacgtctcttgattacttgtctccctaaacttaacttggagacgaggaaagatgctacacaagttgttgcaaatctacagaggcaacaggttaattcacggttgattgcttctgattatttagaagccaacattgatctcatggatgttttgattgaaggcttcgagaacacagacatggctttacactatggtgctatgtttagggagtgtatccgtcatcagattgtggctaaatatgttttggagtctgaccatgtgaagaaattctttgattacatacagcttccaaatttcgacattgctgccgatgctgctgctacttttaaggaactgctgacaaggcataagtctactgttgccgagtttctcaccaagaatgaagactggtttttcgcagactacaactcaaagcttcttgaatcaagtaattatataaccagacggcaagctattaagttgttgggtgatatattattggatcgatcaaattcagctgtgatgacgaaatatgtgagctcgagggataacttgaggattctcatgaatcttctaagagagtcaagcaagagtatccaaatagaagcattccatgtctttaagctgtttgcagcgaaccaaaacaagcctgcggatatagtcaacattctggtggccaacagaagcaagcttctgagattgttggctgatttgaaaccagacaaagaggatgagaggtttgaagcagacaaaagtcaggttttgagagaaatcgcagcccttgaacctcgagatcttgcttgaaccaactaatgcaattcatccttccttcccttttaaaacactcgaaaagacatttttgaagcatcttgttgtttttttacattaggtaaccaatcttcctctcactttctcaccacacacacacacacacacacacacacacacacacatacacatacgagatatctattcgatatatgtattcatatgtacactacttcactgtcgatgaaataaaatggtttgtcaaaagctca

SEQ ID NO: 77535 - protein, 343 aa, Arabidopsis thaliana
  peptide (1)..(343): Ceres Seq. ID no. 12576763
MKGLFKSKPRTPADLVRQTRDLLLFSDRSTSLPDLRDSKRDEKMAELSRNIRDMKSILYGNSEAEPVAEACAQLTQEFFKEDTLRLLITCLPKLNLETRKDATQVVANLQRQQVNSRLIASDYLEANIDLMDVLIEGFENTDMALHYGAMFRECIRHQIVAKYVLESDHVKKFFDYIQLPNFDIAADAAATFKELLTRHKSTVAEFLTKNEDWFFADYNSKLLESSNYITRRQAIKLLGDILLDRSNSAVMTKYVSSRDNLRILMNLLRESSKSIQIEAFHVFKLFAANQNKPADIVNILVANRSKLLRLLADLKPDKEDERFEADKSQVLREIAALEPRDLA

SEQ ID NO: 77536 - protein, 300 aa, Arabidopsis thaliana; identical to SEQ ID NO: 27829
  peptide (1)..(300): Ceres Seq. ID no. 12576764

SEQ ID NO: 77537 - protein, 290 aa, Arabidopsis thaliana; identical to SEQ ID NO: 27830
  peptide (1)..(290): Ceres Seq. ID no. 12576765

SEQ ID NO: 77538 - DNA, 2540 bp, Arabidopsis thaliana
  misc_feature (1)..(2540): Ceres Seq. ID no. 12576770
  misc_feature (1)..(2540): Ortholog of  Ceres SEQ ID NO 13663060 as cited in SEQ ID NO 60964
  misc_feature (1)..(2540): Ortholog of  Ceres SEQ ID NO 13598532 as cited in SEQ ID NO 65204
  misc_feature (1)..(2540): Ortholog of  Ceres SEQ ID NO 13656849 as cited in SEQ ID NO 65764
  misc_feature (1)..(2540): Ortholog of  Ceres SEQ ID NO 13656501 as cited in SEQ ID NO 69206
aatccaatctacttttatttttgcgtacatctctctccatcttccattaaagtcttaccctttcttcatcacttgctcttgaaattttctctcccaaaaaagattcaaattcttcatcaagatcgttgttttctctgaaagttgttgcctttttgctatggagggatggtgttgggtctcgctgagccattaaagttgttgtctttgttatggatgaattagggattaggattttgagctgttgttgttgttgattcttctctatcgaaaagaagttgttatgggttgcataatctctaagaagaagtctccaaagaggaatccaccatggaaagaaacattagagaagcgttcttcaaggatcaattcgtcgaggattgatgattctagccaaactaaagaggaacaagataggtcgaataaagttaggttgattgaatctgaaaagtttagttcaagtaggttttctgagaaacatcaggagattgctgagattggtgatactgatgaagatgaagatgatgatcatcatccacctgaggagttgaagagagagcctagtgttgtgattcctccaagtcctgaaaccgtttcaaaggaggctgaattggctgctggatggcctgcttggctagtctcagtggctggtgaggcacttgtgaattggactccacgacgtgctagtacctttgagaaattggagaaaattggccaaggtacatatagcagtgtatacaaggctcgtgatcttactaataacaagattgttgcactcaaaagagtccggtttgatcttagcgatttagagagtgttaagtttatggcgagagagattattgtaatgagaaggcttgatcatcctaatgtacttaagttagaagggttgatcactgcctctgtttcatcttctctgtacttggtttttgagtatatggatcatgatctcgtcggacttgcttccatacctggtatcaagttttcagagcctcaggttaaatgttatatgcaacaacttctaagcgggcttcatcattgtcacagtcgtggtgttctgcatcgtgatataaagggctctaatctactgattgatagtaatggagtcttgaagattgcagattttgggttagcaacgtttttcgatccacagaactgcgttccattaactagccgtgttgtgactctttggtatcgacccccagagcttctacttggagcttgtcattatggtgttggggttgatttgtggagcacaggctgtatcttaggtgaactatattccgggaaaccaatcctggccgggaaaaccgaggtagagcaactgcataaaatcttcaagctatgtggttcaccgacagaagattactggaggaaactaaagctaccaccttcagctgcatttagacccgctcttccatatggaagacgtgtagcagagatgtttaaagacttgccaacgaatgttctttcccttttggaggctttactctccatagatcccgatcggagaggctctgcagctagagctcttgagagtgagtatttcagaacagagccgtttgcttgtgatccatcttctctaccaaaatatcctcccagcaaagagattgatgccaaaatccgcgatgatgcgaaaaggcaacgacccacccaggagaagcatgagagacaagactctcagacaagacgatcacacgaaagaaaactgatcccgccggtaaaagctaataatccatcactttcaacagctgtggagaatccttatctaagaagctgtgttccgggtaattcacaaagacaaatgcaggacatgacctgcaacaatccaacaagcggaagagtctctcactcaggtccgatgatgaaaaaccggaatcttagtcggttaacatacgtgaaggacaatgcagcccctagaataccttcatatagggctaactcagcaggacaaggaggcggttatgttgggtcagatcaacaaatgatggatcagcaaaggaaggaattgagaacattcaacagagctgacactatggataatagtaaaagacaaaccaaaatcccaaatgacccatcttggtatgattcaggggataacaagatgtacatgtccggtccattactggctcagccaagaaaagtggatcagatgctggaagaacacgaccggcagctccaagatttcaccagacagaaagcaaaacactgcagaaactaaatcacgtatctgaatgattttgctgggagtcttttatcagaggacaaaaacagagaaccattcaagtcttgttgtatcaagaagagtcttatttggttcgtagattttgaaaaatttgtttgtaatatatagagattaaaagattgttgttggcttataaaaagctaagctctgtggttatagagtgatgtgtataacatttatacagactcatcatagagtttggttctttgtgtatattacatgtatgtacacttcttcatatattacagagatgtgtacataacataacatatccatatatgtttcatagattcctattatc

SEQ ID NO: 77539 - protein, 644 aa, Arabidopsis thaliana
  peptide (1)..(644): Ceres Seq. ID no. 12576771
MGCIISKKKSPKRNPPWKETLEKRSSRINSSRIDDSSQTKEEQDRSNKVRLIESEKFSSSRFSEKHQEIAEIGDTDEDEDDDHHPPEELKREPSVVIPPSPETVSKEAELAAGWPAWLVSVAGEALVNWTPRRASTFEKLEKIGQGTYSSVYKARDLTNNKIVALKRVRFDLSDLESVKFMAREIIVMRRLDHPNVLKLEGLITASVSSSLYLVFEYMDHDLVGLASIPGIKFSEPQVKCYMQQLLSGLHHCHSRGVLHRDIKGSNLLIDSNGVLKIADFGLATFFDPQNCVPLTSRVVTLWYRPPELLLGACHYGVGVDLWSTGCILGELYSGKPILAGKTEVEQLHKIFKLCGSPTEDYWRKLKLPPSAAFRPALPYGRRVAEMFKDLPTNVLSLLEALLSIDPDRRGSAARALESEYFRTEPFACDPSSLPKYPPSKEIDAKIRDDAKRQRPTQEKHERQDSQTRRSHERKLIPPVKANNPSLSTAVENPYLRSCVPGNSQRQMQDMTCNNPTSGRVSHSGPMMKNRNLSRLTYVKDNAAPRIPSYRANSAGQGGGYVGSDQQMMDQQRKELRTFNRADTMDNSKRQTKIPNDPSWYDSGDNKMYMSGPLLAQPRKVDQMLEEHDRQLQDFTRQKAKHCRN

SEQ ID NO: 77540 - protein, 464 aa, Arabidopsis thaliana
  peptide (1)..(464): Ceres Seq. ID no. 12576772
MAREIIVMRRLDHPNVLKLEGLITASVSSSLYLVFEYMDHDLVGLASIPGIKFSEPQVKCYMQQLLSGLHHCHSRGVLHRDIKGSNLLIDSNGVLKIADFGLATFFDPQNCVPLTSRVVTLWYRPPELLLGACHYGVGVDLWSTGCILGELYSGKPILAGKTEVEQLHKIFKLCGSPTEDYWRKLKLPPSAAFRPALPYGRRVAEMFKDLPTNVLSLLEALLSIDPDRRGSAARALESEYFRTEPFACDPSSLPKYPPSKEIDAKIRDDAKRQRPTQEKHERQDSQTRRSHERKLIPPVKANNPSLSTAVENPYLRSCVPGNSQRQMQDMTCNNPTSGRVSHSGPMMKNRNLSRLTYVKDNAAPRIPSYRANSAGQGGGYVGSDQQMMDQQRKELRTFNRADTMDNSKRQTKIPNDPSWYDSGDNKMYMSGPLLAQPRKVDQMLEEHDRQLQDFTRQKAKHCRN

SEQ ID NO: 77541 - protein, 457 aa, Arabidopsis thaliana
  peptide (1)..(457): Ceres Seq. ID no. 12576773
MRRLDHPNVLKLEGLITASVSSSLYLVFEYMDHDLVGLASIPGIKFSEPQVKCYMQQLLSGLHHCHSRGVLHRDIKGSNLLIDSNGVLKIADFGLATFFDPQNCVPLTSRVVTLWYRPPELLLGACHYGVGVDLWSTGCILGELYSGKPILAGKTEVEQLHKIFKLCGSPTEDYWRKLKLPPSAAFRPALPYGRRVAEMFKDLPTNVLSLLEALLSIDPDRRGSAARALESEYFRTEPFACDPSSLPKYPPSKEIDAKIRDDAKRQRPTQEKHERQDSQTRRSHERKLIPPVKANNPSLSTAVENPYLRSCVPGNSQRQMQDMTCNNPTSGRVSHSGPMMKNRNLSRLTYVKDNAAPRIPSYRANSAGQGGGYVGSDQQMMDQQRKELRTFNRADTMDNSKRQTKIPNDPSWYDSGDNKMYMSGPLLAQPRKVDQMLEEHDRQLQDFTRQKAKHCRN

SEQ ID NO: 77542 - DNA, 1053 bp, Arabidopsis thaliana
  misc_feature (1)..(1053): Ceres Seq. ID no. 12576774
  misc_feature (1)..(1053): Ortholog of  Ceres SEQ ID NO 13654802 as cited in SEQ ID NO 62664
tctttttgtcgactgcttcttcacgccgtcgaggaattcttctccaccaacgaatccggcgacgtcttatcaccaccttgtcgaatctttagttgatgttgtttaaaggttttagctaataagggcatgaaacggatctgctcggtttcaagtgttcaactttaagtttcagagctttagcatcgccacgttccttgaactatcccctgcagtgtatcaagcgttcatcagttcggatggagagtagcaacttttcttctggtgtcagaaccgagagtagtgtgaagccaagaggagcattgatagttctagaaggtcttgatcgcagcgggaaatcaacacagtgtgctaagctactctctttcttgaatggtttaggacatccgaccgagctctggagattccccgatagagagacgagtgtcggtcagatgatatccgcgtatctttctaataagtcgcagttagatgatcacacaattcatctccttttcagcgccaatcgttgggagaaaaggtcgttgatggaggaaaagctaaaaacaggaactacgcttatcgtggatcgttattcgtattctggtgttgcattctcatcagctaaaggtctcgatatcgaatggtgcaaggctcccgaaatcgggttactggctccagattctgtactttacctggacatttcacctgaaagagctgctgagagaggtggatatggagatgagaggtatgagcgagtggagtttcagaagaaagttgcagacttttatcaaacccttggcgattcttcatggaagataatcaatgccagtgatgccatggaggaagtagagaagaagattcaacaagtggtattagatcaagtcaaagaatgtactgaaggaaagcctctgtctctcctatggtcgtcatagaacgttttcgagtcatagcacttgcaagtttagtgattttgaaggaacttttgttgaagtttatactatgttgtgccatctaagcccattaacaggcccaaaagtttagtttatgtcgtcactcatgacatcttaatcgatt

SEQ ID NO: 77543 - protein, 224 aa, Arabidopsis thaliana
  peptide (1)..(224): Ceres Seq. ID no. 12576775
MESSNFSSGVRTESSVKPRGALIVLEGLDRSGKSTQCAKLLSFLNGLGHPTELWRFPDRETSVGQMISAYLSNKSQLDDHTIHLLFSANRWEKRSLMEEKLKTGTTLIVDRYSYSGVAFSSAKGLDIEWCKAPEIGLLAPDSVLYLDISPERAAERGGYGDERYERVEFQKKVADFYQTLGDSSWKIINASDAMEEVEKKIQQVVLDQVKECTEGKPLSLLWSS

SEQ ID NO: 77544 - protein, 159 aa, Arabidopsis thaliana
  peptide (1)..(159): Ceres Seq. ID no. 12576776
MISAYLSNKSQLDDHTIHLLFSANRWEKRSLMEEKLKTGTTLIVDRYSYSGVAFSSAKGLDIEWCKAPEIGLLAPDSVLYLDISPERAAERGGYGDERYERVEFQKKVADFYQTLGDSSWKIINASDAMEEVEKKIQQVVLDQVKECTEGKPLSLLWSS

SEQ ID NO: 77545 - protein, 128 aa, Arabidopsis thaliana
  peptide (1)..(128): Ceres Seq. ID no. 12576777
MEEKLKTGTTLIVDRYSYSGVAFSSAKGLDIEWCKAPEIGLLAPDSVLYLDISPERAAERGGYGDERYERVEFQKKVADFYQTLGDSSWKIINASDAMEEVEKKIQQVVLDQVKECTEGKPLSLLWSS

SEQ ID NO: 77546 - DNA, 1025 bp, Arabidopsis thaliana
  misc_feature (1)..(1025): Ceres Seq. ID no. 12576778
  misc_feature (1)..(1025): Ortholog of  Ceres SEQ ID NO 12557497 as cited in SEQ ID NO 43
agctcttcctagtgttaaaccagagtaaagcttgaaactttggactaaaagaatggcgtctttgggtgtgtcggaaatgcttggtactccccttaacttcagggcagtttcaagatcgtctgctccgttggcatcaagcccatccacgttcaagactgttgctctcttctctaagaaaaagccagctcctgctaagtccaaggctgtctctgagactagcgatgagctcgccaagtggtatggtcctgacaggagaattttcttgcctgatggtcttttggatagatcagagatcccagagtacttaaacggtgaagttgctggagattatggttatgacccatttggtcttggaaagaagcctgagaactttgctaaataccaagcttttgaattgatccatgcgagatgggctatgttaggagcagctggtttcatcattcctgaagctttaaacaaatatggcgctaactgtggccctgaagctgtctggtttaagactggtgctttgcttcttgatggaaacacattgaactactttggcaagaacatccctatcaaccttgttctcgccgtagttgctgaggttgttctcctcggtggagccgagtactacagaatcaccaacggattggatttcgaggacaagctacacccaggaggtccatttgatcctctaggccttgctaaggaccctgagcaaggagctcttctcaaagtcaaagagatcaagaacgggagattagccatgtttgcgatgctcggtttctttatccaagcgtatgttaccggagaaggtcctgttgagaaccttgcaaagcatctcagtgatccttttggaaacaacttgcttaccgtcatcgctggaactgccgagagagctcccactctctaagccatttctactttttttaagagcttccaaaatgtacactttgttcgattggaactccttttgacaatgttaaaaaaacttccatctgaatcttcttgatatatttcaaattttcaatggtgctttatca

SEQ ID NO: 77547 - protein, 280 aa, Arabidopsis thaliana; identical to SEQ ID NO: 25086
  peptide (1)..(280): Ceres Seq. ID no. 12576779

SEQ ID NO: 77548 - protein, 272 aa, Arabidopsis thaliana; identical to SEQ ID NO: 25087
  peptide (1)..(272): Ceres Seq. ID no. 12576780

SEQ ID NO: 77549 - protein, 159 aa, Arabidopsis thaliana; identical to SEQ ID NO: 25088
  peptide (1)..(159): Ceres Seq. ID no. 12576781

SEQ ID NO: 77550 - DNA, 1026 bp, Arabidopsis thaliana
  misc_feature (1)..(1026): Ceres Seq. ID no. 12576782
  misc_feature (1)..(1026): Ortholog of  Ceres SEQ ID NO 12609518 as cited in SEQ ID NO 51887
  misc_feature (1)..(1026): Ortholog of  Ceres SEQ ID NO 13638980 as cited in SEQ ID NO 55975
  misc_feature (1)..(1026): Ortholog of  Ceres SEQ ID NO 13597466 as cited in SEQ ID NO 65077
  misc_feature (1)..(1026): Ortholog of  Ceres SEQ ID NO 13654590 as cited in SEQ ID NO 68615
gagactcttgctttttcacaaaaaaaaagaaaaagagagagagagcagcaaccccagcagcatcgaagatcgtcgatcgtcgatcggttgctctctttcattaatcagatctaattgatacccaagcttcttcatcggaggccgtatctcacgaggaaacatgggcggtagatttggagtcctcctagtcctcttcctcttgagctggtcttgtcatgctacaaacccgattcttctcgaaccattcgaatcagctcatgatgacaaccaagtctgtgaactatgtgacaagtatgtcacgctagtcattgattaccttcaagactacgacaaccagaatgaactcgttgaggcccttcatatcagctgctctcagattcctcctctcaaaaaacagtgtctttcaatggtagatcattacacccaacttttcttcacacaagtctctactatcaaatcagaccaaatctgcaaacggcttaacctctgtcaagctgtgacaccggcctttgcctctcaagtccatcaaggaaactgcgaggcttgccgcgagactgtctctgaggttgtcaccaaactcaaggatcctgagactaagctgaagataattcggttacttctcaaggaatgcaagtcgcttaacaattaccaggacaagtgcaagaagatggtattcgagtacgggcctctgatgcttacggatttgcagaagtttctggagaagaaagacgtgtgcactatcctccacgtctgtccaggtccagccacccaccgtgactacgttcctgcggtggagtcattggcagattcgtaaattcggccaccttggttttgtcgtcattcacactaataccatgccatgatcgtgatgctaatttaatttggtaacccggtggtcatgtaaatactgattgatatattaaaaacataactacacgattgatgattcttgtgtgatttgaaaagaacgctgtctaaaggcccattgtccatcgatgggcctttttgctaatttctacattgccc

SEQ ID NO: 77551 - protein, 217 aa, Arabidopsis thaliana
  peptide (1)..(217): Ceres Seq. ID no. 12576783
MGGRFGVLLVLFLLSWSCHATNPILLEPFESAHDDNQVCELCDKYVTLVIDYLQDYDNQNELVEALHISCSQIPPLKKQCLSMVDHYTQLFFTQVSTIKSDQICKRLNLCQAVTPAFASQVHQGNCEACRETVSEVVTKLKDPETKLKIIRLLLKECKSLNNYQDKCKKMVFEYGPLMLTDLQKFLEKKDVCTILHVCPGPATHRDYVPAVESLADS

SEQ ID NO: 77552 - protein, 135 aa, Arabidopsis thaliana
  peptide (1)..(135): Ceres Seq. ID no. 12576784
MVDHYTQLFFTQVSTIKSDQICKRLNLCQAVTPAFASQVHQGNCEACRETVSEVVTKLKDPETKLKIIRLLLKECKSLNNYQDKCKKMVFEYGPLMLTDLQKFLEKKDVCTILHVCPGPATHRDYVPAVESLADS

SEQ ID NO: 77553 - DNA, 2638 bp, Arabidopsis thaliana
  misc_feature (1)..(2638): Ceres Seq. ID no. 12576818
  misc_feature (1)..(2638): Ortholog of  Ceres SEQ ID NO 13582534 as cited in SEQ ID NO 57409
acatcacgacaggggaacaaagcgaatcaaatctgttgtgcagctgtaattgatgacctgcagtggttctgtctgtttcacattatggatctgaaggagaactcttttgaacacatgggaatacacttgggagagattggtattgttctctttccttggtttctgtggttaagtttattcctaagttgtggctatgcagctataactatttcaagtcctttgacattgggacaaactctgagttcccctggtggattttatgagttaggattcttcagtcctaacaactctcagaatcagtatgtagggatctggttcaagaaaattacaccacgggtggttgtgtgggtggctaacagagaaaagccgatcacaacccctgtggcaaatcttactatcagcagaaatggtagtcttattttgctagacagtagtaaaaatgttgtttggtcaaccagaagaccttccatatctaataagtgtcatgcaaagctcttagatacaggaaatcttgtcatagtagatgatgtttcagaaaatcttttgtggcaaagttttgagaatcctggtgatactatgctgccttactcatcgctgatgtacaaccttgccactggggagaagcgagtattatcttcgtggaaaagccacactgatccatcccctggtgatttcgtagttcgactaacaccacaagtgccagcacagatcgttactatgagaggctcatcggtttataagagaagcggtccatgggctaagaccggtttcactggcgtaccactaatggatgaatcatacacaagtcctttcagcctttcccaagatgtaggaaatggaacagggctcttctcttatttacagagaagttctgaacttacacgagttatcataacatcagagggatatctaaagacttttcggtacaatgggacaggctgggttctggactttatcactccagcaaatttatgtgatttgtatggtgcatgtggaccttttgggctgtgtgtgacgtccaatcccacaaagtgtaaatgcatgaaagggtttgtaccaaaatacaaggaggagtggaagcgcgggaacatgacttctggatgtatgcgacgtacagaattatcttgtcaggcaaacttatctacaaagacacaaggaaaaggtgtagacgtcttctatcgtctggccaatgtaaagcctccggatctctacgaatatgcaagctttgtggatgcagatcaatgccaccagggttgtctcagcaattgctcttgctctgcttttgcgtatattactggaattggttgtttgctttggaatcatgagctaatagacacaattagatattccgttggaggagagtttctttccattcgtcttgcaagttcagaactggctggaagcaggaggaccaagattattgttggtagtatcagcctttccatttttgtgattttggcctttggctcatataagtactggagatacagagcaaaacaaaatgttgggccaacttgggcattcttcaacaattcacaagattcatggaaaaatggtttggaaccacaagaaatctcaggtttaacattctttgagatgaataccatacgagctgctaccaataacttcaatgtctcaaacaaactcggtcaaggtggatttggtccagtttataagggaacactgtcagacaagaaggatatagccgttaaacgcctttctagcagctctgggcagggtacagaagagttcatgaacgaaataaaactcatctcaaaattacaacacagaaacttggttcgacttttgggatgctgcattgatggagaagaaaaactactaatttatgagtttctagtgaacaaaagcctcgacacttttctctttgatttgacgctaaagcttcagattgattggcctaagaggttcaacatcattcaaggtgtttcacgtgggcttctctatctccatcgtgactcttgcatgagggtcatacatcgagatctgaaggtcagcaacattctcttggacgacaaaatgaacccaaaaatatcagatttcggattggctcggatgtttcaaggaacccaacatcaagacaacactcgtaaggttgttggaactctaggatacatgtctcctgagtatgcatggacaggaatgttctcagagaagtccgacatatatgcttttggagttctcctgttagaaatcataagtgggaagaagatttcaagcttttgctgtggagaggaaggcaaaacccttcttggacatgcatgggaatgttggctcgagaccggtggagtggatctattggatgaagatattagcagctcgtgttctccagttgaagttgaagtcgctcgatgtgttcagattggtctactctgcatccaacagcaagctgttgacagaccaaacatagcacaagtagtgaccatgatgacaagtgcaacagatcttccgagaccaaaacaaccactctttgcattgcagattcaagatcaagagagtgttgtgtcagtctcaaagtctgtgaatcatgttacacaaactgagatatatgggcgataaagtttgctttattatgtattaactgcagactgaaatgtaataccagcaatagagtgtaatc

SEQ ID NO: 77554 - protein, 858 aa, Arabidopsis thaliana
  peptide (1)..(858): Ceres Seq. ID no. 12576819
TSRQGNKANQICCAAVIDDLQWFCLFHIMDLKENSFEHMGIHLGEIGIVLFPWFLWLSLFLSCGYAAITISSPLTLGQTLSSPGGFYELGFFSPNNSQNQYVGIWFKKITPRVVVWVANREKPITTPVANLTISRNGSLILLDSSKNVVWSTRRPSISNKCHAKLLDTGNLVIVDDVSENLLWQSFENPGDTMLPYSSLMYNLATGEKRVLSSWKSHTDPSPGDFVVRLTPQVPAQIVTMRGSSVYKRSGPWAKTGFTGVPLMDESYTSPFSLSQDVGNGTGLFSYLQRSSELTRVIITSEGYLKTFRYNGTGWVLDFITPANLCDLYGACGPFGLCVTSNPTKCKCMKGFVPKYKEEWKRGNMTSGCMRRTELSCQANLSTKTQGKGVDVFYRLANVKPPDLYEYASFVDADQCHQGCLSNCSCSAFAYITGIGCLLWNHELIDTIRYSVGGEFLSIRLASSELAGSRRTKIIVGSISLSIFVILAFGSYKYWRYRAKQNVGPTWAFFNNSQDSWKNGLEPQEISGLTFFEMNTIRAATNNFNVSNKLGQGGFGPVYKGTLSDKKDIAVKRLSSSSGQGTEEFMNEIKLISKLQHRNLVRLLGCCIDGEEKLLIYEFLVNKSLDTFLFDLTLKLQIDWPKRFNIIQGVSRGLLYLHRDSCMRVIHRDLKVSNILLDDKMNPKISDFGLARMFQGTQHQDNTRKVVGTLGYMSPEYAWTGMFSEKSDIYAFGVLLLEIISGKKISSFCCGEEGKTLLGHAWECWLETGGVDLLDEDISSSCSPVEVEVARCVQIGLLCIQQQAVDRPNIAQVVTMMTSATDLPRPKQPLFALQIQDQESVVSVSKSVNHVTQTEIYGR

SEQ ID NO: 77555 - protein, 830 aa, Arabidopsis thaliana
  peptide (1)..(830): Ceres Seq. ID no. 12576820
MDLKENSFEHMGIHLGEIGIVLFPWFLWLSLFLSCGYAAITISSPLTLGQTLSSPGGFYELGFFSPNNSQNQYVGIWFKKITPRVVVWVANREKPITTPVANLTISRNGSLILLDSSKNVVWSTRRPSISNKCHAKLLDTGNLVIVDDVSENLLWQSFENPGDTMLPYSSLMYNLATGEKRVLSSWKSHTDPSPGDFVVRLTPQVPAQIVTMRGSSVYKRSGPWAKTGFTGVPLMDESYTSPFSLSQDVGNGTGLFSYLQRSSELTRVIITSEGYLKTFRYNGTGWVLDFITPANLCDLYGACGPFGLCVTSNPTKCKCMKGFVPKYKEEWKRGNMTSGCMRRTELSCQANLSTKTQGKGVDVFYRLANVKPPDLYEYASFVDADQCHQGCLSNCSCSAFAYITGIGCLLWNHELIDTIRYSVGGEFLSIRLASSELAGSRRTKIIVGSISLSIFVILAFGSYKYWRYRAKQNVGPTWAFFNNSQDSWKNGLEPQEISGLTFFEMNTIRAATNNFNVSNKLGQGGFGPVYKGTLSDKKDIAVKRLSSSSGQGTEEFMNEIKLISKLQHRNLVRLLGCCIDGEEKLLIYEFLVNKSLDTFLFDLTLKLQIDWPKRFNIIQGVSRGLLYLHRDSCMRVIHRDLKVSNILLDDKMNPKISDFGLARMFQGTQHQDNTRKVVGTLGYMSPEYAWTGMFSEKSDIYAFGVLLLEIISGKKISSFCCGEEGKTLLGHAWECWLETGGVDLLDEDISSSCSPVEVEVARCVQIGLLCIQQQAVDRPNIAQVVTMMTSATDLPRPKQPLFALQIQDQESVVSVSKSVNHVTQTEIYGR

SEQ ID NO: 77556 - protein, 820 aa, Arabidopsis thaliana
  peptide (1)..(820): Ceres Seq. ID no. 12576821
MGIHLGEIGIVLFPWFLWLSLFLSCGYAAITISSPLTLGQTLSSPGGFYELGFFSPNNSQNQYVGIWFKKITPRVVVWVANREKPITTPVANLTISRNGSLILLDSSKNVVWSTRRPSISNKCHAKLLDTGNLVIVDDVSENLLWQSFENPGDTMLPYSSLMYNLATGEKRVLSSWKSHTDPSPGDFVVRLTPQVPAQIVTMRGSSVYKRSGPWAKTGFTGVPLMDESYTSPFSLSQDVGNGTGLFSYLQRSSELTRVIITSEGYLKTFRYNGTGWVLDFITPANLCDLYGACGPFGLCVTSNPTKCKCMKGFVPKYKEEWKRGNMTSGCMRRTELSCQANLSTKTQGKGVDVFYRLANVKPPDLYEYASFVDADQCHQGCLSNCSCSAFAYITGIGCLLWNHELIDTIRYSVGGEFLSIRLASSELAGSRRTKIIVGSISLSIFVILAFGSYKYWRYRAKQNVGPTWAFFNNSQDSWKNGLEPQEISGLTFFEMNTIRAATNNFNVSNKLGQGGFGPVYKGTLSDKKDIAVKRLSSSSGQGTEEFMNEIKLISKLQHRNLVRLLGCCIDGEEKLLIYEFLVNKSLDTFLFDLTLKLQIDWPKRFNIIQGVSRGLLYLHRDSCMRVIHRDLKVSNILLDDKMNPKISDFGLARMFQGTQHQDNTRKVVGTLGYMSPEYAWTGMFSEKSDIYAFGVLLLEIISGKKISSFCCGEEGKTLLGHAWECWLETGGVDLLDEDISSSCSPVEVEVARCVQIGLLCIQQQAVDRPNIAQVVTMMTSATDLPRPKQPLFALQIQDQESVVSVSKSVNHVTQTEIYGR

SEQ ID NO: 77557 - DNA, 1106 bp, Arabidopsis thaliana
  misc_feature (1)..(1106): Ceres Seq. ID no. 12576828
  misc_feature (1)..(1106): Ortholog of  Ceres SEQ ID NO 13598427 as cited in SEQ ID NO 60899
ttttccgatataagcacgaaatcgctgtttctctcttcgacgaagctttgataatttgatctcaatcgatcgattctattgagaatttgtgtacctgttttcttataaggttaactaaggattgtggaatcagaagtgttgtgtttttgtgatcggagattatggattggggaaacgtaacggttgatgatctcttcgatgctctccgagaagttgactggtcgtctccgccgcgtcctccgtctgagttcttctcaaggttcaccgttcctaaatctgtccctaaatgggatagtcgcctcaagtgcaatctctactactaccgaacaaactatttcatcatgatcgtcgttatacttggattgggagtccttacaaggcctttagcgatcttcgctgcgcttttgacagcattaagtttggcatttctaaatgacagctttgcaggttcttttagtgagaaggcgacacgaaccgtcagaagattctctccacagttagctgctaaaatgagacctcctttgacacctgtcactcgtgggcgtccatcatcaaagagagcaatccatgtatgtggtcaaccccgttgggtttttgtcttgacatgctcacttgagttttgctctttggtatatttcctctggtttgctcagagtctcggttgcgctactcattgcacatcttgcaacaattcttcatgcaagcttgagaacaccgaacttgaaggcacgttttaacacatttagggaggaattccgagcagtatggcgtaactacagcgagatttagagtaatcttgtaccaccatgatcgtgttctgctgaggacataacgctgtaaagaccaaacttactgcctttctccaagataaacccggtttcgttaacactgtactatggatgttcaatctggatttgttgctcaatgactgggatcatctgttttttctttgatttgagatttgagctctgagctctttttgctagcaaaatcctctcttttttttgctaaagacttgtaaagctagctttgttgttcttcgttctaacacaaaaccctttgtgtaaagtcctagaatcgtttaatagcttgcatttttttctttc

SEQ ID NO: 77558 - protein, 191 aa, Arabidopsis thaliana
  peptide (1)..(191): Ceres Seq. ID no. 12576829
MDWGNVTVDDLFDALREVDWSSPPRPPSEFFSRFTVPKSVPKWDSRLKCNLYYYRTNYFIMIVVILGLGVLTRPLAIFAALLTALSLAFLNDSFAGSFSEKATRTVRRFSPQLAAKMRPPLTPVTRGRPSSKRAIHVCGQPRWVFVLTCSLEFCSLVYFLWFAQSLGCATHCTSCNNSSCKLENTELEGTF

SEQ ID NO: 77559 - protein, 131 aa, Arabidopsis thaliana
  peptide (1)..(131): Ceres Seq. ID no. 12576830
MIVVILGLGVLTRPLAIFAALLTALSLAFLNDSFAGSFSEKATRTVRRFSPQLAAKMRPPLTPVTRGRPSSKRAIHVCGQPRWVFVLTCSLEFCSLVYFLWFAQSLGCATHCTSCNNSSCKLENTELEGTF

SEQ ID NO: 77560 - DNA, 1782 bp, Arabidopsis thaliana
  misc_feature (1)..(1782): Ceres Seq. ID no. 12576843
  misc_feature (1)..(1782): Ortholog of  Ceres SEQ ID NO 14307991 as cited in SEQ ID NO 65737
aaagaagagagaactttagaggttagagagatgaagacgcaacatcaatggtgggaagttcttgatccattcttgacacaacacgaagctcttattgcattcttgacttttgcagcggttgtaattgtgatttacttgtaccgaccctcctggtccgtatgcaatgttcccggtccaaccgctatgcctctagttggtcacttgcccttgatggctaagtatggtcctgatgtcttctccgttcttgctaagcaatatggccctattttcagtttggtatatatggccatctcttatggttgttatgactgagtgatgaacacaacaagtgtctaaaaaacaaaatgaagacaagtgatcatgtccatttaaattaacaacaaacagatttcagatggggaggcaaccactgataataatagcagaagcagagctttgcagagaagttgggataaagaagttcaaagatcttccaaacagaagcattccttccccaatctcagcttctcctcttcacaagaaaggcctcttcttcaccagggacaagagatggtctaaaatgagaaacaccatcctatctctctatcagccttcacatttaacaagtcttatccctacaatgcatagtttcatcacttctgctactcataatcttgattctaaaccgcgagatatcgttttctccaacctcttcctcaaacttaccactgatatcatcggacaagcggcttttggagtcgacttcggtctttccgggaagaaaccaatcaaagatgtggaggtgactgatttcataaaccagcatgtctactctacaacacaactcaagatggatttatcaggatcactctctatcatcttaggcttactgattccgattcttcaagagccgtttaggcaggtgttgaagaggataccgggaacaatggactggagagtcgagaagactaatgcaagactgagtggacaacttaatgagattgtgtcaaagcgagccaaggaggctgagactgactcaaaagacttcttgtcattgattttgaaagctcgagagtccgatcctttcgccaaaaacatcttcacatcggattatattagtgctgtgacttatgagcatcttcttgctggctctgcaaccactgctttcacactatcctctgttctttacttagtctctggtcatcttgatgttgagaaacgtctgcttcaagaaattgacgggtttgggaaccgtgatctgatcccgactgctcatgacttacaacacaagtttccatacctcgatcaggtcattaaagaggctatgagattctacatggtttctcctttggttgcaagggaaactgctaaagaagtggagataggaggttatttactcccaaaggggacatgggtttggttagcactaggagttctagcaaaggaccctaaaaactttccagaaccggagaagttcaagccggaaagatttgatccgaacggagaagaggagaaacatagacatccatacgctttcatcccattcggtatcggtccacgagcctgtgttggacagagatttgccctgcaagagatcaaactcacattactgcatctctaccgtaattacattttcagacattccctagaaatggagataccactgcagcttgattatggtataattctcagcttcaagaacggggttaagctcagaaccatcaaaagattctgattcttgaaacaagtgaaataaaagcaagactgaaatttatatttaaattcaaaactccaatgtagttc

SEQ ID NO: 77561 - protein, 439 aa, Arabidopsis thaliana
  peptide (1)..(439): Ceres Seq. ID no. 12576844
MGRQPLIIIAEAELCREVGIKKFKDLPNRSIPSPISASPLHKKGLFFTRDKRWSKMRNTILSLYQPSHLTSLIPTMHSFITSATHNLDSKPRDIVFSNLFLKLTTDIIGQAAFGVDFGLSGKKPIKDVEVTDFINQHVYSTTQLKMDLSGSLSIILGLLIPILQEPFRQVLKRIPGTMDWRVEKTNARLSGQLNEIVSKRAKEAETDSKDFLSLILKARESDPFAKNIFTSDYISAVTYEHLLAGSATTAFTLSSVLYLVSGHLDVEKRLLQEIDGFGNRDLIPTAHDLQHKFPYLDQVIKEAMRFYMVSPLVARETAKEVEIGGYLLPKGTWVWLALGVLAKDPKNFPEPEKFKPERFDPNGEEEKHRHPYAFIPFGIGPRACVGQRFALQEIKLTLLHLYRNYIFRHSLEMEIPLQLDYGIILSFKNGVKLRTIKRF

SEQ ID NO: 77562 - protein, 384 aa, Arabidopsis thaliana
  peptide (1)..(384): Ceres Seq. ID no. 12576845
MRNTILSLYQPSHLTSLIPTMHSFITSATHNLDSKPRDIVFSNLFLKLTTDIIGQAAFGVDFGLSGKKPIKDVEVTDFINQHVYSTTQLKMDLSGSLSIILGLLIPILQEPFRQVLKRIPGTMDWRVEKTNARLSGQLNEIVSKRAKEAETDSKDFLSLILKARESDPFAKNIFTSDYISAVTYEHLLAGSATTAFTLSSVLYLVSGHLDVEKRLLQEIDGFGNRDLIPTAHDLQHKFPYLDQVIKEAMRFYMVSPLVARETAKEVEIGGYLLPKGTWVWLALGVLAKDPKNFPEPEKFKPERFDPNGEEEKHRHPYAFIPFGIGPRACVGQRFALQEIKLTLLHLYRNYIFRHSLEMEIPLQLDYGIILSFKNGVKLRTIKRF

SEQ ID NO: 77563 - protein, 364 aa, Arabidopsis thaliana
  peptide (1)..(364): Ceres Seq. ID no. 12576846
MHSFITSATHNLDSKPRDIVFSNLFLKLTTDIIGQAAFGVDFGLSGKKPIKDVEVTDFINQHVYSTTQLKMDLSGSLSIILGLLIPILQEPFRQVLKRIPGTMDWRVEKTNARLSGQLNEIVSKRAKEAETDSKDFLSLILKARESDPFAKNIFTSDYISAVTYEHLLAGSATTAFTLSSVLYLVSGHLDVEKRLLQEIDGFGNRDLIPTAHDLQHKFPYLDQVIKEAMRFYMVSPLVARETAKEVEIGGYLLPKGTWVWLALGVLAKDPKNFPEPEKFKPERFDPNGEEEKHRHPYAFIPFGIGPRACVGQRFALQEIKLTLLHLYRNYIFRHSLEMEIPLQLDYGIILSFKNGVKLRTIKRF

SEQ ID NO: 77564 - DNA, 1785 bp, Arabidopsis thaliana
  misc_feature (1)..(1785): Ceres Seq. ID no. 12576847
  misc_feature (1)..(1785): Ortholog of  Ceres SEQ ID NO 15176081 as cited in SEQ ID NO 65838
  misc_feature (1)..(1785): Ortholog of  Ceres SEQ ID NO 13660287 as cited in SEQ ID NO 67316
gcaaaactttaaccttaaaaaccaaaccaaaaaaaacaaactaaattaaacttatggatgtgtcaaatgagacagtggaaagaaccgatctccggacacctttagtagatccggcagacacggaggtgaaacctctaccagaggtcgggctcgagagcgtattaacggagagtagcttgtcataccggaggcgtgtgtacttaggagcctgtatagagttgaaagtacttttccggttggcactaccggcgatacttatctatttagtcaactccggaatgggtatatccgctcgtgtcttcgccggtcatgttggtagtcaagaacttgcggccgcgtccatcggaaatagctgcttcaatctcgtctatggacttatgttaggtatgggcagtgcagtcgaaacactatgtggacaagcctatggagcccatcgttacgagatgcttgggatctatctccaaagagcaacaatagtcctcgctctagttggcttgcccatgacattactatacaccttctcgtaccctattctaatcctactaggggaacccaaaacggtgtcgtacatgggatccaaatacatcgccgggctcatccctcaaatcttcgcttacgccgtcaacttcacggcccaaaagttcctccaggcccaaagcgtggttgccccgagcgccttcatctcagccgccgccctcatcctccagatattgttgacgtggatcaccgtttatgtaatggacatgggctttatgggcatagcttatgttcttacaatttcttggtgggtcattgttggatcccagtgtttttacattgcggttagtcccaagtttagacacacgtggactggtcttagctggagatcgctccaaggtctttggagcttctttaaactctctgctggctcagctgttatgatttgtctggaaatgtggtattcgcagattcttgttcttcttgctggtttgctcgaaaatcctgctcgctctctagattctctttccatctgtatgtcaatttcagcattatcattcatggtctctgtcggctttaatgctgctgtaagtgtacggacaagtaatgagcttggagcaggaaatccgaaatcagcatggttctctacatggacggcgacttttgtatccttcgtgatctccgtgacggaagccctcgccgtgatttggtttcgtgattacgttagctacattttcacggaggatgctgacgtggctaaagccgtctctgacctctgtccttttcttgccatcaccatcattctcaacggaattcaacctgtcttgtccggagtggcagtgggatgtggatggcaaacatacgtggcatatgtgaatgttggttgttactacgttgttggtattccggttgggtgtattctcggcttcactttcgattttcaagccaagggaatatggaccgggatgattggaggtaccctcatgcaaacactcattttactttacgtcacgtaccgaacagattgggataaagaggtggaaaaagcgaggaaacgtttggatctgtgggacgacaagaaggagcctctccaaaactagtaatggattttacagaataaaagtatatttttaaaaataattaacattaaactttacaatctgatatttaatattcaggttataacaagtttggtggagtgatagacaataaagaaaaggaaataagtgtcgtgtgtgcaggtgatttcaatgtacgtagcttttcatggttattatgcttgttctatggaaatagaacaattaaaat

SEQ ID NO: 77565 - protein, 507 aa, Arabidopsis thaliana
  peptide (1)..(507): Ceres Seq. ID no. 12576848
MDVSNETVERTDLRTPLVDPADTEVKPLPEVGLESVLTESSLSYRRRVYLGACIELKVLFRLALPAILIYLVNSGMGISARVFAGHVGSQELAAASIGNSCFNLVYGLMLGMGSAVETLCGQAYGAHRYEMLGIYLQRATIVLALVGLPMTLLYTFSYPILILLGEPKTVSYMGSKYIAGLIPQIFAYAVNFTAQKFLQAQSVVAPSAFISAAALILQILLTWITVYVMDMGFMGIAYVLTISWWVIVGSQCFYIAVSPKFRHTWTGLSWRSLQGLWSFFKLSAGSAVMICLEMWYSQILVLLAGLLENPARSLDSLSICMSISALSFMVSVGFNAAVSVRTSNELGAGNPKSAWFSTWTATFVSFVISVTEALAVIWFRDYVSYIFTEDADVAKAVSDLCPFLAITIILNGIQPVLSGVAVGCGWQTYVAYVNVGCYYVVGIPVGCILGFTFDFQAKGIWTGMIGGTLMQTLILLYVTYRTDWDKEVEKARKRLDLWDDKKEPLQN

SEQ ID NO: 77566 - protein, 432 aa, Arabidopsis thaliana; identical to SEQ ID NO: 30285
  peptide (1)..(432): Ceres Seq. ID no. 12576849

SEQ ID NO: 77567 - protein, 399 aa, Arabidopsis thaliana; identical to SEQ ID NO: 30286
  peptide (1)..(399): Ceres Seq. ID no. 12576850

SEQ ID NO: 77568 - DNA, 1701 bp, Arabidopsis thaliana
  misc_feature (1)..(1701): Ceres Seq. ID no. 12576851
  misc_feature (1)..(1701): Ortholog of  Ceres SEQ ID NO 15179015 as cited in SEQ ID NO 0
  misc_feature (1)..(1701): Ortholog of  Ceres SEQ ID NO 15179613 as cited in SEQ ID NO 0
ctccttcttcatttttggttttctttggaaattcttgaaattgtaatgtttttttttggaatcttgatgagtttttgcataaatcaagaagtgtcggtggaggcatttatttcacaccaattgttctgaattcagttttgttttaacactctttttttttttgtaactgaaaaatttgtgttttcttcttggttttcacacaagaattctagaagattgatagataaaatcaagaatgcttaattaacgctagagagacttgcaataattgtaaaacatgattggaacaagcttccccgaggatcttgattgtggcaacttctttgacaacatggatgatctcatggactttcccggtggagatatcgatgtcggtttcggcataggtgactccgactctttccctaccatctggaccactcatcacgacacgtggcctgccgcttctgatcctctcttctcttccaacaccaactctgattcatcacctgagctctatgttccgtttgaggacattgttaaggtggaaagacctccaagctttgtagaggaaacattggttgagaagaaggaagattcgttttcgacaaacactgattcatcatcttctcatagccaattcaggagctcaagtccagtgtcggttctcgagagcagctcctcctcgtctcaaaccaccaacacaacctcccttgttctccctggaaagcacggtcgtccacgcacaaaacgccctcgtccacctgtccaggataaagatagagtcaaagacaatgtgtgcggtggtgactcgcgcctcatcattagaataccgaaacagtttctctctgatcacaacaagatgatcaacaagaagaagaagaagaaggccaagattacttcttcctcttcttcgtccgggattgatcttgaagtcaatggaaacaacgtcgattcgtattcttcagagcaatatccgcttaggaaatgtatgcactgtgaggtcaccaagactccacagtggaggcttggtccaatgggtccaaagacactttgcaatgcgtgcggtgtacgttacaaatcagggaggcttttcccggagtaccgtccagctgctagtccaacatttactccagctcttcactcaaactcacacaagaaagtggctgaaatgagaaacaagagatgcagtgatggtagctacataaccgaagagaatgatctgcaagggctgattccgaacaatgcctacattggcgtagactaaaacatagagaagatgattcgatttccatgcgttgaagtgattagatatgccaggagtaggaaagagtcagtgagaagaaaagtttttagctttagaagagatgaaggaagagagcaatcaattggagggattaaaagttagatgagaattgattgtgtttgtattattttgtatttgtagtgtgaatgggcaaaaaactcttgaaacagaggaaaagtaagttgaggaagagcagaagattttgaagacattagagaatcattaggtgttgagtattacattaaatcttcctcttcttcttttgttctttcaattctttgtatttttattgtgaggattctctttttttttctttttttttttgtagttgatttgtttagctaaaggattctttttttttgtttttgttaaaatccaatgttataaattgttaattattaaatggttttcttacc

SEQ ID NO: 77569 - protein, 322 aa, Arabidopsis thaliana
  peptide (1)..(322): Ceres Seq. ID no. 12576852
MIGTSFPEDLDCGNFFDNMDDLMDFPGGDIDVGFGIGDSDSFPTIWTTHHDTWPAASDPLFSSNTNSDSSPELYVPFEDIVKVERPPSFVEETLVEKKEDSFSTNTDSSSSHSQFRSSSPVSVLESSSSSSQTTNTTSLVLPGKHGRPRTKRPRPPVQDKDRVKDNVCGGDSRLIIRIPKQFLSDHNKMINKKKKKKAKITSSSSSSGIDLEVNGNNVDSYSSEQYPLRKCMHCEVTKTPQWRLGPMGPKTLCNACGVRYKSGRLFPEYRPAASPTFTPALHSNSHKKVAEMRNKRCSDGSYITEENDLQGLIPNNAYIGVD

SEQ ID NO: 77570 - protein, 304 aa, Arabidopsis thaliana
  peptide (1)..(304): Ceres Seq. ID no. 12576853
MDDLMDFPGGDIDVGFGIGDSDSFPTIWTTHHDTWPAASDPLFSSNTNSDSSPELYVPFEDIVKVERPPSFVEETLVEKKEDSFSTNTDSSSSHSQFRSSSPVSVLESSSSSSQTTNTTSLVLPGKHGRPRTKRPRPPVQDKDRVKDNVCGGDSRLIIRIPKQFLSDHNKMINKKKKKKAKITSSSSSSGIDLEVNGNNVDSYSSEQYPLRKCMHCEVTKTPQWRLGPMGPKTLCNACGVRYKSGRLFPEYRPAASPTFTPALHSNSHKKVAEMRNKRCSDGSYITEENDLQGLIPNNAYIGVD

SEQ ID NO: 77571 - protein, 300 aa, Arabidopsis thaliana
  peptide (1)..(300): Ceres Seq. ID no. 12576854
MDFPGGDIDVGFGIGDSDSFPTIWTTHHDTWPAASDPLFSSNTNSDSSPELYVPFEDIVKVERPPSFVEETLVEKKEDSFSTNTDSSSSHSQFRSSSPVSVLESSSSSSQTTNTTSLVLPGKHGRPRTKRPRPPVQDKDRVKDNVCGGDSRLIIRIPKQFLSDHNKMINKKKKKKAKITSSSSSSGIDLEVNGNNVDSYSSEQYPLRKCMHCEVTKTPQWRLGPMGPKTLCNACGVRYKSGRLFPEYRPAASPTFTPALHSNSHKKVAEMRNKRCSDGSYITEENDLQGLIPNNAYIGVD

SEQ ID NO: 77572 - DNA, 2133 bp, Arabidopsis thaliana
  misc_feature (1)..(2133): Ceres Seq. ID no. 12576859
  misc_feature (1)..(2133): Ortholog of  Ceres SEQ ID NO 15171762 as cited in SEQ ID NO 57846
  misc_feature (1)..(2133): Ortholog of  Ceres SEQ ID NO 12597287 as cited in SEQ ID NO 63982
ctttatcacttttccactcccaaatcaatttttaggttttttttataattataatttatttgctctcggcaggatctatataatacacagaccagtctttgcgtgtgcttgtgtgcattcattgatcgggtttatatcttttcatcggattttctttgtcgagcaagagccatgtcactgagacccaacgctaagacggaggttcgccggaaccgatacaaagttgcagtggatgcggaggaaggacgacggaggagagaagacaacatggttgagatccgtaaaagcaagcgtgaggagagtttgatgaagaagagacgtgaaggtatgcaagctcttcagggtttcccttcagcttccgccgcctccgtcgataagaagttggatagtctgaaggatatggtcgctggggtttggtccgatgaccctgccttgcagcttgagtccactactcagttcaggaagcttctctctattgagagaagtcctccaatcgaggaagtgataagtgctggtgttgttcctaggtttgttgagtttcttaagaaagaagattaccccgccattcagtttgaggcagcttgggctctaacaaacattgcatctggaacatcggatcacactaaggttgtaatcgatcacaatgctgttccaatctttgttcagcttcttgcttcccctagcgatgatgttcgtgaacaggctgtatgggctttgggtaacgttgctggtgattcaccacggtgccgtgatcttgttcttggatgtggggcactgcttccgctgctcaatcagcttaatgagcatgctaaattgtccatgcttcgaaatgccacttggaccttgtcaaacttctgtcgtggcaagcctcagcctcactttgaccaggtcaaacctgctcttcccgcccttgaacgactaattcattcagatgatgaagaagtcttgacagatgcctgttgggctctttcttacctctctgatgggaccaatgacaaaatccagactgtcatccaggccggtgttgtcccaaaacttgttgaacttctcctccatcattctccatctgtgctaattcctgctcttcgcactgttggaaatatagttactggagatgatatacaaacacagtgcgtgatcaatagtggtgctctaccttgtcttgccaacctgctcactcaaaaccataagaaaagcataaagaaggaagcttgctggacgatttcaaacatcacagcaggcaacaaagatcagatccagacggtagttgaggctaatttgatttccccgttggtgagtctgcttcaaaatgctgaatttgacattaagaaggaagctgcatgggcaatttcaaatgcaacttcaggtggttctcatgatcaaataaaatacctggtggagcaagggtgcataaaaccattatgcgatctcctggtttgcccagatccaagaatcataactgtctgccttgaaggattggaaaacattttgaaggtgggagaggcagagaagaacttgggtcacacaggagacatgaactattacgctcagctgattgatgatgcagaagggctagaaaagatcgagaaccttcagagccatgacaacaatgagatctatgagaaggctgttaaaattctggagacatactggcttgaagaggaagatgatgagacacagcaacctccaggtgttgatggttctcaggctgggttccagtttggagggaatcaagctccagtaccatccggaggattcaacttcagctgaaggaatggaattggaagcttgcaacttgagaatggtgaaaggtcagagtcagtcagagtctagtttcactgccatggttatactccaggtctggtctggtctggtctcagaggtttgtaccgggtggtcggtttaaaagtacagcgtctgagaaagtgtttggttcattgtccagggctatttttttgaaatgactggtacaccggtcgtgagtcgacctttgtgttgtttttaaattttggagggttataaaaacttacagtggagtcttttgtttttgtgttgacaacagtttgtatgtcggttaaaaaattgaaaccataaaccctttattggtcttaatatgtttggtgtctgatttcc

SEQ ID NO: 77573 - protein, 532 aa, Arabidopsis thaliana; identical to SEQ ID NO: 28267
  peptide (1)..(532): Ceres Seq. ID no. 12576860

SEQ ID NO: 77574 - protein, 500 aa, Arabidopsis thaliana; identical to SEQ ID NO: 28268
  peptide (1)..(500): Ceres Seq. ID no. 12576861

SEQ ID NO: 77575 - protein, 487 aa, Arabidopsis thaliana; identical to SEQ ID NO: 28269
  peptide (1)..(487): Ceres Seq. ID no. 12576862

SEQ ID NO: 77576 - DNA, 1492 bp, Arabidopsis thaliana
  misc_feature (1)..(1492): Ceres Seq. ID no. 12576875
  misc_feature (1)..(1492): Ortholog of  Ceres SEQ ID NO 13599602 as cited in SEQ ID NO 0
aaaccaaaggtgatgcgttttcttagccaagaactcaaacttgtgatatttcttttgattctcatcatctctgcattttctgaattggctcagacataatttcttcggtgacttccatggctccgcctgtctctgatgattccctacagcctcgagatgtttgtgttgtgggagtggcgcgaacgcctataggggacttccttggctccctctcgtctttgactgctacaagacttgggtccatagccatccaagccgcacttaagagagcacatgttgatccggcccttgtggaagaggtcttctttggcaatgtcttaactgccaatcttgggcaagcaccagcaagacaggctgcacttggtgctgggattccctattctgtgatctgcaccactatcaacaaagtttgtgctgcaggaatgaaatctgtaatgctagcgtctcaaagtatccagctcggcttgaatgatattgttgttgctggtgggatggagagcatgtcaaacgtacctaagtacctcccggacgcaagaaggggttctcgattaggtcatgatactgttgttgatggtatgatgaaagatggactttgggatgtctataatgactttggaatgggagtttgtggagaaatatgcgctgaccagtaccgtattacaagagaagaacaggatgcttatgctatccagagctttgagcgtggtattgctgcgcaaaacactcagttgttcgcttgggaaattgttccggtcgaagtttccactggaagagggaggccttcagttgttattgacaaggatgaaggattggggaagtttgatgcagccaagttaaaaaagcttagaccaagtttcaaggaggatgggggatcagtcactgctggaaatgcatcaagcataagtgatggtgcggcagcgttagtgctagtgagtggagagaaggctcttgagcttggactgcatgttatcgctaagattagaggatacgctgatgctgctcaggcaccagagttattcacaaccacgccagctcttgctattcctaaagctataaagcgggctggtttggatgcatctcaagtggattattatgaaataaacgaagcattttctgtggtagctctagccaatcagaaactactgggattagatcctgaacggctcaatgcgcatggaggggctgtttcactgggacatccattgggctgtagcggtgctcgtatcttggtcacattattgggggtgttgagagcaaagaagggaaagtatggagtggcatcaatatgcaacggaggaggaggagcatcagcacttgtccttgagttcatgtaagccccctctttaactctggtcggagaagacaatcggatattcggcactctgaagctaagagctgttgttttataacgcaaagcttatgtatatggttcatgtgtgtgtcacaagactgtaactttgtacttgagagagatgcaataaaagtgtgttag

SEQ ID NO: 77577 - protein, 405 aa, Arabidopsis thaliana; identical to SEQ ID NO: 75896
  peptide (1)..(405): Ceres Seq. ID no. 12576876

SEQ ID NO: 77578 - protein, 303 aa, Arabidopsis thaliana; identical to SEQ ID NO: 75897
  peptide (1)..(303): Ceres Seq. ID no. 12576877

SEQ ID NO: 77579 - protein, 299 aa, Arabidopsis thaliana; identical to SEQ ID NO: 75898
  peptide (1)..(299): Ceres Seq. ID no. 12576878

SEQ ID NO: 77580 - DNA, 1066 bp, Arabidopsis thaliana
  misc_feature (1)..(1066): Ceres Seq. ID no. 12576886
  misc_feature (1)..(1066): Ortholog of  Ceres SEQ ID NO 15169809 as cited in SEQ ID NO 52839
  misc_feature (1)..(1066): Ortholog of  Ceres SEQ ID NO 15224302 as cited in SEQ ID NO 53942
gcaacttgtgttacagatactctcgcaaagtctcatcctttctcagcaaaaaacactaggaaatggttgaaaggcatggagagttttgatttgctgcttaagatatatcatgtcgcagtgcgttgacggtatcaagcatttatgcacctctgttttagggtgttttgatcttgatttgtataaacaatctggtggccttggagatcctgaattgcttgcaagagacactgtttttagtgtgagtgaaatagaagctctttatgagctttttaagaaaatcagcagtgccgtgattgatgatgggctaataaacaaggaagagtttcagttggctttgtttaagacaaataaaaaagagagtttgtttgcagatcgggttttcgatttgtttgatacaaagcacaatggaatactggggtttgaggaatttgctcgtgctctctccgtctttcacccaaatgcgcctatagatgacaaaattcacttttcatttcagctatatgatcttaaacagcaagggtttatcgaacggcaagaggtgaaacaaatggttgtcgctacgcttgctgaatctggaatgaatttgaaggatactgtcattgaggatataatcgacaagacgtttgaggaagcagacacaaaacacgatggaaagatcgataaggaagagtggagaagccttgttcttagacatcccagccttctgaagaacatgactcttcaatatctcaaggatatcacgactacgtttccaagctttgtgttccattctcaggttgaagatacctgaaaaagcaaaagcaaaagcaagcagcggcaagacatcattgtattgttgaaggttgttctttcgttatggttctttatttgttacatttctaaatctctgaactcattttattttttattgagctttttttgtgaagcaaaattcttctttttagtttggtttttgtcctttttgatttcgctcggtctatctgtagatacaacttttgcatcttgatgttatggtaatgtaaagtttttcagtttatttattaatccaattaaaaagatttgcttc

SEQ ID NO: 77581 - protein, 226 aa, Arabidopsis thaliana; identical to SEQ ID NO: 23899
  peptide (1)..(226): Ceres Seq. ID no. 12576887

SEQ ID NO: 77582 - DNA, 1446 bp, Arabidopsis thaliana
  misc_feature (1)..(1446): Ceres Seq. ID no. 12576888
  misc_feature (1)..(1446): Ortholog of  Ceres SEQ ID NO 14305026 as cited in SEQ ID NO 52980
  misc_feature (1)..(1446): Ortholog of  Ceres SEQ ID NO 15175670 as cited in SEQ ID NO 55204
  misc_feature (1)..(1446): Ortholog of  Ceres SEQ ID NO 13595598 as cited in SEQ ID NO 56822
agagaaagtgtgaaaccaacttgttcatattgaaaagaaccattgctctctagattaaaagcttctctctctctctctctctctctctctctctctctctctctctctctcttttggactttctcaatccatatccctctctctgttttttctaatttgagcctctaaagtctcctcgttttgttcatgttgttgttcaagtgaagaagctcaattatgtttacaacattgttgtaatttcaaaacttcataagaatttctctgataataaagaaaaagctggagtagaactattttaaagtgtcatcatgaagagactaagcagctcagattcaatgtgtggtctaatctccacttctacagatgaacagagtccaagagggtacggaagtaattaccaatctatgcttgaaggttacgatgaagatgctacactaatcgaggaatattccggcaaccaccaccacatgggtctatcggagaagaagagaagattaaaagttgaccaagtcaaagctcttgagaagaatttcgaacttgagaataaactcgaacctgagaggaaaactaaattagcacaagagcttggacttcaacctcgtcaagtagctgtttggtttcagaaccgtcgtgcacggtggaaaacaaaacagcttgaaaaagattacggtgttcttaagggtcaatacgattctctccgccacaatttcgattctctccgccgtgacaatgattcccttctccaagagattagtaaaatcaaagctaaggtaaacggtgaagaagataacaacaacaacaaagctattacggagggtgttaaggaagaggaagttcacaagacggattcgattccttcgtctcctctgcagtttctagaacattcctctggttttaactaccggcgaagcttcactgacctccgtgaccttctaccgaattccaccgttgtcgaggctggatcttccgatagttgcgattcaagcgccgttcttaacgacgaaacaagttctgataacggaagattgacgccgcctgtgacggttactggcgggagtttcttacagtttgtgaaaacagagcaaacagaggatcacgaggattttctaagcggtgaagaagcttgtggtttcttctccgatgaacagccgccgtcacttcattggtactctgcttcagatcattggacttgagaattgtttatcaaattggtgctctgtttagtctcaatgggaaaacagagaagagggcaaaggtggaataattgataaataaggattaaggatgaaggggattattaaattaaatccgcgggagaagttaattttgggtttaagattgtaatggctcttcatgtaattaacgatgtcgagaggggctttcacagaaataggaatcaatggggacactctgatatgaaagcaataaaactacgtttgacccctt

SEQ ID NO: 77583 - protein, 294 aa, Arabidopsis thaliana; identical to SEQ ID NO: 38954
  peptide (1)..(294): Ceres Seq. ID no. 12576889

SEQ ID NO: 77584 - protein, 285 aa, Arabidopsis thaliana; identical to SEQ ID NO: 38955
  peptide (1)..(285): Ceres Seq. ID no. 12576890

SEQ ID NO: 77585 - protein, 262 aa, Arabidopsis thaliana; identical to SEQ ID NO: 38956
  peptide (1)..(262): Ceres Seq. ID no. 12576891

SEQ ID NO: 77586 - DNA, 1515 bp, Arabidopsis thaliana
  misc_feature (1)..(1515): Ceres Seq. ID no. 12576892
  misc_feature (1)..(1515): Ortholog of  Ceres SEQ ID NO 13654989 as cited in SEQ ID NO 63117
  misc_feature (1)..(1515): Ortholog of  Ceres SEQ ID NO 13657138 as cited in SEQ ID NO 65923
  misc_feature (1)..(1515): Ortholog of  Ceres SEQ ID NO 13584744 as cited in SEQ ID NO 69137
aaaaattcaattccccacgtctgtcttatccacaataaaaccgaccttagcttagcttagactcattactcatttcacaaaaacagagagagaaatagagagacatactttacaggcaaacgatcgttcaccagctcagtttgttaggctggataaaccgagagccgtagacgatctctatataggcaagagagaaaagatgcgtaggtggttgtgctgtgcttgccacgttgaagaaccttaccattcttctgaaaatgaacacctcagaagccctaagcaccacaatgattttgggcatcacactagaaaaccacaggcggctgtgaagcctgatgctttgaaggagcctccatctattgatgtgcctgcattgtcattggatgagttgaaagaaaagaccgataactttggatcaaagtcattgattggtgaaggatcttacggcagagcctattatgcaaccttgaaagatggaaaggctgtcgcggtgaagaagcttgacaatgcagcggaacctgaatcaaatgttgagttcttgactcaggtctctagggtttccaagctgaagcacgataattttgttgagctcttcggttattgtgttgaagggaatttccgcattcttgcgtatgagtttgctactatgggatctttacatgacatcttacacgggaggaaaggagtccaaggagcacaaccaggtcctacgcttgactggatccaacgggtcagaatagcagttgatgcagctagaggacttgagtatttgcatgagaaagttcaacctgcagtaatacacagagatattcgatctagcaatgtgcttctctttgaagattttaaagccaagatcgctgattttaatctatcgaaccaatctcctgatatggctgctcgtcttcattctaccagagttttgggaaccttcggttaccacgcaccagagtatgcgatgactggtcaactgacacagaagagtgatgtttatagttttggtgtggtgcttttggagctcttgactggtaggaaacccgtcgatcatacgatgcctcgtggtcaacaaagtcttgttacttgggctactccaaggctaagtgaagacaaagtgaagcaatgtgttgatccaaaactaaagggagaatatcctcctaaagctgttgcaaagctcgctgcagtagcagcattgtgtgtgcaatatgaatcagagtttaggccaaacatgagcattgtggtaaaagctcttcaaccattgttgaggtcatcaacagcagcagctgtaccagtccaggaagcctgattcttctgtgcaatagcaacaatggaagattgggttcggtttcagttgttgccataccgtataaatgtgttcttaaagagagtctttttgtcgaggcttttcttcagttgggatgtatatgttttattaaggtgatgagtagtgatttggtgtgtcttttcaaatgctttgtggagtctgtttttccttataaaaatttattctaaatctggttt

SEQ ID NO: 77587 - protein, 366 aa, Arabidopsis thaliana
  peptide (1)..(366): Ceres Seq. ID no. 12576893
MRRWLCCACHVEEPYHSSENEHLRSPKHHNDFGHHTRKPQAAVKPDALKEPPSIDVPALSLDELKEKTDNFGSKSLIGEGSYGRAYYATLKDGKAVAVKKLDNAAEPESNVEFLTQVSRVSKLKHDNFVELFGYCVEGNFRILAYEFATMGSLHDILHGRKGVQGAQPGPTLDWIQRVRIAVDAARGLEYLHEKVQPAVIHRDIRSSNVLLFEDFKAKIADFNLSNQSPDMAARLHSTRVLGTFGYHAPEYAMTGQLTQKSDVYSFGVVLLELLTGRKPVDHTMPRGQQSLVTWATPRLSEDKVKQCVDPKLKGEYPPKAVAKLAAVAALCVQYESEFRPNMSIVVKALQPLLRSSTAAAVPVQEA

SEQ ID NO: 77588 - protein, 217 aa, Arabidopsis thaliana; identical to SEQ ID NO: 22807
  peptide (1)..(217): Ceres Seq. ID no. 12576894

SEQ ID NO: 77589 - DNA, 1721 bp, Arabidopsis thaliana
  misc_feature (1)..(1721): Ceres Seq. ID no. 12576899
  misc_feature (1)..(1721): Ortholog of  Ceres SEQ ID NO 15176532 as cited in SEQ ID NO 58184
  misc_feature (1)..(1721): Ortholog of  Ceres SEQ ID NO 13597546 as cited in SEQ ID NO 65017
  misc_feature (1)..(1721): Ortholog of  Ceres SEQ ID NO 14308015 as cited in SEQ ID NO 65798
  misc_feature (1)..(1721): Ortholog of  Ceres SEQ ID NO 15176077 as cited in SEQ ID NO 66728
  misc_feature (1)..(1721): Ortholog of  Ceres SEQ ID NO 14307908 as cited in SEQ ID NO 67189
  misc_feature (1)..(1721): Ortholog of  Ceres SEQ ID NO 13654353 as cited in SEQ ID NO 68318
aaccaaagactctttaccatctctttctctctctgtttgaagacatagcacaaaaaaaaaaaaaaagacagagcaaaaaaacacacaaagatgggcataatgatgatgattttgggtcttcttgtgatcattgtttgtttatgtactgctcttctccgatggaaccagatgcgatattctaagaaaggtcttcctcctggaaccatgggctggccaatatttggtgaaacgactgagtttcttaaacaaggaccagatttcatgaaaaaccaaagactaagatatgggagtttcttcaagtctcacattcttggttgcccaacaatagtctcaatggacgcagagttaaacagatacattctaatgaatgaatcgaaaggacttgttgccggttacccgcaatctatgcttgatattctagggacatgcaacatagctgcggttcatggcccgagccaccggctaatgagaggctcgttgctttctttaataagcccaaccatgatgaaagaccatctcttgcctaagattgatgatttcatgagaaactatctttgtggttgggatgatcttgagacagttgatatccaagaaaagaccaaacatatggcatttttatcatcgttgttacaaatagctgagactttgaaaaaaccagaggttgaagaatatagaacagagtttttcaagcttgttgtgggaactctatcggtcccgatcgatatcccgggaacgaattaccgcagtggagtccaagcaagaaacaacatcgataggttattgacagaactgatgcaagaaagaaaagagtctggagaaactttcacagacatgttgggttacttgatgaagaaggaagataaccgatacttgttaaccgataaagagataagagatcaagtggtaacgatcttgtattccggttatgagactgtctctacaacctccatgatggctcttaagtatctccatgatcatccaaaagctcttgaagaactcagaagagaacatttggctataagggagagaaaacgacctgacgaaccgctcactctcgacgatattaaatcgatgaaattcactcgagctgtgatctttgagacatcaagattggcaacgattgttaatggtgtccttaggaaaactactcacgacttagaactcaacggttatttaatcccaaaaggttggagaatttacgtatacacaagagagattaactatgatacatctctttatgaagatccaatgatctttaacccatggagatggatggaaaagagcttagaatcaaagagctatttcttactctttggaggtggagttaggctttgccctggaaaggaactaggaatctcggaagtctcaagcttccttcactactttgttacaaaatatagatgggaagagaatggagaagacaaattaatggtctttccaagagtttctgcaccaaaaggataccatcttaagtgttcaccttactgactagttttgtcctaatattgaaaaatgtgtaaataaatctattaagggtcattttgtagggctaattaacctattttatctattaaatctctcaagatcatagaggagatggataatgtacagagagaaagagagaagaagaaaatggaatatagaaaaaaataaaatatttgaaatgttgagcttagtctcttatcttgtaaatttgtaacccataaatttttacatttcat

SEQ ID NO: 77590 - protein, 465 aa, Arabidopsis thaliana; identical to SEQ ID NO: 28631
  peptide (1)..(465): Ceres Seq. ID no. 12576900

SEQ ID NO: 77591 - protein, 462 aa, Arabidopsis thaliana; identical to SEQ ID NO: 28632
  peptide (1)..(462): Ceres Seq. ID no. 12576901

SEQ ID NO: 77592 - protein, 461 aa, Arabidopsis thaliana; identical to SEQ ID NO: 28633
  peptide (1)..(461): Ceres Seq. ID no. 12576902

SEQ ID NO: 77593 - DNA, 833 bp, Arabidopsis thaliana
  misc_feature (1)..(833): Ceres Seq. ID no. 12576917
  misc_feature (1)..(833): Ortholog of  Ceres SEQ ID NO 12609339 as cited in SEQ ID NO 51780
acaacaatcgctggactctgctactgcgaagaacaacaaattccttgtttatcatggcgaattccggcgaagagaagttgaagctctactcttactggagaagctcgtgtgctcatcgtgtccgtatcgccctcgctttgaaagggcttgattatgagtatataccagtgaatttgctcaagggtgatcaattcgattcagatttcaagaagatcaatccaatgggaactgtaccagctctggtggatggagatgttgtgattaatgattcttttgcgataataatgtatctggatgagaagtaccctgagccacctttgttacctcgtgacctccataaacgagctgtgaattaccaggcaatgagtattgtcttgtctggcatacagcctcatcaaaatctggctgttattaggtatatcgaggaaaagataaatgtggaggagaagactgcctgggttaataatgctatcacaaaaggatttacagctctcgagaaactgttggtgaattgcgctgggaaacatgcgactggtgatgaaatttacctggctgatctctttctagcaccacagatccacggagcaatcaacagattccagattaacatggaaccgtacccaactcttgcaaaatgttacgaatcatacaacgaactgcctgcgtttcaaaatgcactaccggaaaagcagccagatgctccttcttccaccatctgattctgtgaacccataagctactctcactttaataaaacctcagacaacaacaacaacaacaatgataataataataccttgtactcatacatgtatcatataaaccagttacgt

SEQ ID NO: 77594 - protein, 238 aa, Arabidopsis thaliana
  peptide (1)..(238): Ceres Seq. ID no. 12576918
NNRWTLLLRRTTNSLFIMANSGEEKLKLYSYWRSSCAHRVRIALALKGLDYEYIPVNLLKGDQFDSDFKKINPMGTVPALVDGDVVINDSFAIIMYLDEKYPEPPLLPRDLHKRAVNYQAMSIVLSGIQPHQNLAVIRYIEEKINVEEKTAWVNNAITKGFTALEKLLVNCAGKHATGDEIYLADLFLAPQIHGAINRFQINMEPYPTLAKCYESYNELPAFQNALPEKQPDAPSSTI

SEQ ID NO: 77595 - protein, 221 aa, Arabidopsis thaliana
  peptide (1)..(221): Ceres Seq. ID no. 12576919
MANSGEEKLKLYSYWRSSCAHRVRIALALKGLDYEYIPVNLLKGDQFDSDFKKINPMGTVPALVDGDVVINDSFAIIMYLDEKYPEPPLLPRDLHKRAVNYQAMSIVLSGIQPHQNLAVIRYIEEKINVEEKTAWVNNAITKGFTALEKLLVNCAGKHATGDEIYLADLFLAPQIHGAINRFQINMEPYPTLAKCYESYNELPAFQNALPEKQPDAPSSTI

SEQ ID NO: 77596 - protein, 165 aa, Arabidopsis thaliana
  peptide (1)..(165): Ceres Seq. ID no. 12576920
MGTVPALVDGDVVINDSFAIIMYLDEKYPEPPLLPRDLHKRAVNYQAMSIVLSGIQPHQNLAVIRYIEEKINVEEKTAWVNNAITKGFTALEKLLVNCAGKHATGDEIYLADLFLAPQIHGAINRFQINMEPYPTLAKCYESYNELPAFQNALPEKQPDAPSSTI

SEQ ID NO: 77597 - DNA, 734 bp, Arabidopsis thaliana
  misc_feature (1)..(734): Ceres Seq. ID no. 12576934
  misc_feature (1)..(734): Ortholog of  Ceres SEQ ID NO 15168904 as cited in SEQ ID NO 20611
  misc_feature (1)..(734): Ortholog of  Ceres SEQ ID NO 15172900 as cited in SEQ ID NO 51859
atcacacaattcacaatcaatcgcagagccgattctcttcaaaacttgtctagtcctttgtccttgttgcaaacgatggcagaaacgaagaagatgatcatcctcaagagctccgacggtgaatccttcgaggtcgaggaagccgtcgcggtcgagtcccagacgattaagcacatgatcgaggacgactgcgtcgataacggaattccacttcccaatgtcaccggagccatcctcgcgaaggttatcgagtactgcaagaaacacgttgaagccgctgctgaggctggtggagacaaggatttctatggttccaccgagaaccacgagctcaagacttgggacaacgatttcgtcaaagttgatcatcctactctcttcgatctccttcgggctgccaactatttgaacatcagtggacttcttgaccttacgtgcaaggccgtggctgatcagatgagaggcaaaactccagcgcagatgcgtgaacacttcaacatcaagaacgactacacacctgaggaagaggccgaggttcgcaatgagaacaggtgggcgttcgagtgattggaaaagaatttaagaacatttgatatcaacaaataaaataagagaaatttattttgcctgaatttctttttgcttccaatctcttttgtcacaaaactcccagaagtgtttcacattttcttcattcaatcccggctaaactttatatacataaaatcacaaag

SEQ ID NO: 77598 - protein, 188 aa, Arabidopsis thaliana
  peptide (1)..(188): Ceres Seq. ID no. 12576935
ITQFTINRRADSLQNLSSPLSLLQTMAETKKMIILKSSDGESFEVEEAVAVESQTIKHMIEDDCVDNGIPLPNVTGAILAKVIEYCKKHVEAAAEAGGDKDFYGSTENHELKTWDNDFVKVDHPTLFDLLRAANYLNISGLLDLTCKAVADQMRGKTPAQMREHFNIKNDYTPEEEAEVRNENRWAFE

SEQ ID NO: 77599 - protein, 163 aa, Arabidopsis thaliana
  peptide (1)..(163): Ceres Seq. ID no. 12576936
MAETKKMIILKSSDGESFEVEEAVAVESQTIKHMIEDDCVDNGIPLPNVTGAILAKVIEYCKKHVEAAAEAGGDKDFYGSTENHELKTWDNDFVKVDHPTLFDLLRAANYLNISGLLDLTCKAVADQMRGKTPAQMREHFNIKNDYTPEEEAEVRNENRWAFE

SEQ ID NO: 77600 - protein, 157 aa, Arabidopsis thaliana
  peptide (1)..(157): Ceres Seq. ID no. 12576937
MIILKSSDGESFEVEEAVAVESQTIKHMIEDDCVDNGIPLPNVTGAILAKVIEYCKKHVEAAAEAGGDKDFYGSTENHELKTWDNDFVKVDHPTLFDLLRAANYLNISGLLDLTCKAVADQMRGKTPAQMREHFNIKNDYTPEEEAEVRNENRWAFE

SEQ ID NO: 77601 - DNA, 1656 bp, Arabidopsis thaliana
  misc_feature (1)..(1656): Ceres Seq. ID no. 12576952
  misc_feature (1)..(1656): Ortholog of  Ceres SEQ ID NO 14303572 as cited in SEQ ID NO 65530
aaacaatccatcgaaagatcatcaaaaaaatcatcttcttcctcaatttcttctgattcctcctctctttcttctacttctcaccaaatttctgttagttctctgataagtacatttcgtgcttatcaaatacttatattttaaggggttgaagttgtaattttgaagaagttgaagatcaatcaaaaataatagaagaacagagacgacgaaacgaaaccagccggagaactgagcagagaaaaacccccggcgagaatgggaaattcgaattcgtcttctgttgatcatcgcttcatttctgcttccagagcttttactcagaagaagctcgatgatctcaaatctctcttcgtctccctcgcttccaattctcagagcaatgaccaatacgtctcgtaccctgttttccaggagtattttggtctgagtggttctttaggagaaaggatgtttgatatggtcactcaacgcaggaaagatgataaaatgacttatgaagatcttgttattgctaaggcaacatacgagaaaggaactgacgatgagattgctgagtttatttaccagactttggatgttaatggcaatggggtcttgtcaaggtctgatttagagtcgttcctggtggtgattttgaagagtgtgttctccactgagagttctgatgcggaatcaagtgattacaagaagatggtggatgcgctactcaatgccgctactttctcaaaatctgatgatggttctgaaaaaggaatgtcttttgaagacttcagaagctggtgctcattcgttccaactatcagaaagttcctcggaagcttgcttatgcccccgagtacagtgagacctggatatcaagtcccgcatctgctatatgaagatagtgtgagttcagataggctactattaaagaaggaatacgcttggcatattggaggagctcttcctcaccatgagcttgtagagtggaagctgttgtatcacagttccgtacacggtcaaagcttcaacacattcctcggacacacatcaaacactggtatgtcggcatctgtgctaatcatcaaagacacagaaggatatgtgtatggagggtacgcctctcaaccttgggagaggtacagcgatttctatggagacatgaagtcttttcttttccagcttaaccctaaagcagccatttaccgaccaactggagcaaacaccaacattcaatggtgtgctactaatttcacatcggagaacattccgaatgggataggatttggaggtaagataaatcactttggcctgtttatatcagcaagcttcgatcaaggccagacattcgaatgcacaacgtttggtagcccgagcctttccaagacgagcagaattcagccagaagtgatagaatgctggggaatcgttcaggcctcaaatgaacaagacaccaaacataacgccatgaaaggtactgttctggagaggtttaaggaagatcgcaacatgctcaaactagtcggcatggcaggcaattcaaatgattgaatagagaatttaggttctgagattcaatcttagatatacactcaacgttcgtatacattgtgagagtgagtgtgcaaaaacattatgtacaataaagagtgttgtatgattcataccatttcc

SEQ ID NO: 77602 - protein, 424 aa, Arabidopsis thaliana
  peptide (1)..(424): Ceres Seq. ID no. 12576953
MGNSNSSSVDHRFISASRAFTQKKLDDLKSLFVSLASNSQSNDQYVSYPVFQEYFGLSGSLGERMFDMVTQRRKDDKMTYEDLVIAKATYEKGTDDEIAEFIYQTLDVNGNGVLSRSDLESFLVVILKSVFSTESSDAESSDYKKMVDALLNAATFSKSDDGSEKGMSFEDFRSWCSFVPTIRKFLGSLLMPPSTVRPGYQVPHLLYEDSVSSDRLLLKKEYAWHIGGALPHHELVEWKLLYHSSVHGQSFNTFLGHTSNTGMSASVLIIKDTEGYVYGGYASQPWERYSDFYGDMKSFLFQLNPKAAIYRPTGANTNIQWCATNFTSENIPNGIGFGGKINHFGLFISASFDQGQTFECTTFGSPSLSKTSRIQPEVIECWGIVQASNEQDTKHNAMKGTVLERFKEDRNMLKLVGMAGNSND

SEQ ID NO: 77603 - protein, 360 aa, Arabidopsis thaliana
  peptide (1)..(360): Ceres Seq. ID no. 12576954
MFDMVTQRRKDDKMTYEDLVIAKATYEKGTDDEIAEFIYQTLDVNGNGVLSRSDLESFLVVILKSVFSTESSDAESSDYKKMVDALLNAATFSKSDDGSEKGMSFEDFRSWCSFVPTIRKFLGSLLMPPSTVRPGYQVPHLLYEDSVSSDRLLLKKEYAWHIGGALPHHELVEWKLLYHSSVHGQSFNTFLGHTSNTGMSASVLIIKDTEGYVYGGYASQPWERYSDFYGDMKSFLFQLNPKAAIYRPTGANTNIQWCATNFTSENIPNGIGFGGKINHFGLFISASFDQGQTFECTTFGSPSLSKTSRIQPEVIECWGIVQASNEQDTKHNAMKGTVLERFKEDRNMLKLVGMAGNSND

SEQ ID NO: 77604 - protein, 357 aa, Arabidopsis thaliana
  peptide (1)..(357): Ceres Seq. ID no. 12576955
MVTQRRKDDKMTYEDLVIAKATYEKGTDDEIAEFIYQTLDVNGNGVLSRSDLESFLVVILKSVFSTESSDAESSDYKKMVDALLNAATFSKSDDGSEKGMSFEDFRSWCSFVPTIRKFLGSLLMPPSTVRPGYQVPHLLYEDSVSSDRLLLKKEYAWHIGGALPHHELVEWKLLYHSSVHGQSFNTFLGHTSNTGMSASVLIIKDTEGYVYGGYASQPWERYSDFYGDMKSFLFQLNPKAAIYRPTGANTNIQWCATNFTSENIPNGIGFGGKINHFGLFISASFDQGQTFECTTFGSPSLSKTSRIQPEVIECWGIVQASNEQDTKHNAMKGTVLERFKEDRNMLKLVGMAGNSND

SEQ ID NO: 77605 - DNA, 1064 bp, Arabidopsis thaliana
  misc_feature (1)..(1064): Ceres Seq. ID no. 12576982
  misc_feature (1)..(1064): Ortholog of  Ceres SEQ ID NO 14305854 as cited in SEQ ID NO 52331
  misc_feature (1)..(1064): Ortholog of  Ceres SEQ ID NO 15168588 as cited in SEQ ID NO 60235
acttcactctctaatttccttctctctatctctcaccatattcgcgattaaaaactctcaacttttctctcaaatttctgatcctttgatccaacagttagaagaagattcatctgatcatggccctcgaagcgatgaacactccaacttcttctttcaccagaatcgaaacgaaagaagatttgatgaacgacgccgttttcattgagccgtggcttaaacgcaaacgctccaaacgtcagcgttctcacagcccttcttcgtcttcttcctcaccgcctcgatctcgacccaaatcccagaatcaagatcttacggaagaagagtatctcgctctttgtctcctcatgctcgctaaagatcaaccgtcgcaaacgcgatttcatcaacagtcgcaatcgttaacgccgccgccagaatcaaagaaccttccgtacaagtgtaacgtctgtgaaaaagcgtttccttcctatcaggctttaggcggtcacaaagcaagtcaccgaatcaaaccaccaaccgtaatctcaacaaccgccgatgattcaacagctccgaccatctccatcgtcgccggagaaaaacatccgattgctgcctccggaaagatccacgagtgttcaatctgtcataaagtgtttccgacgggtcaagctttaggcggtcacaaacgttgtcactacgaaggcaacctcggcggcggaggaggaggaggaagcaaatcaatcagtcacagtggaagcgtgtcgagcacggtatcggaagaaaggagccaccgtggattcatcgatctaaacctaccggcgttacctgaactcagccttcatcacaatccaatcgtcgacgaagagatcttgagtccgttgaccggtaaaaaaccgcttttgttgaccgatcacgaccaagtcatcaagaaagaagatttatctttaaaaatctaatactcgactattaattcttgtgtgatttttttcgttacaaccatagtttcattttcatttttttagttacaaatttttaattgttctgatttggattgaatattggtatattgttaggggttg

SEQ ID NO: 77606 - protein, 273 aa, Arabidopsis thaliana; identical to SEQ ID NO: 37506
  peptide (1)..(273): Ceres Seq. ID no. 12576983

SEQ ID NO: 77607 - protein, 268 aa, Arabidopsis thaliana; identical to SEQ ID NO: 37507
  peptide (1)..(268): Ceres Seq. ID no. 12576984

SEQ ID NO: 77608 - protein, 251 aa, Arabidopsis thaliana; identical to SEQ ID NO: 37508
  peptide (1)..(251): Ceres Seq. ID no. 12576985

SEQ ID NO: 77609 - DNA, 2111 bp, Arabidopsis thaliana
  misc_feature (1)..(2111): Ceres Seq. ID no. 12576990
  misc_feature (1)..(2111): Ortholog of  Ceres SEQ ID NO 15178299 as cited in SEQ ID NO 0
  misc_feature (1)..(2111): Ortholog of  Ceres SEQ ID NO 15226331 as cited in SEQ ID NO 0
gaaccaatcaccctaaggggacacttaaagagagaaacaaatccttcttctaaaatattcttcaatcttcttctcgaagcttctccaaaaatggcgattacttcttctagaaccaccagatcaaacggatctgcttcgctccgatccaaatcaccgtccggtcgattctgtggcgtttactcaaaccgtatgccgtcatcatctccgtcgtcgtcaggtttcgcttcttccacaagctcaagtttctcctcaccgtctacagcgtttttcagcagccacaatcagaacaaccaccaccaacacagatctgcttctccgacgcgtgtgaatctattcacatcagctccgatgacgcaatcgtttcgttactcaatcgataacagatctatatcaccgaatcgatccatcgctgtttcttccaacaaacctagcaatcatcacaagattccggattcgaggagaagatgtatgtgctctccgacaacgcatcctggttcattccggtgtagtctacacaagaacgtcgcgaatccacatggtcaaggtacagcttcgtatacaacgaatggattgaatatgcgtcgatctgcgatgacgaattctcttgtgagaattggtggtgttgaaggtgaatgggtgcgaagagctttgactactttgattagaccatcttcacatcaactaaagagaagatctgcttatgagcctcgtcgtagtagactcgcatctatgtcgaaagcagaagatctttgaatctctcttcaggtttgttcttgtttttgatatactcagatctgccatgaacgagttgaatcaaggagcagaatcggagctgagtcataccggaccgagtcaaattcggagctgagttataccggaccgagttatgtaaaacggtgactaagacgacaccgtttttgttttgttgggtgggagatgagatgatgatgatgcattgtacatacacatattgcttattgaagcagaacaaaaaaatttcgcaagtcgaaagtatctagaaatctaaaaatggaaaatagtagtgacgaattgggtaattaaaatctggaaaaggacttagtagtaaatattgtttggattcaactttgcaaatctctccatctccattgttcgttgccttcaccgttagtttgttccgtcaagtcaacgttctctattctccgtcgttgacccgttctgtttgccgttaaccgtcgtcgtgtgttatgtgtgttccgttattatttctccaggtatgtgttgttcgtcgtgtcaggtttcgtacaatgaggagaagatgattacttaaccgttacgttcaactttggaatattttgggtttgtggactttggaagaaaaatgaatttggactatgagaaaaatcaaatatatgacctaaaacacggagaatttgataaaggacgatcgaatatgagtgattttgattcgtggaacgattaaggttttggttttggagctggagaatgtgaaagattcgaaggaatcagatttttctctggaatttgtgaatcacagatttagattcctgaaacggttgaggttaaagtgaaaagattcaatgaaatcatatttttaccataaatatctcaagaaggatatggtaaatgatgaaattcgtgagggtaagtttggaaagtaaaagattcttgaacggtatatatgagaaaaggacagctggccgatgaattgagaacagcccaacacgattacgttggggattccaacgtcttccttatctcgagggattaaagttggattatactattgtatgcataggtcgattttatagatcccttgattaattggttaattaaatataaactatactccttaggtttgctttagttgactgattatatcgtaatctctaagtactaggttctgtgtaaccttttcttcacggtagatgatggatgcactttttgttaatttggttttgattgtgttggattattctgtactttctttactcgtttagtttacttgactatttttatatatctgtaactctttctatatgttttctcattgtttttggaagttgaatatgatttactctattttcttctaaacatcataaaatgatacg

SEQ ID NO: 77610 - protein, 250 aa, Arabidopsis thaliana
  peptide (1)..(250): Ceres Seq. ID no. 12576991
EPITLRGHLKRETNPSSKIFFNLLLEASPKMAITSSRTTRSNGSASLRSKSPSGRFCGVYSNRMPSSSPSSSGFASSTSSSFSSPSTAFFSSHNQNNHHQHRSASPTRVNLFTSAPMTQSFRYSIDNRSISPNRSIAVSSNKPSNHHKIPDSRRRCMCSPTTHPGSFRCSLHKNVANPHGQGTASYTTNGLNMRRSAMTNSLVRIGGVEGEWVRRALTTLIRPSSHQLKRRSAYEPRRSRLASMSKAEDL

SEQ ID NO: 77611 - protein, 220 aa, Arabidopsis thaliana; identical to SEQ ID NO: 38621
  peptide (1)..(220): Ceres Seq. ID no. 12576992

SEQ ID NO: 77612 - protein, 187 aa, Arabidopsis thaliana; identical to SEQ ID NO: 38622
  peptide (1)..(187): Ceres Seq. ID no. 12576993

SEQ ID NO: 77613 - DNA, 1671 bp, Arabidopsis thaliana
  misc_feature (1)..(1671): Ceres Seq. ID no. 12577001
  misc_feature (1)..(1671): Ortholog of  Ceres SEQ ID NO 14302990 as cited in SEQ ID NO 67543
attttcgaacttgctttgctgtgataaagttctctcctttcctttctaaaggaagaagaaaggctttatctctcaaaaccctcatccacaaaatcccctttaatccgctaatcagagggtttttctgtttttgtgttgcttcgttactacggttacattcttctcttccccttttgatttcaaagaaccctcttgataccttaagaagaggcaatttgaagttttcttcacagatccgtcttagctctttctagagaatggcggatttgataccattttatctgaatattgtggcgtttctatgtactgttggagctattgctttggcgatatttcatatctacaggcatcttttgaattacacggaaccaacttatcagagatatattgtacgcattatcttcatggtcccggtttatgccttcatgtcattcttgtctcttgtgttacccaaaagctcgatatattttgattccatacgagaagtatatgaagcatgggttatctacaattttctatcgctgtgtttggcatgggttggaggcccaggatcagtagtgcttagtttgagtggtcgttctttaaagccatcatggtctcttatgacatgttgctttccgcctttaacactggacgggcgatttattcgacgatgcaagcagggttgtctgcaatttgtaattctgaagcctatcctagttgctgtcacacttgtgctttatgctaaagggaagtacaaggatggaaattttaaccctgatcaagcatatctctatcttaccatcatctataccatatcctacacagtggctttgtacgcacttgtgctgttttatatggcatgcagagatctacttcagccattcaatccagtcccaaagtttgtgatcataaagtctgtggtctttctaacctattggcagggtgttctcgttttccttgctgcaaaatctggattcataaagagtgcagaggcagcagctcattttcaaaattttataatatgtgtcgagatgctcattgctgcagcatgtcatttctatgcttttccatacaaggagtatgctggtgccaatgttggtggatctggcagtttctcaggaagcttatcacatgctgtaaaactaaatgacttttaccatgacactgttcaccagtttgctcctacctatcacgattatgtgctctataaccatcaagatggtggtgacgaggggacaaagaagtaccgatcgagaacctttgtgccaactggccaagagatggatgcaatgagaaaaaacaaacctgtgtatgcaaacaagatagatggtgtttcagtctcaagtagtctatcttcagaggcaagctcacctaaaagctccagcgtaacttctgatcctgcacgctctgatgctgtgaaatcttccttgctggtggatgcctcagattctcttgaaacaatgtatgatatgtcgctcattgacattgatctatctagtttccccagcaatgtcccatctgcaagtgaaagtgggcctagataggagcagagaaaatgtagaaatcaccattaacaggtacaaaacatgctcctaatagttgtattcagatgaatcttctgaggtgtgttcttagttggaagatgttgttagttggagacttgaggataaatgaaaaaagcttataaac

SEQ ID NO: 77614 - protein, 422 aa, Arabidopsis thaliana; identical to SEQ ID NO: 72790
  peptide (1)..(422): Ceres Seq. ID no. 12577002

SEQ ID NO: 77615 - protein, 373 aa, Arabidopsis thaliana; identical to SEQ ID NO: 72791
  peptide (1)..(373): Ceres Seq. ID no. 12577003

SEQ ID NO: 77616 - protein, 366 aa, Arabidopsis thaliana; identical to SEQ ID NO: 72792
  peptide (1)..(366): Ceres Seq. ID no. 12577004

SEQ ID NO: 77617 - DNA, 962 bp, Arabidopsis thaliana
  misc_feature (1)..(962): Ceres Seq. ID no. 12577015
  misc_feature (1)..(962): Ortholog of  Ceres SEQ ID NO 14312228 as cited in SEQ ID NO 59237
aaacaaactagtggtgagtgaatcttctctggtgagtaatggaagtgagtatgtctttgaatgcgttaactcggcttcctctgaagaacacaggaagattcgaagaggttggtttagcgagacactctctgtttagctcaagaacggcatgccgagagacggcggtacagcagcggcggatggtttttgtggtggaggctaagggaaagaaaggtatggcggcgcgtcagtatcaacgtacacctcctcctatgcctaagattgaagacgatggaaacccaagattcgttatcttcattcgtatggccaatgtgtatctttggtatcctctgagtataatagctggtggtactactgctaagatcatggttgctgcaaaagataacctcttggggaagtatatctacaaagacaccattgcaagaaacattgccgctgttatttacagagatgagaaagagattcaaaagacagcaattaagcagcatcgtgtcttgcgtacagccaccgagtttcgatatggctacaaacttgtagaaaacggaaacatgagagctgcacttagtacttcagatgttattgagctcccaacccaggaccagcttaaaacagtgttcgacaaagttaaagactactttggggatgcaaaagagtcattcggaaagctatcatcgctgaacccggggagtgacgaaaaaactgaagaaacctcggatgagaaagccaagtaagtataaacagggcctgaggctgaacaattgacacttggttggttgattttgatgtctcaaccgtctcggtatgggctgcagaaggtcactggatatgacgagactaccgctattttgtgcacattttctctatacatctctcacagaaacagcttctgttaaatctcttgtaacatataacttattgtgtattgtagatttgttgaaagaaagagccattggttacaactt

SEQ ID NO: 77618 - protein, 230 aa, Arabidopsis thaliana
  peptide (1)..(230): Ceres Seq. ID no. 12577016
MEVSMSLNALTRLPLKNTGRFEEVGLARHSLFSSRTACRETAVQQRRMVFVVEAKGKKGMAARQYQRTPPPMPKIEDDGNPRFVIFIRMANVYLWYPLSIIAGGTTAKIMVAAKDNLLGKYIYKDTIARNIAAVIYRDEKEIQKTAIKQHRVLRTATEFRYGYKLVENGNMRAALSTSDVIELPTQDQLKTVFDKVKDYFGDAKESFGKLSSLNPGSDEKTEETSDEKAK

SEQ ID NO: 77619 - protein, 226 aa, Arabidopsis thaliana
  peptide (1)..(226): Ceres Seq. ID no. 12577017
MSLNALTRLPLKNTGRFEEVGLARHSLFSSRTACRETAVQQRRMVFVVEAKGKKGMAARQYQRTPPPMPKIEDDGNPRFVIFIRMANVYLWYPLSIIAGGTTAKIMVAAKDNLLGKYIYKDTIARNIAAVIYRDEKEIQKTAIKQHRVLRTATEFRYGYKLVENGNMRAALSTSDVIELPTQDQLKTVFDKVKDYFGDAKESFGKLSSLNPGSDEKTEETSDEKAK

SEQ ID NO: 77620 - protein, 183 aa, Arabidopsis thaliana
  peptide (1)..(183): Ceres Seq. ID no. 12577018
MVFVVEAKGKKGMAARQYQRTPPPMPKIEDDGNPRFVIFIRMANVYLWYPLSIIAGGTTAKIMVAAKDNLLGKYIYKDTIARNIAAVIYRDEKEIQKTAIKQHRVLRTATEFRYGYKLVENGNMRAALSTSDVIELPTQDQLKTVFDKVKDYFGDAKESFGKLSSLNPGSDEKTEETSDEKAK

SEQ ID NO: 77621 - DNA, 1333 bp, Arabidopsis thaliana
  misc_feature (1)..(1333): Ceres Seq. ID no. 12577021
  misc_feature (1)..(1333): Ortholog of  Ceres SEQ ID NO 12781552 as cited in SEQ ID NO 51997
  misc_feature (1)..(1333): Ortholog of  Ceres SEQ ID NO 15176548 as cited in SEQ ID NO 53387
  misc_feature (1)..(1333): Ortholog of  Ceres SEQ ID NO 15169228 as cited in SEQ ID NO 55423
  misc_feature (1)..(1333): Ortholog of  Ceres SEQ ID NO 14312196 as cited in SEQ ID NO 56984
  misc_feature (1)..(1333): Ortholog of  Ceres SEQ ID NO 13597237 as cited in SEQ ID NO 64136
  misc_feature (1)..(1333): Ortholog of  Ceres SEQ ID NO 13598601 as cited in SEQ ID NO 69129
acatttggtgtctgctgctggcgttgagaagaagaagaagaagaaaggcacacaaaataacccatgtctggtttatacaataactcatcttacttctctcctgctcgagctgcttctcctcagattagaagcactcctgagatcgacagctctcagtacttgacggagcttctcgctgaacatcaaaagcttactccttttatgcaggtcctacccatatgtagccgtctattgaatcaagagatgttcagggtctctggaatgatgtctaaccaaggatttggtgattttgatagacttcgacacagaagtcccagccctatggcttcttctaatcttatgtctaatgtctctaataccgggttaggaggctggaacggcctctctcaggagagacttagtggaacacctggaatgacaatggattggcaaggtgcacctggaagccccagttcatacaccgtcaaaaggatattgcgtctggagattcctgtagataactatcctaatttcaattttgttggacgacttctcggccctagaggcaactcgttaaaacgcgttgaagctaccaccggttgccgagtattcatcagagggaaagggtcaatcaaggatcccgaaaaggaagataaattaaggggaagacctggctatgaacacttgaatgagcagcttcacatcttaatagaggcagatcttccagctagtattgtggagatacgtctgcgacaagctcaagaaattatagaagagttactaaagcctgtggacgagtcgcaagatttcataaagagacagcagctgagggaactggcattgctaaactcgaacaacctgagggaagagagtccggggccaagcggaggtggaagcgtttcgcctttcaattcaagtggtaaacgcccgaaaacaggatgctaagtagcgttttgtacgtctcgcccaaaacgctccttcaagccttataatggttacttcaaccaaaagtacatgtctgcatgcattacacagacgcacatgtgtatatctggtttctccagtagtggctgcaatggtggtggtctggtcaaggcctgccctggtctctctcgggtgagcgaccctgtggctttcgtttttcttcttctttattttaaacttttgtttttctttttcctcatcaaaaattcattacagattatttaaaaaagattcatgcaaaaaaaaaaaaaaagagtatgagatatataatatatatagggagaaaaagatgtggtggcttgggagggcgtggactgaaaattcttattgtataaacataaacaaaaaacacatttattggattgattct

SEQ ID NO: 77622 - protein, 286 aa, Arabidopsis thaliana; identical to SEQ ID NO: 39267
  peptide (1)..(286): Ceres Seq. ID no. 12577022

SEQ ID NO: 77623 - protein, 240 aa, Arabidopsis thaliana; identical to SEQ ID NO: 39268
  peptide (1)..(240): Ceres Seq. ID no. 12577023

SEQ ID NO: 77624 - protein, 226 aa, Arabidopsis thaliana; identical to SEQ ID NO: 39269
  peptide (1)..(226): Ceres Seq. ID no. 12577024

SEQ ID NO: 77625 - DNA, 1192 bp, Arabidopsis thaliana
  misc_feature (1)..(1192): Ceres Seq. ID no. 12577029
  misc_feature (1)..(1192): Ortholog of  Ceres SEQ ID NO 12609146 as cited in SEQ ID NO 52118
  misc_feature (1)..(1192): Ortholog of  Ceres SEQ ID NO 13594056 as cited in SEQ ID NO 55691
  misc_feature (1)..(1192): Ortholog of  Ceres SEQ ID NO 13638136 as cited in SEQ ID NO 58644
  misc_feature (1)..(1192): Ortholog of  Ceres SEQ ID NO 13596868 as cited in SEQ ID NO 62806
  misc_feature (1)..(1192): Ortholog of  Ceres SEQ ID NO 12587035 as cited in SEQ ID NO 63605
  misc_feature (1)..(1192): Ortholog of  Ceres SEQ ID NO 13595885 as cited in SEQ ID NO 69265
  misc_feature (1)..(1192): Ortholog of  Ceres SEQ ID NO 12566239 as cited in SEQ ID NO 0
  misc_feature (1)..(1192): Ortholog of  Ceres SEQ ID NO 13599119 as cited in SEQ ID NO 0
agttgcggaattgaacccaacttagggtttgtttacttctcatttctctcttcaatttcgtctcttgcttccatttctcaactcaaaatcgtaaatttcgcggatttttttgttcaattcagaatcaaatgcccaagatctgctgctctcgttccgctacacaagttgtggtagcacaaaaatcaaactcgggtaaaggaagaaacggtgaaggaggaatcaagtatggatttagtttgataaaagggaaatctaaccattcaatggaggattatcatgttgctaagtttaccaatttcaatggcaatgaattggggctttttgcaatctttgatggtcataaaggtgatcatgttgctgcttatctgcagaaacatctcttctctaatatccttaaagatggagagttcttggttgatcctcgaagagcaattgcgaaagcttatgagaatacagatcaaaagattttagcagataatagaacggatttagagagtggtggttcgactgctgtgactgcgattttgatcaatgggaaagctttgtggatagctaatgttggtgattcacgagctattgtttctagtcgaggtaaagcaaaacagatgagtgttgatcatgatcctgatgatgatactgagaggagtatgattgagagtaaaggtggatttgtgaccaacagaccaggtgatgttcctcgagtgaacggtttgttagcggtctctcgtgtctttggagataaaaaccttaaagcatatttgaactcagagcctgagattaaggacgtaaccattgatagtcacacagattttcttattctggctagtgacggtatttcgaaggtgatgtcaaaccaagaagcagttgatgtagctaagaagttgaaagatccaaaggaagcggcgaggcaagtagttgctgaagcattgaaaagaaacagcaaggatgacatatcttgcattgttgtccggtttagatgataaccaagaagactcagcttatattggatttggagcttcctttgcttcaccatgattcttttggggtccggtttagtttgattctgggtcttggttacttgtgcatttttaagaacatgagtttgaataggactattatatattactagtttgacaaaccagatattttatcatataaattacatgaaaagaatagtcgattttaaatggtt

SEQ ID NO: 77626 - protein, 283 aa, Arabidopsis thaliana
  peptide (1)..(283): Ceres Seq. ID no. 12577030
MPKICCSRSATQVVVAQKSNSGKGRNGEGGIKYGFSLIKGKSNHSMEDYHVAKFTNFNGNELGLFAIFDGHKGDHVAAYLQKHLFSNILKDGEFLVDPRRAIAKAYENTDQKILADNRTDLESGGSTAVTAILINGKALWIANVGDSRAIVSSRGKAKQMSVDHDPDDDTERSMIESKGGFVTNRPGDVPRVNGLLAVSRVFGDKNLKAYLNSEPEIKDVTIDSHTDFLILASDGISKVMSNQEAVDVAKKLKDPKEAARQVVAEALKRNSKDDISCIVVRFR

SEQ ID NO: 77627 - protein, 238 aa, Arabidopsis thaliana
  peptide (1)..(238): Ceres Seq. ID no. 12577031
MEDYHVAKFTNFNGNELGLFAIFDGHKGDHVAAYLQKHLFSNILKDGEFLVDPRRAIAKAYENTDQKILADNRTDLESGGSTAVTAILINGKALWIANVGDSRAIVSSRGKAKQMSVDHDPDDDTERSMIESKGGFVTNRPGDVPRVNGLLAVSRVFGDKNLKAYLNSEPEIKDVTIDSHTDFLILASDGISKVMSNQEAVDVAKKLKDPKEAARQVVAEALKRNSKDDISCIVVRFR

SEQ ID NO: 77628 - DNA, 1742 bp, Arabidopsis thaliana
  misc_feature (1)..(1742): Ceres Seq. ID no. 12577032
  misc_feature (1)..(1742): Ortholog of  Ceres SEQ ID NO 13656849 as cited in SEQ ID NO 65764
agaaaagcgacgccgttttaaaggagatggataaacaaccggcgaccagttggagtatccatacccggccggagataatcgccaagtacgagatcttcgagcgagtcggatccggagcttacgccgacgtttacagagctcgccgtctctccgacggtctaatcgtcgcgctcaaggagattttcgattaccaatctgcgttccgggagattgacgcgctcaccatcctcaatggatctcctaatgtagttgttatgcacgaatacttctggcgtgaggaagagaacgctgtgcttgtgcttgagtttcttaggtcggatctcgctgcggtgatccgagatggtaagaggaagaagaaggtagaaggaggggatggattctcggttggggagattaagagatggatgattcagattttaaccggtgttgatgcttgtcatcggaatttgattgtacatagagatttgaagcctgggaatatgttgatttctgatgatggagttcttaagcttgctgattttggtcaggctaggatactcatggagcatgatattgtagcttcagatgaaaaccaacaagcttacaaactggaagacaaagatggagaaaccagcgaaccaccagaagttattcctgattatgagaactcacctaggcaagggtctgatggtcaggaacgggaagcgatgagtaaagacgagtacttccgacaggtggaagagctcaaggctaaacaggttgttagagatgatactgataaggactcgaatgtgcatgatggagacatatcttgccttgcaacgtgcactgttagtgaaatggatgatgatctcggtaggaactcgttttcttacgatgctgacgaagcagtggatgatacacagggtttgatgacatcttgtgtgggaacccgatggtttaggccaccagaactgctctatggatctacgatgtatgggttagaggtcgatctatggtcgcttggttgtgtgtttgcagaactcttgtctcttgagcctttgttcccaggaatttcagatattgatcagatcagcagagtgaccaatgtgctgggaaatttaaatgaagaggtctggcctggttgtgttgatcttccagactacaagtcaatctcatttgctaaagtagaatctcctcttggtattgaaggatgccttcccaaccattcaggggatgtgatatcgctgctcaagaagcttatctgttatgatccagctagtagagctactactatggagatgctgaatgacaaatatttaagtgaagagcctcttccagttccagtttcagagctctatgtgcctccgacaatgagtggaccagatgaggattctccgagaaagtggaatgattacagagaaatggattcagattcagattttgatggctttggacccatgaatgtaaagcctaccagtagtggatttacaatagaattcccctgaccttggcatttaagagtccatggttgagcatcttgatcatcccgacttcccctgaattcgcctactttgtcaaaaatgtgttgtgtgtgtgtgtgtgttgttcctctctctctgcctccctcgtatgaaaatggtaacatttacaattggaaagtcggtgttagcctttagctattagctgaagagctagttttcttgttgcccaggccattctttaccctatttttcatctgaagtaacaatgaaacaaaatctatatatactcgagttttgctt

SEQ ID NO: 77629 - protein, 487 aa, Arabidopsis thaliana
  peptide (1)..(487): Ceres Seq. ID no. 12577033
KSDAVLKEMDKQPATSWSIHTRPEIIAKYEIFERVGSGAYADVYRARRLSDGLIVALKEIFDYQSAFREIDALTILNGSPNVVVMHEYFWREEENAVLVLEFLRSDLAAVIRDGKRKKKVEGGDGFSVGEIKRWMIQILTGVDACHRNLIVHRDLKPGNMLISDDGVLKLADFGQARILMEHDIVASDENQQAYKLEDKDGETSEPPEVIPDYENSPRQGSDGQEREAMSKDEYFRQVEELKAKQVVRDDTDKDSNVHDGDISCLATCTVSEMDDDLGRNSFSYDADEAVDDTQGLMTSCVGTRWFRPPELLYGSTMYGLEVDLWSLGCVFAELLSLEPLFPGISDIDQISRVTNVLGNLNEEVWPGCVDLPDYKSISFAKVESPLGIEGCLPNHSGDVISLLKKLICYDPASRATTMEMLNDKYLSEEPLPVPVSELYVPPTMSGPDEDSPRKWNDYREMDSDSDFDGFGPMNVKPTSSGFTIEFP

SEQ ID NO: 77630 - protein, 479 aa, Arabidopsis thaliana; identical to SEQ ID NO: 23187
  peptide (1)..(479): Ceres Seq. ID no. 12577034

SEQ ID NO: 77631 - protein, 403 aa, Arabidopsis thaliana; identical to SEQ ID NO: 23188
  peptide (1)..(403): Ceres Seq. ID no. 12577035

SEQ ID NO: 77632 - DNA, 803 bp, Arabidopsis thaliana
  misc_feature (1)..(803): Ceres Seq. ID no. 12577048
  misc_feature (1)..(803): Ortholog of  Ceres SEQ ID NO 13599401 as cited in SEQ ID NO 0
aatcacgtccttgtagaggaaaagaaaaaaaatggctgcttcatcttcctctttcactctctgtaatcacaccacacttcgtactctccctctgagaaagacccttgtcaccaaaacccaattttcagttcccacaaaatcatcagaatctaacttctttggctccacactcactcactcatcgtatatctccccagtctcttcctcttctctcaaaggcttaatctttgccaaggttaacaagggtcaggctgcaccagacttcacactaaaggatcaaaacggaaagccggtgagcctcaaaaagtataaagggaagcctgttgttctctacttctaccctgcagatgaaacccctggctgcaccaagcaggcttgtgctttcagagactcttatgagaaattcaagaaagctggtgcagaggtcattggcattagtggagatgactctgcttctcacaaggcgtttgcaagcaaatacaaactaccgtatacattgttaagcgacgaagggaataaggtgagaaaagattggggagtgcctggagacctgtttggagcattgccagggagacagacttacgttcttgacaaaaacggtgttgttcagctcatctacaacaaccagttccagcctgagaaacacatcgacgagaccttgaagtttctcaaagctgcttgatcattctctctttctcttctttctcttctttcatgcatgtctcatgtctgtctccatgagaccatgaccttcttatattgtttctgttgagtatgaattttcaataataccatgttatacc

SEQ ID NO: 77633 - protein, 216 aa, Arabidopsis thaliana
  peptide (1)..(216): Ceres Seq. ID no. 12577049
MAASSSSFTLCNHTTLRTLPLRKTLVTKTQFSVPTKSSESNFFGSTLTHSSYISPVSSSSLKGLIFAKVNKGQAAPDFTLKDQNGKPVSLKKYKGKPVVLYFYPADETPGCTKQACAFRDSYEKFKKAGAEVIGISGDDSASHKAFASKYKLPYTLLSDEGNKVRKDWGVPGDLFGALPGRQTYVLDKNGVVQLIYNNQFQPEKHIDETLKFLKAA

SEQ ID NO: 77634 - DNA, 1810 bp, Arabidopsis thaliana
  misc_feature (1)..(1810): Ceres Seq. ID no. 12577050
  misc_feature (1)..(1810): Ortholog of  Ceres SEQ ID NO 14311942 as cited in SEQ ID NO 51516
tcttctccattgttaaaagctctcacacaaccaccgttctccgtcacggtggcgctttattctctcatcggagcgcctcaccggtggcagacggtgtcgttgttcctctcctaaaacctccatcaatcaccatctctttacacagagctctaaccaaaatcttcgagagatggggcagagtatgagctgtggaagtcgaccggagcacggaatattcgcctctgtacagtgcggcgatatcatcactatccgtcgtgtgatggcgacggagcctagtctgttgaatcaaactactccttatgatcgtcactctgttcttcatgtcgctgctgctaatggtcagatcgagattttgtcattgcttttggaacgatttacgaatccagatttgttgaatcgtcacaagcagactccgttaatgttggctgcgatgtatggaagaatctcttgtgtgaagaagctagctgaagttggagctaatattttgatgtttgattctgtgaatcgaagaacatgtttgcattacgctgcttattatggacatgctaattgtgttcaagctattctctctgctgctcaatcaagtcctgttgctgtccattggggatatgcgagatttgtgaacataagagatgataaaggagcgactccgttgcatttagctgctcgacagagacgacctgaatgtgtgaatgttttgttggatagtggttctcttgtttgtgcatctactagtgtatatggttctccaggaagcacacctcttcatttagcagctagaagtggatctatagattgtgtcagaaagttgcttgcttggggtgctgatcgtcttcaacgagacgcttctgggagaataccttatgtggttgcgatgaagcataagcatggagcatgtggagccttacttaatccgtcctctgcagagccacttgtttggccatcaccattaaagttcatcagtgagcttaatgacgaggcgaaacttctcttagagcaggctttaatggaggctaacagggagagagagaaaaccatcctcaaaggaacagcttattccttaccatcaccctctttctctgacacggatgataacatgtccgaggtgagtgatacggaactgtgctgcatttgctttgagcaagtatgtacaattgaagttaaagactgtggtcaccaaatgtgtgcacaatgcacacttgcactgtgctgtcacaacaaaccaaacccaacgacctcaaccgtgactccaccggtctgtccgttctgtagaagcaccattgcatgtttagtcgtcgcccagaacaacaacaacaacaacgaaaagagcaaaagcctagatgatgttgttgttgttgatcgtgaggcaggtgatgttagctcctccaaattcagaaaacatagaagatcaataaaccttggcgaagaaagcagcagcttcatgggactatcaactattggatcattcggtaggataaccggccgtggctcgggaaggatcgcagccgaaaacgagctgatggacaaaccaatattgtgagggatcgattccgttttaagggacattttggggcatgggggagcaataaaaaagatgaggggatgaaattgtgagaatgtataaaatatagatgaatttatgttagatcttttgttgaagggaggaagattgaaataaggaaaaagatgtggggaggtgtgtaatgcaaggatttgttgtttctttgattaagtttggccaaaattgtttgttgttgttattatttggttacttgatatgaaagggaaacccataatctttttgtcaaat

SEQ ID NO: 77635 - protein, 456 aa, Arabidopsis thaliana; identical to SEQ ID NO: 21329
  peptide (1)..(456): Ceres Seq. ID no. 12577051

SEQ ID NO: 77636 - protein, 452 aa, Arabidopsis thaliana; identical to SEQ ID NO: 21330
  peptide (1)..(452): Ceres Seq. ID no. 12577052

SEQ ID NO: 77637 - protein, 426 aa, Arabidopsis thaliana; identical to SEQ ID NO: 21331
  peptide (1)..(426): Ceres Seq. ID no. 12577053

SEQ ID NO: 77638 - DNA, 727 bp, Arabidopsis thaliana
  misc_feature (1)..(727): Ceres Seq. ID no. 12577054
  misc_feature (1)..(727): Ortholog of  Ceres SEQ ID NO 15180374 as cited in SEQ ID NO 0
gcgtctctcctctctctgtttcttttctttttgtttcattttcttatctcctcacactcttcgaacaaggaagaaccctaatctcaagatgaatagggagaagttgatgaagatggctaataccgtccgcactggcggaaagggtactgtcagaagaaagaagaaggctgtgcacaagaccaatacaactgatgacaagaggcttcaaagcactcttaagagaattggagttaactccattcccgctattgaagaagttaacatctttaaggatgatgttgttattcagttcatcaaccctaaggttcaagcttcaattgctgcaaacacatgggttgttagcggttctcctcagaccaaaaaattgcaagatatccttcctcagatcatcagccaacttggaccagacaacatggacaacctgaagaagctagcagaacagttccagaaacaggcttctggtgaaggtaatgccgcctcagcaaccatacaagaagaggatgatgacgatgtcccagagcttgttggagagacattcgaaactgctgctgaagagaaagcaccagctgctgctgcttcttcttagagagaaaagagcgagaccacatccaaaaaaaaaccgcactttgatttttacatatctttataatatgtttgttcgctcgatcctttttgtagtttccgaccagaatcttgttttccatctaatgacttaaggtttttatcc

SEQ ID NO: 77639 - protein, 194 aa, Arabidopsis thaliana
  peptide (1)..(194): Ceres Seq. ID no. 12577055
RLSSLCFFSFCFIFLSPHTLRTRKNPNLKMNREKLMKMANTVRTGGKGTVRRKKKAVHKTNTTDDKRLQSTLKRIGVNSIPAIEEVNIFKDDVVIQFINPKVQASIAANTWVVSGSPQTKKLQDILPQIISQLGPDNMDNLKKLAEQFQKQASGEGNAASATIQEEDDDDVPELVGETFETAAEEKAPAAAASS

SEQ ID NO: 77640 - protein, 165 aa, Arabidopsis thaliana; identical to SEQ ID NO: 25920
  peptide (1)..(165): Ceres Seq. ID no. 12577056

SEQ ID NO: 77641 - protein, 159 aa, Arabidopsis thaliana; identical to SEQ ID NO: 25921
  peptide (1)..(159): Ceres Seq. ID no. 12577057

SEQ ID NO: 77642 - DNA, 1831 bp, Arabidopsis thaliana
  misc_feature (1)..(1831): Ceres Seq. ID no. 12577062
  misc_feature (1)..(1831): Ortholog of  Ceres SEQ ID NO 14302343 as cited in SEQ ID NO 67343
atcttcgttttgaatttgttgttaggttttatgctctgaggatctaaaatgggtgctgctgaaaacaaccttgaaatggagggtaccctggagatcggcatggagtatagaactgtttctggtgttgcgggacctctcgtcatccttgaaaaagtcaaggggcctaaataccaagaaattgtcaatatccgtcttggggatggaactacccgacgtggtcaagttctcgaagttgatggagagaaagctgttgttcaggtatttgagggaacatctggaatcgacaacaagtacacaactgtgcaatttacaggagaggttttgaaaactcctgtttctttggatatgcttggtcgcatcttcaatggttcagggaagcccattgacaacggtccacctatattgcctgaggcgtacttggatatttctggaagttctatcaatcccagtgagagaacctatcctgaagagatgattcagacgggtatatccaccattgatgtcatgaactctatcgccagaggacagaagattcccctcttttctgccgcaggtcttccccacaatgaaattgctgctcagatttgccgtcaggctggtttggttaagcgtttagagaagtcagataatcttctcgagcatcaggaggatgataacttcgccattgtgttcgcagcaatgggtgtgaacatggagactgcacaattttttaaacgtgatttcgaggagaatggatcgatggagagagtgactcttttccttaacttggcaaacgaccccactattgagcgtatcatcactcctcgtatcgcacttacaactgctgagtacttggcatatgaatgtggcaagcatgtccttgtcattctcacagacatgagttcctacgccgatgctcttcgtgaggtctctgctgcccgtgaagaagtgcctggaaggcgtggttacccaggttacatgtacaccgacttggctaccatatacgagagagcagggcgaattgaagggaggaaaggttccatcactcaaattcccattttaaccatgccaaacgatgatatcacgcatcccacaccagatctgacaggatacattacagaggggcaaatctatattgaccgacaacttcacaatagacagatctaccctccgatcaatgtcttgccatctctgtctcgtctcatgaagagtgccattggtgagggtatgactcgcagggaccactctgatgtttctaatcaattgtatgccaattacgctattggaaaggacgtgcaggccatgaaagccgtggttggagaagaagctctttcttccgaggatctgctatatcttgagttcttggataagttcgagaggaagtttgtggctcagggagcttatgatacccgaaacatcttccagtcactcgacctggcatggactctcctcagaatcttcccccgtgagttacttcaccgtatacccgcgaaaacccttgatcagttttacagtcgcgataccaccaactgaagaacatagtttctactgccttggtgtgatgatatgtccaaatgcatctttattttttacttctgcggttggatcacacctctgagtcgtccgtcccaataaatggtgtttgttcccaatcgctagaccctttattattgtcttcgaaactgagcaagccaggttgattattctttttgtaagagaaattgaaattcttgtataatttatgagattttgcatcttttttttggggtaccaaattactggttcagaacaacatacatttgtttgtcttattactgtcacgaatgtcaatgcagcttcttcttcttttttt

SEQ ID NO: 77643 - protein, 487 aa, Arabidopsis thaliana; identical to SEQ ID NO: 46610
  peptide (1)..(487): Ceres Seq. ID no. 12577063

SEQ ID NO: 77644 - protein, 478 aa, Arabidopsis thaliana; identical to SEQ ID NO: 46611
  peptide (1)..(478): Ceres Seq. ID no. 12577064

SEQ ID NO: 77645 - protein, 470 aa, Arabidopsis thaliana; identical to SEQ ID NO: 46612
  peptide (1)..(470): Ceres Seq. ID no. 12577065

SEQ ID NO: 77646 - DNA, 1124 bp, Arabidopsis thaliana
  misc_feature (1)..(1124): Ceres Seq. ID no. 12577066
  misc_feature (1)..(1124): Ortholog of  Ceres SEQ ID NO 12578688 as cited in SEQ ID NO 27
gttaaaataaaataaaataaaaataaaaggaagaagaagaagaagaaaggattcgtcttccttcttccacaccctttctgacacctcatctcccctcccaccttctccgtcccgttccgtttctccatcaggtaattattaatctcctcttaatcatccctctaatctctttcccgtttcttcatctcccgattctcaattccatctacacagatcctcgattccgatccaacagttcgaattcagtttccgattctgatctgatcgaaccaatactcactgagatttgatcggcgattatggagtctatatctccggtatcgaatcagcttcttcagccgacgacgacgagctctaattccgatcgctctcgtcgtaagcgtaagaagaaatcatcgccatcatcggttgagaaatctccatctccgtcaatatcgttggagaaatggagatcggagaagcagcaacagatctactcaacgaagctagttcatgctttaagagagctacgaatcagccaacaaccatcttcatcatcatcttcttcgattccacgtggaggtagagccgtacgtgaagtcgccgatagagctttagcagttgcggcgagaggtaaaacgttatggagtcgagcgatactttcaaaagctgtaaaactcaaattcaggaaacacaaacgccagagaatctctaatccgacgacgacgacgttaaccaccgggagtatcaggtcaaagaaacagagagcgacggttttgaggcttaaggctaaaggtttgccagctgtacagaggaaagtgaaagtactgagccggttagttcccggttgccgtaaacaatcattaccggtggttttagaagaaaccactgattatatagctgcgatggagatgcagattcgtactatgactgcgattctctccgccgttagttcttctcctccgccgccaacgccaggtcacgaagggggacaaacacacatgcttggttagttggccaaactgtccttttatttttttccaattttaaaaaccaaaaaaaaaactgtttttttttatcatattattattcttctcactgtattgtttgttgtttgaatattttactattcaactttatttacc

SEQ ID NO: 77647 - protein, 230 aa, Arabidopsis thaliana; identical to SEQ ID NO: 39916
  peptide (1)..(230): Ceres Seq. ID no. 12577067

SEQ ID NO: 77648 - DNA, 1216 bp, Arabidopsis thaliana
  misc_feature (1)..(1216): Ceres Seq. ID no. 12577078
  misc_feature (1)..(1216): Ortholog of  Ceres SEQ ID NO 13596891 as cited in SEQ ID NO 62868
  misc_feature (1)..(1216): Ortholog of  Ceres SEQ ID NO 12617235 as cited in SEQ ID NO 63990
  misc_feature (1)..(1216): Ortholog of  Ceres SEQ ID NO 13655371 as cited in SEQ ID NO 68945
ataacaaatgggagaagtttcagtggtggagaacaagaaagtgatactaaagaattatgtagatggtattcctacagaaacagacatggaagtgaaactcggagaaacaattgagctaaaagcaccaaaaggatcttcttgtttcctcgtcaaaaatctatacttgtcttgtgatccttacatgagaggtcgtatgcgtgattttcacggttcctatctcccgccttttgttcctggccaacgtatcgaagggtttggtttagcaagagtgatagattctgatgatactaattataagcccggcgatatagtctctggtatcattggttgggaagaatacagtttgctacgtagttcagataacctacagttgagaaatattcagttagacgacgacattccgctttcttatcatctcggacttctcgggatggctggatttacagcatatgcagggtttaatgagatatgttgtcctaagaaaggggacagtgtttttgtctctgcagcatgtggagcagttggacaacttgttggtcagctagctaagttgcacggctgctatgttgttggtagcgccggtagtaagcaaaaggttgagatccttaaaaacgagcttggatatgatgaagcctttaactacaaggaagaggctgatcttgatactgctttgaagaggtacttcccggaggggatagatatctacttcgataacgtgggtggatccatgcttgatgcagcgctcctcaacatgaaggtacgtggaagaatcgcgctctgtggaatggtgtctttgcaaagcctctcaacttcatcacaaggaatcaagaacctatacagcgctatctacaaacgtttaaggttagaagggttcttgcagagcgattaccttcatatcttcccacagtttcttgaaaatgtcaagagatattacaaagaaggcaagattgtctacgtcgaagatatatctgaaggcctcgacctcgctcccgctgcacttgttgggctgttttccgggaaaaatatcggtaaacaggttgttcgggttgctaaagagtgattgtttctgaaagtatattgcaagtgatttaagaacatacattggatgaaataaagccacgttatgtataacatcttcttgtcgaagtcaatgtatgtataagtctcttatggaaaaacgttagttaagcaacaatgttttaaaagtcttcataac

SEQ ID NO: 77649 - protein, 350 aa, Arabidopsis thaliana
  peptide (1)..(350): Ceres Seq. ID no. 12577079
MGEVSVVENKKVILKNYVDGIPTETDMEVKLGETIELKAPKGSSCFLVKNLYLSCDPYMRGRMRDFHGSYLPPFVPGQRIEGFGLARVIDSDDTNYKPGDIVSGIIGWEEYSLLRSSDNLQLRNIQLDDDIPLSYHLGLLGMAGFTAYAGFNEICCPKKGDSVFVSAACGAVGQLVGQLAKLHGCYVVGSAGSKQKVEILKNELGYDEAFNYKEEADLDTALKRYFPEGIDIYFDNVGGSMLDAALLNMKVRGRIALCGMVSLQSLSTSSQGIKNLYSAIYKRLRLEGFLQSDYLHIFPQFLENVKRYYKEGKIVYVEDISEGLDLAPAALVGLFSGKNIGKQVVRVAKE

SEQ ID NO: 77650 - protein, 324 aa, Arabidopsis thaliana
  peptide (1)..(324): Ceres Seq. ID no. 12577080
MEVKLGETIELKAPKGSSCFLVKNLYLSCDPYMRGRMRDFHGSYLPPFVPGQRIEGFGLARVIDSDDTNYKPGDIVSGIIGWEEYSLLRSSDNLQLRNIQLDDDIPLSYHLGLLGMAGFTAYAGFNEICCPKKGDSVFVSAACGAVGQLVGQLAKLHGCYVVGSAGSKQKVEILKNELGYDEAFNYKEEADLDTALKRYFPEGIDIYFDNVGGSMLDAALLNMKVRGRIALCGMVSLQSLSTSSQGIKNLYSAIYKRLRLEGFLQSDYLHIFPQFLENVKRYYKEGKIVYVEDISEGLDLAPAALVGLFSGKNIGKQVVRVAKE

SEQ ID NO: 77651 - protein, 292 aa, Arabidopsis thaliana
  peptide (1)..(292): Ceres Seq. ID no. 12577081
MRGRMRDFHGSYLPPFVPGQRIEGFGLARVIDSDDTNYKPGDIVSGIIGWEEYSLLRSSDNLQLRNIQLDDDIPLSYHLGLLGMAGFTAYAGFNEICCPKKGDSVFVSAACGAVGQLVGQLAKLHGCYVVGSAGSKQKVEILKNELGYDEAFNYKEEADLDTALKRYFPEGIDIYFDNVGGSMLDAALLNMKVRGRIALCGMVSLQSLSTSSQGIKNLYSAIYKRLRLEGFLQSDYLHIFPQFLENVKRYYKEGKIVYVEDISEGLDLAPAALVGLFSGKNIGKQVVRVAKE

SEQ ID NO: 77652 - DNA, 1006 bp, Arabidopsis thaliana
  misc_feature (1)..(1006): Ceres Seq. ID no. 12577082
  misc_feature (1)..(1006): Ortholog of  Ceres SEQ ID NO 15175949 as cited in SEQ ID NO 58819
  misc_feature (1)..(1006): Ortholog of  Ceres SEQ ID NO 13596660 as cited in SEQ ID NO 63180
aatctaatcactttctgcttcttcgcctacttcattcacatcttctttcctcttcctcctttgggttacttcttcgaatctcctgtaaatggagactggtgctggtataggtttgtaccctttgcatcgctgcaaaaccatttacctagtgagacatgctcaggggattcacaatgtggatggggagaagaattataaggcttacatgtctcatgactactttgatgctgagttgacccagcttggctggaaacaggtagatagtttgcgtaagcatgttcattccagtggacttcacaagaagatcgaactggtcatttcgtctccactgatgagaaccttgcaaactgctgttggtgtttttggtggagagggctacacggatatgagtgatgtactacctctaatggtagcaaatgcaggaaatagcagccgtgcagctatatcgagtttaaactgcccaccagttattacagaggagtcctgcagagagcatttgggagtgcatccatgtgatcagaggagaagtatcagcgactatcagtttcttttccctgcagttgacttttcactgatagaaagcgaggaagacaagttatggaaggctgatgttagagaaacgattgaagaacttgcagctagaggaaaaaagttcctgaactggctatggacacggaaagaaaaagagatagctattgtgacacacagtggtttcttgtttcacacattgaatgcactacaaaacgagtgtcatccagatgttaagaaggaaatttgcggccactttgctaattgtgagctacgttcaatggtcatcgtcgatagaagtatgttgggatcggacagttcggtgactgattatccaggaaagattccaaaggggattgatcttccaagtgatgctgttgtagatgataacaacatcaaagttgagtgattctttatgatggacactgcattgtcttcaacttttctatttatctatacacaaacaccttctttgctg

SEQ ID NO: 77653 - protein, 282 aa, Arabidopsis thaliana; identical to SEQ ID NO: 34767
  peptide (1)..(282): Ceres Seq. ID no. 12577083

SEQ ID NO: 77654 - protein, 243 aa, Arabidopsis thaliana; identical to SEQ ID NO: 34768
  peptide (1)..(243): Ceres Seq. ID no. 12577084

SEQ ID NO: 77655 - protein, 201 aa, Arabidopsis thaliana; identical to SEQ ID NO: 34769
  peptide (1)..(201): Ceres Seq. ID no. 12577085

SEQ ID NO: 77656 - DNA, 2912 bp, Arabidopsis thaliana
  misc_feature (1)..(2912): Ceres Seq. ID no. 12577091
  misc_feature (1)..(2912): Ortholog of  Ceres SEQ ID NO 15169316 as cited in SEQ ID NO 54821
  misc_feature (1)..(2912): Ortholog of  Ceres SEQ ID NO 15176851 as cited in SEQ ID NO 61348
  misc_feature (1)..(2912): Ortholog of  Ceres SEQ ID NO 13598294 as cited in SEQ ID NO 61982
aaaatgaggattttttaaacccatttttcccttcactaaaaaagaatcgacacacaaaaagagagagtttataaaatacacgataatatcaaagttaaacacacaccaaccaagtaaaaagatacaacacaattggaatctttcttctttgacaaaaaaaaaaggaatctctctctttctctgattctctcatgtccatgcaacaagaaacgtctcacatgacggcggctccacagaccaacggccatcaaatcttccctgagattgacatgtccgccggcgattcctcctccatcgtacgagctacagtcgtccaagcctctacagtcttctacgatactcccaccacgctagataaggcagagagactgctttctgaggcagcggagaatggatctcagctagtggtgttcccggaggctttcatcggtggatatccacgtggctctacctttgaattggctattggttctcgtaccgctaaaggacgagatgactttcgcaagtaccatgcttctgccattgatgttcctggccctgaagtggaacgattagcgttaatggccaagaagtacaaagtatacttggttatgggtgtgatagagagggaaggctacacgctatactgcaccgttcttttcttcgattcacaaggtctgttcttaggtaagcaccgcaaactcatgcctacagctcttgaacgttgcatttggggatttggagatggatcaaccatccctgtgttcgatactcctattgggaaaatcggtgctgctatttgttgggaaaataggatgccttctttgagaaccgcaatgtatgccaaaggcattgagatttattgtgcacctactgctgattcaagagaaacttggctagcatcaatgactcatattgcacttgagggtggatgttttgttttgtcagctaaccagttttgtcgtcggaaagactatccttctccgccggaatacatgttttccggttcagaagagagcctaacaccggactctgttgtctgcgctggtggaagctctatcatttcacctttgggaattgttttagctggaccaaactatagaggagaagctcttatcacagctgatctagatcttggggacatagcacgagccaagtttgattttgatgtggtcggacattactcgaggcctgaagtgtttagcttgaacataagggagcatccgagaaaagcggtcagcttcaagacgtcaaaggtaatggaagatgaatccgtctaacaaatgatcatttgttagtcgagttaattaaattaatccccccccccccccccgatattctaacgctcaaaactgatcactagcattcctagatttttccttcttgtgatcacttgcagctatggccacacatgcagctctcgccgtctcaagaatcccggtcacacagcgactgcagtctaagagtgccattcactctttccctgctcaatgctcctccaagaggctagaagtcgctgaattctccggtctgcgtatgagtagtatcggtggggaagcatctttcttcgatgctgtagctgcacaaatcatccctaaggctgtgacaacatcaactcctgttagaggagagacagtggcgaaactgaaagttgcgattaacggttttggaaggattggtaggaactttcttaggtgttggcatggtcgtaaagactctcctctcgaagttgttgtacttaacgacagtggtggtgtcaagaatgcatcccacttgcttaagtatgactccatgcttggaaccttcaaggctgaagtgaaaattgtggacaatgaaactattagtgttgatggtaagctcatcaaagttgtctccaacagagaccctcttaagcttccatgggctgagctcggcattgacattgttatcgagggaacaggagtgtttgttgatgggccaggagcagggaagcatatccaagccggagcctcgaaagttatcatcactgcaccagccaaaggtgctgatatccctacctatgttatgggagtcaatgagcaagactatggtcacgatgtcgctaacattattagcaatgcatcttgcaccaccaactgtttggcaccttttgctaaagtcttggatgaagaatttggaattgtcaaggggacaatgacaaccacacactcctacaccggagaccaaaggcttctagatgcatcacacagggacctaaggcgtgcaagagccgcagcactgaacatagtgcctaccagcacaggagcagccaaggcggtgtcattagtgttgccgcagctgaagggtaaacttaacggcattgcactccgtgtgccaacaccaaacgtctcagtggttgaccttgttataaacgttgagaagaaaggtttgacagcagaggatgtgaacgaggcctttagaaaagccgctaatggaccgatgaaaggcattttagacgtttgcgatgcgcctcttgtctctgttgacttcaggtgctctgatgtctctaccaccattgactcgtccctcactatggttatgggtgatgatatggtcaaggtggttgcttggtatgataacgagtggggttacagccaaagagtggtggatttggctcacctagtggctagcaagtggccgggagcggaagctgttggaagtggagatcctttggaggatttctgcaagacaaacccggctgatgaggaatgcaaagtctatgactgaacaactttgatcatttctttctttatttttcaccaaaacaatactttgtatcatgagttacttattcgaaatcgtactatgcatacttgtttttctcataagattttcttgtctgatgaacaactatatgttaagactgagagaattgtatttgagaaataaccattttatgctacatgttaaaacgt

SEQ ID NO: 77657 - protein, 447 aa, Arabidopsis thaliana; identical to SEQ ID NO: 49987
  peptide (1)..(447): Ceres Seq. ID no. 12577092

SEQ ID NO: 77658 - protein, 402 aa, Arabidopsis thaliana; identical to SEQ ID NO: 49988
  peptide (1)..(402): Ceres Seq. ID no. 12577093

SEQ ID NO: 77659 - protein, 355 aa, Arabidopsis thaliana
  peptide (1)..(355): Ceres Seq. ID no. 12577094
MSMQQETSHMTAAPQTNGHQIFPEIDMSAGDSSSIVRATVVQASTVFYDTPTTLDKAERLLSEAAENGSQLVVFPEAFIGGYPRGSTFELAIGSRTAKGRDDFRKYHASAIDVPGPEVERLALMAKKYKVYLVMGVIEREGYTLYCTVLFFDSQGLFLGKHRKLMPTALERCIWGFGDGSTIPVFDTPIGKIGAAICWENRMPSLRTAMYAKGIEIYCAPTADSRETWLASMTHIALEGGCFVLSANQFCRRKDYPSPPEYMFSGSEESLTPDSVVCAGGSSIISPLGIVLAGPNYRGEALITADLDLGDIARAKFDFDVVGHYSRPEVFSLNIREHPRKAVSFKTSKVMEDESV

SEQ ID NO: 77660 - DNA, 1479 bp, Arabidopsis thaliana
  misc_feature (1)..(1479): Ceres Seq. ID no. 12577103
  misc_feature (1)..(1479): Ortholog of  Ceres SEQ ID NO 15170209 as cited in SEQ ID NO 58562
  misc_feature (1)..(1479): Ortholog of  Ceres SEQ ID NO 12616332 as cited in SEQ ID NO 63449
  misc_feature (1)..(1479): Ortholog of  Ceres SEQ ID NO 13597498 as cited in SEQ ID NO 64648
aacggcactctcttctcttgtctctccttatttctcaatccagattccaatttttctcagcgaagtgagtgatctcgccgtttgtgttccgctggtgaatcatcaccggagaattgcagatccaatgatacattcctaatcggttttattttgagtgacgacgaatcattggatccagaaaatccgatttctggagatttgaattagtgaaatttgatcgaatttcgacagtgaagaggcatttgcgtctgattgctttgactaagagatctgattttggatctatttcaatggcgaggaaagggtcgagtataagattatcgagctcgagaatatcaacccttttgctctttatgtttgcaacttttgcttccttctatgtagcaggccgtttatggcaagaatctcaaactagggttcatctaatcaatgagctcgatagagtaaccggacaggggaaatctgctatatcagtggatgatactttgaagatcatagcttgcagggaacagaagaagacactagcagctcttgagatggaattaagttcagctaggcaagaaggctttgtttcaaaaagtcccaaacttgctgatggaactgaaaccaagaaaagaccgttagtggttatcgggataatgacaagtttgggtaacaagaagaagagggatgcagttcgtcaagcatggatggggactggtgcatcacttaaaaaacttgaaagtgaaaagggtgtgattgcaagatttgttattggaagaagtgcaaataaaggggacagcatggacaagagcattgatactgaaaatagtcaaaccgatgacttcattattctcgatgatgtagttgaggcacccgaggaagcttctaagaaggtaaaactgttctttgcctacgctgcagataggtgggatgcacagttttatgcaaaagccatcgacaatatctacgtaaatatagatgctctgggaactacgcttgcagcacatctggaaaacccacgggcttacatcggttgcatgaaatcaggcgaagtcttctcagaaccgaaccacaaatggtatgaaccagagtggtggaaattcggtgacaagaaagcatacttccggcatgcttatggggagatgtatgttataacgcacgcattggctagatttgtatcgatcaatagagacattcttcattcgtatgctcatgatgacgtcagcacgggttcatggtttgtgggtcttgatgttaagcatgtagatgaaggaaagttttgctgttctgcgtggtcctcagaagccatatgcgcaggagtgtagtagaaccaaagacgaatccaaagtgtgaggctcttggctctttggtgcttatagagaaagaagaacaaatgacatttgtctgaagaaagctaattacaccatttcatctatgtattctaaacttgccattttattggcattgcattatacgaagtctaggatttggatgtgg

SEQ ID NO: 77661 - protein, 338 aa, Arabidopsis thaliana; identical to SEQ ID NO: 26027
  peptide (1)..(338): Ceres Seq. ID no. 12577104

SEQ ID NO: 77662 - protein, 317 aa, Arabidopsis thaliana; identical to SEQ ID NO: 26028
  peptide (1)..(317): Ceres Seq. ID no. 12577105

SEQ ID NO: 77663 - protein, 256 aa, Arabidopsis thaliana
  peptide (1)..(256): Ceres Seq. ID no. 12577106
MELSSARQEGFVSKSPKLADGTETKKRPLVVIGIMTSLGNKKKRDAVRQAWMGTGASLKKLESEKGVIARFVIGRSANKGDSMDKSIDTENSQTDDFIILDDVVEAPEEASKKVKLFFAYAADRWDAQFYAKAIDNIYVNIDALGTTLAAHLENPRAYIGCMKSGEVFSEPNHKWYEPEWWKFGDKKAYFRHAYGEMYVITHALARFVSINRDILHSYAHDDVSTGSWFVGLDVKHVDEGKFCCSAWSSEAICAGV

SEQ ID NO: 77664 - DNA, 2062 bp, Arabidopsis thaliana
  misc_feature (1)..(2062): Ceres Seq. ID no. 12577111
  misc_feature (1)..(2062): Ortholog of  Ceres SEQ ID NO 15226493 as cited in SEQ ID NO 59078
aagatcctctacgacccgagtccattttagatcctaacccggtgacccgtttacctggtttcctctcaccaccaagttttgcttctaaaattttctggtagatctgagtccacaatcatcagaaatcaactttgtgaattgaaggccgatcactcctttgactttgttcttagggttcatcctcaaaggtgtttaatgagctcttagaagctatgggaatggcgtccatgagctctggtactgaaagccttcgtctttgcgtgtttgacttaagaagaggccaacacgaaggacaggaactggacaagatcttgttcttctatcctcctgatctaaccttctccactcagctatcggttataggtctcagtgaagggcttatcacgttcacgagcttttcctgtattgttgggtgttcctgagacgtggtttatggaatataaacacagacttttctccccggaggcagcttgtgaggtaattgaagcagagagacattcccatgttttctatgaggccgagcccgatatctggatggtcatgattgtagagaaaaataaggagattgaagctgtatggaggattgatgcattgcggagagtgcttaaggaagtgcactctctctttgttatgtttcaagggtcaattagggcattgcttgagaaagaaccaactggaggacttgtaagatcgcacttgtatccattcatcacagactatttaaatgatcttttcgttgggaaaaaacaacagttaccttccttccgtgacactttgaaagagcgtggaacagttcagatgctaactttagctagagatgcggcacttgaagttcagatgtacagtctctcgtcggagtgctagattcatgtgctgggaccgttcgatgccactctgtgattctatttcatgatctactggtgtcaacaactctctcacctgatgataccgtcgacttgtttgcattttctgtcatgagattaaccacaaacgcgctatcatctggcacaagttcctggtcatatctacgcaaaggatccggttcacctcaaatatcttctagatctactacggtgccccctcttggttcaggtggtacattgccttcgggaaatggtagtagcacaggtcgtgttattagacctttgcagcacgataagtggtcgaaggggaaagatgggtttcttgtaactgatatttggggtttagatgccaccccgacaattttgatacagaagacacaggaaagtttttaccttttgacttatcagtacaagagtctcaccttggttcttctcgtgcctatcgctgcaattgttaatggagagctagacatctcattcgtgaagcagcaagttattgaaaacgcatcgaccaaaatcttgaaagtcgaagagaagctatcgaaagggtggggcggtgagaatgcttaccatgtaagcggttaccgttacttactagttgataatgacatggaagtttccagagcttctccaccaggaaaggtagcaacactagcaaaggagtctttgcttgcactaaacaagctaagggaagaagtggatacagaaaaaaaccgctcgaagcaagagaaagacatggaaatatgcattcgagcgaagaacaacacatgggtcatcgcgcgtctaaacagaggtaaagagctttacatggctttagagaaagcaagtgaaactcttcttgatgctacagactctgtccaaagattcagcaacaggtaaaactttttagttactactactactaaagtactaacccatgaattagggtttccaaacaaaaaaaatgaaatgatgttgccaatttcttcaggtactgcagcggggcattccccatggattagattctgcaattgtttgttttgatagaagttgcaaaggaaagtgtttttgaagtgttttgagatatgttttagattttcaattataagatataaaagaaaccgttacaaagaatgagaatttggtgacttttgtatccacaactaaaagtaaacgtggaacttgacccttgacggtttgaataaaaccttcgcttaatc

SEQ ID NO: 77665 - protein, 255 aa, Arabidopsis thaliana
  peptide (1)..(255): Ceres Seq. ID no. 12577112
MRLTTNALSSGTSSWSYLRKGSGSPQISSRSTTVPPLGSGGTLPSGNGSSTGRVIRPLQHDKWSKGKDGFLVTDIWGLDATPTILIQKTQESFYLLTYQYKSLTLVLLVPIAAIVNGELDISFVKQQVIENASTKILKVEEKLSKGWGGENAYHVSGYRYLLVDNDMEVSRASPPGKVATLAKESLLALNKLREEVDTEKNRSKQEKDMEICIRAKNNTWVIARLNRGKELYMALEKASETLLDATDSVQRFSNR

SEQ ID NO: 77666 - protein, 143 aa, Arabidopsis thaliana
  peptide (1)..(143): Ceres Seq. ID no. 12577113
MEYKHRLFSPEAACEVIEAERHSHVFYEAEPDIWMVMIVEKNKEIEAVWRIDALRRVLKEVHSLFVMFQGSIRALLEKEPTGGLVRSHLYPFITDYLNDLFVGKKQQLPSFRDTLKERGTVQMLTLARDAALEVQMYSLSSEC

SEQ ID NO: 77667 - DNA, 1193 bp, Arabidopsis thaliana
  misc_feature (1)..(1193): Ceres Seq. ID no. 12577114
  misc_feature (1)..(1193): Ortholog of  Ceres SEQ ID NO 13599627 as cited in SEQ ID NO 0
  misc_feature (1)..(1193): Ortholog of  Ceres SEQ ID NO 14305069 as cited in SEQ ID NO 0
aaacaagccctatctccgattacacacacaatcaaaagaagatcaagccaaaaacagaggcattgcgaattttaattgatcactctctctctctatctctgttcacacatctctcccaaaggtagaagaagatggggacgacgttagatgtatcaagagcagagctagcacttgtggtaatgtatttgaacaaagcagaggcaagagataagttatgcagagctatacagtatggttccaagttcttgagtggtggacaacctggtactgctcaaaatgttgacaaatctactagcttagcaagaaaagtcttccgtcttttcaaggttaatccttttgattttgattagagtgtgtttttacctctttgtttaattaactaaatattatcattgttgcagtttgtgaatgacttgcatggtcttatcagtcctgtgcctaaaggaactcctcttcctcttgttttacttggaaaggtaggtgctttagagatcaaagctcagagttcgtttcggttttatatctttgttctgtatcaatctttgttgttattttcagtcgaagaacgcacttttatctacattcttgttcctggatcaaattgtctggcttgggagatcaggaatatataagaacaaagaacgagctgagttacttggacgtatatctctcttctgctggatgggatcttctgtctgcacaactttagtcgaggttggtgagatgggaaggctttcttcatcaatgaagaagatcgaaaagggactcaagaatggaaacaagtatcaggatgaggattatcgtgctaagctaaaaaaatcaaacgagaggtcacttgctttgatcaaatcagctatggacattgttgtagcagctggtcttcttcagttagctccaacgaagatcactcctcgtgtcaccggagcttttggattcatcacctccatcatttcttgttaccagttgcttccgacacgccccaagatcaaaacaccctgaagtcaatcgaggaagctggtgttaaggagaaagtcatttcagaaagtttctgttcttcttattattaaggaaattcactgctgttataaaacatcgtataaaatacttatttgcaggaattacggttattataaatttatgcctcagattcttgatacacaagtttcaatactcaatagtattgcattattatg

SEQ ID NO: 77668 - protein, 105 aa, Arabidopsis thaliana
  peptide (1)..(105): Ceres Seq. ID no. 12577115
MGSSVCTTLVEVGEMGRLSSSMKKIEKGLKNGNKYQDEDYRAKLKKSNERSLALIKSAMDIVVAAGLLQLAPTKITPRVTGAFGFITSIISCYQLLPTRPKIKTP

SEQ ID NO: 77669 - protein, 91 aa, Arabidopsis thaliana
  peptide (1)..(91): Ceres Seq. ID no. 12577116
MGRLSSSMKKIEKGLKNGNKYQDEDYRAKLKKSNERSLALIKSAMDIVVAAGLLQLAPTKITPRVTGAFGFITSIISCYQLLPTRPKIKTP

SEQ ID NO: 77670 - protein, 84 aa, Arabidopsis thaliana
  peptide (1)..(84): Ceres Seq. ID no. 12577117
MKKIEKGLKNGNKYQDEDYRAKLKKSNERSLALIKSAMDIVVAAGLLQLAPTKITPRVTGAFGFITSIISCYQLLPTRPKIKTP

SEQ ID NO: 77671 - DNA, 1652 bp, Arabidopsis thaliana
  misc_feature (1)..(1652): Ceres Seq. ID no. 12577130
  misc_feature (1)..(1652): Ortholog of  Ceres SEQ ID NO 14302458 as cited in SEQ ID NO 66127
ctgtactttcacaagcttccaagctctcttatcattcactgatttttggttctcgagaaaaaagtgaagatttttgagattctctttcgatggattacgaacgaatcggaaagacccaggttactagtagcggcggcggattttctccggggaagttaaggagtatgcttcttctaggtgttgatagaaagaagaatgaagaagaagaatcaactcctacaatgagatctgggtctaatcaaattgatgaccctagggtttatgttgctagtggattagatgattgcaaagatgttgatgttgtgagtgagattactgattgttctacttcagggatagctagatcgattagtttgggtcttcaagagtattctgattatgataatgtgaatgagatcaagagtgtttctgcatcatctgtctttgagtttcaaaagactgagaaggaaaaagttaatcaaagaatgcctattagatcattctctaaaccagctccatctaaatgggatgatgctcagaaatggattgctagtcctacggctaaccgaccgaagactggacaggttcaggttccgggttcgaagaaagggcctagctttggtcgtcagtcttctatgaagattgttgaagttgctgaacatagagtggttgaagagcctgatacaaagagaatagatgtaagccaagtgaaaaaggatatgggaaacaagtttggtagctgggaagttgattcgtacactaccgtggattcatatgtcaaaccggttcttatggttgagaactctattgtagaatcagcaactgaagttaatctcagccgtcatgactcgtcagtcgcaactgcgtttgctcaaccgccttcaacggcaaggtctgtgtcaatgagagacatgggaactgaaatgactcctatagcgagccaagaaccttctagaaacgggacaccgattagggcaacaacgccaatacgaagtcctatatcttctgaaccttcaagtccaggcagacaagcatcagcttctcctatgagtaacaaggaactgtcagagaaagagcttcaaatgaaaactaggagagagataatggtgttgggtactcaacttggtaaatttaacattgctgcttgggctagcaaggaggatgaagataaagacgcatccacatcattaaagaccaaagcttctctacaaacttctaaaagtgtttctgaagctcgtgctacagcgtgggaggaagcggaaaaagctaagcacatggctaggttcagacgcgaagagatgaagattcaagcatgggagaatcatcagaaggcgaaatctgaagccgagatgaagaaaaccgaggttaaagttgagaggattaagggacgagcacaagaccggttgatgaagaaactcgctacaatcgagcgcaaagcagaggaaaagcgagcagcggctgaagcaaagaaggatcatcaggcagctaaaacagagaaacaagctgaacaaatccgaagaacaggcaaagtaccttcattgttgttctcttgctttagcttttgttcttaaatccaatcctattgtgaatgtgatgttgttaattctcaagaacacatctttctatcatcatttgtataataaaagctttgaaaaacttatttcttgtgatct

SEQ ID NO: 77672 - protein, 486 aa, Arabidopsis thaliana; identical to SEQ ID NO: 38047
  peptide (1)..(486): Ceres Seq. ID no. 12577131

SEQ ID NO: 77673 - protein, 461 aa, Arabidopsis thaliana; identical to SEQ ID NO: 38048
  peptide (1)..(461): Ceres Seq. ID no. 12577132

SEQ ID NO: 77674 - protein, 442 aa, Arabidopsis thaliana; identical to SEQ ID NO: 38049
  peptide (1)..(442): Ceres Seq. ID no. 12577133

SEQ ID NO: 77675 - DNA, 2060 bp, Arabidopsis thaliana
  misc_feature (1)..(2060): Ceres Seq. ID no. 12577134
  misc_feature (1)..(2060): Ortholog of  Ceres SEQ ID NO 12626078 as cited in SEQ ID NO 69113
acttcctttccttgcttcagctccccttttcttatccggaaaccaaaaacttccggtgataaaacctccttcgtcatctctctacttcttgctgaattttgtctgtctttgaagtggataaaatggcgtcaactttcactgccacatcttctattggttcaatggttgctccgaatggtcacaaatctgataagaaacttatcagcaagttgtcttcaagctcatttggaaggagacaaagtgtgtgtcctagacccagaagatccagttctgcaattgtgtgcgcagcaaaggaattacatttcaacaaagatgggactaccattaggagacttcaagctggtgtcaacaagctcgcagatcttgttggtgttacacttggacccaaaggacgaaatgttgttcttgagagcaagtatggatcaccacgaattgttaatgatggtgtgactgttgcaagagaggttgagttggaagacccggttgagaacattggcgctaagcttgtgaggcaagcggctgccaaaaccaatgacttggctggtgacggtacaacaacatctgttgttcttgcacaaggttttatcgctgagggtgtcaaggtggtagctgctggtgcaaaccctgttttgatcaccagaggtattgagaagacagcaaaggctttggttaccgagctcaagaaaatgtctaaggaggttgaagacagtgaacttgcagatgttgcagctgttagtgcgggtaacaacgacgaaattggaaatatgattgctgaagcaatgagcaaagtgggcaggaaaggtgtggtgacccttgaggagggtaaaagtgccgagaacaacctctacgtcgtagaaggaatgcaatttgaccgtggttatatctctccttactttgtgacagacagcgagaaaatgtccgtcgagttcgacaattgcaagttacttctcgttgacaagaaaattaccaatgcaagggatcttgttggtgttttggaggatgcaattagaggcggatacccaatattaattattgctgaagacattgaacaagaagctttagcgactcttgttgtaaacaagcttagaggtacactgaagatagcagctctcagagctccagggtttggagagcgcaagagccaataccttgatgatattgccattctaactggagcaactgtgatccgtgaggaagttggtctttcacttgacaaagctggaaaagaggttcttggtaatgcttcaaaggttgtcctcacaaaggagacctcgaccatagtgggtgatggaagcacacaggatgcagtgaaaaagcgtgttacacagattaaaaatcttattgagcaagcggagcaagattacgagaaggagaaactcaatgagagaattgcaaagctctctggtggagttgctgtgattcaggttggagcacaaactgagacagaactcaaagagaagaagttgagagttgaagatgctcttaatgcaacaaaggccgctgtcgaggaaggtattgttgttggtggtggttgcactctgcttcgtcttgcttccaaggttgatgccattaaagccacgcttgataatgatgaagaaaaggttggagcggatatagttaaaagagcactaagttaccccctaaaactaatcgccaagaatgctggtgttaatggaagtgtagttagcgagaaggtgctttccaacgataacgtgaaattcggttacaatgctgcaaccggcaagtacgaggatttgatggctgcaggaatcatcgatccaacaaaggttgtgagatgttgcttggaacacgcagcttcggttgcaaagactttcttgatgtcggactgcgttgttgttgagatcaaggaacctgaaccagttcccgtcggcaacccaatggacaactcaggatatggatactaagaggagataggctaatattgaaacggattactttagcttgcgagtgtaatgattttgaacaagagaatgtgtaatgtgaaactgaaattttgaattaatcatcatatgaataaatcatgattccctcaatgcttc

SEQ ID NO: 77676 - protein, 600 aa, Arabidopsis thaliana; identical to SEQ ID NO: 44357
  peptide (1)..(600): Ceres Seq. ID no. 12577135

SEQ ID NO: 77677 - protein, 587 aa, Arabidopsis thaliana; identical to SEQ ID NO: 44358
  peptide (1)..(587): Ceres Seq. ID no. 12577136

SEQ ID NO: 77678 - protein, 412 aa, Arabidopsis thaliana
  peptide (1)..(412): Ceres Seq. ID no. 12577137
MSKEVEDSELADVAAVSAGNNDEIGNMIAEAMSKVGRKGVVTLEEGKSAENNLYVVEGMQFDRGYISPYFVTDSEKMSVEFDNCKLLLVDKKITNARDLVGVLEDAIRGGYPILIIAEDIEQEALATLVVNKLRGTLKIAALRAPGFGERKSQYLDDIAILTGATVIREEVGLSLDKAGKEVLGNASKVVLTKETSTIVGDGSTQDAVKKRVTQIKNLIEQAEQDYEKEKLNERIAKLSGGVAVIQVGAQTETELKEKKLRVEDALNATKAAVEEGIVVGGGCTLLRLASKVDAIKATLDNDEEKVGADIVKRALSYPLKLIAKNAGVNGSVVSEKVLSNDNVKFGYNAATGKYEDLMAAGIIDPTKVVRCCLEHAASVAKTFLMSDCVVVEIKEPEPVPVGNPMDNSGYGY

SEQ ID NO: 77679 - DNA, 966 bp, Arabidopsis thaliana
  misc_feature (1)..(966): Ceres Seq. ID no. 12577142
  misc_feature (1)..(966): Ortholog of  Ceres SEQ ID NO 15225572 as cited in SEQ ID NO 61651
ccattctccacattttccaaggcttcagtttcacttcatcacactctctgcaaaaaaacaaaaatgagctctcaaatctgcagatctgcttccaaagcagccaaatctcttctctcttcagctaaaaatgctcgcttcttctctgaaggacgagccattggtgctgcggcagcggtttcggcgtcaggaaaaattcctttgtatgcatctaactttgcaagatcatcaggttctggtgttgcttctaagagttggatcactggactcttagctcttcctgctgcagcttatatgattcaagatcaagaggttcttgctgctgagatggaacgaacttttattgctatcaagcctgatggtgtgcaaagaggactgatatcagagatcatttctcgattcgaacgcaagggattcaagctagttggtatcaaagtcattgttccttctaaagatttcgcacaaaagcattaccatgatcttaaggaaagacctttcttcaatggtttgtgtgacttccttagctctggtcctgttattgccatggtctgggaaggagatggtgtgatcagatacggacgtaaactgattggagccactgatcctcagaaatctgagcctggaacaatccgaggagatcttgcagttactgttggcaggaacataatccatggaagtgatggaccagagactgcaaaggatgagatcagtctgtggtttaagcctcaagaacttgtttcttacactagtaactctgagaagtggctctatggtgacaactaaatccctcttcctcttgtcttttgaaatcaaatcacattggtttttcttttcttttcttacccatacaataaaaacaagaaacagttgttacggatacaaacacattccgggttttgatttttccccggtgaactcagtaaacagagcataagcaataagtatgggatgtttgaatctatattgttc

SEQ ID NO: 77680 - protein, 259 aa, Arabidopsis thaliana
  peptide (1)..(259): Ceres Seq. ID no. 12577143
PFSTFSKASVSLHHTLCKKTKMSSQICRSASKAAKSLLSSAKNARFFSEGRAIGAAAAVSASGKIPLYASNFARSSGSGVASKSWITGLLALPAAAYMIQDQEVLAAEMERTFIAIKPDGVQRGLISEIISRFERKGFKLVGIKVIVPSKDFAQKHYHDLKERPFFNGLCDFLSSGPVIAMVWEGDGVIRYGRKLIGATDPQKSEPGTIRGDLAVTVGRNIIHGSDGPETAKDEISLWFKPQELVSYTSNSEKWLYGDN

SEQ ID NO: 77681 - protein, 238 aa, Arabidopsis thaliana; identical to SEQ ID NO: 23294
  peptide (1)..(238): Ceres Seq. ID no. 12577144

SEQ ID NO: 77682 - protein, 162 aa, Arabidopsis thaliana; identical to SEQ ID NO: 23295
  peptide (1)..(162): Ceres Seq. ID no. 12577145

SEQ ID NO: 77683 - DNA, 1787 bp, Arabidopsis thaliana
  misc_feature (1)..(1787): Ceres Seq. ID no. 12577160
  misc_feature (1)..(1787): Ortholog of  Ceres SEQ ID NO 13596816 as cited in SEQ ID NO 62287
ctgatctgaattctcgccgagtgaatctagaaccaggtttaaggttttcaagcactctgtttccaatgctgcttccgagatggtttgcagaagcgttgttgctcctactttcaattcttgcctgttcaaacgctgcatttatcggtgtaaacattggcactgatctcaccaacatgccaccgccttcagacattgtaacacttctcaaatcacaacaaatcacacacgtccgtctctatgatgctaatagccatatgctcaaagcatttgccaacactagcatcgaagttatggtcggtgtaaccaatgaagaaatcctcaaaatcggacggtttccttcagctgcagctgcttgggttaacaaaaacgtcgctgcttatattccttcaactaatataaccgccattgctgttggtagtgaggttctcaccacgattcctcacgtggcgccgattctcgcctctgctcttaacaacattcacaaggctcttgtggcttccaatctcaactttaaggtcaaagtctccagccctatgtctatggatataatgcctaaaccgtttcctccatctacatctacctttagcccgtcgtggaacaccacggtttaccagcttcttcagtttttgaagaacactggttcctttttcatgttaaacgcgtatccttactacggttacacaaccgctaatgggattttcccgcttgattacgctttgttcaagcagctttctccggtgaagcagattgttgatcccaacacgcttttacattacaacagcatgtttgatgctatggttgatgctgcttactactccatggaagctttgaatttctccaagattcctgttgtagtcacggaaacaggctggccttcgtctggtggaagcgatgaagcggctgcaacagtcgctaatgcggagacattcaacactaacttgatcaagagagtgctgaacaactcaggtcctcctagtcaaccagacataccgataaacacttacatctacgagctgtacaatgaagacaagcggtcaggaccagtctctgaaagaaactgggggattttgtttccaaatgggacctcggtttaccctctgagtttgagtggtggctctagctccgcagctctaaacggttcatcgatgttctgcgtggctaaagcagatgctgatgatgataagttggttgacggtttgaattgggcgtgtggtcaaggccgagctaactgcgctgccattcaaccgggccaaccttgctacctccctaacgatgttaagagccatgcttcttttgctttcaatgactattaccagaagatgaaaagtgcaggtggaacttgtgactttgatggtacggctatcactacgactagagatcctagctatagaacatgtgcatatacgggaagcttaaacgcaaacgctactaatggaaactttcctccggatgcgttaggacccgcaagtccattgggaggaaacgcaaacgcacgtatcatctttagctaccatcttcccatattggcaccgttagctctcactctactacaactgttgcttcagcatgaccgccttttgtagaacgtttgccaaaaagcggttttgtagtaaccggggaagtctacctgtggcttggattggatttcttacggttaccggtagttactgtgtactttgtttttagtgtaagtgtaactagagactaaagagggctcacaagttcccattcttttttttgtcttcatctttgaactaaaatattcgaattagagtgatttaaatttc

SEQ ID NO: 77684 - protein, 526 aa, Arabidopsis thaliana
  peptide (1)..(526): Ceres Seq. ID no. 12577161
DLNSRRVNLEPGLRFSSTLFPMLLPRWFAEALLLLLSILACSNAAFIGVNIGTDLTNMPPPSDIVTLLKSQQITHVRLYDANSHMLKAFANTSIEVMVGVTNEEILKIGRFPSAAAAWVNKNVAAYIPSTNITAIAVGSEVLTTIPHVAPILASALNNIHKALVASNLNFKVKVSSPMSMDIMPKPFPPSTSTFSPSWNTTVYQLLQFLKNTGSFFMLNAYPYYGYTTANGIFPLDYALFKQLSPVKQIVDPNTLLHYNSMFDAMVDAAYYSMEALNFSKIPVVVTETGWPSSGGSDEAAATVANAETFNTNLIKRVLNNSGPPSQPDIPINTYIYELYNEDKRSGPVSERNWGILFPNGTSVYPLSLSGGSSSAALNGSSMFCVAKADADDDKLVDGLNWACGQGRANCAAIQPGQPCYLPNDVKSHASFAFNDYYQKMKSAGGTCDFDGTAITTTRDPSYRTCAYTGSLNANATNGNFPPDALGPASPLGGNANARIIFSYHLPILAPLALTLLQLLLQHDRLL

SEQ ID NO: 77685 - protein, 505 aa, Arabidopsis thaliana
  peptide (1)..(505): Ceres Seq. ID no. 12577162
MLLPRWFAEALLLLLSILACSNAAFIGVNIGTDLTNMPPPSDIVTLLKSQQITHVRLYDANSHMLKAFANTSIEVMVGVTNEEILKIGRFPSAAAAWVNKNVAAYIPSTNITAIAVGSEVLTTIPHVAPILASALNNIHKALVASNLNFKVKVSSPMSMDIMPKPFPPSTSTFSPSWNTTVYQLLQFLKNTGSFFMLNAYPYYGYTTANGIFPLDYALFKQLSPVKQIVDPNTLLHYNSMFDAMVDAAYYSMEALNFSKIPVVVTETGWPSSGGSDEAAATVANAETFNTNLIKRVLNNSGPPSQPDIPINTYIYELYNEDKRSGPVSERNWGILFPNGTSVYPLSLSGGSSSAALNGSSMFCVAKADADDDKLVDGLNWACGQGRANCAAIQPGQPCYLPNDVKSHASFAFNDYYQKMKSAGGTCDFDGTAITTTRDPSYRTCAYTGSLNANATNGNFPPDALGPASPLGGNANARIIFSYHLPILAPLALTLLQLLLQHDRLL

SEQ ID NO: 77686 - protein, 469 aa, Arabidopsis thaliana
  peptide (1)..(469): Ceres Seq. ID no. 12577163
MPPPSDIVTLLKSQQITHVRLYDANSHMLKAFANTSIEVMVGVTNEEILKIGRFPSAAAAWVNKNVAAYIPSTNITAIAVGSEVLTTIPHVAPILASALNNIHKALVASNLNFKVKVSSPMSMDIMPKPFPPSTSTFSPSWNTTVYQLLQFLKNTGSFFMLNAYPYYGYTTANGIFPLDYALFKQLSPVKQIVDPNTLLHYNSMFDAMVDAAYYSMEALNFSKIPVVVTETGWPSSGGSDEAAATVANAETFNTNLIKRVLNNSGPPSQPDIPINTYIYELYNEDKRSGPVSERNWGILFPNGTSVYPLSLSGGSSSAALNGSSMFCVAKADADDDKLVDGLNWACGQGRANCAAIQPGQPCYLPNDVKSHASFAFNDYYQKMKSAGGTCDFDGTAITTTRDPSYRTCAYTGSLNANATNGNFPPDALGPASPLGGNANARIIFSYHLPILAPLALTLLQLLLQHDRLL

SEQ ID NO: 77687 - DNA, 1605 bp, Arabidopsis thaliana
  misc_feature (1)..(1605): Ceres Seq. ID no. 12577171
  misc_feature (1)..(1605): Ortholog of  Ceres SEQ ID NO 14311882 as cited in SEQ ID NO 51638
  misc_feature (1)..(1605): Ortholog of  Ceres SEQ ID NO 13595437 as cited in SEQ ID NO 56562
aaccttaatgcgcgatccgcttttctaaagttttgtgagagagaagagatctaaaaaaatccacaattttgttcaaatcttggagttaaatgctgaattttaggccttgttgcttagatttatggcttaaagtttcaaacttttcattggatatggtacaaatcttgtagttaaacactgaattgtgtccctcgtgggcgttgttgctttgatttatggccaaaagtttcaaacttggatatgtgagaagaaaatgtcaggatctgagacgggtttaatggcggcgaccagagaatcaatgcaatttacaatggctctccaccagcagcagcaacacagtcaagctcaacctcagcagtctcagaacaggccattgtcattcggtggagacgacggaactgctctttacaagcagccgatgagatcagtatcaccaccgcagcagtaccaacccaactcagctggtgagaattctgtcttgaacatgaacttgcccggaggtgagtctggaggcatgactggaactggaagtgagccagtgaaaaagaggagaggtagaccgaggaaatatgggcctgatagtggtgaaatgtcacttggtttgaatcctggagctccttctttcactgtcagccaacctagtagcggcggcgatggaggagagaagaagagaggaagacctcctggttcttctagcaaaaggctcaagcttcaagctttaggctcgactggaatcggatttacgcctcatgtacttaccgtgctggctggagaggatgtatcatccaagataatggcgttaactcataatggaccccgtgctgtgtgtgtcttgtctgcaaatggagccatctccaatgtgactctccgccagtctgccacatccggtggaactgttacatatgaggggagatttgagattctgtctttatcgggatctttccatttgctggagaacaatggtcaaagaagcaggacgggaggtctaagcgtgtcattatcaagtccggatggtaatgtcctcggtggcagtgtagctggtcttcttatagcagcatcacctgttcagattgttgttgggagtttcttaccagacggagaaaaagaaccaaaacagcatgtgggacaaatgggactgtcgtcacccgtattaccgcgtgtggccccaacgcaggtgctgatgactccaagtagcccacaatctcgaggcacaatgagtgagtcatcttgtggaggaggacatggaagccctattcatcagagcactggaggaccttacaataacaccattaacatgccctggaagtagccaagtgatctgtgtcggcttaaaaccaacaacttcccgttattagagtgatttatttctacatttggtttagactttctagttctgatggttatttctacagttggtttagactttctagttctgttcagacaaaaggagtttgataaattgaccgacctattttgtgtgtttgaggtactttcagaaccataggtgttcagaaattagaatgttctgtttaaggtagatcttttattttatgttgaggtactttcggaaccataagttgttcagaaattggaatatcctgatta

SEQ ID NO: 77688 - protein, 351 aa, Arabidopsis thaliana
  peptide (1)..(351): Ceres Seq. ID no. 12577172
MSGSETGLMAATRESMQFTMALHQQQQHSQAQPQQSQNRPLSFGGDDGTALYKQPMRSVSPPQQYQPNSAGENSVLNMNLPGGESGGMTGTGSEPVKKRRGRPRKYGPDSGEMSLGLNPGAPSFTVSQPSSGGDGGEKKRGRPPGSSSKRLKLQALGSTGIGFTPHVLTVLAGEDVSSKIMALTHNGPRAVCVLSANGAISNVTLRQSATSGGTVTYEGRFEILSLSGSFHLLENNGQRSRTGGLSVSLSSPDGNVLGGSVAGLLIAASPVQIVVGSFLPDGEKEPKQHVGQMGLSSPVLPRVAPTQVLMTPSSPQSRGTMSESSCGGGHGSPIHQSTGGPYNNTINMPWK

SEQ ID NO: 77689 - protein, 343 aa, Arabidopsis thaliana
  peptide (1)..(343): Ceres Seq. ID no. 12577173
MAATRESMQFTMALHQQQQHSQAQPQQSQNRPLSFGGDDGTALYKQPMRSVSPPQQYQPNSAGENSVLNMNLPGGESGGMTGTGSEPVKKRRGRPRKYGPDSGEMSLGLNPGAPSFTVSQPSSGGDGGEKKRGRPPGSSSKRLKLQALGSTGIGFTPHVLTVLAGEDVSSKIMALTHNGPRAVCVLSANGAISNVTLRQSATSGGTVTYEGRFEILSLSGSFHLLENNGQRSRTGGLSVSLSSPDGNVLGGSVAGLLIAASPVQIVVGSFLPDGEKEPKQHVGQMGLSSPVLPRVAPTQVLMTPSSPQSRGTMSESSCGGGHGSPIHQSTGGPYNNTINMPWK

SEQ ID NO: 77690 - protein, 336 aa, Arabidopsis thaliana
  peptide (1)..(336): Ceres Seq. ID no. 12577174
MQFTMALHQQQQHSQAQPQQSQNRPLSFGGDDGTALYKQPMRSVSPPQQYQPNSAGENSVLNMNLPGGESGGMTGTGSEPVKKRRGRPRKYGPDSGEMSLGLNPGAPSFTVSQPSSGGDGGEKKRGRPPGSSSKRLKLQALGSTGIGFTPHVLTVLAGEDVSSKIMALTHNGPRAVCVLSANGAISNVTLRQSATSGGTVTYEGRFEILSLSGSFHLLENNGQRSRTGGLSVSLSSPDGNVLGGSVAGLLIAASPVQIVVGSFLPDGEKEPKQHVGQMGLSSPVLPRVAPTQVLMTPSSPQSRGTMSESSCGGGHGSPIHQSTGGPYNNTINMPWK

SEQ ID NO: 77691 - DNA, 792 bp, Arabidopsis thaliana
  misc_feature (1)..(792): Ceres Seq. ID no. 12577175
  misc_feature (1)..(792): Ortholog of  Ceres SEQ ID NO 12585325 as cited in SEQ ID NO 63062
ccttttcggttttcacggtaaggctcggaggaaaacctaattcgtccggagaatctccacctcactctcgccaaacgcatctctgttgtagcttgtgatggatccaacacagaacacaagtgcagggattggtgggagcaatggtacaatcagatatcaaaccaatgatgggacttcaactgtgaccgttgctgatgattcaaaggagaatctttcccaagtcataaactctattgagaaaactttaggagtccttcatcagttacaccttaccgtcacttctttcacacccgcgtctcaactccatctcctccagcgccttaactctcttgtgatggagctagataacatgactaagttgtctgagaaatgcaacattcaaatccccatggaggttcttaacttgattgatgatgggaagaacccggatgagtttacgaaagatgttcttaatagctgcatagctagaaatcaagttactaagggcaagactgatgcttttaaggatttgagaaaacatattctggaggagcttgaacagaatttccctgatgaagtcgatatgtatagagaaatccgtgctagttctgctgctgaagcgaaacggttggcgcaatcgcaaagtgtgttaccaaatggggatgcaaaggtcaagaatgagctataagagcccaaaggatcctttttatgtttaccttgtactcttgtagaatataatgactgagtcgatgaatgtgatgtaacacgaacaatcccaagtggaatttctaataatatctgttggttctcttc

SEQ ID NO: 77692 - protein, 189 aa, Arabidopsis thaliana
  peptide (1)..(189): Ceres Seq. ID no. 12577176
MDPTQNTSAGIGGSNGTIRYQTNDGTSTVTVADDSKENLSQVINSIEKTLGVLHQLHLTVTSFTPASQLHLLQRLNSLVMELDNMTKLSEKCNIQIPMEVLNLIDDGKNPDEFTKDVLNSCIARNQVTKGKTDAFKDLRKHILEELEQNFPDEVDMYREIRASSAAEAKRLAQSQSVLPNGDAKVKNEL

SEQ ID NO: 77693 - protein, 110 aa, Arabidopsis thaliana
  peptide (1)..(110): Ceres Seq. ID no. 12577177
MELDNMTKLSEKCNIQIPMEVLNLIDDGKNPDEFTKDVLNSCIARNQVTKGKTDAFKDLRKHILEELEQNFPDEVDMYREIRASSAAEAKRLAQSQSVLPNGDAKVKNEL

SEQ ID NO: 77694 - protein, 105 aa, Arabidopsis thaliana
  peptide (1)..(105): Ceres Seq. ID no. 12577178
MTKLSEKCNIQIPMEVLNLIDDGKNPDEFTKDVLNSCIARNQVTKGKTDAFKDLRKHILEELEQNFPDEVDMYREIRASSAAEAKRLAQSQSVLPNGDAKVKNEL

SEQ ID NO: 77695 - DNA, 1048 bp, Arabidopsis thaliana
  misc_feature (1)..(1048): Ceres Seq. ID no. 12577187
  misc_feature (1)..(1048): Ortholog of  Ceres SEQ ID NO 13597821 as cited in SEQ ID NO 64462
  misc_feature (1)..(1048): Ortholog of  Ceres SEQ ID NO 12618069 as cited in SEQ ID NO 65387
agagctcaagagaagtaaagaaactgcgacaagagaaagaagattgactttggagaagagagagagtaacgatggaagatattcataatctcgatatagagaaaagtgatagatcgatttggttgatgaagtgtcctgtagttgtagacaaggcatggcacaagatagcagcttcgtcgtcttcttcttttgcttcctcggattctcctcccgacatggcaaagattgttcgcgaagttgatcctctacgggacgattctccccccgagttcaaaatgtatatggttggtgctgagtatgggaacatgccaaagtgctacgctttgaacatgttcacagactttgttccgatggggggcttttccgatgttaatcaaggttgtgcagctgctgaaggaaaggttgatcacaaattcgatatgaagccatatggtgaaaccattgaagaatatgctaggctttgtcgtgagagaacgagcaaagccatggttaaaaatcgacagattcaggttattgataatgaccgcggagttcatatgaggcccatgcctggaatgcttggtttagtttcctccaattccaaggaaaagaggaaacctcccccagtcaagcaaaccgaggtgaagaggacgaggagagatcgtggtgagcttgaagctataatgttcaagctatttgaaggccagcctaactggacattgaagcagcttgtacaagagacggaccagccagctcagttcctgaaagaaatactaaacgagctgtgcgtgtacaataagagaggatcgaaccaagggacatatgagcttaaacctgaatacaagaaatctgctgaagatgatacaggtgggcagtgaaatcaaccccttgtgtaattcactattatatacatgtgacatagtcataacattattataaaccctgagtcattattcatcagaagaaaaaaacaagattttagtagggaagagaaaagaggggttttaagtggtcatcttttaatttgtatctttaatcgaaacagacaaatataaaagagagtttttgt

SEQ ID NO: 77696 - protein, 261 aa, Arabidopsis thaliana; identical to SEQ ID NO: 35607
  peptide (1)..(261): Ceres Seq. ID no. 12577188

SEQ ID NO: 77697 - protein, 243 aa, Arabidopsis thaliana; identical to SEQ ID NO: 35608
  peptide (1)..(243): Ceres Seq. ID no. 12577189

SEQ ID NO: 77698 - protein, 213 aa, Arabidopsis thaliana
  peptide (1)..(213): Ceres Seq. ID no. 12577190
MAKIVREVDPLRDDSPPEFKMYMVGAEYGNMPKCYALNMFTDFVPMGGFSDVNQGCAAAEGKVDHKFDMKPYGETIEEYARLCRERTSKAMVKNRQIQVIDNDRGVHMRPMPGMLGLVSSNSKEKRKPPPVKQTEVKRTRRDRGELEAIMFKLFEGQPNWTLKQLVQETDQPAQFLKEILNELCVYNKRGSNQGTYELKPEYKKSAEDDTGGQ

SEQ ID NO: 77699 - DNA, 1197 bp, Arabidopsis thaliana
  misc_feature (1)..(1197): Ceres Seq. ID no. 12577199
  misc_feature (1)..(1197): Ortholog of  Ceres SEQ ID NO 15172553 as cited in SEQ ID NO 57496
agtttcagcgaaacgatggagcttctctgctcaccaacgtctctttcctcctccttcgctctctcttctgctcttttagtccctcgttcgttctccatgccagggacaaggagattcatggttctgtgtagttcccagaaggaaagtcagatgacagtgtcagtaactggagcaactggattcatagggagacgattggttcagagacttcgtgctgataaccacgctatccgggtcttaacacgctctaaatccaaagctgagcaaatatttcctgccaaggacttcccaggtattgtgattgcagaagaatcggagtggaagaactgtgtacaaggctctactgctgttgtgaacttggcaggactgcctattagtacaaggtggtctcccgagatcaagaaagagattaagggcagccggatccgtgtcacctccaaagttgttgacttaatcaataattcaccagcagaagctaggcctaccgttctagttagcgccacggctgttggttactatggtactagtgagacaggagtattcgacgaaaatagtccatcagggaaggactatcttgcagaggtttgcagagaatgggaaggaactgcattgaaagcaaataaggatgttagagtggcacttatccgcattggtgttgttcttggcaaagacggtggagctttggccatgatgataccctttttccaaatgtttgctggaggacctctgggttccggacaacaatggttctcttggattcacgtggatgacttggtgaacttaatttacgaggccctcactaatccatcttataaaggagttattaatgggactgcgccgaatccggttaggcttggggaaatgtgccagcagctaggcagtgttcttagccgaccatcgtggctaccagttcctgactttgcactcaaagctttgctcggagaaggtgccactgtagttctggagggacagaaggtattacctgtaagagccaaagagcttggttttgaattcaagtataaatacgtgaaggatgcactcagagccattatgcaataaggtgacacacataagcatctttgtaaaattggttttgatcacagaaaatccccagaaaaacaagatattcttttcttttcgtctctatatctttctttttgagtaaaactcgagggccgatttggccaatcgaggggg

SEQ ID NO: 77700 - protein, 352 aa, Arabidopsis thaliana
  peptide (1)..(352): Ceres Seq. ID no. 12577200
SFSETMELLCSPTSLSSSFALSSALLVPRSFSMPGTRRFMVLCSSQKESQMTVSVTGATGFIGRRLVQRLRADNHAIRVLTRSKSKAEQIFPAKDFPGIVIAEESEWKNCVQGSTAVVNLAGLPISTRWSPEIKKEIKGSRIRVTSKVVDLINNSPAEARPTVLVSATAVGYYGTSETGVFDENSPSGKDYLAEVCREWEGTALKANKDVRVALIRIGVVLGKDGGALAMMIPFFQMFAGGPLGSGQQWFSWIHVDDLVNLIYEALTNPSYKGVINGTAPNPVRLGEMCQQLGSVLSRPSWLPVPDFALKALLGEGATVVLEGQKVLPVRAKELGFEFKYKYVKDALRAIMQ

SEQ ID NO: 77701 - protein, 347 aa, Arabidopsis thaliana; identical to SEQ ID NO: 40612
  peptide (1)..(347): Ceres Seq. ID no. 12577201

SEQ ID NO: 77702 - protein, 320 aa, Arabidopsis thaliana; identical to SEQ ID NO: 40613
  peptide (1)..(320): Ceres Seq. ID no. 12577202

SEQ ID NO: 77703 - DNA, 892 bp, Arabidopsis thaliana
  misc_feature (1)..(892): Ceres Seq. ID no. 12577221
  misc_feature (1)..(892): Ortholog of  Ceres SEQ ID NO 13589868 as cited in SEQ ID NO 55521
  misc_feature (1)..(892): Ortholog of  Ceres SEQ ID NO 12617659 as cited in SEQ ID NO 65286
  misc_feature (1)..(892): Ortholog of  Ceres SEQ ID NO 12780566 as cited in SEQ ID NO 65822
gtcgcgcatttagcgttgttttgaagctctctctttcaaattctgttcgtctctcgcgatctctctctctctctcagatagctccgaaactttcacgcagagttaagtgaagcaggatgggattgtcattcgccaagctttttagcaggctttttgccaagaaggagatgagaattctgatggttggtcttgatgctgctggtaagaccaccattttgtacaagctcaagctcggagagattgtaaccaccattcccactattgggttcaatgtggagactgtggagtacaagaacatcagtttcacagtgtgggatgtcggcggtcaggataagatccgtcccttgtggaggcattacttccagaacacccaaggtcttatctttgtggtggacagcaatgacagagaccgtgttgttgaggctagagatgaattgcaccgaatgttgaatgaggacgagctgcgtgatgctgttctgctcgtatttgctaacaagcaggatctcccaaatgctatgaatgcagctgagatcacggataagcttggtctccactctctccgtcagcgtcactggtacatccagagcacatgtgccacttcaggcgaggggctttacgaaggtcttgactggttgtccaacaacattgccggcaaggcgtagagggaaagttcgtggtggagttgatttgctgagcaaatctggatgcaggggcaaacattatctgaattttttttttggtttccgttttcgttattgttctgcttttttttttgggatatgtcgatggattttgtgattgtacgtagaacttagaaaaaaactaccttttatatagttttggtaaaactgtaatcgaagatttcacctactgctttcgtggttttggtcac

SEQ ID NO: 77704 - protein, 181 aa, Arabidopsis thaliana; identical to SEQ ID NO: 22281
  peptide (1)..(181): Ceres Seq. ID no. 12577222

SEQ ID NO: 77705 - protein, 164 aa, Arabidopsis thaliana; identical to SEQ ID NO: 22282
  peptide (1)..(164): Ceres Seq. ID no. 12577223

SEQ ID NO: 77706 - protein, 160 aa, Arabidopsis thaliana; identical to SEQ ID NO: 22283
  peptide (1)..(160): Ceres Seq. ID no. 12577224

SEQ ID NO: 77707 - DNA, 1145 bp, Arabidopsis thaliana
  misc_feature (1)..(1145): Ceres Seq. ID no. 12577233
  misc_feature (1)..(1145): Ortholog of  Ceres SEQ ID NO 12583413 as cited in SEQ ID NO 56816
  misc_feature (1)..(1145): Ortholog of  Ceres SEQ ID NO 15168480 as cited in SEQ ID NO 57927
  misc_feature (1)..(1145): Ortholog of  Ceres SEQ ID NO 15177738 as cited in SEQ ID NO 0
ctgtctatctatctctctcgctcgcataaaaggttaacctcaaaacaagtagctcctccttccattaggatggcggcaggactctcaaccgccgttacattcaaaccactccaccgctctttctcctcctcctctaccgatttccgactccgcctcccgaaatccttatccggattctctccgtctcttcgatttaaacgcttttctgtctgttacgtcgtcgaagaacggagacagaattctccgattgagaacgatgagagaccggagagcacgagctccacaaacgctatagacgctgagtatctggcgttgcgtttggcggagaaattggagaggaagaaatcggagaggtccacttatctaatcgctgctatgttgtcgagctttggtatcacttctatggctgttatggctgtttactacagattctcttggcaaatggagggaggtgagatctcaatgttggaaatgtttggtacatttgctctctctgttggtgctgctgttggtatggaattctgggcaagatgggctcatagagctctgtggcacgcttctctatggaatatgcatgagtcacatcacaaaccaagagaaggaccgtttgagctaaacgatgtttttgctatagtgaacgctggtccagcgattggtctcctctcttatggattcttcaataaaggactcgttcctggtctctgctttggcgccgggttaggcataacggtgtttggaatcgcctacatgtttgtccacgatggtctcgtgcacaagcgtttccctgtaggtcccatcgccgacgtcccttacctccgaaaggtcgccgccgctcaccagctacatcacacagacaagttcaatggtgtaccatatggactgtttcttggacccaaggaattggaagaagttggaggaaatgaagagttagataaggagattagtcggagaatcaaatcatacaaaaaggcctcgggctccgggtcgagttcgagttcttgactttaaacaagttttaaatcccaaattctttttttgtcttctgtcattatgatcatcttaagacggtctatgttgataaatcctatatgccgattttgattttaatgaatattttaaaaaatataaatacctctctttcttgc

SEQ ID NO: 77708 - protein, 333 aa, Arabidopsis thaliana
  peptide (1)..(333): Ceres Seq. ID no. 12577234
LSIYLSRSHKRLTSKQVAPPSIRMAAGLSTAVTFKPLHRSFSSSSTDFRLRLPKSLSGFSPSLRFKRFSVCYVVEERRQNSPIENDERPESTSSTNAIDAEYLALRLAEKLERKKSERSTYLIAAMLSSFGITSMAVMAVYYRFSWQMEGGEISMLEMFGTFALSVGAAVGMEFWARWAHRALWHASLWNMHESHHKPREGPFELNDVFAIVNAGPAIGLLSYGFFNKGLVPGLCFGAGLGITVFGIAYMFVHDGLVHKRFPVGPIADVPYLRKVAAAHQLHHTDKFNGVPYGLFLGPKELEEVGGNEELDKEISRRIKSYKKASGSGSSSSS

SEQ ID NO: 77709 - protein, 310 aa, Arabidopsis thaliana
  peptide (1)..(310): Ceres Seq. ID no. 12577235
MAAGLSTAVTFKPLHRSFSSSSTDFRLRLPKSLSGFSPSLRFKRFSVCYVVEERRQNSPIENDERPESTSSTNAIDAEYLALRLAEKLERKKSERSTYLIAAMLSSFGITSMAVMAVYYRFSWQMEGGEISMLEMFGTFALSVGAAVGMEFWARWAHRALWHASLWNMHESHHKPREGPFELNDVFAIVNAGPAIGLLSYGFFNKGLVPGLCFGAGLGITVFGIAYMFVHDGLVHKRFPVGPIADVPYLRKVAAAHQLHHTDKFNGVPYGLFLGPKELEEVGGNEELDKEISRRIKSYKKASGSGSSSSS

SEQ ID NO: 77710 - protein, 208 aa, Arabidopsis thaliana
  peptide (1)..(208): Ceres Seq. ID no. 12577236
MLSSFGITSMAVMAVYYRFSWQMEGGEISMLEMFGTFALSVGAAVGMEFWARWAHRALWHASLWNMHESHHKPREGPFELNDVFAIVNAGPAIGLLSYGFFNKGLVPGLCFGAGLGITVFGIAYMFVHDGLVHKRFPVGPIADVPYLRKVAAAHQLHHTDKFNGVPYGLFLGPKELEEVGGNEELDKEISRRIKSYKKASGSGSSSSS

SEQ ID NO: 77711 - DNA, 896 bp, Arabidopsis thaliana
  misc_feature (1)..(896): Ceres Seq. ID no. 12577241
  misc_feature (1)..(896): Ortholog of  Ceres SEQ ID NO 15180555 as cited in SEQ ID NO 1214
agagtgtttccgacaagctctctctttaagacaatccatctctttcttcaagctaagccccgacggaaagctaaactcattgcttaaatagattccctcatatctgagccgaaggttaactacatgaccggcgctgagaacggcgtgagaatgacgtcaccagaggcgtcttcaacatcctccctcgccaccacaagtgtccacgtaagcgctctcgacggactcgtgaacgtgaactctctcttcaccatcgccgtcttcgttggtctttccttagcgactccaggacaacacagcctcgaacaacgatccagctgcgacgcaagtgctgacgtcgccaagaagctactggtcttcgaagtcgtctccttcagcttcttcctcttctcctctcttgtagctcagggtcttaagcttgccttaaaccttcttaatagcaaagacgtcaacgagattttcagagctcacatcaatatcaaggttttgagatggggaatgatggcttctgctgtcggatctgtaatgggctgtctcttcttgatgctctctatggttaatgtgattcagatccgtcttggtttgctctcttgcggcagcaaatcggcggctcaagctgttgcaacgctcgtcactctggtttcctctgctctgctgatttacatctctaccgccatttacgctttctggcattgatgctatgtcaaaattggataatgtccatggctttgttttgattagccaatgtgtaatttcatcatcaatgccttccaatctagttttttgtttttttgtttcggagaatgaagaatcaatcacaagatacagaacattggattatgagaatttgatgttaagcttttatgaacagaaatgaagcattatgtttgttgtttggt

SEQ ID NO: 77712 - protein, 189 aa, Arabidopsis thaliana
  peptide (1)..(189): Ceres Seq. ID no. 12577242
MTGAENGVRMTSPEASSTSSLATTSVHVSALDGLVNVNSLFTIAVFVGLSLATPGQHSLEQRSSCDASADVAKKLLVFEVVSFSFFLFSSLVAQGLKLALNLLNSKDVNEIFRAHINIKVLRWGMMASAVGSVMGCLFLMLSMVNVIQIRLGLLSCGSKSAAQAVATLVTLVSSALLIYISTAIYAFWH

SEQ ID NO: 77713 - protein, 180 aa, Arabidopsis thaliana
  peptide (1)..(180): Ceres Seq. ID no. 12577243
MTSPEASSTSSLATTSVHVSALDGLVNVNSLFTIAVFVGLSLATPGQHSLEQRSSCDASADVAKKLLVFEVVSFSFFLFSSLVAQGLKLALNLLNSKDVNEIFRAHINIKVLRWGMMASAVGSVMGCLFLMLSMVNVIQIRLGLLSCGSKSAAQAVATLVTLVSSALLIYISTAIYAFWH

SEQ ID NO: 77714 - DNA, 1675 bp, Arabidopsis thaliana
  misc_feature (1)..(1675): Ceres Seq. ID no. 12577247
  misc_feature (1)..(1675): Ortholog of  Ceres SEQ ID NO 14315626 as cited in SEQ ID NO 52943
  misc_feature (1)..(1675): Ortholog of  Ceres SEQ ID NO 13584616 as cited in SEQ ID NO 65234
  misc_feature (1)..(1675): Ortholog of  Ceres SEQ ID NO 14313536 as cited in SEQ ID NO 67925
tctctctctctctcttttgcccttacgtcctcgagctcaaccctttaattgcatctacgacagtcgtaccttttgctaggttatcgtcgtcatgatgcagcagccacctccagcttccaacggtgctgcaacagggccagggcagattccttccgaccaacaagcttacctccagcagcagcagtcgtggatgatgcagcaccagcagcaacaacaaggtcagccgcctgcaggatggaatcagcagtctgcaccgtcttctggtcaaccacagcagcagcagtatggtggtggtggatctcagaatccaggatcagctggtgagatccggtccctgtggatcggtgacttgcagccatggatggatgagaactatctcatgaacgtctttggtcttactggcgaggctacagcagctaaagttattcgcaataaacagaacggatattcagaaggttatggctttattgagtttgtgaaccatgctacagctgagaggaatttacagacttacaatggtgctccgatgccgagcagtgagcaggccttcaggttgaactgggctcagcttggagctggagagagacgccaggctgaagggcctgagcacacagtttttgttggagacttggcacctgatgttaccgaccacatgcttactgaaacgtttaaagctgtgtattcctctgtcaagggagctaaagttgtgaatgataggactactggacggtccaagggttatggatttgtcaggtttgcggatgaaagtgagcagattcgtgccatgactgaaatgaatggtcaatactgctcatcaaggcctatgcgtactggtcctgctgccaacaagaagcctcttacaatgcaaccagcttcatatcagaacactcaaggaaattcaggagaaagtgatccaactaacacaacaatttttgttggagctgtggatcaaagtgtaacagaagatgatttgaagtcagtttttggtcaatttggtgaactagttcatgtgaaaatacccgcaggaaaacgttgcggatttgttcaatacgccaatagggcatgtgctgagcaagcactttctgtgttgaacggaacacaacttgggggacaaagcattcgtctttcatggggtcgcagtccttccaacaaacagactcaacctgatcaagcccagtatggtggtggtggaggatactatgggtatcctcctcaaggatatgaagcatacggatatgcacctcctcctcaggaccctaacgcctactacggtggttatgctgggggcggctatggaaactaccagcagcctggtggataccagcagcaacagcagtgaagcatgatgtgtaagtcgtgatcgagctgaagttgtagaaagctgtaaccgtttgacaatggtgaatgaattattgaagtggatgtgtattagctcttcttgtctcagattctctcttcaactcttttttttttcttttggattatttttctttcgcgtggctattgttgagtgtccttgcaagtcataacaaaaagcttaaacccaagtgttttttgtcatgactaatatgaccattatgttttcttgctgtaccatttcttcttgtatcacctatgacttccaattattcagtagtaccctcataatttttcaataatactcgttttgtgatcc

SEQ ID NO: 77715 - protein, 415 aa, Arabidopsis thaliana; identical to SEQ ID NO: 38736
  peptide (1)..(415): Ceres Seq. ID no. 12577248

SEQ ID NO: 77716 - protein, 414 aa, Arabidopsis thaliana; identical to SEQ ID NO: 38737
  peptide (1)..(414): Ceres Seq. ID no. 12577249

SEQ ID NO: 77717 - protein, 382 aa, Arabidopsis thaliana; identical to SEQ ID NO: 38738
  peptide (1)..(382): Ceres Seq. ID no. 12577250

SEQ ID NO: 77718 - DNA, 1356 bp, Arabidopsis thaliana
  misc_feature (1)..(1356): Ceres Seq. ID no. 12577268
  misc_feature (1)..(1356): Ortholog of  Ceres SEQ ID NO 14314643 as cited in SEQ ID NO 56903
acagtttctaaggcaaaataagctctctttctactatttctctttctctttctactatttctctcctgtggagaaactcaggagatagagagagagagagagaagagaagagagcatgtatgtttggttttataatctctctactcataccaaagatttgtctcagacccaccacttggacagagagaacccaagctcctttctctctttttctcgatctactccttcttaatctccttttttgaaacttgaagccactttcaacatcatccttaaacttttgttcccttattcacaatctcctgccacctctcatttctctagttgagttgttatctgcgtttttaagcactcgaatactgcatgcaaattccctgattgtttgctacatatatgggttctattagaggaaacattgaagagcctatatctcagtcattaacgaggcagaactctctctatagcttaaagctccatgaggttcaaacccacttaggaagttctggaaaaccactaggaagcatgaaccttgatgagcttctcaagactgtcttgccaccagctgaggaagggcttgttcgtcagggaagcttgacgttacctcgagatctcagtaaaaagacagttgatgaggtctggagagatatccaacaggacaagaatggaaacggtactagtactactactactcataagcagcctacactcggtgaaataacacttgaggatttgttgttgagagctggtgtagtgactgagacagtagtccctcaagaaaatgttgttaacatagcttcaaatgggcaatgggttgagtatcatcatcagcctcaacaacaacaagggtttatgacatatccggtttgcgagatgcaagatatggtgatgatgggtggattatcggatacaccacaagcgcctgggaggaaaagagtagctggagagattgtggagaagactgttgagaggagacagaagaggatgatcaagaacagagaatctgcagcacgttcacgagctaggaaacaggcttatacacatgaattagagatcaaggtttcaaggttagaagaagaaaacgaaaaacttcggaggctaaaggaggtggagaagatcctaccaagtgaaccaccaccagatcctaagtggaagctccggcgaacaaactctgcttctctctgatcctaaagactcttctttctttcttcttctttgtgttggtttatatcagaccgctttgttctttgtatattgtgtagactttattgactttgaacagcatgtctttataaacatttcttgagtgtattcctcttttgcagctagttcaaactttttgagtacaaacactagttc

SEQ ID NO: 77719 - protein, 262 aa, Arabidopsis thaliana; identical to SEQ ID NO: 40490
  peptide (1)..(262): Ceres Seq. ID no. 12577269

SEQ ID NO: 77720 - protein, 219 aa, Arabidopsis thaliana; identical to SEQ ID NO: 40491
  peptide (1)..(219): Ceres Seq. ID no. 12577270

SEQ ID NO: 77721 - DNA, 3984 bp, Arabidopsis thaliana
  misc_feature (1)..(3984): Ceres Seq. ID no. 12577278
  misc_feature (1)..(3984): Ortholog of  Ceres SEQ ID NO 15175849 as cited in SEQ ID NO 55644
atggtgttggcggagctcggcggccggataacccgcgccatacagcagatgaacaatgtgacaataatcgatgaaaaggttttgaatgatttcttaaacgagattactcgcgctttgctccagtccgatgtttcttttggccttgtggaaaagatgcagaccaatattaagaagatcgttaacctcgacgatctagcagctggccacaacaaacgcctgatcatcgagcaggctatcttcaaggaactctgtaggatgctggatccaggaaagcctgcctttgcccccaaaaaggccaaacctagtgtagtgatgttcgtcggtttacaaggtgctggaaaaaccacaacatgtaccaagtatgcttactatcatcagaagaaagggtacaaagcagctctagtgtgtgcggatactttcagggccggtgcttttgatcagctgaaacagaatgccaccaaggctaagatccccttttatggaagctacacagaatccgatcctgtgaaaattgctgttgagggagttgataggttcaagaaagaaaagtgtgatcttattattgttgacaccagtggtcgccataaacaagcagcttctctctttgaagaaatgcgtcaagttgctgaagcaacggaaccagatcttgttatatttgttatggatagcagtattggtcaagctgcatttgaacaagctgaagcttttaaggaaactgtatctgttggagctgtaattattactaagatggacggccatgccaagggaggtggtgctcttagcgctgttgcagctacaaaaagtcctgtgatattcattggaacaggagagcatatggatgagtttgaagtgtttgacgttaaaccatttgtcagccgtctcttaggaaagggtgattggtctggactcgtggataaactacaagaggtggtacctaaagatctacagaatgaacttgtagaaaatctctctcagggtaactttacgttgagaagtatgtacgaccagttccagtgctctctgcggattccacttaatcagcttttctcgatgctgcctggaattagtgctgaaatgatgccgaaaggacatggtgaagaaagccgagtgaagatgaagcgatacatgacaatgatggattctatgacaaataaagaacttgacagcccaaacccaaagatttttaacgagtcaaggataatgaggatagcgagagggtcagggaggttagtaagagaagtgatggagatgttggaagagtacaagaggatagcaaagacaatgaaagggatcaagatcccaaagaacggagacatgagcaaggtcataccgcctcagatgctaaaacagatgggcggcatgagcggtctgcagagtctcatgaagcagatgggttcggctaaggacatgatgggaatgtttggtggcggaggcaaagcccattacacacgcgtttcagagtcttcttcctttgtgtgtgtgagtttcaactttctctcttctttgttttcgtgtttattctctggagattttgtgttctgcgatgtgtcttctcttttgtcggatctctttgttccctggactatggacactaatccttcagagctggttgataccgacgttgtttgtgatacacgaccccccatgcactgcaacaaatcctttgcctacatgtctgaaaataagtgttcaggaactagccaccttaagcgtcacatttacttgggtatttgtgcgaagatcccagattacaataagctctcgcaaatcaaggaggaaaccacctcattccttcctaagaaatgtcagatattgcaaaccaaggatgaaaaacccacttcttgccttcccaagaaacgtcaaatgtcttctgctgatgtccctctagatcaagatcgctgtaaccttgagatggcaaagatgatcattatgcatgattaccctcttgatatggtcgagcatcctggttttgttggttttctgcaggctcttcgtccccgcttcagtgtctctagcttcgacaccattcatgctgattgtctcgctatgtttctatcccaaaagcagaaaattttggacattattggagagattcctgggggagttaatcttacagtagacttgtggtcatcaaagcaatcagtggcttacgcttttgtggcaggacactttgttgataaagactggaatttgactcaccgccttctaaatgttgttgttgtggcttctcctgattctgattttgcgttaaaccagcctataacagcttgcttatccgactggaacttggagggaaagatttcgagcatcgctgtcagccaatcattagtaaataaaacctccatcgacaatctcagaggtttcttgtctttcaggaaccagcatgtgttgaatggtcagttgttgatggggagatgctatgctcgcatcttaagcagtatggcgcaagatgcactcacagctgagcggcttcaagaacccataaagaaagtccgagatagcatcaagtatatccaaaccaacgaggcttgcggagacagatttgatgaactgaagagacggtttccatccccttcgctttacaaagatcttcttattgacaaccaaacgagatgggacacaagttacaatatgttgttggctgcctgtgaacacagacaagtgttttctagtttggaaacctgccatcctgactacaaaatatcattatctcctgaggaatggaaaaagattgagagtctttgctcatgcttgaaggtacttgtcgaagcgggtaatgcattgactgggccaaacctgttgacagcaaacgatttgtaccatgagatgacaaagcttcagctagatctgagccacgctgccccgggtgaagacccggatgtcagaaacctagcaaaatcattgagggaaaaattcgaccagtactggagaggatgcttccttgtgttggcagttgcagtggtcatggatcctcggttcaaaatgcagctcattaagtttacgttcaataagtcgtatggtgaagatgcagagaaatggaccaagtctgtcgaagatgcagtccatgatctgtaccttaactacagtgaacagaacctgttggatgcttatgtggatcatggcttttcggaaatagaggtggctcaggaatctcacttccatcaagacatggctgaagctgccaatacagggaatggacaatcatatgatgagacaagtccacaagtagaggaaaccacaaacatggttgaagctgccaatacagggaatggacaatcatatgatgagacaagtccacaagtagaggaaaccacatacatggctgaagctgccaatacagggaatggacaatcaggtgatgagacaagtccacaagtagagaaaaccacagacatggctgaagctaccaatacagggaatggacaatcaggtgatgagacaagtccacaagtagaggaaaccacagagtcacatcaacatgagagacagcttaaggcagagaagcagaatgtggtagggatttgggagggagtgagtgaagagagtcagctaacagaagaggaccaacaacgtggtgatgattctcaagcacacgcaatggtagaggaagaccacacaacatttccggtagacgtgcttctcgaggaagggtctaccctcatcacaataggagagtcattgtcagacttcgagatgtacatgacagatatgaatacggagctggatcaatacttggaagaaaatttgattccgaggtcagaagactttaacgttctgagctggtggagggtcaacaacaccaactacccaactctctcaaagatggctgtggatcttctctcggtccccttcagcaccgtctctcctgattccgtattcgacacagaggtgaagcagatggacaattacaggacatctcttcctggtgaaaccttggaggctctcttgtgcaccaaggactggttaaaaaatggaactttatga

SEQ ID NO: 77722 - protein, 1327 aa, Arabidopsis thaliana
  peptide (1)..(1327): Ceres Seq. ID no. 12577279
MVLAELGGRITRAIQQMNNVTIIDEKVLNDFLNEITRALLQSDVSFGLVEKMQTNIKKIVNLDDLAAGHNKRLIIEQAIFKELCRMLDPGKPAFAPKKAKPSVVMFVGLQGAGKTTTCTKYAYYHQKKGYKAALVCADTFRAGAFDQLKQNATKAKIPFYGSYTESDPVKIAVEGVDRFKKEKCDLIIVDTSGRHKQAASLFEEMRQVAEATEPDLVIFVMDSSIGQAAFEQAEAFKETVSVGAVIITKMDGHAKGGGALSAVAATKSPVIFIGTGEHMDEFEVFDVKPFVSRLLGKGDWSGLVDKLQEVVPKDLQNELVENLSQGNFTLRSMYDQFQCSLRIPLNQLFSMLPGISAEMMPKGHGEESRVKMKRYMTMMDSMTNKELDSPNPKIFNESRIMRIARGSGRLVREVMEMLEEYKRIAKTMKGIKIPKNGDMSKVIPPQMLKQMGGMSGLQSLMKQMGSAKDMMGMFGGGGKAHYTRVSESSSFVCVSFNFLSSLFSCLFSGDFVFCDVSSLLSDLFVPWTMDTNPSELVDTDVVCDTRPPMHCNKSFAYMSENKCSGTSHLKRHIYLGICAKIPDYNKLSQIKEETTSFLPKKCQILQTKDEKPTSCLPKKRQMSSADVPLDQDRCNLEMAKMIIMHDYPLDMVEHPGFVGFLQALRPRFSVSSFDTIHADCLAMFLSQKQKILDIIGEIPGGVNLTVDLWSSKQSVAYAFVAGHFVDKDWNLTHRLLNVVVVASPDSDFALNQPITACLSDWNLEGKISSIAVSQSLVNKTSIDNLRGFLSFRNQHVLNGQLLMGRCYARILSSMAQDALTAERLQEPIKKVRDSIKYIQTNEACGDRFDELKRRFPSPSLYKDLLIDNQTRWDTSYNMLLAACEHRQVFSSLETCHPDYKISLSPEEWKKIESLCSCLKVLVEAGNALTGPNLLTANDLYHEMTKLQLDLSHAAPGEDPDVRNLAKSLREKFDQYWRGCFLVLAVAVVMDPRFKMQLIKFTFNKSYGEDAEKWTKSVEDAVHDLYLNYSEQNLLDAYVDHGFSEIEVAQESHFHQDMAEAANTGNGQSYDETSPQVEETTNMVEAANTGNGQSYDETSPQVEETTYMAEAANTGNGQSGDETSPQVEKTTDMAEATNTGNGQSGDETSPQVEETTESHQHERQLKAEKQNVVGIWEGVSEESQLTEEDQQRGDDSQAHAMVEEDHTTFPVDVLLEEGSTLITIGESLSDFEMYMTDMNTELDQYLEENLIPRSEDFNVLSWWRVNNTNYPTLSKMAVDLLSVPFSTVSPDSVFDTEVKQMDNYRTSLPGETLEALLCTKDWLKNGTL

SEQ ID NO: 77723 - protein, 1311 aa, Arabidopsis thaliana
  peptide (1)..(1311): Ceres Seq. ID no. 12577280
MNNVTIIDEKVLNDFLNEITRALLQSDVSFGLVEKMQTNIKKIVNLDDLAAGHNKRLIIEQAIFKELCRMLDPGKPAFAPKKAKPSVVMFVGLQGAGKTTTCTKYAYYHQKKGYKAALVCADTFRAGAFDQLKQNATKAKIPFYGSYTESDPVKIAVEGVDRFKKEKCDLIIVDTSGRHKQAASLFEEMRQVAEATEPDLVIFVMDSSIGQAAFEQAEAFKETVSVGAVIITKMDGHAKGGGALSAVAATKSPVIFIGTGEHMDEFEVFDVKPFVSRLLGKGDWSGLVDKLQEVVPKDLQNELVENLSQGNFTLRSMYDQFQCSLRIPLNQLFSMLPGISAEMMPKGHGEESRVKMKRYMTMMDSMTNKELDSPNPKIFNESRIMRIARGSGRLVREVMEMLEEYKRIAKTMKGIKIPKNGDMSKVIPPQMLKQMGGMSGLQSLMKQMGSAKDMMGMFGGGGKAHYTRVSESSSFVCVSFNFLSSLFSCLFSGDFVFCDVSSLLSDLFVPWTMDTNPSELVDTDVVCDTRPPMHCNKSFAYMSENKCSGTSHLKRHIYLGICAKIPDYNKLSQIKEETTSFLPKKCQILQTKDEKPTSCLPKKRQMSSADVPLDQDRCNLEMAKMIIMHDYPLDMVEHPGFVGFLQALRPRFSVSSFDTIHADCLAMFLSQKQKILDIIGEIPGGVNLTVDLWSSKQSVAYAFVAGHFVDKDWNLTHRLLNVVVVASPDSDFALNQPITACLSDWNLEGKISSIAVSQSLVNKTSIDNLRGFLSFRNQHVLNGQLLMGRCYARILSSMAQDALTAERLQEPIKKVRDSIKYIQTNEACGDRFDELKRRFPSPSLYKDLLIDNQTRWDTSYNMLLAACEHRQVFSSLETCHPDYKISLSPEEWKKIESLCSCLKVLVEAGNALTGPNLLTANDLYHEMTKLQLDLSHAAPGEDPDVRNLAKSLREKFDQYWRGCFLVLAVAVVMDPRFKMQLIKFTFNKSYGEDAEKWTKSVEDAVHDLYLNYSEQNLLDAYVDHGFSEIEVAQESHFHQDMAEAANTGNGQSYDETSPQVEETTNMVEAANTGNGQSYDETSPQVEETTYMAEAANTGNGQSGDETSPQVEKTTDMAEATNTGNGQSGDETSPQVEETTESHQHERQLKAEKQNVVGIWEGVSEESQLTEEDQQRGDDSQAHAMVEEDHTTFPVDVLLEEGSTLITIGESLSDFEMYMTDMNTELDQYLEENLIPRSEDFNVLSWWRVNNTNYPTLSKMAVDLLSVPFSTVSPDSVFDTEVKQMDNYRTSLPGETLEALLCTKDWLKNGTL

SEQ ID NO: 77724 - protein, 1276 aa, Arabidopsis thaliana
  peptide (1)..(1276): Ceres Seq. ID no. 12577281
MQTNIKKIVNLDDLAAGHNKRLIIEQAIFKELCRMLDPGKPAFAPKKAKPSVVMFVGLQGAGKTTTCTKYAYYHQKKGYKAALVCADTFRAGAFDQLKQNATKAKIPFYGSYTESDPVKIAVEGVDRFKKEKCDLIIVDTSGRHKQAASLFEEMRQVAEATEPDLVIFVMDSSIGQAAFEQAEAFKETVSVGAVIITKMDGHAKGGGALSAVAATKSPVIFIGTGEHMDEFEVFDVKPFVSRLLGKGDWSGLVDKLQEVVPKDLQNELVENLSQGNFTLRSMYDQFQCSLRIPLNQLFSMLPGISAEMMPKGHGEESRVKMKRYMTMMDSMTNKELDSPNPKIFNESRIMRIARGSGRLVREVMEMLEEYKRIAKTMKGIKIPKNGDMSKVIPPQMLKQMGGMSGLQSLMKQMGSAKDMMGMFGGGGKAHYTRVSESSSFVCVSFNFLSSLFSCLFSGDFVFCDVSSLLSDLFVPWTMDTNPSELVDTDVVCDTRPPMHCNKSFAYMSENKCSGTSHLKRHIYLGICAKIPDYNKLSQIKEETTSFLPKKCQILQTKDEKPTSCLPKKRQMSSADVPLDQDRCNLEMAKMIIMHDYPLDMVEHPGFVGFLQALRPRFSVSSFDTIHADCLAMFLSQKQKILDIIGEIPGGVNLTVDLWSSKQSVAYAFVAGHFVDKDWNLTHRLLNVVVVASPDSDFALNQPITACLSDWNLEGKISSIAVSQSLVNKTSIDNLRGFLSFRNQHVLNGQLLMGRCYARILSSMAQDALTAERLQEPIKKVRDSIKYIQTNEACGDRFDELKRRFPSPSLYKDLLIDNQTRWDTSYNMLLAACEHRQVFSSLETCHPDYKISLSPEEWKKIESLCSCLKVLVEAGNALTGPNLLTANDLYHEMTKLQLDLSHAAPGEDPDVRNLAKSLREKFDQYWRGCFLVLAVAVVMDPRFKMQLIKFTFNKSYGEDAEKWTKSVEDAVHDLYLNYSEQNLLDAYVDHGFSEIEVAQESHFHQDMAEAANTGNGQSYDETSPQVEETTNMVEAANTGNGQSYDETSPQVEETTYMAEAANTGNGQSGDETSPQVEKTTDMAEATNTGNGQSGDETSPQVEETTESHQHERQLKAEKQNVVGIWEGVSEESQLTEEDQQRGDDSQAHAMVEEDHTTFPVDVLLEEGSTLITIGESLSDFEMYMTDMNTELDQYLEENLIPRSEDFNVLSWWRVNNTNYPTLSKMAVDLLSVPFSTVSPDSVFDTEVKQMDNYRTSLPGETLEALLCTKDWLKNGTL

SEQ ID NO: 77725 - DNA, 1475 bp, Arabidopsis thaliana
  misc_feature (1)..(1475): Ceres Seq. ID no. 12577311
  misc_feature (1)..(1475): Ortholog of  Ceres SEQ ID NO 13597559 as cited in SEQ ID NO 65274
ccacgcgtccgaaaaatcgaccaaagagtaaccaaattgatatttatctcttctcaaccatggcgatgagacaagccgctaaggcaacgatcagggcctgttcttcctcttcttcttcgggttacttcgctcgacgtcagtttaatgcatcttctggtgatagcaaaaagattgtaggagttttctacaaggccaacgaatacgctaccaagaaccctaacttccttggctgcgtcgagaatgccttaggaatccgtgactggcttgaatcccaaggacatcagtacatcgtcactgatgacaaggaaggccctgattgcgaacttgagaaacatatcccggatcttcacgtcctaatctccactcccttccacccggcgtatgtaactgctgaaagaatcaagaaagccaaaaacttgaagcttctcctcacagctggtattggctcggatcatattgatctccaggcagctgcagctgctggcctgacggttgctgaagtcacgggaagcaacgtggtctcagtggcagaagatgagctcatgagaatcttaatcctcatgcgcaacttcgtaccagggtacaaccaggtcgtcaaaggcgagtggaacgtcgcgggcattgcgtacagagcttatgatcttgaagggaagacgataggaaccgtgggagctggaagaatcggaaagcttttgctgcagcggttgaaaccattcgggtgtaacttgttgtaccatgacaggcttcagatggcaccagagctggagaaagagactggagctaagttcgttgaggatctgaatgaaatgctccctaaatgtgacgttatagtcatcaacatgcctctcacggagaagacaagaggaatgttcaacaaagagttgatagggaaattgaagaaaggcgttttgatagtgaacaacgcaagaggagccatcatggagaggcaagcagtggtggatgcggtggagagtggacacattggagggtacagcggagacgtttgggacccacagccagctcctaaggaccatccatggcgttacatgcctaaccaggctatgacccctcatacctccggcaccaccattgacgctcagctacggtatgcggcggggacgaaagacatgttggagagatacttcaagggagaagacttccctactgagaattacatcgtcaaggacggtgaacttgctcctcagtaccggtaagcttttgaggaggtgacattgggaagatgatgagaaacgaccccaacgttcaagaaaacaaataaagaagtatttggactttgctaagtcgaatgacttgagtcatcttttggtttagtttttgttattatataagcacaataataataggagggcacttcccctgttctgagagtttgtgaacatattactcagtggtttaaatcacacatatgtatttgtttccccaatcgtaggaactcaatggtttcaaatctcatt

SEQ ID NO: 77726 - protein, 403 aa, Arabidopsis thaliana
  peptide (1)..(403): Ceres Seq. ID no. 12577312
TRPKNRPKSNQIDIYLFSTMAMRQAAKATIRACSSSSSSGYFARRQFNASSGDSKKIVGVFYKANEYATKNPNFLGCVENALGIRDWLESQGHQYIVTDDKEGPDCELEKHIPDLHVLISTPFHPAYVTAERIKKAKNLKLLLTAGIGSDHIDLQAAAAAGLTVAEVTGSNVVSVAEDELMRILILMRNFVPGYNQVVKGEWNVAGIAYRAYDLEGKTIGTVGAGRIGKLLLQRLKPFGCNLLYHDRLQMAPELEKETGAKFVEDLNEMLPKCDVIVINMPLTEKTRGMFNKELIGKLKKGVLIVNNARGAIMERQAVVDAVESGHIGGYSGDVWDPQPAPKDHPWRYMPNQAMTPHTSGTTIDAQLRYAAGTKDMLERYFKGEDFPTENYIVKDGELAPQYR

SEQ ID NO: 77727 - protein, 384 aa, Arabidopsis thaliana; identical to SEQ ID NO: 76128
  peptide (1)..(384): Ceres Seq. ID no. 12577313

SEQ ID NO: 77728 - protein, 382 aa, Arabidopsis thaliana; identical to SEQ ID NO: 76129
  peptide (1)..(382): Ceres Seq. ID no. 12577314

SEQ ID NO: 77729 - DNA, 3261 bp, Arabidopsis thaliana
  misc_feature (1)..(3261): Ceres Seq. ID no. 12577347
  misc_feature (1)..(3261): Ortholog of  Ceres SEQ ID NO 12388487 as cited in SEQ ID NO 20511
ttcttctagaatttgcgcatcctctccgccatggctgccgagaagttaagagacttgagtcagccgattgacgtcgttttactcgatgccactgttgaggccttttactctaccggatctaaggaagaaagagcttctgcggataatatcttgcgggatttgaaagctaatcctgatacttggcttcaagttgttcacattctacagaacaccagtagtacgcataccaaattttttgcccttcaggtgctggaaggtgttataaaatataggtggaatgcattacccgttgaacaacgtgatggaatgaaaaattacatctctgatgtcattgtgcagctgtcaagggatgaagcatctttcagaacggaaaggctttatgtcaacaagttaaatatcatcctggttcagatcgtgaaacaggagtggccggcaaagtggaaaagctttattcctgatttagttatagctgctaagactagtgaaactatctgtgagaattgcatggctattttgaaactcctaagtgaagaggtctttgatttctcaaaaggagagatgactcagcaaaagataaaagaactgaaacagtctctaaacagcgagtttcaactcattcacgagttatgcctatatgtcctctcagcttcccaaagacaagagcttatacgtgctacactctctgcattgcatgcctatctttcttggattccgttgggatacatatttgagtcccctttgctggagatcctacttaaattcttccctgttccagcatataggaatctcacacttcaatgtttgtcagaggttgcatctcttaattttggggacttctacgatatgcaatatgtcaagatgtacagcattttcatgaatcagttgcaggcaattctccctttaaatttaaatatccctgaggcatattcaactggaagtagtgaagaacaggcttttatccagaacttggcactgtttttcacttcgtttttcaagttacatataaaaatcctagaatctgcacccgaaaatatttctctattacttgcgggtctgggatatctcattagcatatcgtatgttgatgacactgaagtattcaaggtttgtttggactattggaattcattagtgttggagttgtttgggacgcgacatcatgcgtgtcaccctgcactaactccaagtctgtttggattgcaaatggctttccttcctagtacagttgatggtgttaaatctgaagtcactgagcggcaaaaactttattcagatccaatgtcaaaattaaggggactcatgattagtcgcacggctaagcctgaagaagtgttaattgttgaggacgaaaatgggaacattgttcgtgaaactatgaaggataatgatgttcttgtccagtataagataatgcgggagacattaatctacctctcacaccttgatcatgaagataccgaaaaacagatgttgagtaagctaagcaaacagttgagcggggaggaatgggcatggaacaatctaaacactttatgctgggctattgggtctatttctgggtccatggtagtagaacaggaaaacagatttctcgtgatggttatccgtgatttgttaagtttatgtgaagtcgtcaagggaaaagacaataaagctgttattgcgagcaacatcatgtacgttgttggacaatattcaagattcttaagagcccattggaagtttttgaagacagttgtccataagctgtttgaatttatgcatgagacgcatcctggtgttcaggacatggcttgcgacacattcttaaaaattgttcagaagtgtaagcgaaaatttgttattgttcaggttggagaaagtgagccatttgtgtctgaacttctatcaggccttgctacaatcgtcggagatcttcaacctcatcagattcatacattttatgaatctgttggtagtatgatccaggcagaatcagatcctcagaagaggggggaatacctccagaggttgatggctctcccgaatcagaaatgggcagaaattataggacaagcacgtcaaagtgcagatatcctcaaggaaccagatgtgatacgtactgtgcttaatatcctccagacaaatacgcgcgttgcaacttcactaggaacattcttcctgtctcaaatttcgttgatcttcttggatatgctgaatgtttacagaatgtatagtgaactcgtttcaagcagcattgctaatggtggcccatacgcttcgagaacatctcttgttaaacttttaaggtctgttaagagggaaattcttaagctgatagagacgtttttagataaagctgaaaaccagccacacattggaaaacagtttgttccaccaatgatggatcaagtacttggcgactatgcaagaaatgttcctgatgcaagagaatcagaagtcttgtcactctttgcgacaataatcaacaaatacaaggttgtaatgcgagatgaagttcccctcatatttgaagctgttttccagtgcacattggagatgattactaagaattttgaagattacccagagcaccgtctcaagtttttctcgttacttcgtgctattgctacattttgtttccgtgcgttgatacagttgtcaagtgagcaactgaagctagtgatggattcagttatctgggcatttaggcatactgaaagaaatatcgctgaaactgggctcaatctcttgctcgagatgctgaaaaactttcagaaatctgacttttgtaacaaattctaccaaacatactttctgcaaattgagcaagaagtatttgctgtcttgaccgataccttccacaagcctgggttcaagttgcatgtgttggtgttgcagcacttatttagcctggttgagagcggatcattggcagaaccattgtgggatgctgcaacggtaccgcatccttattcaaataatgtcgcctttgtgcttgagtacaccaccaagcttctaagctcatcattccccaacatgactacaacagaggtgacacagtttgtgaatggactttacgagtcgagaaacgatgttggcagatttaaggataacatacgcgacttccttatacagtccaaggaattttctgctcaggataacaaagatttatatgctgaggaagctgctgcccaaatggagagagagagacaaagaatgctttcgattcctggacttatagctcccagcgaaattcaagacgacatggccgattcttaa

SEQ ID NO: 77730 - protein, 1076 aa, Arabidopsis thaliana
  peptide (1)..(1076): Ceres Seq. ID no. 12577348
MAAEKLRDLSQPIDVVLLDATVEAFYSTGSKEERASADNILRDLKANPDTWLQVVHILQNTSSTHTKFFALQVLEGVIKYRWNALPVEQRDGMKNYISDVIVQLSRDEASFRTERLYVNKLNIILVQIVKQEWPAKWKSFIPDLVIAAKTSETICENCMAILKLLSEEVFDFSKGEMTQQKIKELKQSLNSEFQLIHELCLYVLSASQRQELIRATLSALHAYLSWIPLGYIFESPLLEILLKFFPVPAYRNLTLQCLSEVASLNFGDFYDMQYVKMYSIFMNQLQAILPLNLNIPEAYSTGSSEEQAFIQNLALFFTSFFKLHIKILESAPENISLLLAGLGYLISISYVDDTEVFKVCLDYWNSLVLELFGTRHHACHPALTPSLFGLQMAFLPSTVDGVKSEVTERQKLYSDPMSKLRGLMISRTAKPEEVLIVEDENGNIVRETMKDNDVLVQYKIMRETLIYLSHLDHEDTEKQMLSKLSKQLSGEEWAWNNLNTLCWAIGSISGSMVVEQENRFLVMVIRDLLSLCEVVKGKDNKAVIASNIMYVVGQYSRFLRAHWKFLKTVVHKLFEFMHETHPGVQDMACDTFLKIVQKCKRKFVIVQVGESEPFVSELLSGLATIVGDLQPHQIHTFYESVGSMIQAESDPQKRGEYLQRLMALPNQKWAEIIGQARQSADILKEPDVIRTVLNILQTNTRVATSLGTFFLSQISLIFLDMLNVYRMYSELVSSSIANGGPYASRTSLVKLLRSVKREILKLIETFLDKAENQPHIGKQFVPPMMDQVLGDYARNVPDARESEVLSLFATIINKYKVVMRDEVPLIFEAVFQCTLEMITKNFEDYPEHRLKFFSLLRAIATFCFRALIQLSSEQLKLVMDSVIWAFRHTERNIAETGLNLLLEMLKNFQKSDFCNKFYQTYFLQIEQEVFAVLTDTFHKPGFKLHVLVLQHLFSLVESGSLAEPLWDAATVPHPYSNNVAFVLEYTTKLLSSSFPNMTTTEVTQFVNGLYESRNDVGRFKDNIRDFLIQSKEFSAQDNKDLYAEEAAAQMERERQRMLSIPGLIAPSEIQDDMADS

SEQ ID NO: 77731 - protein, 984 aa, Arabidopsis thaliana
  peptide (1)..(984): Ceres Seq. ID no. 12577349
MKNYISDVIVQLSRDEASFRTERLYVNKLNIILVQIVKQEWPAKWKSFIPDLVIAAKTSETICENCMAILKLLSEEVFDFSKGEMTQQKIKELKQSLNSEFQLIHELCLYVLSASQRQELIRATLSALHAYLSWIPLGYIFESPLLEILLKFFPVPAYRNLTLQCLSEVASLNFGDFYDMQYVKMYSIFMNQLQAILPLNLNIPEAYSTGSSEEQAFIQNLALFFTSFFKLHIKILESAPENISLLLAGLGYLISISYVDDTEVFKVCLDYWNSLVLELFGTRHHACHPALTPSLFGLQMAFLPSTVDGVKSEVTERQKLYSDPMSKLRGLMISRTAKPEEVLIVEDENGNIVRETMKDNDVLVQYKIMRETLIYLSHLDHEDTEKQMLSKLSKQLSGEEWAWNNLNTLCWAIGSISGSMVVEQENRFLVMVIRDLLSLCEVVKGKDNKAVIASNIMYVVGQYSRFLRAHWKFLKTVVHKLFEFMHETHPGVQDMACDTFLKIVQKCKRKFVIVQVGESEPFVSELLSGLATIVGDLQPHQIHTFYESVGSMIQAESDPQKRGEYLQRLMALPNQKWAEIIGQARQSADILKEPDVIRTVLNILQTNTRVATSLGTFFLSQISLIFLDMLNVYRMYSELVSSSIANGGPYASRTSLVKLLRSVKREILKLIETFLDKAENQPHIGKQFVPPMMDQVLGDYARNVPDARESEVLSLFATIINKYKVVMRDEVPLIFEAVFQCTLEMITKNFEDYPEHRLKFFSLLRAIATFCFRALIQLSSEQLKLVMDSVIWAFRHTERNIAETGLNLLLEMLKNFQKSDFCNKFYQTYFLQIEQEVFAVLTDTFHKPGFKLHVLVLQHLFSLVESGSLAEPLWDAATVPHPYSNNVAFVLEYTTKLLSSSFPNMTTTEVTQFVNGLYESRNDVGRFKDNIRDFLIQSKEFSAQDNKDLYAEEAAAQMERERQRMLSIPGLIAPSEIQDDMADS

SEQ ID NO: 77732 - protein, 918 aa, Arabidopsis thaliana
  peptide (1)..(918): Ceres Seq. ID no. 12577350
MAILKLLSEEVFDFSKGEMTQQKIKELKQSLNSEFQLIHELCLYVLSASQRQELIRATLSALHAYLSWIPLGYIFESPLLEILLKFFPVPAYRNLTLQCLSEVASLNFGDFYDMQYVKMYSIFMNQLQAILPLNLNIPEAYSTGSSEEQAFIQNLALFFTSFFKLHIKILESAPENISLLLAGLGYLISISYVDDTEVFKVCLDYWNSLVLELFGTRHHACHPALTPSLFGLQMAFLPSTVDGVKSEVTERQKLYSDPMSKLRGLMISRTAKPEEVLIVEDENGNIVRETMKDNDVLVQYKIMRETLIYLSHLDHEDTEKQMLSKLSKQLSGEEWAWNNLNTLCWAIGSISGSMVVEQENRFLVMVIRDLLSLCEVVKGKDNKAVIASNIMYVVGQYSRFLRAHWKFLKTVVHKLFEFMHETHPGVQDMACDTFLKIVQKCKRKFVIVQVGESEPFVSELLSGLATIVGDLQPHQIHTFYESVGSMIQAESDPQKRGEYLQRLMALPNQKWAEIIGQARQSADILKEPDVIRTVLNILQTNTRVATSLGTFFLSQISLIFLDMLNVYRMYSELVSSSIANGGPYASRTSLVKLLRSVKREILKLIETFLDKAENQPHIGKQFVPPMMDQVLGDYARNVPDARESEVLSLFATIINKYKVVMRDEVPLIFEAVFQCTLEMITKNFEDYPEHRLKFFSLLRAIATFCFRALIQLSSEQLKLVMDSVIWAFRHTERNIAETGLNLLLEMLKNFQKSDFCNKFYQTYFLQIEQEVFAVLTDTFHKPGFKLHVLVLQHLFSLVESGSLAEPLWDAATVPHPYSNNVAFVLEYTTKLLSSSFPNMTTTEVTQFVNGLYESRNDVGRFKDNIRDFLIQSKEFSAQDNKDLYAEEAAAQMERERQRMLSIPGLIAPSEIQDDMADS

SEQ ID NO: 77733 - DNA, 854 bp, Arabidopsis thaliana
  misc_feature (1)..(854): Ceres Seq. ID no. 12577362
  misc_feature (1)..(854): Ortholog of  Ceres SEQ ID NO 13661890 as cited in SEQ ID NO 61482
gatacaattacaatatgtagagtatcttataggtgacgtaaccatgaaatatagaattctttggaatctgaaactgaattattcagttgataaatgataaaacaaatactcatatctcatcctttggcatggcgatccagaagatcctctttgcttcacttctcatatgctcactgatccaatccatccacggggcggaaaaagtaagactcttcaaagagctggacaaaggtgcacttgatgtcaccactaaacccagccgagaaggaccaggtgttgttttggatgccggcaaggatacgttgaacattacatggacgctaagctcgattgggtctaaaagagaggctgaatttaagatcatcaaagttaagctatgctacgctccacctagccaagttgaccgaccatggcgcaaaacccatgacgagctcttcaaagacaagacctgcccacacaagatcatagccaagccttatgacaaaacacttcaatcaactacttggactcttgagcgtgacatccccaccggaacctacttcgttcgtgcctacgcggttgatgccattggccatgaagttgcctatggacagagcaccgacgatgccaagaaaaccaatctcttcagcgttcaggctatcagtggccgccacgcgtccctagatattgcctccatctgtttcagtgtcttctccgtcgtggctcttgtcgtcttctttgtcaatgagaagaggaaggccaagatagagcaaagcaaatgagtcgtttactttgcgtatttgtgacgttgaacccaaaaaaagttgactttgaactttcttgtttaccaattccttttgtcttgttgcacactt

SEQ ID NO: 77734 - protein, 210 aa, Arabidopsis thaliana
  peptide (1)..(210): Ceres Seq. ID no. 12577363
MAIQKILFASLLICSLIQSIHGAEKVRLFKELDKGALDVTTKPSREGPGVVLDAGKDTLNITWTLSSIGSKREAEFKIIKVKLCYAPPSQVDRPWRKTHDELFKDKTCPHKIIAKPYDKTLQSTTWTLERDIPTGTYFVRAYAVDAIGHEVAYGQSTDDAKKTNLFSVQAISGRHASLDIASICFSVFSVVALVVFFVNEKRKAKIEQSK

SEQ ID NO: 77735 - DNA, 1312 bp, Arabidopsis thaliana
  misc_feature (1)..(1312): Ceres Seq. ID no. 12577381
  misc_feature (1)..(1312): Ortholog of  Ceres SEQ ID NO 13656161 as cited in SEQ ID NO 64908
  misc_feature (1)..(1312): Ortholog of  Ceres SEQ ID NO 13597600 as cited in SEQ ID NO 65142
aaaatgggttacataggagctcatggtgtagctgctcttaagaaacacaaatacagtggtgttgatcactcttatcttgccaaatatgttctccaacctttttggaaccgttttgtcaaaatcttccctctatggatgccccccaacatgataacacttatggggttcatgtttcttctcacatctgctctcttaggctatatatactcacctaagttggattctccacctcctcgatgggtccactttgcacacggcttacttctgtttttatatcagacatttgatgcggttgatgggaagcaagcacgaagaacaaattcatctagcccactaggagagctttttgaccatggttgcgatgcacttggctgtgcgttagaaacaatggcatatgggagtactgctatgtgtggaagagatactttctggttttgggttatttctgctgttccattttttggagcaacatgggaacactattttaccaatacgcttactcttccggtagtcaatggtcctacagaaggtcttgcacttatatactgtggccatttcttcacagccattgttggtgcggagtggtgggctcagccgtttgggaagtcgattcctttgtttagttgggttccgtttttgaacgagatgcaaatgtccagaataatactattctccatgattttctttgctgttataccaacccttgcaatcaacacgtctaatgtttacaaagttgtacattcaagaaatggaagcatgcttctagcattagctatgctatatcccttagtcacgttaattgcaggagttctgatttgggattacttgtctccaattgatctcataagaaactaccctcacttagttgtgttgggaactggtcttgcatttggattccttgtgggaagaatgattctagctcacttatgtgacgaaccaaaaggattgaaaacaaacatgtgtatgtcactgctttaccttccatttgcactagcaaatgctctaaccgctagactcaacgacggggttcctcttgtggatgagttttgggttcttcttggatattgtatattcacattgtcactatatgcgcattttgcaacttcagtcattcatgagatcacaactgcacttggaatctactgcttcaggattactcggaaagaagcttgaatttttgttttagtgttttttttcttgttcggttgaaatagggtaattcatgtagaacctttttgtgtaacgtttctaagaaaaaaaaatatgggattgttctagatttttttttttaatttaaacctcgttattgatc

SEQ ID NO: 77736 - protein, 390 aa, Arabidopsis thaliana
  peptide (1)..(390): Ceres Seq. ID no. 12577382
KMGYIGAHGVAALKKHKYSGVDHSYLAKYVLQPFWNRFVKIFPLWMPPNMITLMGFMFLLTSALLGYIYSPKLDSPPPRWVHFAHGLLLFLYQTFDAVDGKQARRTNSSSPLGELFDHGCDALGCALETMAYGSTAMCGRDTFWFWVISAVPFFGATWEHYFTNTLTLPVVNGPTEGLALIYCGHFFTAIVGAEWWAQPFGKSIPLFSWVPFLNEMQMSRIILFSMIFFAVIPTLAINTSNVYKVVHSRNGSMLLALAMLYPLVTLIAGVLIWDYLSPIDLIRNYPHLVVLGTGLAFGFLVGRMILAHLCDEPKGLKTNMCMSLLYLPFALANALTARLNDGVPLVDEFWVLLGYCIFTLSLYAHFATSVIHEITTALGIYCFRITRKEA

SEQ ID NO: 77737 - protein, 389 aa, Arabidopsis thaliana; identical to SEQ ID NO: 44528
  peptide (1)..(389): Ceres Seq. ID no. 12577383

SEQ ID NO: 77738 - protein, 345 aa, Arabidopsis thaliana; identical to SEQ ID NO: 44529
  peptide (1)..(345): Ceres Seq. ID no. 12577384

SEQ ID NO: 77739 - DNA, 1374 bp, Arabidopsis thaliana
  misc_feature (1)..(1374): Ceres Seq. ID no. 12577389
  misc_feature (1)..(1374): Ortholog of  Ceres SEQ ID NO 14301830 as cited in SEQ ID NO 62310
  misc_feature (1)..(1374): Ortholog of  Ceres SEQ ID NO 15179524 as cited in SEQ ID NO 0
actctttcttccttgtcgtttcaaatggcgcaattgtattcttccgtgaaacccacgccaatgttgaaagatgagctagacattgtgatacctacgattcgaaacctcgacttccttgagatgtggcgacctttctttgagcagtatcatttgatcattgttcaagatggtgatccttcgaaagtcatcaacattccagtagggtttgactacgagctctacaacaggaacgacatcaatcgaatcttgggtcccaaggcctcttgcatttccttcaaggactctgcttgtcgttgcttcggttacatggtctccaaaaagaagtacatctacaccattgatgatgattgctttgttgcaaaggatccaacagggaaagagatcaatgcgcttgagcagcatatcaagaacctcttatctccatcaactccgcatttctttaacacactttatgatccatacagagatggggcagactttgttcgtggataccctttcagtatgcgcgaaggtgccataaccgcggtctctcatggcctctggctcaacattcctgactatgatgctcccactcagcttgtgaaacctcttgagaaaaattccaggtatgttgatgcagtcatgaccattcccaaaggaactctttttcctatgtgtggtatgaaccttgcttttgaccgtgagctgattggtccggctatgtactttgggcttatgggtgatggacagccaattggacgctatgacgacatgtgggctggttggtgtgtcaaggtgatatgtgaccacatgggatggggagtgaagacgggtttgccttacatatggcacagcaaagccagcaacccattcgtgaacctgaaaaaggaatacaacggaatattttggcaggaagaggcgattccgttctttcaatccgtgactcttcctaaagagtgcacttcggtgcagcaatgctacctcgagctggccaagctcgtgagagagaaacttgggaaggttgatccttacttcatcacacttgcaactggaatggtcacctggatcgaagcttgggaggagcttaactccgcggagggaactgaggctgaggcaccaaaaggcaaaaattagtaaagagaaggtcactgaataaggcaaatggtattgtttactaggagaaaagggtttgagtcacatgtgcaaccctctctgtttttcttaatcataatttgatttgcttctgtctttaatttcttgtcatcagtatttgtgttctcagtgcattgtcagtttgtcacaaaaagagaaggtgtaatgtgctctatgcattttgttttctttaaggtttctaaactctttatctatgaaatatctatcattcctattttcctt

SEQ ID NO: 77740 - protein, 370 aa, Arabidopsis thaliana
  peptide (1)..(370): Ceres Seq. ID no. 12577390
TLSSLSFQMAQLYSSVKPTPMLKDELDIVIPTIRNLDFLEMWRPFFEQYHLIIVQDGDPSKVINIPVGFDYELYNRNDINRILGPKASCISFKDSACRCFGYMVSKKKYIYTIDDDCFVAKDPTGKEINALEQHIKNLLSPSTPHFFNTLYDPYRDGADFVRGYPFSMREGAITAVSHGLWLNIPDYDAPTQLVKPLEKNSRYVDAVMTIPKGTLFPMCGMNLAFDRELIGPAMYFGLMGDGQPIGRYDDMWAGWCVKVICDHMGWGVKTGLPYIWHSKASNPFVNLKKEYNGIFWQEEAIPFFQSVTLPKECTSVQQCYLELAKLVREKLGKVDPYFITLATGMVTWIEAWEELNSAEGTEAEAPKGKN

SEQ ID NO: 77741 - protein, 362 aa, Arabidopsis thaliana
  peptide (1)..(362): Ceres Seq. ID no. 12577391
MAQLYSSVKPTPMLKDELDIVIPTIRNLDFLEMWRPFFEQYHLIIVQDGDPSKVINIPVGFDYELYNRNDINRILGPKASCISFKDSACRCFGYMVSKKKYIYTIDDDCFVAKDPTGKEINALEQHIKNLLSPSTPHFFNTLYDPYRDGADFVRGYPFSMREGAITAVSHGLWLNIPDYDAPTQLVKPLEKNSRYVDAVMTIPKGTLFPMCGMNLAFDRELIGPAMYFGLMGDGQPIGRYDDMWAGWCVKVICDHMGWGVKTGLPYIWHSKASNPFVNLKKEYNGIFWQEEAIPFFQSVTLPKECTSVQQCYLELAKLVREKLGKVDPYFITLATGMVTWIEAWEELNSAEGTEAEAPKGKN

SEQ ID NO: 77742 - protein, 350 aa, Arabidopsis thaliana
  peptide (1)..(350): Ceres Seq. ID no. 12577392
MLKDELDIVIPTIRNLDFLEMWRPFFEQYHLIIVQDGDPSKVINIPVGFDYELYNRNDINRILGPKASCISFKDSACRCFGYMVSKKKYIYTIDDDCFVAKDPTGKEINALEQHIKNLLSPSTPHFFNTLYDPYRDGADFVRGYPFSMREGAITAVSHGLWLNIPDYDAPTQLVKPLEKNSRYVDAVMTIPKGTLFPMCGMNLAFDRELIGPAMYFGLMGDGQPIGRYDDMWAGWCVKVICDHMGWGVKTGLPYIWHSKASNPFVNLKKEYNGIFWQEEAIPFFQSVTLPKECTSVQQCYLELAKLVREKLGKVDPYFITLATGMVTWIEAWEELNSAEGTEAEAPKGKN

SEQ ID NO: 77743 - DNA, 2093 bp, Arabidopsis thaliana
  misc_feature (1)..(2093): Ceres Seq. ID no. 12577416
  misc_feature (1)..(2093): Ortholog of  Ceres SEQ ID NO 13622744 as cited in SEQ ID NO 0
aacttcaatggagactggagagagagaagggacgtaattaaacaccaaagcgtttttatatttcggagaatcaactacgtgtcgtttgacatcctaaattggcagatagtagaaaggaaatgttgagactggagagtttgatagtaacagtgtggggaccagcgacgcttctagctcgaaaagctccgttgggtcagatatggatggccgctacattgcacgcgaagatcaaccggaagaaactagataagctcgatatcattcaaatctgcgaagagattttgaatccgtcggttccgatggctcttagactctccgggattcttatgggtggtgttgtgattgtttatgagaggaaagtgaagctcctattcgatgatgttaatcgctttctggttgaaattaatggagcttggcgcacaaaatctgttccggatcccactttactacctaaaggaaaaacccatgccaggaaagaggctgttacattgcctgagaacgaagaagctgattttggagattttgaacagactcgtaatgttcctaaatttggcaattacatggattttcagcagacttttatttccatgcggttagatgaatcccatgttaacaataaccccgagccagaagatcttggacagcagttccatcaagctgatgccgagaatatcacactctttgagtatcatggttcattccagaccaacaatgaaacatatgatcgttttgaaagatttgacatcgaaggagatgatgaaacacagatgaactccaatccaagagaaggcgctgaaatacctacaactctcatcccatcaccacctcgtcatcatgacattcccgaaggagtcaaccccacaagccctcagcgccaggagcaacaggagaatcgtagggacggatttgctgagcagatggaggaacaaaacataccggacaaagaggaacacgatagaccacaaccagcgaaaaagagagcaagaaagacagctacttcagcgatggattatgagcaaactattatcgctggtcatgtttaccagtcatggctccaggatacttctgacattctctgtaggggggaaaagagaaaggttcgaggaactatccggccagacatggaaagtttcaaacgtgcgaatatgccacctacacaactctttgaaaaggacagttcttacccgcctcagctttaccagctttggtcaaagaatactcaagttcttcaaacctcatcatctgaatctcgacatcctgatctccgtgcggaacaatctccagggtttgttcaggagagaatgcataaccaccatcaaacagaccatcatgagcgcagtgacacaagctcccaaaatcttgatagtcccgcagaaatactccggacagttcgtactgggaaaggtgcttcagtagaaagcatgatggctggatctcgagcaagccctgaaactattaaccgccaggctgctgatattaatgtcacgccattctattctggagatgatgtgagatccatgcctagtacaccatccgcacgtggagcagcttcaattaacaacatagagatcagctctaaaagtcgcatgcccaatagaaaaagaccaaattcctcaccaagaagaggactcgaaccagtggcggaagagagaccgtgggagcaccgtgaatatgagtttgagttttcaatgttacctgaaaaacgcttcacagccgataaagaaatactatttgaaactgcatctacacagactcaaaagccagtgtgcaatcaatcagacgagatgataacagatagcatcaaaagtcacctgaagacacactttgaaacacctggagctcctcaagtggaatctcttaacaagctcgctgttggaatggacagaaacgctgcagctaaactcttcttccaatcctgtgtgttagctactcgcggagtcatcaaggtaaaccaagcagagccttatggggacattctcattgcaagaggacccaacatgtaaggtttgatttctaaattataaaagattctggtgaaccgattatccatagttgttttgcttttcatattctagcagagagagttcgtagac

SEQ ID NO: 77744 - protein, 627 aa, Arabidopsis thaliana
  peptide (1)..(627): Ceres Seq. ID no. 12577417
MLRLESLIVTVWGPATLLARKAPLGQIWMAATLHAKINRKKLDKLDIIQICEEILNPSVPMALRLSGILMGGVVIVYERKVKLLFDDVNRFLVEINGAWRTKSVPDPTLLPKGKTHARKEAVTLPENEEADFGDFEQTRNVPKFGNYMDFQQTFISMRLDESHVNNNPEPEDLGQQFHQADAENITLFEYHGSFQTNNETYDRFERFDIEGDDETQMNSNPREGAEIPTTLIPSPPRHHDIPEGVNPTSPQRQEQQENRRDGFAEQMEEQNIPDKEEHDRPQPAKKRARKTATSAMDYEQTIIAGHVYQSWLQDTSDILCRGEKRKVRGTIRPDMESFKRANMPPTQLFEKDSSYPPQLYQLWSKNTQVLQTSSSESRHPDLRAEQSPGFVQERMHNHHQTDHHERSDTSSQNLDSPAEILRTVRTGKGASVESMMAGSRASPETINRQAADINVTPFYSGDDVRSMPSTPSARGAASINNIEISSKSRMPNRKRPNSSPRRGLEPVAEERPWEHREYEFEFSMLPEKRFTADKEILFETASTQTQKPVCNQSDEMITDSIKSHLKTHFETPGAPQVESLNKLAVGMDRNAAAKLFFQSCVLATRGVIKVNQAEPYGDILIARGPNM

SEQ ID NO: 77745 - protein, 599 aa, Arabidopsis thaliana
  peptide (1)..(599): Ceres Seq. ID no. 12577418
MAATLHAKINRKKLDKLDIIQICEEILNPSVPMALRLSGILMGGVVIVYERKVKLLFDDVNRFLVEINGAWRTKSVPDPTLLPKGKTHARKEAVTLPENEEADFGDFEQTRNVPKFGNYMDFQQTFISMRLDESHVNNNPEPEDLGQQFHQADAENITLFEYHGSFQTNNETYDRFERFDIEGDDETQMNSNPREGAEIPTTLIPSPPRHHDIPEGVNPTSPQRQEQQENRRDGFAEQMEEQNIPDKEEHDRPQPAKKRARKTATSAMDYEQTIIAGHVYQSWLQDTSDILCRGEKRKVRGTIRPDMESFKRANMPPTQLFEKDSSYPPQLYQLWSKNTQVLQTSSSESRHPDLRAEQSPGFVQERMHNHHQTDHHERSDTSSQNLDSPAEILRTVRTGKGASVESMMAGSRASPETINRQAADINVTPFYSGDDVRSMPSTPSARGAASINNIEISSKSRMPNRKRPNSSPRRGLEPVAEERPWEHREYEFEFSMLPEKRFTADKEILFETASTQTQKPVCNQSDEMITDSIKSHLKTHFETPGAPQVESLNKLAVGMDRNAAAKLFFQSCVLATRGVIKVNQAEPYGDILIARGPNM

SEQ ID NO: 77746 - protein, 567 aa, Arabidopsis thaliana
  peptide (1)..(567): Ceres Seq. ID no. 12577419
MALRLSGILMGGVVIVYERKVKLLFDDVNRFLVEINGAWRTKSVPDPTLLPKGKTHARKEAVTLPENEEADFGDFEQTRNVPKFGNYMDFQQTFISMRLDESHVNNNPEPEDLGQQFHQADAENITLFEYHGSFQTNNETYDRFERFDIEGDDETQMNSNPREGAEIPTTLIPSPPRHHDIPEGVNPTSPQRQEQQENRRDGFAEQMEEQNIPDKEEHDRPQPAKKRARKTATSAMDYEQTIIAGHVYQSWLQDTSDILCRGEKRKVRGTIRPDMESFKRANMPPTQLFEKDSSYPPQLYQLWSKNTQVLQTSSSESRHPDLRAEQSPGFVQERMHNHHQTDHHERSDTSSQNLDSPAEILRTVRTGKGASVESMMAGSRASPETINRQAADINVTPFYSGDDVRSMPSTPSARGAASINNIEISSKSRMPNRKRPNSSPRRGLEPVAEERPWEHREYEFEFSMLPEKRFTADKEILFETASTQTQKPVCNQSDEMITDSIKSHLKTHFETPGAPQVESLNKLAVGMDRNAAAKLFFQSCVLATRGVIKVNQAEPYGDILIARGPNM

SEQ ID NO: 77747 - DNA, 1071 bp, Arabidopsis thaliana
  misc_feature (1)..(1071): Ceres Seq. ID no. 12577439
  misc_feature (1)..(1071): Ortholog of  Ceres SEQ ID NO 15179676 as cited in SEQ ID NO 52442
  misc_feature (1)..(1071): Ortholog of  Ceres SEQ ID NO 13582807 as cited in SEQ ID NO 67806
acttcatcgaaaatggcggaaagaggaggagaaagcggcgcagagcgtggcggtgaccgtggtgacttcgggcgtggattcggcggtggacgtggaggtggccgtggccgtgatcgtggtccaagaggccgtggaagacgtggaggccgtgcctcggaagaaacgaaatgggttccagtgaccaaactaggtcgtctagtggctgacaataaaataacgaagctagagcagatctatcttcattctctcccagtaaaggagtaccaaatcatagatcatcttgttggtcctacgttgaaagacgaggttatgaagatcatgcctgttcagaaacaaaccagagctggtcaaaggactagattcaaggcctttgttgttgttggtgatggaaatggtcatgttggtttgggtgtcaagtgttctaaggaagttgctactgccattagaggagctattattcttgctaagctatcagtggttccggtgaggagaggttattgggggaataagattgggaagccacacactgtgccttgtaaggttactggtaaatgtggttctgttactgtgagaatggttcctgctccgagaggttctggtattgttgctgctagggttcctaagaaggttcttcagttcgctggtattgatgatgtctttacttcttcaagaggatctaccaaaacccttggaaactttgtcaaggctacattcgattgcttacagaagacatatgggttccttacaccagagttctggaaagagactagattctccagatcgccgtaccaagagcacactgatttcctgtcgactaaggctgtttctgcaaccaaggttatcactgagggtgaagaccaagcttaagaccttcatgagatgagtttggtttataggttttggttatcgcaaatatttatctttccggtcttgtttcttggttgtcttttatcagtttttgatattggagtttcagttacaaggataatcataatttagttatgtttggcttttgttagatatttgcttccatgaaatgacattttgcaataatgcatgtctatttctaag

SEQ ID NO: 77748 - protein, 288 aa, Arabidopsis thaliana
  peptide (1)..(288): Ceres Seq. ID no. 12577440
TSSKMAERGGESGAERGGDRGDFGRGFGGGRGGGRGRDRGPRGRGRRGGRASEETKWVPVTKLGRLVADNKITKLEQIYLHSLPVKEYQIIDHLVGPTLKDEVMKIMPVQKQTRAGQRTRFKAFVVVGDGNGHVGLGVKCSKEVATAIRGAIILAKLSVVPVRRGYWGNKIGKPHTVPCKVTGKCGSVTVRMVPAPRGSGIVAARVPKKVLQFAGIDDVFTSSRGSTKTLGNFVKATFDCLQKTYGFLTPEFWKETRFSRSPYQEHTDFLSTKAVSATKVITEGEDQA

SEQ ID NO: 77749 - protein, 284 aa, Arabidopsis thaliana [sequence omitted]

SEQ ID NO: 77750 - protein, 185 aa, Arabidopsis thaliana; identical to SEQ ID NO: 38083
  peptide (1)..(185): Ceres Seq. ID no. 12577442

SEQ ID NO: 77751 - DNA, 1828 bp, Arabidopsis thaliana
  misc_feature (1)..(1828): Ceres Seq. ID no. 12577447
  misc_feature (1)..(1828): Ortholog of  Ceres SEQ ID NO 14311305 as cited in SEQ ID NO 53731
  misc_feature (1)..(1828): Ortholog of  Ceres SEQ ID NO 13501807 as cited in SEQ ID NO 67558
tttggttagagtgttaaaaaactattggaagatgggttctggtcaatggcatatggagaagaggtctactttaaagaatgattcgtttgtaaaagaatacaatccagtcacggaaactgggagtctctctatcattgttcttggtgcttctggtgatcttgctaagaagaagacttttcctgcacttttcaatctatttcatcagggatttcttaatccagatgaagttcatatatttggatatgcaaggagtaagattactgatgaggagcttagagataaaatccgcggatatcttgttgatgagaagaatgcatctaagaaaacagaagctttgtccaagtttctaaagctgattaagtatgtgagtggaccttatgattctgaggaagggtttaagagattagacaaggcgattttggagcacgagatatctaaaaagactgctgaaggatcttcgaggagattgttttatcttgcacttcctccgtctgtataccctcctgtaagcaagatgatcaaggcatggtgcactaacaaatctgatcttggtggatggactaggattgttgttgagaaaccatttggaaaggatttggaatctgcagagcagctgagttctcagattggagccttgtttgaagaaccacagatttatcgtattgatcactatctgggaaaagagttagttcaaaacatgttggttcttcggtttgccaatcgcttgtttttgccactatggaaccgcgacaatattgcaaacgtacagatcgttttcagagaagattttggaactgaaggtcgcggtggatattttgatgaatacggaatcattcgtgatattattcaaaaccacttgctccaggttctttgccttgtcgccatggagaaaccaatctctcttaaacccgagcacatccgggatgagaaagtgaaggttcttcaatctgtgattcccataaaagatgaagaggtggttcttggacaatatgaaggatatagagatgatccaactgttccaaatgactcaaacactccaacgtttgccacaacaattcttcgcattaacaatgaaagatgggaaggtgttccttttatactgaaggccggaaaggcaatgagttcaaagaaggcagatattcgcattcagtttaaagatgttcctggcgacatattcaaatgtcaaaaccaagggaggaacgagtttgttatacgcttgcagccttcagaggccatgtacatgaagctaactgtgaagcaaccgggtctggagatgcaaaccgtgcagagtgaactagacctatcgtacaagcagcgttaccaagatgtctcaattccagaggcttacgaacgccttattcttgacacaatcagaggcgaccaacaacactttgttcgcagagacgaattaaaggcagcttgggaaatcttcactccactgcttcacaggatcgacaagggagaagtgaaatcggtcccatacaaacaaggtagccgtggcccagcggaagcagatcagctacttaagaaagctggttatatgcagactcatggctacatttggatccctcctacattgtaaatggtataatcatagagatgatgatgatgagtacacacaaaataagagggttttttttcttttttttccttgcttgctgaataaaaactcttcaccagtttggagtttgtttaagtgaatcttatgtatactagtgatcttcactaggacattgtttgtttatgccttgtagtttttgttgtactagtcccttgttttctttttttacataatgcaaaacagctttgtggaaaagctaattaaatt

SEQ ID NO: 77752 - protein, 526 aa, Arabidopsis thaliana
  peptide (1)..(526): Ceres Seq. ID no. 12577448
LVRVLKNYWKMGSGQWHMEKRSTLKNDSFVKEYNPVTETGSLSIIVLGASGDLAKKKTFPALFNLFHQGFLNPDEVHIFGYARSKITDEELRDKIRGYLVDEKNASKKTEALSKFLKLIKYVSGPYDSEEGFKRLDKAILEHEISKKTAEGSSRRLFYLALPPSVYPPVSKMIKAWCTNKSDLGGWTRIVVEKPFGKDLESAEQLSSQIGALFEEPQIYRIDHYLGKELVQNMLVLRFANRLFLPLWNRDNIANVQIVFREDFGTEGRGGYFDEYGIIRDIIQNHLLQVLCLVAMEKPISLKPEHIRDEKVKVLQSVIPIKDEEVVLGQYEGYRDDPTVPNDSNTPTFATTILRINNERWEGVPFILKAGKAMSSKKADIRIQFKDVPGDIFKCQNQGRNEFVIRLQPSEAMYMKLTVKQPGLEMQTVQSELDLSYKQRYQDVSIPEAYERLILDTIRGDQQHFVRRDELKAAWEIFTPLLHRIDKGEVKSVPYKQGSRGPAEADQLLKKAGYMQTHGYIWIPPTL

SEQ ID NO: 77753 - protein, 516 aa, Arabidopsis thaliana; identical to SEQ ID NO: 77428
  peptide (1)..(516): Ceres Seq. ID no. 12577449

SEQ ID NO: 77754 - protein, 509 aa, Arabidopsis thaliana; identical to SEQ ID NO: 77429
  peptide (1)..(509): Ceres Seq. ID no. 12577450

SEQ ID NO: 77755 - DNA, 703 bp, Arabidopsis thaliana
  misc_feature (1)..(703): Ceres Seq. ID no. 12577459
  misc_feature (1)..(703): Ortholog of  Ceres SEQ ID NO 13661143 as cited in SEQ ID NO 61139
  misc_feature (1)..(703): Ortholog of  Ceres SEQ ID NO 13597234 as cited in SEQ ID NO 64118
caagaagaacacacgaataagaagaaaaagaagaagaagaagaagaagagaagcttatggcaggaggaggaacagaagcgtttcctgatcttggagagcattgccaagaccctgattgcaaattactcgattttctcccttttacttgcgacggctgcaaattggtgttttgtttggagcatagatcatacaagtcacataactgtccgaaatccgatcatgggagcagaacggtttccatctgtgaaacatgttcaatagcgattgaaacaactggttttgatgaaaaaggaatcaaatctttgcttgagaaacacgaaagatccggagattgtgatccaaacaagaaaaagaaaccaacgtgtcctgtaaaacgttgcaaagagattctgacttttgcgaataaccttacttgcaaatattgtggagtcaagttctgtttgaaacaccggtttccgacagatcatgtctgtaacaagaagatcattaataccgcgggaacaagctcgaggtggaacgagaggtttatggaagctttgagtttaagaaaccagaaagggtgtggaagagggagctctgtttcatcaaaatcttcaccatcagttagatcgttttagtttcttctcttgtaacaatagtttgcatcaaccaattccttctttatgttctcatgtattttccattgtttgcaagaaagaagatt

SEQ ID NO: 77756 - protein, 186 aa, Arabidopsis thaliana
  peptide (1)..(186): Ceres Seq. ID no. 12577460
MAGGGTEAFPDLGEHCQDPDCKLLDFLPFTCDGCKLVFCLEHRSYKSHNCPKSDHGSRTVSICETCSIAIETTGFDEKGIKSLLEKHERSGDCDPNKKKKPTCPVKRCKEILTFANNLTCKYCGVKFCLKHRFPTDHVCNKKIINTAGTSSRWNERFMEALSLRNQKGCGRGSSVSSKSSPSVRSF

SEQ ID NO: 77757 - DNA, 984 bp, Arabidopsis thaliana
  misc_feature (1)..(984): Ceres Seq. ID no. 12577478
  misc_feature (1)..(984): Ortholog of  Ceres SEQ ID NO 13593919 as cited in SEQ ID NO 54135
  misc_feature (1)..(984): Ortholog of  Ceres SEQ ID NO 14303359 as cited in SEQ ID NO 54913
  misc_feature (1)..(984): Ortholog of  Ceres SEQ ID NO 13596017 as cited in SEQ ID NO 62012
gaaatctattgtctatctcctcaatttggattggattttctgcatatcatcgctctagctttcgcgggttttggattcgattccttacccttctccaatcgaagtttttggctttgaattggatttgggtttcgttccaaaatcagctctttttgttaatcagggtttcatctgtgtgggtcttgttttgaagcaatttgtgtgtgtttggatgaaagtagcagatatgcaggaccagctggtgtgtcatggttgtaggaatttattgatgtatcctagaggagcatctaatgtgcgttgtgcgttatgtaacactatcaacatggttcctcctcctcctccacctcacgacatggcacacattatatgtggtggttgtagaacaatgcttatgtatacgcgtggggctagtagcgtaagatgctcttgctgtcaaactacgaaccttgtgccagcgcactccaatcaggttgcccatgctccttccagtcaggttgcgcagatcaattgtgggcattgtcggacgaccctcatgtatccttacggtgcatcatccgtcaaatgcgctgtttgtcaattcgtaactaacgttaatatgagcaatggaagggtacctctcccaactaaccggccaaatggaacagcttgtcccccctctacatcaacttcaacaccaccctctcagacccaaaccgttgttgtagaaaaccccatgtccgttgatgaaagcggaaagttggtgagcaatgttgttgttggagtgacaactgacaaaaagtaatcaagaatgagtgagatcttaaagatcaaatccaaattcttcctctattcctgcgtttggtttgtgcatattacatacgcggaaaaactgtatgttatatatctcttgactcctttttaacccaagagaaaaagcttatcagaatctcttgttactgcattattggggtttattcaaagttgaagacacaaggtttttgctcg

SEQ ID NO: 77758 - protein, 189 aa, Arabidopsis thaliana
  peptide (1)..(189): Ceres Seq. ID no. 12577479
MKVADMQDQLVCHGCRNLLMYPRGASNVRCALCNTINMVPPPPPPHDMAHIICGGCRTMLMYTRGASSVRCSCCQTTNLVPAHSNQVAHAPSSQVAQINCGHCRTTLMYPYGASSVKCAVCQFVTNVNMSNGRVPLPTNRPNGTACPPSTSTSTPPSQTQTVVVENPMSVDESGKLVSNVVVGVTTDKK

SEQ ID NO: 77759 - protein, 184 aa, Arabidopsis thaliana; identical to SEQ ID NO: 24508
  peptide (1)..(184): Ceres Seq. ID no. 12577480

SEQ ID NO: 77760 - protein, 170 aa, Arabidopsis thaliana; identical to SEQ ID NO: 24509
  peptide (1)..(170): Ceres Seq. ID no. 12577481

SEQ ID NO: 77761 - DNA, 1350 bp, Arabidopsis thaliana
  misc_feature (1)..(1350): Ceres Seq. ID no. 12577482
  misc_feature (1)..(1350): Ortholog of  Ceres SEQ ID NO 14301676 as cited in SEQ ID NO 67423
tcatcaatctcaagcgccggtggaatcggcggtggaggtttatatgttccgataatgacaatcgtggccggtctcgatctaaagacagcttcaagcttctcagcttttatggttactggtggatctatagctaacgtgggatgcaatctattcgttagaaaccctaaatctggtggcaaaaccctaatcgacttcgatttagctcttttattggaaccatgtatgcttcttggagttagtattggtgtgatctgtaatcttgtttttccgaactggttgattacgagtctcttcgctgtgtttcttgcgtggtcgacgttgaagacttttggaaatggactttattattggagattggaatcggagatggtgaagattagagaatcgaatagaattgaagaagatgatgaagaagataagattgagagtctaaagttgcctctcttggaggattatcagagaccaaagaggtttccatggattaagcttggagttttggtcattatttggctttcttacttcgcagtttatcttcttcgaggaaacaaatatggcgagggaatcatatcgatcgagccatgtggaaacgcctactggctcatttcatcgtctcaaataccactaactctcttcttcactctctggatctgcttcagtgacaatgttcaaagccaacaacaatcagattaccatgtctcagtaaaggatgtagaagatttgagatcaaatgatggagcaagatcaaacaagtgtatgttccctgtaatggctctattagctggagttttgggtggtgtttttggtattggaggtggaatgctcattagtcctcttcttctccaagttggtatcgctcccgaggtaactgcagcgacatgttctttcatggttcttttttcatcaacgatgtctgcgattcaatacttattactaggcatggaacataccggaaccgcaagtatatttgcggttatatgttttgtggcatcactcgtgggactaaaggtggttcaaaaggtaataaccgagtatggaagggcttcgatcattgtgttctcggttggtatcgtcatggcattgagtattgtgttgatgacaagctatggagctcttgatgtttggaatgattatgtctctggtcgttacatgggtttcaagttaccttgttgagaccaagtttcataatacatgtgtatatcatatcaccatgttgttgctctttcatccatttggtcatttagagttaacaagctttctatttctttcttttgtatgatttttaaatcactattcagaatgcacatctcgtgcattcgaatatatggtcaaataaaagttatgttctggacc

SEQ ID NO: 77762 - protein, 389 aa, Arabidopsis thaliana
  peptide (1)..(389): Ceres Seq. ID no. 12577483
SSISSAGGIGGGGLYVPIMTIVAGLDLKTASSFSAFMVTGGSIANVGCNLFVRNPKSGGKTLIDFDLALLLEPCMLLGVSIGVICNLVFPNWLITSLFAVFLAWSTLKTFGNGLYYWRLESEMVKIRESNRIEEDDEEDKIESLKLPLLEDYQRPKRFPWIKLGVLVIIWLSYFAVYLLRGNKYGEGIISIEPCGNAYWLISSSQIPLTLFFTLWICFSDNVQSQQQSDYHVSVKDVEDLRSNDGARSNKCMFPVMALLAGVLGGVFGIGGGMLISPLLLQVGIAPEVTAATCSFMVLFSSTMSAIQYLLLGMEHTGTASIFAVICFVASLVGLKVVQKVITEYGRASIIVFSVGIVMALSIVLMTSYGALDVWNDYVSGRYMGFKLPC

SEQ ID NO: 77763 - protein, 371 aa, Arabidopsis thaliana
  peptide (1)..(371): Ceres Seq. ID no. 12577484
MTIVAGLDLKTASSFSAFMVTGGSIANVGCNLFVRNPKSGGKTLIDFDLALLLEPCMLLGVSIGVICNLVFPNWLITSLFAVFLAWSTLKTFGNGLYYWRLESEMVKIRESNRIEEDDEEDKIESLKLPLLEDYQRPKRFPWIKLGVLVIIWLSYFAVYLLRGNKYGEGIISIEPCGNAYWLISSSQIPLTLFFTLWICFSDNVQSQQQSDYHVSVKDVEDLRSNDGARSNKCMFPVMALLAGVLGGVFGIGGGMLISPLLLQVGIAPEVTAATCSFMVLFSSTMSAIQYLLLGMEHTGTASIFAVICFVASLVGLKVVQKVITEYGRASIIVFSVGIVMALSIVLMTSYGALDVWNDYVSGRYMGFKLPC

SEQ ID NO: 77764 - protein, 353 aa, Arabidopsis thaliana
  peptide (1)..(353): Ceres Seq. ID no. 12577485
MVTGGSIANVGCNLFVRNPKSGGKTLIDFDLALLLEPCMLLGVSIGVICNLVFPNWLITSLFAVFLAWSTLKTFGNGLYYWRLESEMVKIRESNRIEEDDEEDKIESLKLPLLEDYQRPKRFPWIKLGVLVIIWLSYFAVYLLRGNKYGEGIISIEPCGNAYWLISSSQIPLTLFFTLWICFSDNVQSQQQSDYHVSVKDVEDLRSNDGARSNKCMFPVMALLAGVLGGVFGIGGGMLISPLLLQVGIAPEVTAATCSFMVLFSSTMSAIQYLLLGMEHTGTASIFAVICFVASLVGLKVVQKVITEYGRASIIVFSVGIVMALSIVLMTSYGALDVWNDYVSGRYMGFKLPC

SEQ ID NO: 77765 - DNA, 4003 bp, Arabidopsis thaliana
  misc_feature (1)..(4003): Ceres Seq. ID no. 12577509
  misc_feature (1)..(4003): Ortholog of  Ceres SEQ ID NO 13600310 as cited in SEQ ID NO 5086
gggcaaatttgttcatcagatctactacaatctctctttttcttcgggtatggagggccaacgaggcagtaattcttcgttgagctctggcaatggcaccgaagtcgccaccgacgtttcttcttgcttctatgttcccaatccctctggaaccgatttcgatgccgagtcgtcttctcttcctcctctctccccagctcctcaagtggcattgtcaattcctgcggagcttgccgccgccattcccctcatcgatcgcttccaggttgaagcttttctgcggctaatgcagaaacaaatccagtctgctgggaagcgtggcttcttctattccaaaaagtcctctggctccaatgtccgcgagcgcttcacatttgaggatatgctttgctttcaaaagcttcaggatccaatccccacatctctcctcaagattaacagcgatctcgtcagccgtgctaccaagttgtttcatctcatcttaaaatatatgggtgttgattcatctgatcgatctacgcctcccagtttagatgaacgcattgacctcgttggaaagctcttcaaaaaaactttgaagcgtgttgaactcagggacgaactttttgcccaaatctccaaacagactagacataatcctgacaggcaatacttgatcaaagcttgggaattgatgtacttatgtgcctcctctatgcctcctagcaaagatatcggtggatatctatctgagtatattcataatgtcgcacacgatgcaactattgaaccggatgctcaggttcttgctgttaacactttgaaagctttaaagcgctctatcaaagctggtcctaggcacaccacacctggtcgtgaagaaattgaagcccttttgaccggtagaaagctcacaaccattgtcttctttctcgatgaaacttttgaagaaatttcatatgacatggctaccacagtgtctgatgctgttgagctagctggaacaattaaactatcagctttctctagctttagtttgtttgaatgtcgtaaagttgtttcaagttctaaatcatctgatcccggaaatgaggaatatataggattggatgataacaagtatattggagatctcctcgcagaatttaaagctattaaagatcgaaataaaggagagatactacactgcaaactggtatttaaaaaaaaattattccgagagtctgatgaagctgtaacagatctgatgtttgtgcaactttcgtatgttcaactgcaacatgactatttgctaggaaactatcctgttgggagggacgatgctgcacagctttgtgccttgcaaattcttgttgggattgggtttgtcaatagtccagagtcatgcattgattggacatcacttcttgagcggtttttgccaagacaaatagcaataacccgagcaaagcgtgaatgggaattggatatccttgctcgctaccgttcaatggagaacgtgaccaaagatgatgcaagacaacaatttctacggatactgaaggcactgccatacgggaattcagttttttttagcgtacgcaagatagatgatccgatcggtcttttacctgggcgaatcattttgggtatcaacaaacgtggggttcacttttttcgaccggttcctaaagaatatctgcactctgctgaactacgtgacatcatgcaatttggcagcagtaacactgctgtctttttcaaaatgagagtcgctggtgttcttcacatatttcagttcgagacaaaacagggagaagaaatttgtgttgctttgcaaacacatataaatgatgtcatgttgcgtcgttactccaaagctcgatctgctgccaatagcttggttaatggagatatatcttgtagttctaagccgcaaaattttgaagtgtatgaaaaacgtttgcaagatttgtctaaggcttatgaagagtcccaaaagaagattgagaagttgatggatgaacaacaagagaaaaatcagcaagaagttactctgcgtgaagagttagaagctatacacaatggtttggagcttgaaaggagaaaattgttggaggttactttagaccgagataaacttaggtcattgtgtgacgagaagggaacaactattcaatccttgatgtctgaactgcgaggaatggaagcaaggttggcaaagtcgggcaacacaaaatcaagtaaagagacaaaatcagaattagccgaaatgaataatcagatattatacaagatccaaaaggagttagaagttcgaaataaggaattgcatgtcgcagttgataattcaaagaggttgttgagtgaaaacaagatattggagcaaaatctcaatattgaaaagaagaaaaaagaggaggttgaaattcatcaaaagagatatgaacaagaaaaaaaggtgttaaagcttcgagtttctgaacttgaaaataagcttgaagtacttgctcaagacttggatagtgctgagtctacgattgaaagtaagaattctgacatgctgctgttgcaaaataacttgaaagaacttgaggagttaagagaaatgaaagaggacattgacagaaaaaatgagcaaacagctgccattttgaaaatgcaaggagcccaacttgctgagctagaaatactttataaggaagaacaagttttaaggaaaagatactataataccatagaagatatgaaagggaagattagagtttattgtcgaataagacctctaaatgaaaaagagagttcagagagggaaaaacaaatgctgacaactgtggatgagtttactgttgaacatccatggaaagacgacaaaagaaagcaacacatatatgatcgcgtatttgacatgcgtgctagtcaagatgatatctttgaagacacaaagtatttggtacagtcggctgtagatgggtataacgtttgcatctttgcatatggtcaaactggttctggaaaaactttcactatatatgggcatgagagcaatcctggactcacacctcgagctacaaaggaactgttcaacatattaaagcgagatagcaagagattttcattttctctaaaggcatatatggtggaactttatcaagacacacttgtagaccttttgttaccaaaaagtgcaagacgcttgaaactagagattaaaaaagattcaaagggaatggtctttgtagagaatgtgacaactattcctatatcaactttggaggaactgcgaatgattcttgaacggggatcggaacgacgacatgtttctggaacaaatatgaatgaagaaagctcaagatctcacctcatattatcagttgttattgaaagtattgatcttcaaacccagtctgctgcgaggggcaagctgagttttgtggatcttgctggttctgagagagttaaaaagtcgggctcagctggttgtcaactcaaagaagctcaaagtatcaacaaatcactttctgcattaggtgatgttattggtgctttatcttctggcaaccagcatattccttataggaatcacaagctaacgatgttgatgagcgattcattgggcggcaatgccaagacgttaatgtttgttaatgtgtctccagccgaatcaaatttggacgagacgtacaattctcttctatatgcatcgagagtgagaacgatcgtgaatgatcccagcaaacatatatcatccaaagagatggtgcgattgaagaagttggtagcatactggaaagagcaagccggtaaaaaaggtgaggaagaagacttggtggatattgaggaagatcgtacacgaaaagatgaggcagatagttgaagaaagctgacatgaaattcgtctaggtgaaattgagactatagtatcactggttttcaccattctttttgtaggaagttcctgctttatagtagagtttctatcgaagagtagtcctatatgtctcaaactttctctcttttgatgagatcttcattacaagaaatg

SEQ ID NO: 77766 - protein, 1277 aa, Arabidopsis thaliana
  peptide (1)..(1277): Ceres Seq. ID no. 12577510
GKFVHQIYYNLSFSSGMEGQRGSNSSLSSGNGTEVATDVSSCFYVPNPSGTDFDAESSSLPPLSPAPQVALSIPAELAAAIPLIDRFQVEAFLRLMQKQIQSAGKRGFFYSKKSSGSNVRERFTFEDMLCFQKLQDPIPTSLLKINSDLVSRATKLFHLILKYMGVDSSDRSTPPSLDERIDLVGKLFKKTLKRVELRDELFAQISKQTRHNPDRQYLIKAWELMYLCASSMPPSKDIGGYLSEYIHNVAHDATIEPDAQVLAVNTLKALKRSIKAGPRHTTPGREEIEALLTGRKLTTIVFFLDETFEEISYDMATTVSDAVELAGTIKLSAFSSFSLFECRKVVSSSKSSDPGNEEYIGLDDNKYIGDLLAEFKAIKDRNKGEILHCKLVFKKKLFRESDEAVTDLMFVQLSYVQLQHDYLLGNYPVGRDDAAQLCALQILVGIGFVNSPESCIDWTSLLERFLPRQIAITRAKREWELDILARYRSMENVTKDDARQQFLRILKALPYGNSVFFSVRKIDDPIGLLPGRIILGINKRGVHFFRPVPKEYLHSAELRDIMQFGSSNTAVFFKMRVAGVLHIFQFETKQGEEICVALQTHINDVMLRRYSKARSAANSLVNGDISCSSKPQNFEVYEKRLQDLSKAYEESQKKIEKLMDEQQEKNQQEVTLREELEAIHNGLELERRKLLEVTLDRDKLRSLCDEKGTTIQSLMSELRGMEARLAKSGNTKSSKETKSELAEMNNQILYKIQKELEVRNKELHVAVDNSKRLLSENKILEQNLNIEKKKKEEVEIHQKRYEQEKKVLKLRVSELENKLEVLAQDLDSAESTIESKNSDMLLLQNNLKELEELREMKEDIDRKNEQTAAILKMQGAQLAELEILYKEEQVLRKRYYNTIEDMKGKIRVYCRIRPLNEKESSEREKQMLTTVDEFTVEHPWKDDKRKQHIYDRVFDMRASQDDIFEDTKYLVQSAVDGYNVCIFAYGQTGSGKTFTIYGHESNPGLTPRATKELFNILKRDSKRFSFSLKAYMVELYQDTLVDLLLPKSARRLKLEIKKDSKGMVFVENVTTIPISTLEELRMILERGSERRHVSGTNMNEESSRSHLILSVVIESIDLQTQSAARGKLSFVDLAGSERVKKSGSAGCQLKEAQSINKSLSALGDVIGALSSGNQHIPYRNHKLTMLMSDSLGGNAKTLMFVNVSPAESNLDETYNSLLYASRVRTIVNDPSKHISSKEMVRLKKLVAYWKEQAGKKGEEEDLVDIEEDRTRKDEADS

SEQ ID NO: 77767 - protein, 1261 aa, Arabidopsis thaliana
  peptide (1)..(1261): Ceres Seq. ID no. 12577511
MEGQRGSNSSLSSGNGTEVATDVSSCFYVPNPSGTDFDAESSSLPPLSPAPQVALSIPAELAAAIPLIDRFQVEAFLRLMQKQIQSAGKRGFFYSKKSSGSNVRERFTFEDMLCFQKLQDPIPTSLLKINSDLVSRATKLFHLILKYMGVDSSDRSTPPSLDERIDLVGKLFKKTLKRVELRDELFAQISKQTRHNPDRQYLIKAWELMYLCASSMPPSKDIGGYLSEYIHNVAHDATIEPDAQVLAVNTLKALKRSIKAGPRHTTPGREEIEALLTGRKLTTIVFFLDETFEEISYDMATTVSDAVELAGTIKLSAFSSFSLFECRKVVSSSKSSDPGNEEYIGLDDNKYIGDLLAEFKAIKDRNKGEILHCKLVFKKKLFRESDEAVTDLMFVQLSYVQLQHDYLLGNYPVGRDDAAQLCALQILVGIGFVNSPESCIDWTSLLERFLPRQIAITRAKREWELDILARYRSMENVTKDDARQQFLRILKALPYGNSVFFSVRKIDDPIGLLPGRIILGINKRGVHFFRPVPKEYLHSAELRDIMQFGSSNTAVFFKMRVAGVLHIFQFETKQGEEICVALQTHINDVMLRRYSKARSAANSLVNGDISCSSKPQNFEVYEKRLQDLSKAYEESQKKIEKLMDEQQEKNQQEVTLREELEAIHNGLELERRKLLEVTLDRDKLRSLCDEKGTTIQSLMSELRGMEARLAKSGNTKSSKETKSELAEMNNQILYKIQKELEVRNKELHVAVDNSKRLLSENKILEQNLNIEKKKKEEVEIHQKRYEQEKKVLKLRVSELENKLEVLAQDLDSAESTIESKNSDMLLLQNNLKELEELREMKEDIDRKNEQTAAILKMQGAQLAELEILYKEEQVLRKRYYNTIEDMKGKIRVYCRIRPLNEKESSEREKQMLTTVDEFTVEHPWKDDKRKQHIYDRVFDMRASQDDIFEDTKYLVQSAVDGYNVCIFAYGQTGSGKTFTIYGHESNPGLTPRATKELFNILKRDSKRFSFSLKAYMVELYQDTLVDLLLPKSARRLKLEIKKDSKGMVFVENVTTIPISTLEELRMILERGSERRHVSGTNMNEESSRSHLILSVVIESIDLQTQSAARGKLSFVDLAGSERVKKSGSAGCQLKEAQSINKSLSALGDVIGALSSGNQHIPYRNHKLTMLMSDSLGGNAKTLMFVNVSPAESNLDETYNSLLYASRVRTIVNDPSKHISSKEMVRLKKLVAYWKEQAGKKGEEEDLVDIEEDRTRKDEADS

SEQ ID NO: 77768 - protein, 1182 aa, Arabidopsis thaliana
  peptide (1)..(1182): Ceres Seq. ID no. 12577512
MQKQIQSAGKRGFFYSKKSSGSNVRERFTFEDMLCFQKLQDPIPTSLLKINSDLVSRATKLFHLILKYMGVDSSDRSTPPSLDERIDLVGKLFKKTLKRVELRDELFAQISKQTRHNPDRQYLIKAWELMYLCASSMPPSKDIGGYLSEYIHNVAHDATIEPDAQVLAVNTLKALKRSIKAGPRHTTPGREEIEALLTGRKLTTIVFFLDETFEEISYDMATTVSDAVELAGTIKLSAFSSFSLFECRKVVSSSKSSDPGNEEYIGLDDNKYIGDLLAEFKAIKDRNKGEILHCKLVFKKKLFRESDEAVTDLMFVQLSYVQLQHDYLLGNYPVGRDDAAQLCALQILVGIGFVNSPESCIDWTSLLERFLPRQIAITRAKREWELDILARYRSMENVTKDDARQQFLRILKALPYGNSVFFSVRKIDDPIGLLPGRIILGINKRGVHFFRPVPKEYLHSAELRDIMQFGSSNTAVFFKMRVAGVLHIFQFETKQGEEICVALQTHINDVMLRRYSKARSAANSLVNGDISCSSKPQNFEVYEKRLQDLSKAYEESQKKIEKLMDEQQEKNQQEVTLREELEAIHNGLELERRKLLEVTLDRDKLRSLCDEKGTTIQSLMSELRGMEARLAKSGNTKSSKETKSELAEMNNQILYKIQKELEVRNKELHVAVDNSKRLLSENKILEQNLNIEKKKKEEVEIHQKRYEQEKKVLKLRVSELENKLEVLAQDLDSAESTIESKNSDMLLLQNNLKELEELREMKEDIDRKNEQTAAILKMQGAQLAELEILYKEEQVLRKRYYNTIEDMKGKIRVYCRIRPLNEKESSEREKQMLTTVDEFTVEHPWKDDKRKQHIYDRVFDMRASQDDIFEDTKYLVQSAVDGYNVCIFAYGQTGSGKTFTIYGHESNPGLTPRATKELFNILKRDSKRFSFSLKAYMVELYQDTLVDLLLPKSARRLKLEIKKDSKGMVFVENVTTIPISTLEELRMILERGSERRHVSGTNMNEESSRSHLILSVVIESIDLQTQSAARGKLSFVDLAGSERVKKSGSAGCQLKEAQSINKSLSALGDVIGALSSGNQHIPYRNHKLTMLMSDSLGGNAKTLMFVNVSPAESNLDETYNSLLYASRVRTIVNDPSKHISSKEMVRLKKLVAYWKEQAGKKGEEEDLVDIEEDRTRKDEADS

SEQ ID NO: 77769 - DNA, 1773 bp, Arabidopsis thaliana
  misc_feature (1)..(1773): Ceres Seq. ID no. 12577525
  misc_feature (1)..(1773): Ortholog of  Ceres SEQ ID NO 15171606 as cited in SEQ ID NO 57214
  misc_feature (1)..(1773): Ortholog of  Ceres SEQ ID NO 13596921 as cited in SEQ ID NO 62368
gagagagtctctgtctctgtaaaagatatttgagcttgagaagaacagaagaaacttccaggatcaatcaatcgatcaactttagtgaactaactcttgatttttcattcgaagttatggaatcggttcccgaatccgtaccatcgccgaactcgaatacaccgtcaataccaccgccggtgaactccgtaccgcctttcttgagtaaaacctacgacatggttgatgatccgttgaccaatgaggtcgtttcgtggagcagcgggaacaacagcttcgtcgtctggagtgccccggagttctcgaaggtgctcttgcccaagtatttcaagcacaacaacttctccagcttcgtcagacagttaaatacttatggtttcagaaaagttgatcctgaccgatgggaatttgcaaatgaaggatttcttagaggccgaaaacaactactgaagagtattgtcaggagaaaaccttcgcatgtgcagcagaatcagcaacaaactcaagttcagagctcatctgttggtgcttgtgtcgaggtggggaagtttggaatagaagaagaagtggaaagacttaagcgggataagaatgttcttatgcaagaactcgtcaggttaaggcagcaacagcaagctactgaaaaccaactgcagaatgtgggacagaaagttcaggtgatggagcaaaggcaacaacaaatgatgtcgtttttagcaaaggctgttcaaagtccaggtttcttaaaccagttagtacaacagaataataatgatggcaacagacaaattccaggaagcaacaaaaagaggagacttcctgtagatgagcaggagaatcgtggtgacaatgtggctaatggtcttaaccgccagattgttagatatcagccgtcgataaacgaagcagcacaaaatatgcttcgacagttcttaaatactagtacctcacctcggtatgaatcagtttcaaacaatcctgacagtttcctattgggtgatgttcccagttctacctctgtagacaatgggaacccttcaagtagagtttctggagtaacattggccgagttttcacccaacacagttcagtcagcaacgaatcaagtacccgaagcaagtttggctcatcatcctcaagctggtctggttcagccaaatataggtcaaagtccggctcaaggagcagcacctgcagactcttggagccctgaatttgatttagttggatgcgagacagatagtggagagtgttttgatccaataatggctgttttagatgagtcagaaggcgatgcaatttctcctgaaggtgagggcaagatgaatgagttactggagggagtccctaagctgcccggaatccaagatccattctgggaacagttcttttctgttgaactcccagcgattgcagatacagacgatattctatcaggatcagtggagaataatgacttggtattggaacaagaaccaaacgagtggacccgtaatgaacaacaaatgaagtatcttactgaacaaatgggactgctttcctcagaagcacagaggaaataaagattttcaggggaggttgcaaaaggagatatgaaggaacgaggaatatatcagatggtgtgtataccctttacatttttacttaaatgaaaaaaaaacagagagaagaaacataaaagatttaccaccaagcttgtgaatagttagtagagatcggtttttgtgttgtttatattatacttttgtgtgaaaacgttcatcttgttcaatt

SEQ ID NO: 77770 - protein, 519 aa, Arabidopsis thaliana
  peptide (1)..(519): Ceres Seq. ID no. 12577526
ESLCLCKRYLSLRRTEETSRINQSINFSELTLDFSFEVMESVPESVPSPNSNTPSIPPPVNSVPPFLSKTYDMVDDPLTNEVVSWSSGNNSFVVWSAPEFSKVLLPKYFKHNNFSSFVRQLNTYGFRKVDPDRWEFANEGFLRGRKQLLKSIVRRKPSHVQQNQQQTQVQSSSVGACVEVGKFGIEEEVERLKRDKNVLMQELVRLRQQQQATENQLQNVGQKVQVMEQRQQQMMSFLAKAVQSPGFLNQLVQQNNNDGNRQIPGSNKKRRLPVDEQENRGDNVANGLNRQIVRYQPSINEAAQNMLRQFLNTSTSPRYESVSNNPDSFLLGDVPSSTSVDNGNPSSRVSGVTLAEFSPNTVQSATNQVPEASLAHHPQAGLVQPNIGQSPAQGAAPADSWSPEFDLVGCETDSGECFDPIMAVLDESEGDAISPEGEGKMNELLEGVPKLPGIQDPFWEQFFSVELPAIADTDDILSGSVENNDLVLEQEPNEWTRNEQQMKYLTEQMGLLSSEAQRK

SEQ ID NO: 77771 - protein, 481 aa, Arabidopsis thaliana
  peptide (1)..(481): Ceres Seq. ID no. 12577527
MESVPESVPSPNSNTPSIPPPVNSVPPFLSKTYDMVDDPLTNEVVSWSSGNNSFVVWSAPEFSKVLLPKYFKHNNFSSFVRQLNTYGFRKVDPDRWEFANEGFLRGRKQLLKSIVRRKPSHVQQNQQQTQVQSSSVGACVEVGKFGIEEEVERLKRDKNVLMQELVRLRQQQQATENQLQNVGQKVQVMEQRQQQMMSFLAKAVQSPGFLNQLVQQNNNDGNRQIPGSNKKRRLPVDEQENRGDNVANGLNRQIVRYQPSINEAAQNMLRQFLNTSTSPRYESVSNNPDSFLLGDVPSSTSVDNGNPSSRVSGVTLAEFSPNTVQSATNQVPEASLAHHPQAGLVQPNIGQSPAQGAAPADSWSPEFDLVGCETDSGECFDPIMAVLDESEGDAISPEGEGKMNELLEGVPKLPGIQDPFWEQFFSVELPAIADTDDILSGSVENNDLVLEQEPNEWTRNEQQMKYLTEQMGLLSSEAQRK

SEQ ID NO: 77772 - protein, 447 aa, Arabidopsis thaliana; identical to SEQ ID NO: 72747
  peptide (1)..(447): Ceres Seq. ID no. 12577528

SEQ ID NO: 77773 - DNA, 1644 bp, Arabidopsis thaliana
  misc_feature (1)..(1644): Ceres Seq. ID no. 12577548
  misc_feature (1)..(1644): Ortholog of  Ceres SEQ ID NO 13592852 as cited in SEQ ID NO 20709
  misc_feature (1)..(1644): Ortholog of  Ceres SEQ ID NO 13532807 as cited in SEQ ID NO 53012
  misc_feature (1)..(1644): Ortholog of  Ceres SEQ ID NO 14313425 as cited in SEQ ID NO 54973
  misc_feature (1)..(1644): Ortholog of  Ceres SEQ ID NO 13663060 as cited in SEQ ID NO 60964
  misc_feature (1)..(1644): Ortholog of  Ceres SEQ ID NO 13656849 as cited in SEQ ID NO 65764
  misc_feature (1)..(1644): Ortholog of  Ceres SEQ ID NO 13500573 as cited in SEQ ID NO 67431
  misc_feature (1)..(1644): Ortholog of  Ceres SEQ ID NO 13656501 as cited in SEQ ID NO 69206
gtctcaccacttcctaactcttctctctcttatctcttcttgttttagctatgaagaagcaatctcaattcagatccaatcatacccttctcttctttcatctctgatcattaacaacaacaacaacgactcgggttctgtaaattcagttattggagagaaaatggcgatgttagttgagccaccaaatgggattaagcaacaagggaaacattactactccatgtggcaaacattgttcgaaatcgatacaaagtatgttccgattaaacccattggaagaggagcttatggtgtggtttgttcttctatcaatcgtgagactaatgagagagttgctattaaaaagattcacaatgtgtttgagaatcgtgttgatgctttgagaacgttgagggaacttaaacttcttaggcatgtgaggcatgagaatgtgatcgcgcttaaagatgttatgttgcctgctaatagatccagtttcaaggatgtttatttggtttatgagctaatggatactgatcttcatcagattattaaatcctctcagtctctttctgatgatcactgcaagtacttcttgtttcagttgcttagagggttgaagtatcttcattctgcaaacatacttcaccgggatttgaagcccgggaacctcttagttaatgcgaactgcgatctcaagatttgtgatttcgggttggcgagaacgagccaaggtaatgaacagttcatgactgagtatgtggttacacgttggtacagagcacctgagcttcttctttgttgtgataactatggaacctccattgatgtatggtcggttggttgcatattcgcggagattcttggtaggaaaccgatttttccaggaacagaatgcttgaatcagcttaagctaatcatcaacgttgttggtagccaacaagaatctgatattcggttcatagacaacccgaaagctcgaaggtttataaagtctcttccgtactcaagaggaactcatctctccaatctttatccacaagccaatcctctagctatagatttgttacagaggatgcttgtgtttgatccaaccaagagaatctctgtaaccgatgcgctcttacacccgtatatggcggggttgtttgatcctggatccaatccgcctgcacatgtcccaatctctctggacatagatgaaaacatggaggaaccagtgataagagagatgatgtggaatgagatgctttattaccaccctgaagctgaaatctcaaatgcctaaatcaacatcaatgatcattaagagtaagctttttccagttttttttttttttgctttctaaaatgcagctttgatgttatgttatatatagcgagtccacaaacgcgggaacagatcgataaaaagcccggtgctttgatctcgtctggtttgatttagttgcagtgagtgagtagtagtaacagagtttgaaaagtggctctcagtatctttaccactttgtaaatgtgactgtttgttactaagtaagttaaggcttgtttttgttacattatctttgagttgatgagttttactactgattttcaggccaactcttgtattttgtatagctttgccattgcccacttgctagccacacgaaataatttttt

SEQ ID NO: 77774 - protein, 422 aa, Arabidopsis thaliana
  peptide (1)..(422): Ceres Seq. ID no. 12577549
SHHFLTLLSLISSCFSYEEAISIQIQSYPSLLSSLIINNNNNDSGSVNSVIGEKMAMLVEPPNGIKQQGKHYYSMWQTLFEIDTKYVPIKPIGRGAYGVVCSSINRETNERVAIKKIHNVFENRVDALRTLRELKLLRHVRHENVIALKDVMLPANRSSFKDVYLVYELMDTDLHQIIKSSQSLSDDHCKYFLFQLLRGLKYLHSANILHRDLKPGNLLVNANCDLKICDFGLARTSQGNEQFMTEYVVTRWYRAPELLLCCDNYGTSIDVWSVGCIFAEILGRKPIFPGTECLNQLKLIINVVGSQQESDIRFIDNPKARRFIKSLPYSRGTHLSNLYPQANPLAIDLLQRMLVFDPTKRISVTDALLHPYMAGLFDPGSNPPAHVPISLDIDENMEEPVIREMMWNEMLYYHPEAEISNA

SEQ ID NO: 77775 - protein, 368 aa, Arabidopsis thaliana
  peptide (1)..(368): Ceres Seq. ID no. 12577550
MAMLVEPPNGIKQQGKHYYSMWQTLFEIDTKYVPIKPIGRGAYGVVCSSINRETNERVAIKKIHNVFENRVDALRTLRELKLLRHVRHENVIALKDVMLPANRSSFKDVYLVYELMDTDLHQIIKSSQSLSDDHCKYFLFQLLRGLKYLHSANILHRDLKPGNLLVNANCDLKICDFGLARTSQGNEQFMTEYVVTRWYRAPELLLCCDNYGTSIDVWSVGCIFAEILGRKPIFPGTECLNQLKLIINVVGSQQESDIRFIDNPKARRFIKSLPYSRGTHLSNLYPQANPLAIDLLQRMLVFDPTKRISVTDALLHPYMAGLFDPGSNPPAHVPISLDIDENMEEPVIREMMWNEMLYYHPEAEISNA

SEQ ID NO: 77776 - protein, 366 aa, Arabidopsis thaliana
  peptide (1)..(366): Ceres Seq. ID no. 12577551
MLVEPPNGIKQQGKHYYSMWQTLFEIDTKYVPIKPIGRGAYGVVCSSINRETNERVAIKKIHNVFENRVDALRTLRELKLLRHVRHENVIALKDVMLPANRSSFKDVYLVYELMDTDLHQIIKSSQSLSDDHCKYFLFQLLRGLKYLHSANILHRDLKPGNLLVNANCDLKICDFGLARTSQGNEQFMTEYVVTRWYRAPELLLCCDNYGTSIDVWSVGCIFAEILGRKPIFPGTECLNQLKLIINVVGSQQESDIRFIDNPKARRFIKSLPYSRGTHLSNLYPQANPLAIDLLQRMLVFDPTKRISVTDALLHPYMAGLFDPGSNPPAHVPISLDIDENMEEPVIREMMWNEMLYYHPEAEISNA

SEQ ID NO: 77777 - DNA, 1634 bp, Arabidopsis thaliana
  misc_feature (1)..(1634): Ceres Seq. ID no. 12577556
  misc_feature (1)..(1634): Ortholog of  Ceres SEQ ID NO 13663060 as cited in SEQ ID NO 60964
  misc_feature (1)..(1634): Ortholog of  Ceres SEQ ID NO 13655298 as cited in SEQ ID NO 68914
  misc_feature (1)..(1634): Ortholog of  Ceres SEQ ID NO 13656501 as cited in SEQ ID NO 69206
attcatcatcatcaatcaatccttcattttatggatctactcatatcttgattcttccttctatctctcccttttcttccatctctttttctctgggtttccccgatttgaagagcgtgacaaaggaagaatcttttattaaaacaaattcttctgttttaatcttgggatggcctcggtgggcatagagcctagtgccgcggttagagaatctactggaaacgttactgatgctgatagattacccgaggagatgaaggacatgaaaattcaagatgataaagaaatggaagctacgattgttaatggcaatgtgactgagactggccatataatagtaactactataggaggaagaaatggccagccaaaacagacaatcagttacatggcggagcgagttgttggacatggctcctttggtgttgtgtttcaggccaaatgtttagaaacaggagaaactgttgctataaagaaagttctacaagatcggaggtacaagaatcgtgagcttcaaacaatgaggctacttgaccatccaaatgttgtgtctttgaaacattgtttcttctctacaaccgaaaaagatgagctttatctcaacttggttctggaatacgttccggaaactgtgcaccgcgtcatcaaacactacaacaaacttaaccaacgaatgcctctcgtttacgtcaaactttacacttatcagatttttaggtccttatcctacattcaccgatgtatcggcgtatgtcatcgagacatcaaacctcaaaacttgttggtaaatccacacactcatcaagtgaaactatgcgattttggaagtgcgaaagtattggttaaaggagagccaaacatttcatacatttgctcgaggtattacagagcacctgagctcatttttggagccaccgagtatactacagccattgatgtctggtctgcaggatgtgttctcgccgagcttcttctcgggcagccattgttcccgggtgagagcggtgttgatcaacttgtagagattataaaggttttgggaacaccaacaagggaagaaatcaaatgcatgaacccgaattacacagagttcaaatttcctcagattaaagctcatccatggcataagattttccacaagagaatgcctccagaagctgttgatttggtctcaaggcttcttcaatactctcccaatctccgttgtgctgctcttgattcattggtccacccattctttgacgagctaagagatccgaatgcgcgattacccaacggacgtttccttccaccgctctttaactttaagcctcatgaacttaaaggtgtgcctgtggagatggtggcgaagttagttccagaacatgcgaggaagcaatgtccgtggctcagtttgtgatttgttctcacctgcaaacacgaaaactagagcaaagcagtcgagatattcatctcttctcttctctctccttctctgtattaatattattataatgatcatatctcaatctgatgatttagtaaccctttgtttgttgtatgagtagagaaagagtgaatcatttgtgggggttatgatattgtataagccaacaaagattattttttaaagagagtttcgtgttttctgtctc

SEQ ID NO: 77778 - protein, 409 aa, Arabidopsis thaliana; identical to SEQ ID NO: 30400
  peptide (1)..(409): Ceres Seq. ID no. 12577557

SEQ ID NO: 77779 - protein, 381 aa, Arabidopsis thaliana; identical to SEQ ID NO: 30401
  peptide (1)..(381): Ceres Seq. ID no. 12577558

SEQ ID NO: 77780 - protein, 378 aa, Arabidopsis thaliana; identical to SEQ ID NO: 30402
  peptide (1)..(378): Ceres Seq. ID no. 12577559

SEQ ID NO: 77781 - DNA, 1586 bp, Arabidopsis thaliana
  misc_feature (1)..(1586): Ceres Seq. ID no. 12577572
  misc_feature (1)..(1586): Ortholog of  Ceres SEQ ID NO 13584839 as cited in SEQ ID NO 60676
ggcgaacgaaaccctaatcatcacttctccacttttgttcgtcatcctcttcaaaatttcttcaatttgattctgcaatttcctttatctctctctggattaagtttcaatttcttcttagcccgccatggatgctcagcgagctctgttggacgaactaatgggcgcagctcgtaatctgacagacgaagagagaagagggttcaaggaggttaagtgggacgatagagaagtatgtgcattctatatggttcgattttgtcctcatgacctctttgttaacacgaaaagcgatcttggagcatgctcgagaattcatgatccaaagttgaaagaaagcttcgagaactctccgaggcatgattcctatgtgcctaaattcgaggctgagcttgcacagttttgcgagaagttggtgaatgatcttgataggaaagttaggcgtgggcgagaacgtcttgcacaagaagttgaaccggttccaccaccttctctatcagcagagaaagctgaacaattgtctgtcttggaggagaaagttaagaaccttttggaacaagtggaagcacttggtgaagaaggcaaagtggatgaagctgaagcgctaatgaggaaggtggaagggctaaatgctgagaagacagtgttgttacaacgaccaactgacaaggtactcgcgatggctcaggagaagaagatggcattgtgtgaggtttgtggttcatttcttgtggctaatgatgcagtagaaagaacacagtctcatgtcactggaaagcaacatgttggctatggcttggttcgggattttattgctgaacaaaaagctgctaaagataaaggaaaggaagaagaaagactagtaagaggaaaagaagcagatgataagaggaaaccaagggagaaggaaagcgagagtaagaggagtggttctagtgatagagaaagatatcgtgatcgagaccgaaacagagatggtgacagacacagagaccgtggtagagattatagaaagccttatgacaggagatcgaggagtgggagagaggaccgagatcgaagcaggtcacgatctcctcatggaaggtctggtcacagaagggtgtcgagaagccccattcgccaatactagtttgagaccctcgtggaaggtctggtcacgaaagggtgttgagaagcaccatttgccagtactagtttgagataaggtgttgtcactatgtcttggggccaggaactttgcaaattaatgaggtagacaatgtgataccccctttggtttcataagcatgtgttgtcttttggaacttccttgttaaaatttatggataaaatttgtctttctaccggatcacagctattctaagagtttgagaccttaccgattctccttcatcggttatttgttaagaggtcaaaagcgttgaggtaggtattacccgtaaaacttttacattttcattgtatttctcgatacttgagatgctatagcgtcattttattttatttttgtcttttggtacaccatttcaagtttgatatacctttctgatttaaagaatacagaatcgggattgttgggatcg

SEQ ID NO: 77782 - protein, 334 aa, Arabidopsis thaliana; identical to SEQ ID NO: 46497
  peptide (1)..(334): Ceres Seq. ID no. 12577573

SEQ ID NO: 77783 - protein, 323 aa, Arabidopsis thaliana; identical to SEQ ID NO: 46498
  peptide (1)..(323): Ceres Seq. ID no. 12577574

SEQ ID NO: 77784 - protein, 294 aa, Arabidopsis thaliana; identical to SEQ ID NO: 46499
  peptide (1)..(294): Ceres Seq. ID no. 12577575

SEQ ID NO: 77785 - DNA, 1487 bp, Arabidopsis thaliana
  misc_feature (1)..(1487): Ceres Seq. ID no. 12577576
  misc_feature (1)..(1487): Ortholog of  Ceres SEQ ID NO 13663060 as cited in SEQ ID NO 60964
  misc_feature (1)..(1487): Ortholog of  Ceres SEQ ID NO 13655298 as cited in SEQ ID NO 68914
  misc_feature (1)..(1487): Ortholog of  Ceres SEQ ID NO 13656501 as cited in SEQ ID NO 69206
ctcagatcgatgaagagaagaattaggatttttacgttttcatcggcttgaaagtttgaagagttttgtagcctgaaaaatggcgtcagtgggtatagctcctaatcctggagcaagagactctactggtgttgataaattgcctgaagaaatgaatgacatgaaaattcgtgacgataaagaaatggaagcgacagtggtagatggaaatggaacagagactggacatatcattgtgactactattggtggtagaaatggccaaccaaaacagacaattagctacatggctgagcgtgttgttggtcacggatcttttggtgttgtgttccaagcgaaatgtcttgagacaggagaaactgttgcgataaagaaagttttacaagataggaggtacaagaaccgtgagcttcaaaccatgaggctacttgaccatcctaatgttgtgtctctgaaacattgtttcttctcaaccactgaaaaagatgagctttacctcaatcttgttcttgagtacgttccagaaactgttcatcgtgttatcaaacactacaacaaactgaatcagagaatgcctcttatatacgtcaaactttacacttatcagatttttagagccttatcttacattcaccgatgcattggtgtgtgtcatcgtgacataaaacctcaaaacttgttggtaaatccgcacactcatcaagtaaagctatgtgattttggaagtgcaaaagtattggtaaaaggagaaccaaacatttcctacatctgctcgaggtattacagagcacctgaacttatttttggagcaaccgagtatacgacagccattgatgtctggtctgcaggatgtgttctagctgaactattgcttggacagcccttgttccctggtgagagcggtgttgatcaacttgtacacattatcaaggtcttgggaacgcctactagagaagaaatcaagtgcatgaacccaaactacacggaattcaaattccctcagattaaagctcatccatggcacaagattttccacaaacgcatgcctccagaagctgttgatttggtctcaagacttcttcaatactctcctaatctacgaagtgccgctctcgacacattagtccacccattctttgatgagttaagagacccaaacgcacgtctacctaatggacgtttccttccaccggcttttcacttcaagcctcacgagctgaaaggtgtaccattggagatggtagctaagttagtacctgagcatgcaaggaagcagtgtccttggctcggtttgtgatttcctcttaatgtagcatgaacacaacaaacacttcttataaattacctctctatgtatcaatatgtcacaaactgatatgcaccctttgtttgttgtatgagtagagaaaaaaagagttattactatggttggttggttcataatgtaaaagcccaccaagattttttatctagataaagagtttgct

SEQ ID NO: 77786 - protein, 405 aa, Arabidopsis thaliana
  peptide (1)..(405): Ceres Seq. ID no. 12577577
MASVGIAPNPGARDSTGVDKLPEEMNDMKIRDDKEMEATVVDGNGTETGHIIVTTIGGRNGQPKQTISYMAERVVGHGSFGVVFQAKCLETGETVAIKKVLQDRRYKNRELQTMRLLDHPNVVSLKHCFFSTTEKDELYLNLVLEYVPETVHRVIKHYNKLNQRMPLIYVKLYTYQIFRALSYIHRCIGVCHRDIKPQNLLVNPHTHQVKLCDFGSAKVLVKGEPNISYICSRYYRAPELIFGATEYTTAIDVWSAGCVLAELLLGQPLFPGESGVDQLVHIIKVLGTPTREEIKCMNPNYTEFKFPQIKAHPWHKIFHKRMPPEAVDLVSRLLQYSPNLRSAALDTLVHPFFDELRDPNARLPNGRFLPPAFHFKPHELKGVPLEMVAKLVPEHARKQCPWLGL

SEQ ID NO: 77787 - protein, 381 aa, Arabidopsis thaliana
  peptide (1)..(381): Ceres Seq. ID no. 12577578
MNDMKIRDDKEMEATVVDGNGTETGHIIVTTIGGRNGQPKQTISYMAERVVGHGSFGVVFQAKCLETGETVAIKKVLQDRRYKNRELQTMRLLDHPNVVSLKHCFFSTTEKDELYLNLVLEYVPETVHRVIKHYNKLNQRMPLIYVKLYTYQIFRALSYIHRCIGVCHRDIKPQNLLVNPHTHQVKLCDFGSAKVLVKGEPNISYICSRYYRAPELIFGATEYTTAIDVWSAGCVLAELLLGQPLFPGESGVDQLVHIIKVLGTPTREEIKCMNPNYTEFKFPQIKAHPWHKIFHKRMPPEAVDLVSRLLQYSPNLRSAALDTLVHPFFDELRDPNARLPNGRFLPPAFHFKPHELKGVPLEMVAKLVPEHARKQCPWLGL

SEQ ID NO: 77788 - protein, 378 aa, Arabidopsis thaliana
  peptide (1)..(378): Ceres Seq. ID no. 12577579
MKIRDDKEMEATVVDGNGTETGHIIVTTIGGRNGQPKQTISYMAERVVGHGSFGVVFQAKCLETGETVAIKKVLQDRRYKNRELQTMRLLDHPNVVSLKHCFFSTTEKDELYLNLVLEYVPETVHRVIKHYNKLNQRMPLIYVKLYTYQIFRALSYIHRCIGVCHRDIKPQNLLVNPHTHQVKLCDFGSAKVLVKGEPNISYICSRYYRAPELIFGATEYTTAIDVWSAGCVLAELLLGQPLFPGESGVDQLVHIIKVLGTPTREEIKCMNPNYTEFKFPQIKAHPWHKIFHKRMPPEAVDLVSRLLQYSPNLRSAALDTLVHPFFDELRDPNARLPNGRFLPPAFHFKPHELKGVPLEMVAKLVPEHARKQCPWLGL

SEQ ID NO: 77789 - DNA, 551 bp, Arabidopsis thaliana
  misc_feature (1)..(551): Ceres Seq. ID no. 12577992
  misc_feature (1)..(551): Ortholog of  Ceres SEQ ID NO 12608605 as cited in SEQ ID NO 58240
aactttacgttggtattatctctggtttcacattctcttaaccctcttggtgaatgcgtcattgaaacgccattatccgccgtgctaatctgaatctcctcccccgtcggaaaaaatggccactggtggaaaagtctccttcaaagtcactctgacttcggatcctaagcttcctttcaaagttttcagcgtaccagaaggagctccgttcacggcggttctgaaattcgcagcagaagagttcaaggttcctccacaaaccagcgccatcatcactaatgatgggatcgggatcaatcctcaacagagtgcaggaaacgtttttctgaagcacggatctgaactaagattgatcccgcgtgatagagttggagctgtgtttgtgatggatccatagatgatgtgtaagcaatgattaaaaactcagttccaaaaaaaacataataatatactgaaatgcttatgtacaacttcgttgaataaatatgtaatcgtcacaattgaagtgagttgaatttggtcaagttatatgtctgttataattcatattt

SEQ ID NO: 77790 - protein, 93 aa, Arabidopsis thaliana; identical to SEQ ID NO: 26059
  peptide (1)..(93): Ceres Seq. ID no. 12577993

SEQ ID NO: 77791 - DNA, 1569 bp, Arabidopsis thaliana
  misc_feature (1)..(1569): Ceres Seq. ID no. 12578019
  misc_feature (1)..(1569): Ortholog of  Ceres SEQ ID NO 15168908 as cited in SEQ ID NO 20765
gatctcaacatctctcaatttttctctctacgttgaagaaactttcgaatttcccgttagttcttctccacgctttctctttccctttatctcttatctggttaagccaatcttgattgtttggattcgtaaccgatcagtgttgtgaggtttgaaagaatggtgttttttcgcagcgtatcagccatttcaagactacggtctcgagcagtgcaacaatcctcacttagtaactccgtcagatggctccactcttctgaattggacttgaagtcgcagatgcaagagatcattccagaacaacaggaccgtttgaagaaactgaaatcagaacaaggaaaggttccagtggggaacatcaccgttgatatggtacttggtggaatgagagggatgactggattactctgggaaacctcattgcttgatgcagatgagggaatacggtttagaggcatgtcgattcctgaatgtcagaaaatattaccttcagctgagtctggagaagagcccttgcctgagagtcttctgtggcttctattaactggaaaggtgccaactaaagagcaagctaatgctttgtcaacagagttggctcatcgtgcggctgtgccagattatatatacaaagctatagatgctttgccttcaacagctcatccaatgactcaatttgctagtggtgttatggcccttcaggttcaaagtgagtttcaaaaggcgtatgagcagggtgatatttctaagtcaaagtactgggaaccaaccttcgaagatgccctaaacttgattgctcgtgttcctgttgtagcttcatacgtttatcggaggatgtacaaggatggtagcatcattccattagatgattctttggattatggtgcaaatttttcacacatgctgggatttgatagtcctcagatgaaagagctcatgaggctttatgtcactatccacagtgatcatgaaggtggaaatgttagtgctcacgctggtcacctggttgggagtgcactttcagatccatatctttcatttgctgctgcattgaatggtttagctgggccactccatggtttggctaatcaggaagttttgctgtggatcaaattagttgttgaggaatgtggagaaagtatatcaaaggaacagctaaaagattatgtctggaaaacgttaaacagtggcaaggttgttccaggatatggccatggtgttttgcgtaaaacggatccaagatatatatgccaaagagagtttgccttgaagcatctacctgatgatcctctttttcagctggtctcaaaactttatgaagtggtgcctcctattctaaccgagctgggaaaggtcaagaacccgtggcctaacgttgatgctcatagcggagtgcttctgaactactatggtctaaccgaagcaagatactacacggtgctttttggcgtctcaagaagtcttggaatctgctcgcagctgatatgggacagggcacttggactgccacttgagagaccaaagagtgtaaacatggactggctcgataacttcacgcgcttgaaccgctaa

SEQ ID NO: 77792 - protein, 469 aa, Arabidopsis thaliana
  peptide (1)..(469): Ceres Seq. ID no. 12578020
MVFFRSVSAISRLRSRAVQQSSLSNSVRWLHSSELDLKSQMQEIIPEQQDRLKKLKSEQGKVPVGNITVDMVLGGMRGMTGLLWETSLLDADEGIRFRGMSIPECQKILPSAESGEEPLPESLLWLLLTGKVPTKEQANALSTELAHRAAVPDYIYKAIDALPSTAHPMTQFASGVMALQVQSEFQKAYEQGDISKSKYWEPTFEDALNLIARVPVVASYVYRRMYKDGSIIPLDDSLDYGANFSHMLGFDSPQMKELMRLYVTIHSDHEGGNVSAHAGHLVGSALSDPYLSFAAALNGLAGPLHGLANQEVLLWIKLVVEECGESISKEQLKDYVWKTLNSGKVVPGYGHGVLRKTDPRYICQREFALKHLPDDPLFQLVSKLYEVVPPILTELGKVKNPWPNVDAHSGVLLNYYGLTEARYYTVLFGVSRSLGICSQLIWDRALGLPLERPKSVNMDWLDNFTRLNR

SEQ ID NO: 77793 - protein, 429 aa, Arabidopsis thaliana
  peptide (1)..(429): Ceres Seq. ID no. 12578021
MQEIIPEQQDRLKKLKSEQGKVPVGNITVDMVLGGMRGMTGLLWETSLLDADEGIRFRGMSIPECQKILPSAESGEEPLPESLLWLLLTGKVPTKEQANALSTELAHRAAVPDYIYKAIDALPSTAHPMTQFASGVMALQVQSEFQKAYEQGDISKSKYWEPTFEDALNLIARVPVVASYVYRRMYKDGSIIPLDDSLDYGANFSHMLGFDSPQMKELMRLYVTIHSDHEGGNVSAHAGHLVGSALSDPYLSFAAALNGLAGPLHGLANQEVLLWIKLVVEECGESISKEQLKDYVWKTLNSGKVVPGYGHGVLRKTDPRYICQREFALKHLPDDPLFQLVSKLYEVVPPILTELGKVKNPWPNVDAHSGVLLNYYGLTEARYYTVLFGVSRSLGICSQLIWDRALGLPLERPKSVNMDWLDNFTRLNR

SEQ ID NO: 77794 - protein, 399 aa, Arabidopsis thaliana
  peptide (1)..(399): Ceres Seq. ID no. 12578022
MVLGGMRGMTGLLWETSLLDADEGIRFRGMSIPECQKILPSAESGEEPLPESLLWLLLTGKVPTKEQANALSTELAHRAAVPDYIYKAIDALPSTAHPMTQFASGVMALQVQSEFQKAYEQGDISKSKYWEPTFEDALNLIARVPVVASYVYRRMYKDGSIIPLDDSLDYGANFSHMLGFDSPQMKELMRLYVTIHSDHEGGNVSAHAGHLVGSALSDPYLSFAAALNGLAGPLHGLANQEVLLWIKLVVEECGESISKEQLKDYVWKTLNSGKVVPGYGHGVLRKTDPRYICQREFALKHLPDDPLFQLVSKLYEVVPPILTELGKVKNPWPNVDAHSGVLLNYYGLTEARYYTVLFGVSRSLGICSQLIWDRALGLPLERPKSVNMDWLDNFTRLNR

SEQ ID NO: 77795 - DNA, 2051 bp, Arabidopsis thaliana
  misc_feature (1)..(2051): Ceres Seq. ID no. 12580575
  misc_feature (1)..(2051): Ortholog of  Ceres SEQ ID NO 12613725 as cited in SEQ ID NO 68196
atgagaaaatatcattgattatggttgcttctgagattaaatccccggtgagtgtccccgagactccgggaagctcctctgtgcatcataggaagcagttgagtgtgttcttcatagaatcagataacagacgtcttgctcttggccgtggctataccggaggaaccactcccgttaacatccatggcaaacccatcgccaatctttccaaaaccggtggttggatcgcagctttcttcatttttggaaatgaaatggcagagagaatggcgtatttcggactctcggtgaacatggtggcgttcatgttctacgtaatgcataggccttttgaaagttcatcaaacgcagtcaacaacttccttggcatctctcaagcctcctctgttcttggaggcttcttagccgacgcttacttgggtcgatactggactattgccatcttcactaccatgtatcttgtcggtttgataggaataacattgggggcaagtttgaagatgttcgtaccagaccagagcaactgtggccagttatcattgctcttaggaaattgtgaagaagccaaatcttggcaaatgctttatctctacacggttctctacataaccggattcggagctgctggtataaggccatgtgtttcctcatttggtgctgaccagtttgatgagaagagcaaagactacaagacacatttagaccgtttcttcaacttcttctatctatcggtcactttaggcgcaatcattgccttcactttggtggtatatgttcaaatggaacttggttggggtatggcttttggcacattggccgtagccatggggatttctaatgctttgttctttgctggtacaccgctttatcggcataggttgcctggtggtagtcccttgactagggtagctcaggtcttagttgccgctttccgcaaacgaaatgcagctttcacaagcagtgagttcatcggtctttacgaagttcctggcttgaaatctgctattaatggcagtcgtaaaatccctcattccaatgatttcatatggctagacaaggcggcacttgagttgaaagaagatggattggaaccatctccatggaagctatgcacagtaacacaagtagaggaagtgaagattctgatcagattgattccaatcccaacatgcactataatgctgagtctggtcttgactgagtatcttacactctcagtgcaacaagcttacacactcaacacacacattcaacacctcaagcttccagtgacctgcatgccagttttcccaggcctaagcattttcctcattctctccctttattactctgtcttcgtccctatcaccagaagaatcactggcaatcctcatggtgcttcccagcttcaaagagtgggcatagggctagcagtttcaatcatatcagtagcttgggctgggctattcgagaactacaggagacattacgcgatacaaaatggttttgagttcaacttcttgacccaaatgcctgatctaaccgcgtactggttgttaatccagtactgtctcatcggaatcgcagaggttttctgcatagtagggctattggagttcctttacgaggaagctccggatgctatgaagagtattggttcggcttacgctgctctagccggcgggttagggtgttttgctgccaccattttgaacaatattgtcaaggctgcgactcgggactcagatgggaaatcgtggttatcgcagaacataaacacggggagattcgactgcttgtactggttgctcacacttctgagctttttgaatttctgtgtgttcctttggtcagcgcataggtacaagtaccgagctatcgagtctgaggaagacaagagtagtgctgttctttaaagacaccacttctgtgttctcttctcgttattctttttgataaaacagcagtaattgtatcatcctactttgctttcctatagctaatgtttaagggtggaaaatccgctaaacgtgattgttcgtttgtaagaagaccaataaaattaagttgtt

SEQ ID NO: 77796 - protein, 630 aa, Arabidopsis thaliana
  peptide (1)..(630): Ceres Seq. ID no. 12580576
EKISLIMVASEIKSPVSVPETPGSSSVHHRKQLSVFFIESDNRRLALGRGYTGGTTPVNIHGKPIANLSKTGGWIAAFFIFGNEMAERMAYFGLSVNMVAFMFYVMHRPFESSSNAVNNFLGISQASSVLGGFLADAYLGRYWTIAIFTTMYLVGLIGITLGASLKMFVPDQSNCGQLSLLLGNCEEAKSWQMLYLYTVLYITGFGAAGIRPCVSSFGADQFDEKSKDYKTHLDRFFNFFYLSVTLGAIIAFTLVVYVQMELGWGMAFGTLAVAMGISNALFFAGTPLYRHRLPGGSPLTRVAQVLVAAFRKRNAAFTSSEFIGLYEVPGLKSAINGSRKIPHSNDFIWLDKAALELKEDGLEPSPWKLCTVTQVEEVKILIRLIPIPTCTIMLSLVLTEYLTLSVQQAYTLNTHIQHLKLPVTCMPVFPGLSIFLILSLYYSVFVPITRRITGNPHGASQLQRVGIGLAVSIISVAWAGLFENYRRHYAIQNGFEFNFLTQMPDLTAYWLLIQYCLIGIAEVFCIVGLLEFLYEEAPDAMKSIGSAYAALAGGLGCFAATILNNIVKAATRDSDGKSWLSQNINTGRFDCLYWLLTLLSFLNFCVFLWSAHRYKYRAIESEEDKSSAVL

SEQ ID NO: 77797 - protein, 624 aa, Arabidopsis thaliana
  peptide (1)..(624): Ceres Seq. ID no. 12580577
MVASEIKSPVSVPETPGSSSVHHRKQLSVFFIESDNRRLALGRGYTGGTTPVNIHGKPIANLSKTGGWIAAFFIFGNEMAERMAYFGLSVNMVAFMFYVMHRPFESSSNAVNNFLGISQASSVLGGFLADAYLGRYWTIAIFTTMYLVGLIGITLGASLKMFVPDQSNCGQLSLLLGNCEEAKSWQMLYLYTVLYITGFGAAGIRPCVSSFGADQFDEKSKDYKTHLDRFFNFFYLSVTLGAIIAFTLVVYVQMELGWGMAFGTLAVAMGISNALFFAGTPLYRHRLPGGSPLTRVAQVLVAAFRKRNAAFTSSEFIGLYEVPGLKSAINGSRKIPHSNDFIWLDKAALELKEDGLEPSPWKLCTVTQVEEVKILIRLIPIPTCTIMLSLVLTEYLTLSVQQAYTLNTHIQHLKLPVTCMPVFPGLSIFLILSLYYSVFVPITRRITGNPHGASQLQRVGIGLAVSIISVAWAGLFENYRRHYAIQNGFEFNFLTQMPDLTAYWLLIQYCLIGIAEVFCIVGLLEFLYEEAPDAMKSIGSAYAALAGGLGCFAATILNNIVKAATRDSDGKSWLSQNINTGRFDCLYWLLTLLSFLNFCVFLWSAHRYKYRAIESEEDKSSAVL

SEQ ID NO: 77798 - protein, 546 aa, Arabidopsis thaliana
  peptide (1)..(546): Ceres Seq. ID no. 12580578
MAERMAYFGLSVNMVAFMFYVMHRPFESSSNAVNNFLGISQASSVLGGFLADAYLGRYWTIAIFTTMYLVGLIGITLGASLKMFVPDQSNCGQLSLLLGNCEEAKSWQMLYLYTVLYITGFGAAGIRPCVSSFGADQFDEKSKDYKTHLDRFFNFFYLSVTLGAIIAFTLVVYVQMELGWGMAFGTLAVAMGISNALFFAGTPLYRHRLPGGSPLTRVAQVLVAAFRKRNAAFTSSEFIGLYEVPGLKSAINGSRKIPHSNDFIWLDKAALELKEDGLEPSPWKLCTVTQVEEVKILIRLIPIPTCTIMLSLVLTEYLTLSVQQAYTLNTHIQHLKLPVTCMPVFPGLSIFLILSLYYSVFVPITRRITGNPHGASQLQRVGIGLAVSIISVAWAGLFENYRRHYAIQNGFEFNFLTQMPDLTAYWLLIQYCLIGIAEVFCIVGLLEFLYEEAPDAMKSIGSAYAALAGGLGCFAATILNNIVKAATRDSDGKSWLSQNINTGRFDCLYWLLTLLSFLNFCVFLWSAHRYKYRAIESEEDKSSAVL

SEQ ID NO: 77799 - DNA, 875 bp, Arabidopsis thaliana
  misc_feature (1)..(875): Ceres Seq. ID no. 12580583
  misc_feature (1)..(875): Ortholog of  Ceres SEQ ID NO 13599568 as cited in SEQ ID NO 509
  misc_feature (1)..(875): Ortholog of  Ceres SEQ ID NO 15172903 as cited in SEQ ID NO 51839
  misc_feature (1)..(875): Ortholog of  Ceres SEQ ID NO 15177108 as cited in SEQ ID NO 52015
  misc_feature (1)..(875): Ortholog of  Ceres SEQ ID NO 13638595 as cited in SEQ ID NO 52050
  misc_feature (1)..(875): Ortholog of  Ceres SEQ ID NO 13594748 as cited in SEQ ID NO 52114
  misc_feature (1)..(875): Ortholog of  Ceres SEQ ID NO 15170313 as cited in SEQ ID NO 59293
  misc_feature (1)..(875): Ortholog of  Ceres SEQ ID NO 12623490 as cited in SEQ ID NO 61136
  misc_feature (1)..(875): Ortholog of  Ceres SEQ ID NO 15173596 as cited in SEQ ID NO 63267
  misc_feature (1)..(875): Ortholog of  Ceres SEQ ID NO 12583993 as cited in SEQ ID NO 68098
  misc_feature (1)..(875): Ortholog of  Ceres SEQ ID NO 13654535 as cited in SEQ ID NO 68227
  misc_feature (1)..(875): Ortholog of  Ceres SEQ ID NO 13589319 as cited in SEQ ID NO 0
tacatgcataacaaattaagagcgagcaataatgagggtttctcaatctcttgtcccttttgccataattgctttggtcctttcctttgtcaatgcttatgatccaagtccactccaagacttctgtgttgccattgatgacctaaaaggcgtttttgtgaatggtaggttttgtaaagacccgaagcgagtcgatgcaaaagattttttcttctcaggtctcaatatgcccgggaacaccaataatcaagttggctctaatgtgaccactgttaatgttgatcagatcccagggctaaacaccatgggaatatcattggtccgcatagactacgcaccgcatggccaaaatccacctcacacgcaccctcgtggctcagagatccttgtccttgtcgaaggaacattatacgtcggttttgtctcttccaatcaagataacaaccggttattcgccaaagtattgcaccccggtgatgttttcgtgttccccataggaatgatccattttcaggtaaatgtggggaaaattccagcagttgcttttgcgggattgagtagccagaacgcaggtgttatcacaattgcaaacactgtgtttgggtccaatcctccgatttatccagagcttcttgccagggcgttccagttggatgcaagtgttgtcaaagaacttcaggccaagtttgggtccatatgaactgatcatctaagtcgtttaagagtatttatcatcttttacaaaaaaaaagaaaaaaaagtatttatcattgaaacacttaattaaaggaatacactactatgaaatatttatgtaacaaaataaaacctggattatgtaccaagtttctatattataatatatcaacttttcc

SEQ ID NO: 77800 - protein, 222 aa, Arabidopsis thaliana
  peptide (1)..(222): Ceres Seq. ID no. 12580584
MRVSQSLVPFAIIALVLSFVNAYDPSPLQDFCVAIDDLKGVFVNGRFCKDPKRVDAKDFFFSGLNMPGNTNNQVGSNVTTVNVDQIPGLNTMGISLVRIDYAPHGQNPPHTHPRGSEILVLVEGTLYVGFVSSNQDNNRLFAKVLHPGDVFVFPIGMIHFQVNVGKIPAVAFAGLSSQNAGVITIANTVFGSNPPIYPELLARAFQLDASVVKELQAKFGSI

SEQ ID NO: 77801 - protein, 157 aa, Arabidopsis thaliana
  peptide (1)..(157): Ceres Seq. ID no. 12580585
MPGNTNNQVGSNVTTVNVDQIPGLNTMGISLVRIDYAPHGQNPPHTHPRGSEILVLVEGTLYVGFVSSNQDNNRLFAKVLHPGDVFVFPIGMIHFQVNVGKIPAVAFAGLSSQNAGVITIANTVFGSNPPIYPELLARAFQLDASVVKELQAKFGSI

SEQ ID NO: 77802 - protein, 131 aa, Arabidopsis thaliana
  peptide (1)..(131): Ceres Seq. ID no. 12580586
MGISLVRIDYAPHGQNPPHTHPRGSEILVLVEGTLYVGFVSSNQDNNRLFAKVLHPGDVFVFPIGMIHFQVNVGKIPAVAFAGLSSQNAGVITIANTVFGSNPPIYPELLARAFQLDASVVKELQAKFGSI

SEQ ID NO: 77803 - DNA, 2417 bp, Arabidopsis thaliana
  misc_feature (1)..(2417): Ceres Seq. ID no. 12580591
  misc_feature (1)..(2417): Ortholog of  Ceres SEQ ID NO 14303348 as cited in SEQ ID NO 59561
actgattcaacaaagaagaatcaaaatctccagaaattcgatcgtcgttgaagattcgtctcagtttgtgtagtttctagcttagtgttttggaatcgaaaatggcgggtcgagttaaagaagacgagaagaacgagaagattattaggagtcttcttaaacttcctgagaataagaggtgtataaactgtaacagccttggaccacaatatgtttgcactactttctggacttttgtttgtaccaactgcagtggaatacatcgtgagtttacacatcgtgttaaatcgatatcaatggcgaaatttacctcacaagaagttactgctttgaaagaaggtggaaatcagcatgctaaggatatttattttaaaggattggatcaacagcggcaatcagtgcctgacggaagtaatgttgagcggttaagggacttcatcagacatgtgtatgtaaataaaaggtatacgaatgagaagaatgatgataagtctccaagtgagacacgtagttctagtggttctcggagtccaccttatgaagatggatatgaccgtcgttacggcgacagatcaagtcctggtgggagaagtccagggttcgagacgggtagtaggaatgctgttaataacagaaaaagccctgctcgtcctgagatcctgaatgattggcgcagagaggataggtttgggggtagaaaaacatcagaagagggctcccagtcacctgagcaagtaaaagacttgggttcagctagccctcctgtagctcgacctgttagggaaattttgggtgacagtgttattcctcttcgtgtgggagagcctccaaaaccccctgtcagtagaaataccgatgcttcagcacatgcaaaggttttggcttcatctctttcagagtgcatgaaggatgtaaagtatataagaaccattgatgctctgcttatataatgttgttgtagcacatgcattcgttggtaataccatctaaattcttagggaggtaagtaaatgttgatgttttctgttgtgtgttatttcagtcaggtacatcattgagtagtttaatgtccacaaatgagaagccaccagaagtgaagctggagactgctttaagcctgattgattttgatactgattttgaaactcctgctccatctgttgcaattcaagcaccactatcgaccacatctcagcctgctccacagccaacaacttcatctaatgataactgggcatctttcgatgctgcacccagtgcccctagtttaaatgtatcgcaaccaccacccagtggaaacacactggattcacttctctcccagttggcagtgacttcttctgtgccaggtcaggcgtctacaccatctaacggacctgtgaatcttggtcattccacgtcacaaatctttgcaccctttcagaatgagcattcgagtgaacagccatggaacacagcacttgcatctaatgtacagaggtcaatgagtgcaccgtcattgcaacctcttcaaggagtcccttctggtggcctgcagtcttctgaagttaaaccttcgggaagatcagaattacctgcggatttattcgctgtaaactacccatcataccatgcaccagtgcctggatggcaagctggtccacctcatgctatgcactatggcatgcagcagtataataaccccgtgccgtatcagaatgttccgcagccaggcaagtcaatgaacccttttgacttcagccctgggccgccatcacaaacacaaacggaaaatatgttcccttccatggctcctctgcaaggtgcattacctccttcaggcatgatgccttctcaaggagtacacaatcaattcaatataccttctcaaggctcagcccatccatctgcaatgccaccaaggtacatgccttctcaaataccaggaagcatgccacctagcaatgtaaacccaattggcgacataaacacgtcatatgacactcaacaaacatatcaaaattttggaagctcgtttgctgctgcagttcctttgaacccaccttctttccaatcaggaggaaacccatttgggtaagaaagagcgagaatattagctcacgagagctatgttatgcatgaggattgcgtttgtgttctaaggtgtagtataagactataaggaggtattaaatcgaatacaaacatgggttaaatagggtgaacgagggaaggtacgggccatgaacctgaagaagaattgggtttgtgagagtgttagattactgtattttttataagcatcaaaatgatttgaaataggtttgatatttattctttggtgtttctatattccatttccattttgttgtttgtccttcagaaaatcttcaggctcctcctgtgttgtatgattttgtataacagtttacacattg

SEQ ID NO: 77804 - protein, 336 aa, Arabidopsis thaliana; identical to SEQ ID NO: 28388
  peptide (1)..(336): Ceres Seq. ID no. 12580592

SEQ ID NO: 77805 - protein, 282 aa, Arabidopsis thaliana
  peptide (1)..(282): Ceres Seq. ID no. 12580593
MAGRVKEDEKNEKIIRSLLKLPENKRCINCNSLGPQYVCTTFWTFVCTNCSGIHREFTHRVKSISMAKFTSQEVTALKEGGNQHAKDIYFKGLDQQRQSVPDGSNVERLRDFIRHVYVNKRYTNEKNDDKSPSETRSSSGSRSPPYEDGYDRRYGDRSSPGGRSPGFETGSRNAVNNRKSPARPEILNDWRREDRFGGRKTSEEGSQSPEQVKDLGSASPPVARPVREILGDSVIPLRVGEPPKPPVSRNTDASAHAKVLASSLSECMKDVKYIRTIDALLI

SEQ ID NO: 77806 - protein, 217 aa, Arabidopsis thaliana
  peptide (1)..(217): Ceres Seq. ID no. 12580594
MAKFTSQEVTALKEGGNQHAKDIYFKGLDQQRQSVPDGSNVERLRDFIRHVYVNKRYTNEKNDDKSPSETRSSSGSRSPPYEDGYDRRYGDRSSPGGRSPGFETGSRNAVNNRKSPARPEILNDWRREDRFGGRKTSEEGSQSPEQVKDLGSASPPVARPVREILGDSVIPLRVGEPPKPPVSRNTDASAHAKVLASSLSECMKDVKYIRTIDALLI

SEQ ID NO: 77807 - DNA, 2190 bp, Arabidopsis thaliana
  misc_feature (1)..(2190): Ceres Seq. ID no. 12580595
  misc_feature (1)..(2190): Ortholog of  Ceres SEQ ID NO 15175923 as cited in SEQ ID NO 54037
  misc_feature (1)..(2190): Ortholog of  Ceres SEQ ID NO 13503610 as cited in SEQ ID NO 62416
  misc_feature (1)..(2190): Ortholog of  Ceres SEQ ID NO 13657610 as cited in SEQ ID NO 66165
  misc_feature (1)..(2190): Ortholog of  Ceres SEQ ID NO 13598312 as cited in SEQ ID NO 68448
  misc_feature (1)..(2190): Ortholog of  Ceres SEQ ID NO 13596100 as cited in SEQ ID NO 68573
gccaacacaactccttataagatatacacttcatcaacctatagatctcactcacataatcaacctacaaaacaaaaacaagaatgggtagatccaacgagcaagatctgctctctaccgagatcgttaatcgtgggatcgaaccatccggtcctaacgccggctcaccaacgttctcggttagggtcaggagacgtttgcctgattttcttcagtcggtgaacttgaagtacgtgaaacttggttaccactacctcataaaccatgcggtttatttggcgaccataccggttcttgtgctggtttttagtgctgaggttgggagtttaagcagagaagagatttggaagaagctttgggactatgatcttgcaactgttatcggattcttcggtgtctttgttttaaccgcttgtgtctacttcatgtctcgtcctcgctctgtttatcttattgatttcgcttgttacaagccctccgatgaacacaaggtgacaaaagaagagttcatagaactagcgagaaaatcagggaagttcgacgaagagacactcggtttcaagaagaggatcttacaagcctcaggcataggcgacgagacatacgtcccaagatccatctcttcatcagaaaacataacaacgatgaaagaaggtcgtgaagaagcctctacagtgatctttggagcactagacgaactcttcgagaagacacgtgtaaaacctaaagacgttggtgtccttgtggttaactgtagcattttcaacccgacaccgtcgttgtccgcaatggtgataaaccattacaagatgagagggaacatacttagttacaaccttggagggatgggatgttcggctggaatcatagctattgatcttgctcgtgacatgcttcagtctaaccctaatagttatgctgttgttgtgagtactgagatggttgggtataattggtacgtgggaagtgacaagtcaatggttatacctaattgtttctttaggatgggttgttctgccgttatgctctctaaccgtcgtcgtgactttcgccatgctaagtaccgtctcgagcacattgtccgaactcataaggctgctgacgaccgtagcttcaggtttcattcattttggtattaattcgttttacaatctcttgacgacctagtaactaattttgtgtggtttttaggagtgtgtaccaggaagaagatgaacaaggattcaaggggttgaagataagtagagacttaatggaagttggaggtgaagctctcaagacaaacatcactaccttaggtcctcttgtcctacctttctccgagcagcttctcttctttgctgctttgctccgccgaacattctcacctgctgccaaaacgtccacaaccacttccttctctacttccgccaccgcaaaaaccaatggaatcaagtcttcctcttccgatctgtccaagccatacatcccggactacaagctcgccttcgagcatttttgcttccacgcggcaagcaaagtagtgcttgaagagcttcaaaagaatctaggcttgagtgaagagaatatggaggcttctaggatgacacttcacaggtttggaaacacttctagcagtggaatctggtatgagttggcttacatggaggccaaggaaagtgttcgtagaggcgatagggtttggcagatcgctttcggttctggttttaagtgtaacagtgtggtgtggaaggcaatgaggaaggtgaagaagccaaccaggaacaatccttgggtggattgcatcaaccgttaccctgtgcctctctaaattatcattcttctaaattaaatcaagtaagatctctaattactccaaccaaaagatacagtttggttggatgataggagttatttactgatcattcgtatctaagtctgttataagaatggatgtggctagagtcctgttcagcttcaacttgttttattttttgtttgttctctattggatcttcataaactttgagagattaaagaaaaaaactcttctttagtttgatagaacagatggtcattgtaatttctttaatatgtcaaagtaaaacaatttctttttaaggcaatctatattcagatacataataaatttagtttacgtgtataagaagatacttgtacgaagtaataaagaaacataactttcggctg

SEQ ID NO: 77808 - protein, 351 aa, Arabidopsis thaliana
  peptide (1)..(351): Ceres Seq. ID no. 12580596
MGRSNEQDLLSTEIVNRGIEPSGPNAGSPTFSVRVRRRLPDFLQSVNLKYVKLGYHYLINHAVYLATIPVLVLVFSAEVGSLSREEIWKKLWDYDLATVIGFFGVFVLTACVYFMSRPRSVYLIDFACYKPSDEHKVTKEEFIELARKSGKFDEETLGFKKRILQASGIGDETYVPRSISSSENITTMKEGREEASTVIFGALDELFEKTRVKPKDVGVLVVNCSIFNPTPSLSAMVINHYKMRGNILSYNLGGMGCSAGIIAIDLARDMLQSNPNSYAVVVSTEMVGYNWYVGSDKSMVIPNCFFRMGCSAVMLSNRRRDFRHAKYRLEHIVRTHKAADDRSFRFHSFWY

SEQ ID NO: 77809 - protein, 237 aa, Arabidopsis thaliana
  peptide (1)..(237): Ceres Seq. ID no. 12580597
MSRPRSVYLIDFACYKPSDEHKVTKEEFIELARKSGKFDEETLGFKKRILQASGIGDETYVPRSISSSENITTMKEGREEASTVIFGALDELFEKTRVKPKDVGVLVVNCSIFNPTPSLSAMVINHYKMRGNILSYNLGGMGCSAGIIAIDLARDMLQSNPNSYAVVVSTEMVGYNWYVGSDKSMVIPNCFFRMGCSAVMLSNRRRDFRHAKYRLEHIVRTHKAADDRSFRFHSFWY

SEQ ID NO: 77810 - protein, 185 aa, Arabidopsis thaliana
  peptide (1)..(185): Ceres Seq. ID no. 12580598
MEVGGEALKTNITTLGPLVLPFSEQLLFFAALLRRTFSPAAKTSTTTSFSTSATAKTNGIKSSSSDLSKPYIPDYKLAFEHFCFHAASKVVLEELQKNLGLSEENMEASRMTLHRFGNTSSSGIWYELAYMEAKESVRRGDRVWQIAFGSGFKCNSVVWKAMRKVKKPTRNNPWVDCINRYPVPL

SEQ ID NO: 77811 - DNA, 1030 bp, Arabidopsis thaliana
  misc_feature (1)..(1030): Ceres Seq. ID no. 12580614
  misc_feature (1)..(1030): Ortholog of  Ceres SEQ ID NO 14305591 as cited in SEQ ID NO 0
agaagtctttctctctcgatcaagccaagtaaaaaaaaaatcctaatctttgcgtcaccgttcgtgtttcctcttctctctagggttctccttcaacagttttccagtaaacatgagtcgtcatcctgaagtgaagtgggctgagactaccgagaagattttcctcactgtagtattagctgatactaaggataccaaggttaacctagacccagaaggagtctttgatttctctgcgaaagttggtccagaaaaccacgtttatgagctcaaactggaacttgccgataaagtcaatgttgaggaaagcaaaatcaacattggagagagaagcatattctgcataattgagaaagcagagccggaaaggtggaataagctactccgtgtgaagaagcccccacactatgtcaaggttgattgggacaagtgggttgatgaggacgatgaaggcagtgctggtgccgcagatatggatatggcaggaatggaaggaatgggaggaatgggaggcatgggcggcatgggaggaatgggtggaatgggaggaatgggtggaatgggaggaatggaaggaatggatttctcgaaattaatgggtggaatgggtggaatgggtggaatgggcggactcgaagggctcggtggaatgggaggcatgggtggaatgggaggcatgggtggtatgggaggcatggaagagtttgaagacagtgatgatgaagaagagacagcaaaatcaggagacaagaaggatgatgccgttaaggaggaaggtcttgcgacagagaaggcaccagcggcagaagaaacaacatctgttaaggaagacaagtgaagactctgttctagagatgatgaaaaaccatatggtattattagcttttcaggtttatgaaaccctctgaattacttcctcttttatatgaatgttgttggtactctgttttctttctatggatttgatcttggtttaagtttcttctaccttttgttttgggttatattgtttccaaatgttcttggactt

SEQ ID NO: 77812 - protein, 241 aa, Arabidopsis thaliana
  peptide (1)..(241): Ceres Seq. ID no. 12580615
MSRHPEVKWAETTEKIFLTVVLADTKDTKVNLDPEGVFDFSAKVGPENHVYELKLELADKVNVEESKINIGERSIFCIIEKAEPERWNKLLRVKKPPHYVKVDWDKWVDEDDEGSAGAADMDMAGMEGMGGMGGMGGMGGMGGMGGMGGMGGMEGMDFSKLMGGMGGMGGMGGLEGLGGMGGMGGMGGMGGMGGMEEFEDSDDEEETAKSGDKKDDAVKEEGLATEKAPAAEETTSVKEDK

SEQ ID NO: 77813 - protein, 121 aa, Arabidopsis thaliana
  peptide (1)..(121): Ceres Seq. ID no. 12580616
MDMAGMEGMGGMGGMGGMGGMGGMGGMGGMGGMEGMDFSKLMGGMGGMGGMGGLEGLGGMGGMGGMGGMGGMGGMEEFEDSDDEEETAKSGDKKDDAVKEEGLATEKAPAAEETTSVKEDK

SEQ ID NO: 77814 - DNA, 1695 bp, Arabidopsis thaliana
  misc_feature (1)..(1695): Ceres Seq. ID no. 12580632
  misc_feature (1)..(1695): Ortholog of  Ceres SEQ ID NO 13657647 as cited in SEQ ID NO 66399
agctgctcgatctctctctgatcacaacaatcataagcgatgagaggagctagacccgatgaattcaattttagtacgaatccatcaacgccaaacactggtcagccgacaccgacgtaccccgccggtgttggcggcggcggcggtggaaggaaaaaaggcgttggcgtgaggacgtggttggtacttaactcgtcagggcaatcggagccgaaggaagaagggaaacactccatcatgcggcgaacgggattaccggcgcgtgatcttaggattctcgatccactgttgtcgtatccatctactgttttaggtagagagagagcgattgtcatcaatttggagcatatcaaggcaatcatcactgctcaagaagttttgttgcttaattccaaggatccttcggtctcaccctttattgatgagttgcagaggcggattctctgtcaccatcacgccactaaacctcaggaggagcagaactctgggggagagcctcatacgagggtagatcctgcccaaggagaagctggaacggaacaatcttctggggatcaagggagtgaagccaagaaggatgcgaagcaaagtcttgagaatcaagatggatcgaaggttcttccatttgagtttgttgctctggaagcctgtcttgaagctgcatcaagcagtttggaacatgaggccttaagattggagttagaggctcatccagccctggacaagcttacttccaagatcagtacccttaatttggagcgggttcgacagattaaaagcaggctggttgcaataactggacgtgttcagaaggtgagggatgagctagaacatctgctagacgatgatgaagatatggctgagatgtatcttacagagaagttagctcagaaacttgaggattcgtcaaattcctctatgaatgagagtgataccttcgaggttgatcttcctcaaggagatgaggatgacaggcttcctcccgaatttgcatcagaggctaacagagatggaaggtatcttcaagcaaatgatgctcacgagcttcttatgagtactcaaagtgcacttagcagaaatagccgtgggactcacacaagctcaacccggagtgccatgaccaacaaattagatgtggaagagcttgaaatgcttttggaagcatatttcgtgcagatcgatggtatactgaacaaactatcaacactaagggaatatgtggatgacacggaggactacatcaacataatgctagatgacaagcagaatcatcttctgcagatgggtgtgatgctaacaacagctactctggtgatgagcgcctttatcgcagttgctggtgtatttggtatgaatataaccatagagttgttcacggataataaacatggtccaagtagattcatttggactgtgattggaggttctatcggcagtatatgcctctacgttggtgccatcgggtggtgcaagtacaagcgccttcttgaatgagtcgaccaacaacatattgggagaggagaataatgtcgcattgccacaaatctatttaagctaacaagacttttatgtatatcctttgttcttgaggatctttactactctcaaacctttttttatccgtctccttcactatttgcatttctttcgatttaataaaagagcaaattgcatagtttccttcttgcttatttc

SEQ ID NO: 77815 - protein, 484 aa, Arabidopsis thaliana
  peptide (1)..(484): Ceres Seq. ID no. 12580633
MRGARPDEFNFSTNPSTPNTGQPTPTYPAGVGGGGGGRKKGVGVRTWLVLNSSGQSEPKEEGKHSIMRRTGLPARDLRILDPLLSYPSTVLGRERAIVINLEHIKAIITAQEVLLLNSKDPSVSPFIDELQRRILCHHHATKPQEEQNSGGEPHTRVDPAQGEAGTEQSSGDQGSEAKKDAKQSLENQDGSKVLPFEFVALEACLEAASSSLEHEALRLELEAHPALDKLTSKISTLNLERVRQIKSRLVAITGRVQKVRDELEHLLDDDEDMAEMYLTEKLAQKLEDSSNSSMNESDTFEVDLPQGDEDDRLPPEFASEANRDGRYLQANDAHELLMSTQSALSRNSRGTHTSSTRSAMTNKLDVEELEMLLEAYFVQIDGILNKLSTLREYVDDTEDYINIMLDDKQNHLLQMGVMLTTATLVMSAFIAVAGVFGMNITIELFTDNKHGPSRFIWTVIGGSIGSICLYVGAIGWCKYKRLLE

SEQ ID NO: 77816 - protein, 418 aa, Arabidopsis thaliana
  peptide (1)..(418): Ceres Seq. ID no. 12580634
MRRTGLPARDLRILDPLLSYPSTVLGRERAIVINLEHIKAIITAQEVLLLNSKDPSVSPFIDELQRRILCHHHATKPQEEQNSGGEPHTRVDPAQGEAGTEQSSGDQGSEAKKDAKQSLENQDGSKVLPFEFVALEACLEAASSSLEHEALRLELEAHPALDKLTSKISTLNLERVRQIKSRLVAITGRVQKVRDELEHLLDDDEDMAEMYLTEKLAQKLEDSSNSSMNESDTFEVDLPQGDEDDRLPPEFASEANRDGRYLQANDAHELLMSTQSALSRNSRGTHTSSTRSAMTNKLDVEELEMLLEAYFVQIDGILNKLSTLREYVDDTEDYINIMLDDKQNHLLQMGVMLTTATLVMSAFIAVAGVFGMNITIELFTDNKHGPSRFIWTVIGGSIGSICLYVGAIGWCKYKRLLE

SEQ ID NO: 77817 - DNA, 1839 bp, Arabidopsis thaliana
  misc_feature (1)..(1839): Ceres Seq. ID no. 12580655
  misc_feature (1)..(1839): Ortholog of  Ceres SEQ ID NO 15170155 as cited in SEQ ID NO 64363
gggaggcacacattacacaccaaagcagtgttttctttctcctgaaaagatttttcaagctctctctttctctcaaaggtaaatgcttctctgatttcgccatttttgcttactcgattcaaaagacatgtcgccggcagctacggagacggagcgatggtgcgttgttaccggcggtagaggattcgcggcgaggcatcttgttgaaatgctcgtacgctacgaaatgttttgcgtccgtatcgccgatttagctccggcgataatgcttgatcctcaggaagggaacggagttctcgacgaaggattaagatctggtcgtgttcaatatatctccgctgatcttcgagataaatctcaagtcgttaaagcttttcagggagcggaggtggtgtttcatatggcagctccagattcttctattaacaatcatcagcttcagtattcggtgaatgttcaagggacacaaaatgtgattgatgcttgtgttgatgttggagtaaagaggcttatttacactagctctcctagtgttgtgtttgatggtgttcatggtattttgaacggtactgaatcaatggcttacccaattaagcacaatgactcatattcagcaactaaagctgaaggagaagagttgatcatgaaggctaatggtagaaatggactactcacttgttgcatacgtccaagcagtatttttggtcccggtgatagattattggttccgtcgcttgttgctgctgctagggctgggaaatctaagcttcaggaggagatgtttctacaaaagctgcaggacagtggatttacaggcatatttcattaccaacatggagccaattaaattttgggaatttatgtcacagctccttgatggacttggttacgagaggccaagcataaagatccctgcgtttatcatgatgccgattgcgcatctggttgaactgacatataaagtgttgggaccatatgggatgacagtaccacaactaacaccttcaagagttaggcttctctcatgcagcagaactttcgattccacgaaagcaaaggatcgactaggctatgctcctgtggtcccacttcaggaaggtatacggaggacgatagactcattctctcacctaacagctggaagtcaatccaaaagagagggcccatccaaggcttctaggattcttggaggcggaaaggttgctgatacacttctctggaaggatttaaagcagactcttattgccatattcattctaattagtatctattataactttgttgcaactgggtctaccgtcgtaactgctctttcgaaggctctattggtagcatctgtatttttgttcctccatggcattctaccagagaaaatatttggttatacagttgaaaagattcctgcatcgcaatttcacctctcaaaagactcatcacatgacctctcattgtcagtgatctcttcatggaacaccactgtaaaagctttaagatctctttgccaggggaatgattggagcttctttttcaaggtggtcttcgttttgttagcattgagtttggctggagccatatctcttcacagcatatttgttataggactgcccattgccttccttgcttttctcgtgtacgaaaagaaagagcaagagatcgactcaatagtggtgagttttaaatctttcgcatgcaagcacaaatccgatgtgtatgagaaattgttcggaagcaagaaacatgactaaaaaccctttttttgcccagcatttgtaattttcttttgtttccaacgacctctaactctggtttgagcttttttcaagttttattatttgtgaa

SEQ ID NO: 77818 - protein, 363 aa, Arabidopsis thaliana
  peptide (1)..(363): Ceres Seq. ID no. 12580656
MVEMDYSLVAYVQAVFLVPVIDYWFRRLLLLLGLGNLSFRRRCFYKSCRTVDLQAYFITNMEPIKFWEFMSQLLDGLGYERPSIKIPAFIMMPIAHLVELTYKVLGPYGMTVPQLTPSRVRLLSCSRTFDSTKAKDRLGYAPVVPLQEGIRRTIDSFSHLTAGSQSKREGPSKASRILGGGKVADTLLWKDLKQTLIAIFILISIYYNFVATGSTVVTALSKALLVASVFLFLHGILPEKIFGYTVEKIPASQFHLSKDSSHDLSLSVISSWNTTVKALRSLCQGNDWSFFFKVVFVLLALSLAGAISLHSIFVIGLPIAFLAFLVYEKKEQEIDSIVVSFKSFACKHKSDVYEKLFGSKKHD

SEQ ID NO: 77819 - protein, 360 aa, Arabidopsis thaliana
  peptide (1)..(360): Ceres Seq. ID no. 12580657
MDYSLVAYVQAVFLVPVIDYWFRRLLLLLGLGNLSFRRRCFYKSCRTVDLQAYFITNMEPIKFWEFMSQLLDGLGYERPSIKIPAFIMMPIAHLVELTYKVLGPYGMTVPQLTPSRVRLLSCSRTFDSTKAKDRLGYAPVVPLQEGIRRTIDSFSHLTAGSQSKREGPSKASRILGGGKVADTLLWKDLKQTLIAIFILISIYYNFVATGSTVVTALSKALLVASVFLFLHGILPEKIFGYTVEKIPASQFHLSKDSSHDLSLSVISSWNTTVKALRSLCQGNDWSFFFKVVFVLLALSLAGAISLHSIFVIGLPIAFLAFLVYEKKEQEIDSIVVSFKSFACKHKSDVYEKLFGSKKHD

SEQ ID NO: 77820 - protein, 303 aa, Arabidopsis thaliana
  peptide (1)..(303): Ceres Seq. ID no. 12580658
MEPIKFWEFMSQLLDGLGYERPSIKIPAFIMMPIAHLVELTYKVLGPYGMTVPQLTPSRVRLLSCSRTFDSTKAKDRLGYAPVVPLQEGIRRTIDSFSHLTAGSQSKREGPSKASRILGGGKVADTLLWKDLKQTLIAIFILISIYYNFVATGSTVVTALSKALLVASVFLFLHGILPEKIFGYTVEKIPASQFHLSKDSSHDLSLSVISSWNTTVKALRSLCQGNDWSFFFKVVFVLLALSLAGAISLHSIFVIGLPIAFLAFLVYEKKEQEIDSIVVSFKSFACKHKSDVYEKLFGSKKHD

SEQ ID NO: 77821 - DNA, 2239 bp, Arabidopsis thaliana
  misc_feature (1)..(2239): Ceres Seq. ID no. 12580671
  misc_feature (1)..(2239): Ortholog of  Ceres SEQ ID NO 15176302 as cited in SEQ ID NO 58592
aaaagtccatatatctttctctcatctactcgatttctgaatcgcgaacgcagcgagcgatccggaatcgagagagagagctaccaatttttccaacttgttcggttccttataaagctgtttactttcccttgcgaattctctctctctctactataaagcaatacccttttctttcttttttggtaacccccaaaccctactttgtccagcgagaaaggaagaggggtttcgtctgattccgctaaatctctagtctttatctaaagatcatggattccgatgatgatatgcacgatatggactcggtagattatgattattacagcggcggcacctatgatgacaacgatagtgatgaaactgatttcgggtttggtgaggctgacaccgacgatgccgccatcatcgcctcctatcgctctaagagtaattatgttgttctcaaggaagaagatattcgcaggcatcagaacgatgatgttgggcgagtttccgcggtcctctccataaccgatgtcgaagcaagtactttgcttcttcactatcactggagtgtcagtaaagttaatgatgaatggtttgcggatgaggagagagttcgcagaactgttggcatattagagggacctgttgttacaacacctgatggcagagaatttacatgtggaatatgctttgattcctacactcttgaggaaattgtatcggtttcttgtggtcatcctttctgcgctacatgttggacaggttatataagcacaaccatcaatgatggcccaggctgtttgatgctaaaatgtcccgacccttcttgtcctgctgctattggtcgagatatgatcgataagttggcttctaaggaagacaaggagaagtattatagatattttcttagatcttatgtcgaagtcaacagagagatgaagtggtgtcctgccccaggatgtgaacatgcaattgattttgctggtgggaccgaaagttatgatgtttcgtgcttgtgttcgcatagcttttgctggaattgcactgaagaggctcaccgtcctgtggattgtgacacagttggaaaatggatactaaagaacagcgctgaatctgaaaatatgaattggatacttgccaattcaaagccttgtccaaagtgtaagcggccaattgaaaagaatcatggctgtatgcacatgacatgcacaccaccttgtaaatttgagttttgttggctttgccttaacgcatggacagaacacggggaaagaactggtggattttatgcctgcaaccggtatgaggcggctaagcaagaagggttgtatgatgaggctgaaaggaggcgagagatggcaaaaaattcgctagagagatacactcattactatgaacgctgggcaagcaatcaagtgtcgaggcaaaaagctatgggggatctgcagaaaatgcaatcagagaagcttgggaagcttagtgacattcagtgcacaccagaatctcagctcaagtttatcgcagaggcttggctccagatcattgaatgcagacgggtactgaaatggacatatgcatatggatactatctacaagatcatgctaagaaaccattttttgagtatttgcaaggggaggctgagtcaggtttggagaggctccacaaatgcgtagagaaggatatagaggtgtttgaacttgctgagggcccttcagaggaattcaatcatttccggacaaaattaactggtttaaccagcataacaaaaaccttctttgaaaatctggtgaaagctctggagaatggtcttgctgatgtggattcacaagctgctagcagcaaaccagctaactctaaaccttctagcaagacaaaaggcggtgggaaaggtaaaggaagctccaaaaatggcgggtccagcagaaacccagatggcaattgagatctctcaggtttcagttacatcactcagtctctctcacaaaggtctagattactcaggaagaagaaagactttttaagagttcagcaaattggagaaaggtttggggtttagaatacttttgactacactcctgtgagtttgaaggctgttaaggcacaagactgcacacacaagttaactatctctctctgtcttaagggttcatgatagtctttgcttaccctaaatattgtatagtattaaagaatctgcacattgttactttggcttttgattgccttttgaaccatctgaagtttcttatc

SEQ ID NO: 77822 - protein, 552 aa, Arabidopsis thaliana
  peptide (1)..(552): Ceres Seq. ID no. 12580672
MDSDDDMHDMDSVDYDYYSGGTYDDNDSDETDFGFGEADTDDAAIIASYRSKSNYVVLKEEDIRRHQNDDVGRVSAVLSITDVEASTLLLHYHWSVSKVNDEWFADEERVRRTVGILEGPVVTTPDGREFTCGICFDSYTLEEIVSVSCGHPFCATCWTGYISTTINDGPGCLMLKCPDPSCPAAIGRDMIDKLASKEDKEKYYRYFLRSYVEVNREMKWCPAPGCEHAIDFAGGTESYDVSCLCSHSFCWNCTEEAHRPVDCDTVGKWILKNSAESENMNWILANSKPCPKCKRPIEKNHGCMHMTCTPPCKFEFCWLCLNAWTEHGERTGGFYACNRYEAAKQEGLYDEAERRREMAKNSLERYTHYYERWASNQVSRQKAMGDLQKMQSEKLGKLSDIQCTPESQLKFIAEAWLQIIECRRVLKWTYAYGYYLQDHAKKPFFEYLQGEAESGLERLHKCVEKDIEVFELAEGPSEEFNHFRTKLTGLTSITKTFFENLVKALENGLADVDSQAASSKPANSKPSSKTKGGGKGKGSSKNGGSSRNPDGN

SEQ ID NO: 77823 - protein, 546 aa, Arabidopsis thaliana
  peptide (1)..(546): Ceres Seq. ID no. 12580673
MHDMDSVDYDYYSGGTYDDNDSDETDFGFGEADTDDAAIIASYRSKSNYVVLKEEDIRRHQNDDVGRVSAVLSITDVEASTLLLHYHWSVSKVNDEWFADEERVRRTVGILEGPVVTTPDGREFTCGICFDSYTLEEIVSVSCGHPFCATCWTGYISTTINDGPGCLMLKCPDPSCPAAIGRDMIDKLASKEDKEKYYRYFLRSYVEVNREMKWCPAPGCEHAIDFAGGTESYDVSCLCSHSFCWNCTEEAHRPVDCDTVGKWILKNSAESENMNWILANSKPCPKCKRPIEKNHGCMHMTCTPPCKFEFCWLCLNAWTEHGERTGGFYACNRYEAAKQEGLYDEAERRREMAKNSLERYTHYYERWASNQVSRQKAMGDLQKMQSEKLGKLSDIQCTPESQLKFIAEAWLQIIECRRVLKWTYAYGYYLQDHAKKPFFEYLQGEAESGLERLHKCVEKDIEVFELAEGPSEEFNHFRTKLTGLTSITKTFFENLVKALENGLADVDSQAASSKPANSKPSSKTKGGGKGKGSSKNGGSSRNPDGN

SEQ ID NO: 77824 - protein, 543 aa, Arabidopsis thaliana
  peptide (1)..(543): Ceres Seq. ID no. 12580674
MDSVDYDYYSGGTYDDNDSDETDFGFGEADTDDAAIIASYRSKSNYVVLKEEDIRRHQNDDVGRVSAVLSITDVEASTLLLHYHWSVSKVNDEWFADEERVRRTVGILEGPVVTTPDGREFTCGICFDSYTLEEIVSVSCGHPFCATCWTGYISTTINDGPGCLMLKCPDPSCPAAIGRDMIDKLASKEDKEKYYRYFLRSYVEVNREMKWCPAPGCEHAIDFAGGTESYDVSCLCSHSFCWNCTEEAHRPVDCDTVGKWILKNSAESENMNWILANSKPCPKCKRPIEKNHGCMHMTCTPPCKFEFCWLCLNAWTEHGERTGGFYACNRYEAAKQEGLYDEAERRREMAKNSLERYTHYYERWASNQVSRQKAMGDLQKMQSEKLGKLSDIQCTPESQLKFIAEAWLQIIECRRVLKWTYAYGYYLQDHAKKPFFEYLQGEAESGLERLHKCVEKDIEVFELAEGPSEEFNHFRTKLTGLTSITKTFFENLVKALENGLADVDSQAASSKPANSKPSSKTKGGGKGKGSSKNGGSSRNPDGN

SEQ ID NO: 77825 - DNA, 1604 bp, Arabidopsis thaliana
  misc_feature (1)..(1604): Ceres Seq. ID no. 12580683
  misc_feature (1)..(1604): Ortholog of  Ceres SEQ ID NO 13596816 as cited in SEQ ID NO 62287
acaatatcacattcacactacctcagcttccgaccacctccactgttaataaactcaaacctctgcaattgtcttcttctcttcaactccatcatctccaccaccggcattctcgccggaatccaatggagcttaccagcttccatcgctcttctctcttattcctcatctcactaacattgatcattctcccgacgacaacaacttcaatcggagtaaactacggtcaaatcggagacaacctcccctccccaaccgacgtaatcccactaataaaatcaatcggagcaacaaaagtaaaactctacgacgcaaatccacaaatcctcaaagctttctccaacaccggaatcgaattcatcatcggactcggcaacgaatacctctccaaaatgaaagatccttcaaaagccttaacatggatcaaacaaaacgttactccatttttacctgcgactaacatcacatgcataactatcggtaacgaaatcctcgctctcaacgactcttcactcactaccaatctcctcccagcgatgcaaggagttcactctgctttaatcaccgccggtctctccgatcaaatctccgtcaccaccgcgcattctctctcgatcctcaaatcctcattcccaccttccgccggcgagtttcaaccggatctactcgattcgctaactccgatcttagaatttcaccggaaaactgattctccgttcttaatcaacgcgtatcctttcttcgcttacaaaggaaaccctaaagaagttcctttagatttcgttctgtttcaacctaatcaaggaatcgtagatccggccaccggttttcactacgataacatgttgttcgctcagatcgacgctgtctactctgctttagcggcggcggggtttaaatcgttgagagttgagatatcggagactgggtggccatcgaaaggtgacgacgatgaggtcggagctacgccggagaatgcgaagaggtataacggaaacttgattaagatgatgatgagtggtaaaaagactaaaacgcccttgaagcctaataatgatctaagtatttacgtttttgccctttttaatgagaatttgaaacctggtccgacgtcggagaggaattatggcttgtttaaacctgatgggactcaggcttattcacttgggtttgctttaaacgatgtcgtgagaggtgctagtggtggtggtaccggtggtgggaatagtagtagcggtggaggaagggataagtcaccggtgtttccggtttctccggtggccccggatagtgcgtccactggttatttagcaatttcggcttctccggtaacggggaaaagaaaagggaaaggggcaatattgtcattggtggtgagcatgttactggcgagacacttactttgattacacgaaactcgagtttaacttactagaagttaaagttgtcctgaagccatttgcattcttctaaattccagatattttttttacttgagctattttcacggctatttttcgtttttattactcctataatctttatgttagaaattcattttgcaccttatgtagtatgaggaattgaggatcacacatttaatt

SEQ ID NO: 77826 - protein, 467 aa, Arabidopsis thaliana
  peptide (1)..(467): Ceres Seq. ID no. 12580684
NITFTLPQLPTTSTVNKLKPLQLSSSLQLHHLHHRHSRRNPMELTSFHRSSLLFLISLTLIILPTTTTSIGVNYGQIGDNLPSPTDVIPLIKSIGATKVKLYDANPQILKAFSNTGIEFIIGLGNEYLSKMKDPSKALTWIKQNVTPFLPATNITCITIGNEILALNDSSLTTNLLPAMQGVHSALITAGLSDQISVTTAHSLSILKSSFPPSAGEFQPDLLDSLTPILEFHRKTDSPFLINAYPFFAYKGNPKEVPLDFVLFQPNQGIVDPATGFHYDNMLFAQIDAVYSALAAAGFKSLRVEISETGWPSKGDDDEVGATPENAKRYNGNLIKMMMSGKKTKTPLKPNNDLSIYVFALFNENLKPGPTSERNYGLFKPDGTQAYSLGFALNDVVRGASGGGTGGGNSSSGGGRDKSPVFPVSPVAPDSASTGYLAISASPVTGKRKGKGAILSLVVSMLLARHLL

SEQ ID NO: 77827 - protein, 426 aa, Arabidopsis thaliana
  peptide (1)..(426): Ceres Seq. ID no. 12580685
MELTSFHRSSLLFLISLTLIILPTTTTSIGVNYGQIGDNLPSPTDVIPLIKSIGATKVKLYDANPQILKAFSNTGIEFIIGLGNEYLSKMKDPSKALTWIKQNVTPFLPATNITCITIGNEILALNDSSLTTNLLPAMQGVHSALITAGLSDQISVTTAHSLSILKSSFPPSAGEFQPDLLDSLTPILEFHRKTDSPFLINAYPFFAYKGNPKEVPLDFVLFQPNQGIVDPATGFHYDNMLFAQIDAVYSALAAAGFKSLRVEISETGWPSKGDDDEVGATPENAKRYNGNLIKMMMSGKKTKTPLKPNNDLSIYVFALFNENLKPGPTSERNYGLFKPDGTQAYSLGFALNDVVRGASGGGTGGGNSSSGGGRDKSPVFPVSPVAPDSASTGYLAISASPVTGKRKGKGAILSLVVSMLLARHLL

SEQ ID NO: 77828 - protein, 337 aa, Arabidopsis thaliana
  peptide (1)..(337): Ceres Seq. ID no. 12580686
MKDPSKALTWIKQNVTPFLPATNITCITIGNEILALNDSSLTTNLLPAMQGVHSALITAGLSDQISVTTAHSLSILKSSFPPSAGEFQPDLLDSLTPILEFHRKTDSPFLINAYPFFAYKGNPKEVPLDFVLFQPNQGIVDPATGFHYDNMLFAQIDAVYSALAAAGFKSLRVEISETGWPSKGDDDEVGATPENAKRYNGNLIKMMMSGKKTKTPLKPNNDLSIYVFALFNENLKPGPTSERNYGLFKPDGTQAYSLGFALNDVVRGASGGGTGGGNSSSGGGRDKSPVFPVSPVAPDSASTGYLAISASPVTGKRKGKGAILSLVVSMLLARHLL

SEQ ID NO: 77829 - DNA, 1789 bp, Arabidopsis thaliana
  misc_feature (1)..(1789): Ceres Seq. ID no. 12580698
  misc_feature (1)..(1789): Ortholog of  Ceres SEQ ID NO 15169252 as cited in SEQ ID NO 54957
  misc_feature (1)..(1789): Ortholog of  Ceres SEQ ID NO 15180094 as cited in SEQ ID NO 0
aacacacgcctctaatctccgcgcacacacacacaccctcacgaagaagaagaagacgaagaagaatcaatggcttctgttatctcttcctctccttttctatgcaaatcatcctccaagagtgatttggggatttcttcgtttcctaaatcttctcagatttcgattcatcgatgtcagaagaaatcgatctcacggaagattgtttccgttatggctcctcaaaaggatcggtctcctggaactacaggatcggtgaaaactgggatgacaatgacggagaagattctagctagagcttcggagaagtcattagtggttcctggtgataacatttgggttaatgttgatgttcttatgactcatgatgtttgtggtcctggtgcttttggtatcttcaagagagagtttggtgaaaaagccaaggtttgggatccggagaagattgttgtgattccggatcattatattttcactgctgataagcgtgcaaaccggaatgttgacatcatgagggagcattgcagggaacagaatattaagtatttctatgatatcactgaccttggaaattttaaggctaatcctgactacaaaggtgtttgccatgttgcacttgcacaagaaggtcattgcaggccaggagaggttttgttaggaacagactcacacacttgtactgctggagcatttggtcaatttgctacagggattggaaacactgatgcaggttttgtgttaggcactggaaaaatcctccttaaggttccaccaacgatgaggtttatcttggatggtgagatgcctagttatttgcaagcaaaggatctgattttacaaattattggtgaaatatctgttgctggtgcaacttacaagacgatggagttcagtggtacaactatcgaaagtctgagtatggaagaaagaatgacattgtgcaacatggttgtggaagctgggggaaagaatggtgtcatccctcctgatgcgacgacattaaattatgttgagaataggacatctgtaccatttgagccagtatatagtgatggaaatgcaagctttgtcgcagattatagatttgacgtgtcaaagctggagcctgtggtggctaagcctcattctcctgacaaccgagctctagctagagaatgcaaagacgtgaaaattgacagagtatacatcggttcttgtactggtgggaagacagaggattttatggctgcagctaaacttttccacgcagcaggaagaaaggtcaaagttccaactttccttgtcccggctactcagaaggtgtggatggatgtgtatgctctcccggtacctggagcaggtggaaagacatgtgcgcagatctttgaagaagctggctgtgacacaccagccagccctagctgtggtgcttgccttggtggcccagcagacacctacgctcgcttgaatgaacctcaagtgtgtgtctcaacgacaaacaggaacttccccggtcggatgggacacaaagaagggcaaatttacttagcgtctccttacactgctgcagcctcggctttaaccggccgtgtcgctgacccaagggagttcttgcagtaggctaatgtaatggcttcgtgtgaaaaatcatatgctatgcatcgacgaaatattgctaaatgatggggcattgtgaactatatgtatgtattttccttatttcgctgttggacttgatagtttcaagcactatgtcaaactttgatgttttgagtttgaaataataaaagagagaaaaagagtgagttag

SEQ ID NO: 77830 - protein, 509 aa, Arabidopsis thaliana
  peptide (1)..(509): Ceres Seq. ID no. 12580699
MASVISSSPFLCKSSSKSDLGISSFPKSSQISIHRCQKKSISRKIVSVMAPQKDRSPGTTGSVKTGMTMTEKILARASEKSLVVPGDNIWVNVDVLMTHDVCGPGAFGIFKREFGEKAKVWDPEKIVVIPDHYIFTADKRANRNVDIMREHCREQNIKYFYDITDLGNFKANPDYKGVCHVALAQEGHCRPGEVLLGTDSHTCTAGAFGQFATGIGNTDAGFVLGTGKILLKVPPTMRFILDGEMPSYLQAKDLILQIIGEISVAGATYKTMEFSGTTIESLSMEERMTLCNMVVEAGGKNGVIPPDATTLNYVENRTSVPFEPVYSDGNASFVADYRFDVSKLEPVVAKPHSPDNRALARECKDVKIDRVYIGSCTGGKTEDFMAAAKLFHAAGRKVKVPTFLVPATQKVWMDVYALPVPGAGGKTCAQIFEEAGCDTPASPSCGACLGGPADTYARLNEPQVCVSTTNRNFPGRMGHKEGQIYLASPYTAAASALTGRVADPREFLQ

SEQ ID NO: 77831 - protein, 461 aa, Arabidopsis thaliana
  peptide (1)..(461): Ceres Seq. ID no. 12580700
MAPQKDRSPGTTGSVKTGMTMTEKILARASEKSLVVPGDNIWVNVDVLMTHDVCGPGAFGIFKREFGEKAKVWDPEKIVVIPDHYIFTADKRANRNVDIMREHCREQNIKYFYDITDLGNFKANPDYKGVCHVALAQEGHCRPGEVLLGTDSHTCTAGAFGQFATGIGNTDAGFVLGTGKILLKVPPTMRFILDGEMPSYLQAKDLILQIIGEISVAGATYKTMEFSGTTIESLSMEERMTLCNMVVEAGGKNGVIPPDATTLNYVENRTSVPFEPVYSDGNASFVADYRFDVSKLEPVVAKPHSPDNRALARECKDVKIDRVYIGSCTGGKTEDFMAAAKLFHAAGRKVKVPTFLVPATQKVWMDVYALPVPGAGGKTCAQIFEEAGCDTPASPSCGACLGGPADTYARLNEPQVCVSTTNRNFPGRMGHKEGQIYLASPYTAAASALTGRVADPREFLQ

SEQ ID NO: 77832 - protein, 443 aa, Arabidopsis thaliana
  peptide (1)..(443): Ceres Seq. ID no. 12580701
MTMTEKILARASEKSLVVPGDNIWVNVDVLMTHDVCGPGAFGIFKREFGEKAKVWDPEKIVVIPDHYIFTADKRANRNVDIMREHCREQNIKYFYDITDLGNFKANPDYKGVCHVALAQEGHCRPGEVLLGTDSHTCTAGAFGQFATGIGNTDAGFVLGTGKILLKVPPTMRFILDGEMPSYLQAKDLILQIIGEISVAGATYKTMEFSGTTIESLSMEERMTLCNMVVEAGGKNGVIPPDATTLNYVENRTSVPFEPVYSDGNASFVADYRFDVSKLEPVVAKPHSPDNRALARECKDVKIDRVYIGSCTGGKTEDFMAAAKLFHAAGRKVKVPTFLVPATQKVWMDVYALPVPGAGGKTCAQIFEEAGCDTPASPSCGACLGGPADTYARLNEPQVCVSTTNRNFPGRMGHKEGQIYLASPYTAAASALTGRVADPREFLQ

SEQ ID NO: 77833 - DNA, 1357 bp, Arabidopsis thaliana
  misc_feature (1)..(1357): Ceres Seq. ID no. 12580720
  misc_feature (1)..(1357): Ortholog of  Ceres SEQ ID NO 13655375 as cited in SEQ ID NO 63347
  misc_feature (1)..(1357): Ortholog of  Ceres SEQ ID NO 12626166 as cited in SEQ ID NO 64505
  misc_feature (1)..(1357): Ortholog of  Ceres SEQ ID NO 13654415 as cited in SEQ ID NO 68820
  misc_feature (1)..(1357): Ortholog of  Ceres SEQ ID NO 14303290 as cited in SEQ ID NO 0
ataactgaaaaataaaaataagacagaaaacaaagttaaaaataaaataaaaacggaagagagaaaataaataaataaaatcactcaaaggatttccacagtttttctttccatgttgatttagcccattcgtagacttcctccgcgccgccgttagacgccgcctcggaagtatcagcaaccgccgtggtgttcgtcgccttcaaagagatctgaatttgagatgtttaaaaaaatgagtgctactacaagcaagacggatcagaaagcggcattagacattgcatcatggctattcaatgtggttacttccgttggaatcatcctcgttaacaaagctttaatggctacttatggctttagtttcgctactacattaaccggtttgcatttcggaacaacgacattgttgacaactttcttgacatggcttggttatatccaaccttctcagcttccttggcctgatcttttgaaattcgttttgttcgctaacttctctatcgttgggatgaacgtcagtctcatgtggaattctgttggcttctaccagattgcgaagctgagtatgatcccggtttcttgtcttctagaagttatgcttgacaatgtcaggtattcaagagatacaaagcttagcattttgttagttcttgctggtgttgccgtctgtactgtaaccgatgttagtgtcaatctcaacggatttctagctgccgctattgctgtctggagcaccgcgcttcagcaatactatgtacattatctacaacggaaatattcactcggttctttcaatttactggcgcataccgctccagttcaagctgcgtcattgttgttggtcggaccatttctagactactggttgactaaccaaagagtggatgcatacaacttttcatttgtatctctgttcttcttaatactctcgtgcagtatcgcggttgggaccaatctcagccaattcatctgtattggaagattcacggcggtgtctttccaagtacttggtcacatgaagacaattctggttttggttttgggattcactttcttcggtaaggaaggattaaacctacaagtagtgcttggaatgctgattgctatactcggtatgatctggtacggtaatgcatcttctaaaccgggtggtaaagaacgtcgtagcctgtctattcccataaccaagtcacagaaactatctgaaacaaacgaatctgatgaaaaggtgtagaagaaagaagtgaatcgcattgacatagaaacaaaaacaagatactcagatacaaacaggtagagttatcaaatgggatattatttataaaccaaaaaaaagaaagggatttaattattt

SEQ ID NO: 77834 - protein, 337 aa, Arabidopsis thaliana; identical to SEQ ID NO: 22961
  peptide (1)..(337): Ceres Seq. ID no. 12580721

SEQ ID NO: 77835 - protein, 333 aa, Arabidopsis thaliana; identical to SEQ ID NO: 22962
  peptide (1)..(333): Ceres Seq. ID no. 12580722

SEQ ID NO: 77836 - protein, 297 aa, Arabidopsis thaliana; identical to SEQ ID NO: 22963
  peptide (1)..(297): Ceres Seq. ID no. 12580723

SEQ ID NO: 77837 - DNA, 1213 bp, Arabidopsis thaliana
  misc_feature (1)..(1213): Ceres Seq. ID no. 12580732
  misc_feature (1)..(1213): Ortholog of  Ceres SEQ ID NO 13595414 as cited in SEQ ID NO 56539
  misc_feature (1)..(1213): Ortholog of  Ceres SEQ ID NO 14314396 as cited in SEQ ID NO 60048
ataaatacacatatctcactctctctgatctccgcttctcttcgccaacaaatgtcgaccgctcctctctccggcttctttctcacttcactttctccttctcaatcttctctccagaaactctctcttcgtacttcttccaccgtcgcttgcctcccacccgcctcttcttcttcctcatcttcctcctcctcgtcttcccgttccgttccaacgcttatccgtaacgagccagtttttgccgctcctgctcctatcattgccccttattggagtgaagagatgggaaccgaagcatacgacgaggctattgaagctctcaagaagcttctcatcgagaaggaagagctaaagacggttgcagcggcaaaggtggagcagatcacagcggctcttcagacaggtacttcatccgacaagaaagctttcgaccccgtcgaaaccattaagcagggcttcatcaaattcaagaaggagaaatacgaaaccaaccctgctttgtacggtgagctcgcaaagggtcaaagtcctaagtacatggtgtttgcttgttcagactcacgtgtgtgtccatcacacgttctggactttcagccaggagatgccttcgtggtccgtaacatagccaacatggttcctcctttcgacaaggtcaaatacggtggcgttggagcagccattgaatacgcggtcttacaccttaaggtggagaacattgtggtgataggacacagtgcatgtggtgggatcaaagggcttatgtctttccccttagatggaaacaactccactgacttcatagaggactgggtcaaaatctgtttaccagccaagtcaaaggttatatcagaacttggagattcagcctttgaagatcaatgtggccgatgtgaaagggaggcggtgaatgtttcactagcaaacctattgacatatccatttgtgagagaaggacttgtgaagggaacacttgctttgaagggaggctactatgacttcgtcaagggtgcttttgagctttggggacttgaatttggcctctccgaaactagctctgttaaagatgtggctaccatactacattggaagctgtaggaaactctttgaagccttacccgatttcacattgtcaattcaataacaccaagttgttgtttacatgcagatcttgatgaaactggtttttgattttacagaattaaaatcttggggg

SEQ ID NO: 77838 - protein, 364 aa, Arabidopsis thaliana
  peptide (1)..(364): Ceres Seq. ID no. 12580733
INTHISLSLISASLRQQMSTAPLSGFFLTSLSPSQSSLQKLSLRTSSTVACLPPASSSSSSSSSSSSRSVPTLIRNEPVFAAPAPIIAPYWSEEMGTEAYDEAIEALKKLLIEKEELKTVAAAKVEQITAALQTGTSSDKKAFDPVETIKQGFIKFKKEKYETNPALYGELAKGQSPKYMVFACSDSRVCPSHVLDFQPGDAFVVRNIANMVPPFDKVKYGGVGAAIEYAVLHLKVENIVVIGHSACGGIKGLMSFPLDGNNSTDFIEDWVKICLPAKSKVISELGDSAFEDQCGRCEREAVNVSLANLLTYPFVREGLVKGTLALKGGYYDFVKGAFELWGLEFGLSETSSVKDVATILHWKL

SEQ ID NO: 77839 - protein, 347 aa, Arabidopsis thaliana
  peptide (1)..(347): Ceres Seq. ID no. 12580734
MSTAPLSGFFLTSLSPSQSSLQKLSLRTSSTVACLPPASSSSSSSSSSSSRSVPTLIRNEPVFAAPAPIIAPYWSEEMGTEAYDEAIEALKKLLIEKEELKTVAAAKVEQITAALQTGTSSDKKAFDPVETIKQGFIKFKKEKYETNPALYGELAKGQSPKYMVFACSDSRVCPSHVLDFQPGDAFVVRNIANMVPPFDKVKYGGVGAAIEYAVLHLKVENIVVIGHSACGGIKGLMSFPLDGNNSTDFIEDWVKICLPAKSKVISELGDSAFEDQCGRCEREAVNVSLANLLTYPFVREGLVKGTLALKGGYYDFVKGAFELWGLEFGLSETSSVKDVATILHWKL

SEQ ID NO: 77840 - protein, 270 aa, Arabidopsis thaliana
  peptide (1)..(270): Ceres Seq. ID no. 12580735
MGTEAYDEAIEALKKLLIEKEELKTVAAAKVEQITAALQTGTSSDKKAFDPVETIKQGFIKFKKEKYETNPALYGELAKGQSPKYMVFACSDSRVCPSHVLDFQPGDAFVVRNIANMVPPFDKVKYGGVGAAIEYAVLHLKVENIVVIGHSACGGIKGLMSFPLDGNNSTDFIEDWVKICLPAKSKVISELGDSAFEDQCGRCEREAVNVSLANLLTYPFVREGLVKGTLALKGGYYDFVKGAFELWGLEFGLSETSSVKDVATILHWKL

SEQ ID NO: 77841 - DNA, 2278 bp, Arabidopsis thaliana
  misc_feature (1)..(2278): Ceres Seq. ID no. 12580795
  misc_feature (1)..(2278): Ortholog of  Ceres SEQ ID NO 14310132 as cited in SEQ ID NO 20638
aggttcctgaaatgttctcgtcagggcgacattagggtttcttcattcccgtccttcagattcgtatttgaaacaggaaggagagaaaaatgggtatacaagggcttttgccgttgttgaaatcgataatggtaccgattcatatcaaggagctcgagggttgtatcgtcgccgtcgatacatattcatggctacacaaaggggctttatcttgtagccgagagctctgcaagggattacccaccaagaggcatattcaatactgtatgcatagagtgaatttacttcgccatcatggagtgaagcctatcatggtctttgatggaggtccgttaccgatgaaactagaacaagagaataagcgtgctaggtccagaaaggaaaatcttgctcgtgcattggagcatgaagcaaatggaaattcctcagctgcttatgagtgctactcaaaggccgtagatatttcaccttctattgcacatgagttgatacaggttctgaggcaggagaatgttgattacgttgttgctccttacgaagctgatgcgcagatggcattcttagctattactaagcaagttgatgcgattatcactgaggattctgatctcataccttttggctgcctaagagtaattaagcacttaaagtacagcacagtttcagttcctcctctttatgaagagtcattcaagagagctttactgactttcaagcatcaacgtgtctatgacccaaatgctgaagatatcatacacttgtgtgacatttctgacaaccttggtgaagattcagattttgtaggcccatcgatgccacaagatattgctaagggtatagctctaggccagcttgatcccttcacacagttgccattccaggctgagagtgttactcctaaattggctgttgatgatatatcccgtcccaaaagtttcaaacctgaaactgtaaagaaaaagcttgatttgccagtccaaaaaaaccttctcaccaagtacttctgctttgcgtctgttgaggcaaaaagaaaattcaaggctcctaggatatcaccaatgtctctgaccccaactgatgagtctccaagcattcctgatgacaacacaccagatttagatgctctttcaagccagacaacaaatgaatccccggtttatagcttgggtgagaatccatgtgttagcgaagttgcagagaaaagagattcacccgatgacgatgcagtggaaaggaatcacaaggaccttcatcataaatactgcgaacgggaagtggataggccgaagtcagatagtttgaaggttatagtaagaagcaagtattttaagcagaaacaggaggacaaaagtctgaaacaatcgatcccatgtcttaatgattgctctgtgattggtcagagaaaggctgttaaaactgtgattaacatgtcaagcgcgtctaaaagagaagagagtcacagagctatagcaacaagtccatgtttacaccatgaccgaatctacaacgatcatgaagatgctaaagaagcgagtttctctgccatgaacgaggtggctgagagaacaataaacacccacaagattaaccatcagatcaatgaagaagaacagaacccatccgttgaaattccttctgcctttagtactcccgagaatgttatacctctctcttccattgctattgatagttgccatggagttgcaacagggaagaggaagcttgactcagatgaaaaccttcacaaggaaaatttgaaatccaagcacatgcgcatggatgaaactgatactgctcttaatgcagaaacaccattagaaaccgatgatgttgagaagtttggatcgaacatttcacatatagggcattactcagaaatagcagagaaatcagtggaaagatttgtctcagctatatcgtctttcaaatattctgggactggctctcgtgctagcggtctccgtgcccctctcaaagatatccgcaacacttgtccgtccaaagggttatctcttaaaccagacatcagcaagtttggctatgcgtcaagcaaccgacacatggtgacaaagtcaaggagaatgtgagctcagatttgtaagttaaccatctctttagagccacatgtgagagctttagctttagaattaacttcttggtcgcatgatgatatttttggtgttgtgtctgtattagctttctacttactgtgcatagcattcttgttcaaagacacttcacacaacagttggattcataaatgaaacaactttcaact

SEQ ID NO: 77842 - protein, 665 aa, Arabidopsis thaliana
  peptide (1)..(665): Ceres Seq. ID no. 12580796
MGIQGLLPLLKSIMVPIHIKELEGCIVAVDTYSWLHKGALSCSRELCKGLPTKRHIQYCMHRVNLLRHHGVKPIMVFDGGPLPMKLEQENKRARSRKENLARALEHEANGNSSAAYECYSKAVDISPSIAHELIQVLRQENVDYVVAPYEADAQMAFLAITKQVDAIITEDSDLIPFGCLRVIKHLKYSTVSVPPLYEESFKRALLTFKHQRVYDPNAEDIIHLCDISDNLGEDSDFVGPSMPQDIAKGIALGQLDPFTQLPFQAESVTPKLAVDDISRPKSFKPETVKKKLDLPVQKNLLTKYFCFASVEAKRKFKAPRISPMSLTPTDESPSIPDDNTPDLDALSSQTTNESPVYSLGENPCVSEVAEKRDSPDDDAVERNHKDLHHKYCEREVDRPKSDSLKVIVRSKYFKQKQEDKSLKQSIPCLNDCSVIGQRKAVKTVINMSSASKREESHRAIATSPCLHHDRIYNDHEDAKEASFSAMNEVAERTINTHKINHQINEEEQNPSVEIPSAFSTPENVIPLSSIAIDSCHGVATGKRKLDSDENLHKENLKSKHMRMDETDTALNAETPLETDDVEKFGSNISHIGHYSEIAEKSVERFVSAISSFKYSGTGSRASGLRAPLKDIRNTCPSKGLSLKPDISKFGYASSNRHMVTKSRRM

SEQ ID NO: 77843 - protein, 652 aa, Arabidopsis thaliana
  peptide (1)..(652): Ceres Seq. ID no. 12580797
MVPIHIKELEGCIVAVDTYSWLHKGALSCSRELCKGLPTKRHIQYCMHRVNLLRHHGVKPIMVFDGGPLPMKLEQENKRARSRKENLARALEHEANGNSSAAYECYSKAVDISPSIAHELIQVLRQENVDYVVAPYEADAQMAFLAITKQVDAIITEDSDLIPFGCLRVIKHLKYSTVSVPPLYEESFKRALLTFKHQRVYDPNAEDIIHLCDISDNLGEDSDFVGPSMPQDIAKGIALGQLDPFTQLPFQAESVTPKLAVDDISRPKSFKPETVKKKLDLPVQKNLLTKYFCFASVEAKRKFKAPRISPMSLTPTDESPSIPDDNTPDLDALSSQTTNESPVYSLGENPCVSEVAEKRDSPDDDAVERNHKDLHHKYCEREVDRPKSDSLKVIVRSKYFKQKQEDKSLKQSIPCLNDCSVIGQRKAVKTVINMSSASKREESHRAIATSPCLHHDRIYNDHEDAKEASFSAMNEVAERTINTHKINHQINEEEQNPSVEIPSAFSTPENVIPLSSIAIDSCHGVATGKRKLDSDENLHKENLKSKHMRMDETDTALNAETPLETDDVEKFGSNISHIGHYSEIAEKSVERFVSAISSFKYSGTGSRASGLRAPLKDIRNTCPSKGLSLKPDISKFGYASSNRHMVTKSRRM

SEQ ID NO: 77844 - protein, 606 aa, Arabidopsis thaliana
  peptide (1)..(606): Ceres Seq. ID no. 12580798
MHRVNLLRHHGVKPIMVFDGGPLPMKLEQENKRARSRKENLARALEHEANGNSSAAYECYSKAVDISPSIAHELIQVLRQENVDYVVAPYEADAQMAFLAITKQVDAIITEDSDLIPFGCLRVIKHLKYSTVSVPPLYEESFKRALLTFKHQRVYDPNAEDIIHLCDISDNLGEDSDFVGPSMPQDIAKGIALGQLDPFTQLPFQAESVTPKLAVDDISRPKSFKPETVKKKLDLPVQKNLLTKYFCFASVEAKRKFKAPRISPMSLTPTDESPSIPDDNTPDLDALSSQTTNESPVYSLGENPCVSEVAEKRDSPDDDAVERNHKDLHHKYCEREVDRPKSDSLKVIVRSKYFKQKQEDKSLKQSIPCLNDCSVIGQRKAVKTVINMSSASKREESHRAIATSPCLHHDRIYNDHEDAKEASFSAMNEVAERTINTHKINHQINEEEQNPSVEIPSAFSTPENVIPLSSIAIDSCHGVATGKRKLDSDENLHKENLKSKHMRMDETDTALNAETPLETDDVEKFGSNISHIGHYSEIAEKSVERFVSAISSFKYSGTGSRASGLRAPLKDIRNTCPSKGLSLKPDISKFGYASSNRHMVTKSRRM

SEQ ID NO: 77845 - DNA, 1871 bp, Arabidopsis thaliana
  misc_feature (1)..(1871): Ceres Seq. ID no. 12580799
  misc_feature (1)..(1871): Ortholog of  Ceres SEQ ID NO 13659971 as cited in SEQ ID NO 67565
  misc_feature (1)..(1871): Ortholog of  Ceres SEQ ID NO 13500385 as cited in SEQ ID NO 67583
gattcatcagagccatgggtgtctgtttctccgccattagagtcactggtgctagcagcagtagacgaagcagtcagaccaaatccaaggctgctcctactcccatcgataccaaggcctctaccaaacgccgaaccggctccatcccctgcggcaagcgtaccgattttggctactccaaagacttccacgatcactacaccatcggcaagttgctcggccatggtcaattcggctacacctacgtcgccatccacagacccaatggagatcgcgtcgccgtcaaaagactcgataagtctaagatggttcttcctattgctgttgaggatgtcaagcgtgaggttcagattcttattgctctctctggccacgagaatgttgttcagtttcacaatgcctttgaggatgacgattacgtctatattgttatggagttgtgcgaaggaggcgaattgctggataggatattatccaagaaaggtaatcggtactccgagaaagatgcagccgttgtcgttaggcagatgctcaaagttgcaggagaatgtcatctacacggtcttgtacatagagatatgaaaccagagaactttttgttcaaatcagctcaactagattcgcctctaaaggctacggattttggtttatcggattttatcaaaccagggaaaaggttccatgacattgttggtagcgcctattatgtggctcctgaggtattaaagcgcagatcagggcctgaatcagatgtatggagcattggtgtgattacgtatatattactttgtgggaggcggcctttttgggatagaactgaagatggtatatttaaagaggttttaagaaataaacctgacttcagccgtaaaccttgggcaactataagtgacagcgccaaagattttgtgaaaaagttacttgtaaaagacccacgagcacggctaactgctgcacaagcactatcacatgcgtgggttagagaaggcgggaatgctactgatatccctgtcgacatttcagttctgaacaacttaagacaatttgtgagatacagccgtctaaagcaatttgctttaagggcgcttgctagcacacttgacgaggcagagatctctgacctcagagatcaatttgatgcgattgatgtggataaaaatggcgtcattagtcttgaagagatgagacaggcacttgccaaagatcttccttggaaactgaaagactcacgagttgctgagatccttgaagcgattgatagcaacactgatgggttagtggacttcacagagtttgtagcagcagctctacatgttcatcaactagaagaacatgattcagagaaatggcagctaaggtcaagagcagcttttgagaaattcgacctagacaaagacgggtacataacgcctgaggaacttcgaatgcacacggggttaagaggatcaatagatccactgctggatgaagcagacatagacagagatgggaaaataagcctgcatgagttcaggagacttctaagaacagcgagcataagttcacagagagcaccaagccctgcaggtcacaggaatcttcgatagtatatactagaagaggatgataagtaagtaatactttggttgtttaaggcgcagcaaaacaaagagagaaagtggagtgagaatcccattgatgaaatatgagagagctcttaaggtgcactagatgcaagaggacacgtggcattccctgaatgggggacaaatccaattttaaatttttaatggttgggcaccaaaagaaacatagagagccagctgtaatttcgattctatcatatattttgtctgtttccatttttcttataatattcgttttgagagcac

SEQ ID NO: 77846 - protein, 527 aa, Arabidopsis thaliana
  peptide (1)..(527): Ceres Seq. ID no. 12580800
FIRAMGVCFSAIRVTGASSSRRSSQTKSKAAPTPIDTKASTKRRTGSIPCGKRTDFGYSKDFHDHYTIGKLLGHGQFGYTYVAIHRPNGDRVAVKRLDKSKMVLPIAVEDVKREVQILIALSGHENVVQFHNAFEDDDYVYIVMELCEGGELLDRILSKKGNRYSEKDAAVVVRQMLKVAGECHLHGLVHRDMKPENFLFKSAQLDSPLKATDFGLSDFIKPGKRFHDIVGSAYYVAPEVLKRRSGPESDVWSIGVITYILLCGRRPFWDRTEDGIFKEVLRNKPDFSRKPWATISDSAKDFVKKLLVKDPRARLTAAQALSHAWVREGGNATDIPVDISVLNNLRQFVRYSRLKQFALRALASTLDEAEISDLRDQFDAIDVDKNGVISLEEMRQALAKDLPWKLKDSRVAEILEAIDSNTDGLVDFTEFVAAALHVHQLEEHDSEKWQLRSRAAFEKFDLDKDGYITPEELRMHTGLRGSIDPLLDEADIDRDGKISLHEFRRLLRTASISSQRAPSPAGHRNLR

SEQ ID NO: 77847 - protein, 523 aa, Arabidopsis thaliana
  peptide (1)..(523): Ceres Seq. ID no. 12580801
MGVCFSAIRVTGASSSRRSSQTKSKAAPTPIDTKASTKRRTGSIPCGKRTDFGYSKDFHDHYTIGKLLGHGQFGYTYVAIHRPNGDRVAVKRLDKSKMVLPIAVEDVKREVQILIALSGHENVVQFHNAFEDDDYVYIVMELCEGGELLDRILSKKGNRYSEKDAAVVVRQMLKVAGECHLHGLVHRDMKPENFLFKSAQLDSPLKATDFGLSDFIKPGKRFHDIVGSAYYVAPEVLKRRSGPESDVWSIGVITYILLCGRRPFWDRTEDGIFKEVLRNKPDFSRKPWATISDSAKDFVKKLLVKDPRARLTAAQALSHAWVREGGNATDIPVDISVLNNLRQFVRYSRLKQFALRALASTLDEAEISDLRDQFDAIDVDKNGVISLEEMRQALAKDLPWKLKDSRVAEILEAIDSNTDGLVDFTEFVAAALHVHQLEEHDSEKWQLRSRAAFEKFDLDKDGYITPEELRMHTGLRGSIDPLLDEADIDRDGKISLHEFRRLLRTASISSQRAPSPAGHRNLR

SEQ ID NO: 77848 - protein, 426 aa, Arabidopsis thaliana
  peptide (1)..(426): Ceres Seq. ID no. 12580802
MVLPIAVEDVKREVQILIALSGHENVVQFHNAFEDDDYVYIVMELCEGGELLDRILSKKGNRYSEKDAAVVVRQMLKVAGECHLHGLVHRDMKPENFLFKSAQLDSPLKATDFGLSDFIKPGKRFHDIVGSAYYVAPEVLKRRSGPESDVWSIGVITYILLCGRRPFWDRTEDGIFKEVLRNKPDFSRKPWATISDSAKDFVKKLLVKDPRARLTAAQALSHAWVREGGNATDIPVDISVLNNLRQFVRYSRLKQFALRALASTLDEAEISDLRDQFDAIDVDKNGVISLEEMRQALAKDLPWKLKDSRVAEILEAIDSNTDGLVDFTEFVAAALHVHQLEEHDSEKWQLRSRAAFEKFDLDKDGYITPEELRMHTGLRGSIDPLLDEADIDRDGKISLHEFRRLLRTASISSQRAPSPAGHRNLR

SEQ ID NO: 77849 - DNA, 1631 bp, Arabidopsis thaliana
  misc_feature (1)..(1631): Ceres Seq. ID no. 12580827
  misc_feature (1)..(1631): Ortholog of  Ceres SEQ ID NO 13597546 as cited in SEQ ID NO 65017
  misc_feature (1)..(1631): Ortholog of  Ceres SEQ ID NO 14307912 as cited in SEQ ID NO 66380
  misc_feature (1)..(1631): Ortholog of  Ceres SEQ ID NO 14308045 as cited in SEQ ID NO 67444
  misc_feature (1)..(1631): Ortholog of  Ceres SEQ ID NO 13654353 as cited in SEQ ID NO 68318
atggatcgacggggcaagtattgggccggaccgatgtggatcgggttgagtatgtgcggatcgggctctgataccatattagagtgtaggttaagattattcaaacttcaaaggcaaaaccaaatgagcttcgtgtggtccgctgcggtgtgggtcatagctgtagccgctgttgtgattagcaaatggttataccgatggtcgaacccgaagtgcaatggcaagttaccaccgggatcaatgggtttaccgatcatcggagagacatgcgacttctttgagccccatggattatacgagatctcaccctttgtcaagaagaggatgttaaagtacgggccattgtttcggacaaatattttcggatcgaacaccgtggttttgacagaacctgatatcatcttcgaagtttttcggcaagagaacaagtcttttgtgtttagctatccagaagcttttgtcaagccatttggaaaagaaaacgtgttcctcaaacatggaaacatccacaagcacgtcaagcaaatcagtcttcaacatcttggctctgaggctttaaaaaaaaagatgataggagaaatagacagagtaacctatgagcatcttagatcgaaggctaaccagggtagcttcgatgctaaggaggcagttgaaagtgttataatggcgcacttgaccccaaagataataagtaacctcaaaccagaaacacaagcaactcttgtggacaatataatggccctaggatctgaatggtttcagtcacccttgaagcttacgactttgatttctatctacaaagtctttattgcacgtagatacgccctccaggtgataaaggacgttttcacgaggaggaaagcgtccagagaaatgtgcggagacttcctcgacacaatggtagaagagggggagaaagaagacgtcatttttaatgaagaaagtgctataaatctcatattcgctattttggtcgtcgctaaagaatctacctcttccgttactagcttggccatcaaatttcttgccgaaaaccataaagctctcgcagagttgaagagggagcatgcggccatccttcaaaatagaaatggtaaaggagctggagttagctgggaagaatacagacaccaaatgactttcactaacatggtgataaatgagactcttcgaatggcaaacatggctcctataatgtatagaaaggctgtgaacgatgtcgaaatcaaaggttacacaattccagcgggctggattgtggcggttataccaccagctgtccatttcaatgatgctatttatgagaatcctttggagttcaatccatggagatgggaggggaaagagttgcggtctggatctaagacgttcatggtgtttggaggtggagtgagacagtgtgtcggcgcggagtttgcgagactacaaatttctatcttcattcatcatcttgtaacaacctacgatttctcattggcccaagaatcggagttcatccgtgcaccactcccatacttccccaaaggactgcctatcaagatttcccagtcactctagtatcttgtgtaatcatatatgtcactagtaaagaatccggggaagtattttcaatggggcaatactaaaataat

SEQ ID NO: 77850 - protein, 518 aa, Arabidopsis thaliana
  peptide (1)..(518): Ceres Seq. ID no. 12580828
MDRRGKYWAGPMWIGLSMCGSGSDTILECRLRLFKLQRQNQMSFVWSAAVWVIAVAAVVISKWLYRWSNPKCNGKLPPGSMGLPIIGETCDFFEPHGLYEISPFVKKRMLKYGPLFRTNIFGSNTVVLTEPDIIFEVFRQENKSFVFSYPEAFVKPFGKENVFLKHGNIHKHVKQISLQHLGSEALKKKMIGEIDRVTYEHLRSKANQGSFDAKEAVESVIMAHLTPKIISNLKPETQATLVDNIMALGSEWFQSPLKLTTLISIYKVFIARRYALQVIKDVFTRRKASREMCGDFLDTMVEEGEKEDVIFNEESAINLIFAILVVAKESTSSVTSLAIKFLAENHKALAELKREHAAILQNRNGKGAGVSWEEYRHQMTFTNMVINETLRMANMAPIMYRKAVNDVEIKGYTIPAGWIVAVIPPAVHFNDAIYENPLEFNPWRWEGKELRSGSKTFMVFGGGVRQCVGAEFARLQISIFIHHLVTTYDFSLAQESEFIRAPLPYFPKGLPIKISQSL

SEQ ID NO: 77851 - protein, 507 aa, Arabidopsis thaliana
  peptide (1)..(507): Ceres Seq. ID no. 12580829
MWIGLSMCGSGSDTILECRLRLFKLQRQNQMSFVWSAAVWVIAVAAVVISKWLYRWSNPKCNGKLPPGSMGLPIIGETCDFFEPHGLYEISPFVKKRMLKYGPLFRTNIFGSNTVVLTEPDIIFEVFRQENKSFVFSYPEAFVKPFGKENVFLKHGNIHKHVKQISLQHLGSEALKKKMIGEIDRVTYEHLRSKANQGSFDAKEAVESVIMAHLTPKIISNLKPETQATLVDNIMALGSEWFQSPLKLTTLISIYKVFIARRYALQVIKDVFTRRKASREMCGDFLDTMVEEGEKEDVIFNEESAINLIFAILVVAKESTSSVTSLAIKFLAENHKALAELKREHAAILQNRNGKGAGVSWEEYRHQMTFTNMVINETLRMANMAPIMYRKAVNDVEIKGYTIPAGWIVAVIPPAVHFNDAIYENPLEFNPWRWEGKELRSGSKTFMVFGGGVRQCVGAEFARLQISIFIHHLVTTYDFSLAQESEFIRAPLPYFPKGLPIKISQSL

SEQ ID NO: 77852 - protein, 501 aa, Arabidopsis thaliana
  peptide (1)..(501): Ceres Seq. ID no. 12580830
MCGSGSDTILECRLRLFKLQRQNQMSFVWSAAVWVIAVAAVVISKWLYRWSNPKCNGKLPPGSMGLPIIGETCDFFEPHGLYEISPFVKKRMLKYGPLFRTNIFGSNTVVLTEPDIIFEVFRQENKSFVFSYPEAFVKPFGKENVFLKHGNIHKHVKQISLQHLGSEALKKKMIGEIDRVTYEHLRSKANQGSFDAKEAVESVIMAHLTPKIISNLKPETQATLVDNIMALGSEWFQSPLKLTTLISIYKVFIARRYALQVIKDVFTRRKASREMCGDFLDTMVEEGEKEDVIFNEESAINLIFAILVVAKESTSSVTSLAIKFLAENHKALAELKREHAAILQNRNGKGAGVSWEEYRHQMTFTNMVINETLRMANMAPIMYRKAVNDVEIKGYTIPAGWIVAVIPPAVHFNDAIYENPLEFNPWRWEGKELRSGSKTFMVFGGGVRQCVGAEFARLQISIFIHHLVTTYDFSLAQESEFIRAPLPYFPKGLPIKISQSL

SEQ ID NO: 77853 - DNA, 1933 bp, Arabidopsis thaliana
  misc_feature (1)..(1933): Ceres Seq. ID no. 12580849
  misc_feature (1)..(1933): Ortholog of  Ceres SEQ ID NO 15177343 as cited in SEQ ID NO 51182
attatttcttcttcttcttcttcttcttcttcatcatcgcatctctctcacttcacgttttcttcggtgaagagatagccgccggaaaaagttatcatctccggaaatttcgctctttctttacgtgtttgagggtgtgttttatgtatggatggatttaagggtaaaagaacatctagaccgattatgccacggaaagcaagtggtcttgtgttacatgagaatatgaagaagaaagatgataagagtgttgtccctatctgcagtagaattggttgcagttccagggttagttccactaagggagatttgattgatcataaagcaaaagctactgtgtcttcgtttcgatctcctttgagtggaaaggaaaccgttggtagttcatctcgaagtatgagtggatttggtggtacaaaaaaggcttccaaggttattggtaggagacaactctcttctcttttggacatggattcttcagagagcagcagtgttaatgaagactcacccacaagtgagcgttcccttcctcgtggaaagacaaaagaaagcactattagtgttcattctgaaagtagtgtctctggagaagttgtgacagaggcaggaagctcgagtagaggaactggtagaagcattcatcagagacctgatttggtctcccgagatgctcgtgtgagtaatagtgagcaaaatgcaagagctagtgtgaacaagaatggattaagagacttgaggaacaaatctggttctgatgttcttccatctaattcaactccgacaagaaaaagtaacatctttagaaagaaaacctctgatggtgagagcagctcttcgagtagagggaataagacggaaggatcagtggttgggggaaagaatattagttcccctcaggggaatggcatcaccatgtctgaacctaggaggaacagaaacttaccaagtgttagggacaacagtgttgtttcaagtagtactaggagatcaactggttattatggtagaacaggacgtgctggagcggttgcaacactacaagcacctcggcctccaacaagagctgatctcaatccttctagatcggcagaagcttcgcgtagtcctttaaatagttacagtaggccaatcagtagtaatggcaggttacgtagcctgatgatgcctggtagcccctcagaagccggcctttctcgctctttgatgaaccgtgatactttcagacggtataacatgaatggagttgcagaggtattgttggccctggaaaggattgagcaagacgaagagcttacatacgagcaattggctgttttagagaccaatctgttcttaaatggtatgagcagcttccacgatcagcatagagatatgaggcttgacattgacaacatgtcgtatgaggaactgttagcattagaggagaaaatgggtacagtgagcactgctctaagcgaagaagcgcttctgaaaagcctcaagtcaagtatttaccgtccaaacgatgaatccgacgacatttgcctgaacaaagatgatgatgtcaagtgcagcatttgccaggaagagtatgttgatggagatgaagtagggactttgccttgccaacataaataccacgtgagctgcgcgcaacaatggctacggatgaagaattggtgtcctatatgtaaaacctctgcagaatctcagccacatccattttcatgatgatgggattgcagagacatttaccaaagtgtttgtgtctacttccactaccttgctctctattatttgtacataaaaggttttcttttttacttacacacaattgggaacaaatagaaaataagatcaggtggacaaattattgttttcaccttgtattggttcgtaatttcaacaatatttggtttaattccatatatagtttatatactgttattgcact

SEQ ID NO: 77854 - protein, 520 aa, Arabidopsis thaliana
  peptide (1)..(520): Ceres Seq. ID no. 12580850
MDGFKGKRTSRPIMPRKASGLVLHENMKKKDDKSVVPICSRIGCSSRVSSTKGDLIDHKAKATVSSFRSPLSGKETVGSSSRSMSGFGGTKKASKVIGRRQLSSLLDMDSSESSSVNEDSPTSERSLPRGKTKESTISVHSESSVSGEVVTEAGSSSRGTGRSIHQRPDLVSRDARVSNSEQNARASVNKNGLRDLRNKSGSDVLPSNSTPTRKSNIFRKKTSDGESSSSSRGNKTEGSVVGGKNISSPQGNGITMSEPRRNRNLPSVRDNSVVSSSTRRSTGYYGRTGRAGAVATLQAPRPPTRADLNPSRSAEASRSPLNSYSRPISSNGRLRSLMMPGSPSEAGLSRSLMNRDTFRRYNMNGVAEVLLALERIEQDEELTYEQLAVLETNLFLNGMSSFHDQHRDMRLDIDNMSYEELLALEEKMGTVSTALSEEALLKSLKSSIYRPNDESDDICLNKDDDVKCSICQEEYVDGDEVGTLPCQHKYHVSCAQQWLRMKNWCPICKTSAESQPHPFS

SEQ ID NO: 77855 - protein, 507 aa, Arabidopsis thaliana
  peptide (1)..(507): Ceres Seq. ID no. 12580851
MPRKASGLVLHENMKKKDDKSVVPICSRIGCSSRVSSTKGDLIDHKAKATVSSFRSPLSGKETVGSSSRSMSGFGGTKKASKVIGRRQLSSLLDMDSSESSSVNEDSPTSERSLPRGKTKESTISVHSESSVSGEVVTEAGSSSRGTGRSIHQRPDLVSRDARVSNSEQNARASVNKNGLRDLRNKSGSDVLPSNSTPTRKSNIFRKKTSDGESSSSSRGNKTEGSVVGGKNISSPQGNGITMSEPRRNRNLPSVRDNSVVSSSTRRSTGYYGRTGRAGAVATLQAPRPPTRADLNPSRSAEASRSPLNSYSRPISSNGRLRSLMMPGSPSEAGLSRSLMNRDTFRRYNMNGVAEVLLALERIEQDEELTYEQLAVLETNLFLNGMSSFHDQHRDMRLDIDNMSYEELLALEEKMGTVSTALSEEALLKSLKSSIYRPNDESDDICLNKDDDVKCSICQEEYVDGDEVGTLPCQHKYHVSCAQQWLRMKNWCPICKTSAESQPHPFS

SEQ ID NO: 77856 - protein, 494 aa, Arabidopsis thaliana
  peptide (1)..(494): Ceres Seq. ID no. 12580852
MKKKDDKSVVPICSRIGCSSRVSSTKGDLIDHKAKATVSSFRSPLSGKETVGSSSRSMSGFGGTKKASKVIGRRQLSSLLDMDSSESSSVNEDSPTSERSLPRGKTKESTISVHSESSVSGEVVTEAGSSSRGTGRSIHQRPDLVSRDARVSNSEQNARASVNKNGLRDLRNKSGSDVLPSNSTPTRKSNIFRKKTSDGESSSSSRGNKTEGSVVGGKNISSPQGNGITMSEPRRNRNLPSVRDNSVVSSSTRRSTGYYGRTGRAGAVATLQAPRPPTRADLNPSRSAEASRSPLNSYSRPISSNGRLRSLMMPGSPSEAGLSRSLMNRDTFRRYNMNGVAEVLLALERIEQDEELTYEQLAVLETNLFLNGMSSFHDQHRDMRLDIDNMSYEELLALEEKMGTVSTALSEEALLKSLKSSIYRPNDESDDICLNKDDDVKCSICQEEYVDGDEVGTLPCQHKYHVSCAQQWLRMKNWCPICKTSAESQPHPFS

SEQ ID NO: 77857 - DNA, 1378 bp, Arabidopsis thaliana
  misc_feature (1)..(1378): Ceres Seq. ID no. 12580853
  misc_feature (1)..(1378): Ortholog of  Ceres SEQ ID NO 15226612 as cited in SEQ ID NO 62700
atattctttctttggtccgttgcttattcaccagggaaaaatgttgcagaagatttctcagtctatttctttatgtaacggcgatcaatttaagccgttaatatacctcgccggagctccgacgaacttcatctcttcccctctctcaggcaagaagaaatcatcttctctgagaattaaaaggatacaacaacttcaaagtacattagaagatagaataaatccaccactagtatgtggaacagtatcgccacgtcttagtgttcctgatcatatactaaagcctctatatgttgagtctagcaaagttccagagatatcaagtgaattacagattcctgactctataggcattgtgaaaatgaagaaagcgtgtgagctcgcggctcgtgtattagactatgcaggaactttggttagagtaagttacttttgaatctctaactatgattgaatctctttgttgtaatggtttttttgttttgttgttgcagccgtttgttactacagatgaaattgataaagcagtgcatcagatggttattgagtttggtgcatatccttcacctcttggatatggtggatttcctaaaagtgtttgtacatcggttaatgaatgtatgtttcacgggattcccgattctcgtccgctacaggtttggagtagcatgagaattctcttttgtagtatatatgtaacaccccggtttcaggaatatggtggtgcatgcggagaggtttataatatatcactaatcaacaacttcttgtattcagaatggagatattataaacatcgatgttgcggtttacttggatgggtatcatggagatacgtcaaagactttcttatgtggagacgtcaatggaagccttaaacaacttgtcaaggtcacagaagaatgcttggagaaaggtatatcggtttgtaaagatggagcaagcttcaaacaaatcgggaagataatcagtgagcatgctgcaaagtatggctataatatggagcgattcatcggtcatggtgtaggaacggtattacactcggaacctcttatatatcttcatagtaactatgattatgaacttgaatatatgattgaaggtcaaacttttacgctcgaaccaattctcaccattggaacaacagagtttgtaacatggcctgacaaatggacaattgtgaccgcagatggtggtccggccgcacagtttgagcatacaattcttattaccaccactggtgcagaaattctcaccatatcatcatgaattatatcacaatgttacggaatttacattatgaaccatccatttctgttgtaaataaaagaaaatataaactgtttggttctgagcagttgatgttggtgtcgttggc

SEQ ID NO: 77858 - protein, 144 aa, Arabidopsis thaliana
  peptide (1)..(144): Ceres Seq. ID no. 12580854
YSFFGPLLIHQGKMLQKISQSISLCNGDQFKPLIYLAGAPTNFISSPLSGKKKSSSLRIKRIQQLQSTLEDRINPPLVCGTVSPRLSVPDHILKPLYVESSKVPEISSELQIPDSIGIVKMKKACELAARVLDYAGTLVRVSYF

SEQ ID NO: 77859 - protein, 143 aa, Arabidopsis thaliana
  peptide (1)..(143): Ceres Seq. ID no. 12580855
MIESLCCNGFFVLLLQPFVTTDEIDKAVHQMVIEFGAYPSPLGYGGFPKSVCTSVNECMFHGIPDSRPLQVWSSMRILFCSIYVTPRFQEYGGACGEVYNISLINNFLYSEWRYYKHRCCGLLGWVSWRYVKDFLMWRRQWKP

SEQ ID NO: 77860 - protein, 131 aa, Arabidopsis thaliana
  peptide (1)..(131): Ceres Seq. ID no. 12580856
MLQKISQSISLCNGDQFKPLIYLAGAPTNFISSPLSGKKKSSSLRIKRIQQLQSTLEDRINPPLVCGTVSPRLSVPDHILKPLYVESSKVPEISSELQIPDSIGIVKMKKACELAARVLDYAGTLVRVSYF

SEQ ID NO: 77861 - DNA, 1335 bp, Arabidopsis thaliana
  misc_feature (1)..(1335): Ceres Seq. ID no. 12580883
  misc_feature (1)..(1335): Ortholog of  Ceres SEQ ID NO 14302817 as cited in SEQ ID NO 58209
ggtgagaaactcgatggcgaggaggcgacgttcatcggcggcggagagtttgaaacggcggaacgacggatacgagtcactgtgtcaagtcgtacaacaagattcagatcggagactcatcaccattttcgtaatcttcttcattgtgattcccgccgtttcgattgctgtgtacaaagtcaaattcgctgatcgagtcatccaaacggaatcatcaatacgtcaaaagggaatcgttaaaactgatattaatttccaagaaatcctcactgaacattccaaggcttcagagaattcaactaggcactatgattatccagtgttagcttacattactccatggaactctaaaggctatgatatggcaaagatattcaactcaaagtttacacatttatcgccggtatggtacgacctgaagagccaagggtctggattggttttggaagggagacataatgctgataagggatggattcaagagcttcggtcaagaggcaatgcactgatattaccaagagttgttctagaagcaattcctggggagatgcttaacaaaaaaaaactaagagagaaagctatcagtcttattgtcacagagtgcaaggaaatggaatacaatggtatcgtgttagagtcttggtcaaggtgggcagcttatggcgttttgcatgaccctgatttgcggaaaatggcactgaaattcgtaaaacaacttggagacgctcttcactcaacgagctcaccaagaaacaaccagcaacatatgcagttcatgtatgtcgttggtccgcctcgttcagagaagctccaaataaccctggccccaatgctcctgtcaagtggatagatttaactctcaagctcctgcttgggtcatccaacaacatagactcaaacatagccaggaaggttcttcttggtatcaacttttacggcaacgattttgtaatctctggagattcaggaggtggaggagcaatcaccggaagggattacctcgcattactccagaaacacaagccaactttccgttgggataaagagagcggcgaacatcttttcatgtatagagatgataagaacatcaagcatgctgttttctatcctacattgatgtcaatccttctacggcttgagaatgctcgtctctggggaatcggcatttcaatctgggaaatcggacaaggtttagattatttctttgatctattgtaagttccatacattgcatcatgttatgttttcttaatgttatacttgatcctctttgttcacttaaatcaaatgctgaggaaccttttgtatctagtctagtctctgttctttgtgttc

SEQ ID NO: 77862 - protein, 282 aa, Arabidopsis thaliana
  peptide (1)..(282): Ceres Seq. ID no. 12580884
VRNSMARRRRSSAAESLKRRNDGYESLCQVVQQDSDRRLITIFVIFFIVIPAVSIAVYKVKFADRVIQTESSIRQKGIVKTDINFQEILTEHSKASENSTRHYDYPVLAYITPWNSKGYDMAKIFNSKFTHLSPVWYDLKSQGSGLVLEGRHNADKGWIQELRSRGNALILPRVVLEAIPGEMLNKKKLREKAISLIVTECKEMEYNGIVLESWSRWAAYGVLHDPDLRKMALKFVKQLGDALHSTSSPRNNQQHMQFMYVVGPPRSEKLQITLAPMLLSSG

SEQ ID NO: 77863 - protein, 278 aa, Arabidopsis thaliana
  peptide (1)..(278): Ceres Seq. ID no. 12580885
MARRRRSSAAESLKRRNDGYESLCQVVQQDSDRRLITIFVIFFIVIPAVSIAVYKVKFADRVIQTESSIRQKGIVKTDINFQEILTEHSKASENSTRHYDYPVLAYITPWNSKGYDMAKIFNSKFTHLSPVWYDLKSQGSGLVLEGRHNADKGWIQELRSRGNALILPRVVLEAIPGEMLNKKKLREKAISLIVTECKEMEYNGIVLESWSRWAAYGVLHDPDLRKMALKFVKQLGDALHSTSSPRNNQQHMQFMYVVGPPRSEKLQITLAPMLLSSG

SEQ ID NO: 77864 - protein, 162 aa, Arabidopsis thaliana
  peptide (1)..(162): Ceres Seq. ID no. 12580886
MAKIFNSKFTHLSPVWYDLKSQGSGLVLEGRHNADKGWIQELRSRGNALILPRVVLEAIPGEMLNKKKLREKAISLIVTECKEMEYNGIVLESWSRWAAYGVLHDPDLRKMALKFVKQLGDALHSTSSPRNNQQHMQFMYVVGPPRSEKLQITLAPMLLSSG

SEQ ID NO: 77865 - DNA, 1959 bp, Arabidopsis thaliana
  misc_feature (1)..(1959): Ceres Seq. ID no. 12580899
  misc_feature (1)..(1959): Ortholog of  Ceres SEQ ID NO 14314220 as cited in SEQ ID NO 57321
agaaaacacagtttaaaggaacataaaaagcaactcttttgagagatcacagaaaccctaatttgctaagaaccctaatctcaatttccatcttccaaagttcagattctgtatgtaaatgcatctgaagaattctactgtagcagaacggcggtacatcggaaaagaaaccgccggttatttaacttcttcctccgatttggatccgaaacctaagattaaacatcatcgtcctcttcaggtacctgagattttgactccagacattggtgctggtgctggattcagtgtgtataataatcaagttcaagctcagagtcgtcatcatctgacggttgaaatcccagattcatcgtctcacaatcttacatctaagagacctgtggtggttcaatcttctaatccgttcaacgttgacgatttccgaagacaacaacgcgcaagcttgggtccgatttcatcttattgtccgtcgtatcttttatcgtggttttcttcttctcttccatcgatccatcggccactaatcagaagcttctccgtcatgttcttagagtccgtttgatatgtttccatcttcgtttcttacttcttctctctgttcctcctctctacatcttcttcttgttgattagtttcagattcttccttctctttgtcttctcgattatcgctttttctttcgtcctttcgatctctctcaaattcgctcttcctcacttaccatcgattcgtttgattatcgctcggttactttctctcaagcttacccctaccagatcatcctcttcatctcaggagaacactaaacatgttatttggtcaattgggtctaagcctgtgactgagaagaagaccagctctggctcatgggttcagaagtacagctctggtgatgtatacgagggagagtttcatagggggaagtgttcaggaagtggagtttattactattctatgaagggtaaatacgaaggggattggattgatgggaagtatgatggatatggagttgaaacttgggctaaagggagtaggtaccgaggtcaatacaggcaagggatgagacatggaactggtatctacagattttatacaggggatgtatatgctggtgagtggtctaatggacagagccatggctgtggtgtgtatacctctgaggatggtagtcgttttgttggagagtttaaatggggtgtcaaacatggccttggtcattatcatttcagaaatggtgatacatatgctggggagtattttgcagacaggatgcatggttttggagtgtatcaatttggaaacgggcatcggtatgaaggagcctggcatgaggggagaaggcaaggacttggtatgtacacgttcaggaatggtgagacacaggcaggccattgggaagacggagttcttaactgtcctaccgagcagaccactcgccctgattcatcgttttccatcagtcattccaaggttgtcgacactgtccagcaagcaaggaaagcagccaagaaagcacgcgaagttgtgaaagttgaagagagagtgaacagagcagtgatggtcgcaaaccgagcagcaaatgctgctagagttgctgctacaaaggctgtccaaacccaaacatttcattgtagtagtggtgacgatcccttgtgagttcctgcggcaaagattttgacataatcgcagtcatgaccttacctcgaacttctacgaagacagaagagtgaaagagagatgtttagagacagcgtcagaattcgcaatctccgttgagattttcttgaaggtgaaccacttggaaccaatgtcgagatctcataagtaataagtaagagatctggctatggagcaagtattacaggtttactttttcttttctcccacttgttttatgagcaggctggtttaaaactgtacatatgttgttgaagagtaagcaatgtgtgttaacaa

SEQ ID NO: 77866 - protein, 233 aa, Arabidopsis thaliana
  peptide (1)..(233): Ceres Seq. ID no. 12580900
MKGKYEGDWIDGKYDGYGVETWAKGSRYRGQYRQGMRHGTGIYRFYTGDVYAGEWSNGQSHGCGVYTSEDGSRFVGEFKWGVKHGLGHYHFRNGDTYAGEYFADRMHGFGVYQFGNGHRYEGAWHEGRRQGLGMYTFRNGETQAGHWEDGVLNCPTEQTTRPDSSFSISHSKVVDTVQQARKAAKKAREVVKVEERVNRAVMVANRAANAARVAATKAVQTQTFHCSSGDDPL

SEQ ID NO: 77867 - protein, 198 aa, Arabidopsis thaliana
  peptide (1)..(198): Ceres Seq. ID no. 12580901
MRHGTGIYRFYTGDVYAGEWSNGQSHGCGVYTSEDGSRFVGEFKWGVKHGLGHYHFRNGDTYAGEYFADRMHGFGVYQFGNGHRYEGAWHEGRRQGLGMYTFRNGETQAGHWEDGVLNCPTEQTTRPDSSFSISHSKVVDTVQQARKAAKKAREVVKVEERVNRAVMVANRAANAARVAATKAVQTQTFHCSSGDDPL

SEQ ID NO: 77868 - protein, 153 aa, Arabidopsis thaliana
  peptide (1)..(153): Ceres Seq. ID no. 12580902
MELVSTDFIQGMYMLVSGLMDRAMAVVCIPLRMVVVLLESLNGVSNMALVIIISEMVIHMLGSILQTGCMVLECINLETGIGMKEPGMRGEGKDLVCTRSGMVRHRQAIGKTEFLTVLPSRPLALIHRFPSVIPRLSTLSSKQGKQPRKHAKL

SEQ ID NO: 77869 - DNA, 1553 bp, Arabidopsis thaliana
  misc_feature (1)..(1553): Ceres Seq. ID no. 12580903
  misc_feature (1)..(1553): Ortholog of  Ceres SEQ ID NO 13597446 as cited in SEQ ID NO 64098
  misc_feature (1)..(1553): Ortholog of  Ceres SEQ ID NO 15226246 as cited in SEQ ID NO 68314
ctcgactcctcccagcgcttcaatatctcccaagacccaaccatcggagggagggggcgagatgatgggattgagttccttggtctttaccgagtttcacagcctcggcttctctgaccttatagtttttgttgcgccactctggattgctgtggctgccggtgttttggttggttgggtttggaggcccaagtgggcttatctcgattctaaactcttgtccaattcacctaaattcctcaatcttcagcttcccacttccatcctcaaaacttcttctcaccacgttaaccccagcctttcttccaaagagaaaactgggtttgtaacggacgatgattttaggcatctatggaagttggttgaggtcaaagatggcggtccttgttggattcaaatgatggaccgatcaaccccaaccttctcatatcaagcttggaggcgagatcctgagaatgggcctccccagtaccgtagcagaactgtgtttgaggatgccactcccgagatggtcagggacttcttttgggatgatgagttccgttccaagtgggatgatatgcttttgtattcttctactctcgagcgttgcaaggacacgggcactatggttgtgcaatgggtgcgaaagttccccttcttttgtagcgacagggagtatattataggccgtcgtatatgggatgctggccgagtcttttactgcattactaagggagtacaatacccgtctgtacctagacaaaacaagccaaggcgagtcgacttgtactattcaagctggtgtatccgtgcagttgaatcaaaaagaggcgatggtgagatgacatcatgtgaggtactactatttcaccatgaagatatgggaataccgtgggagattgcaaagcttggggtgagacagggtatgtggggtgcagtcaagaagattgagccaggcctacgtgcatatcagagggctaaagcagcgggagcaggtttatccccgagtgccataatggctcacatcaacaccaaagtgagtgcagaggagttcatgaatgagaggggttcgatagcagaggttacaggagacaagccgacggggaaaaacataccaaagatactagtggtaggaggggcgattgcacttgcatgtacattggacaaagggctgttgacaaaggcggtgatattcggagtagccagaagatttgcaagaatgggaaaaaggatgtaggagagagtgtacatgtaagtagacagagaacgaatgagggaatgagagaggtgaaaagactatctctttagtcattgtcttgctggatgtatcaatcatgtaatagcaaagagaaaaagaagcgagagttattctttcagtgttgaatttctgagagcgcggaaagatagttccaccgcgctgtgctaatgaacatctccgtcttttcttgtctaagtttctgatggagtgaaggtaatagaaattataaaaacaaacacgagaggaagatattaaactgattttgcttcttctcaatcgttctaagttccatagagttctcacaattttcagt

SEQ ID NO: 77870 - protein, 405 aa, Arabidopsis thaliana
  peptide (1)..(405): Ceres Seq. ID no. 12580904
STPPSASISPKTQPSEGGGEMMGLSSLVFTEFHSLGFSDLIVFVAPLWIAVAAGVLVGWVWRPKWAYLDSKLLSNSPKFLNLQLPTSILKTSSHHVNPSLSSKEKTGFVTDDDFRHLWKLVEVKDGGPCWIQMMDRSTPTFSYQAWRRDPENGPPQYRSRTVFEDATPEMVRDFFWDDEFRSKWDDMLLYSSTLERCKDTGTMVVQWVRKFPFFCSDREYIIGRRIWDAGRVFYCITKGVQYPSVPRQNKPRRVDLYYSSWCIRAVESKRGDGEMTSCEVLLFHHEDMGIPWEIAKLGVRQGMWGAVKKIEPGLRAYQRAKAAGAGLSPSAIMAHINTKVSAEEFMNERGSIAEVTGDKPTGKNIPKILVVGGAIALACTLDKGLLTKAVIFGVARRFARMGKRM

SEQ ID NO: 77871 - protein, 385 aa, Arabidopsis thaliana
  peptide (1)..(385): Ceres Seq. ID no. 12580905
MMGLSSLVFTEFHSLGFSDLIVFVAPLWIAVAAGVLVGWVWRPKWAYLDSKLLSNSPKFLNLQLPTSILKTSSHHVNPSLSSKEKTGFVTDDDFRHLWKLVEVKDGGPCWIQMMDRSTPTFSYQAWRRDPENGPPQYRSRTVFEDATPEMVRDFFWDDEFRSKWDDMLLYSSTLERCKDTGTMVVQWVRKFPFFCSDREYIIGRRIWDAGRVFYCITKGVQYPSVPRQNKPRRVDLYYSSWCIRAVESKRGDGEMTSCEVLLFHHEDMGIPWEIAKLGVRQGMWGAVKKIEPGLRAYQRAKAAGAGLSPSAIMAHINTKVSAEEFMNERGSIAEVTGDKPTGKNIPKILVVGGAIALACTLDKGLLTKAVIFGVARRFARMGKRM

SEQ ID NO: 77872 - protein, 384 aa, Arabidopsis thaliana
  peptide (1)..(384): Ceres Seq. ID no. 12580906
MGLSSLVFTEFHSLGFSDLIVFVAPLWIAVAAGVLVGWVWRPKWAYLDSKLLSNSPKFLNLQLPTSILKTSSHHVNPSLSSKEKTGFVTDDDFRHLWKLVEVKDGGPCWIQMMDRSTPTFSYQAWRRDPENGPPQYRSRTVFEDATPEMVRDFFWDDEFRSKWDDMLLYSSTLERCKDTGTMVVQWVRKFPFFCSDREYIIGRRIWDAGRVFYCITKGVQYPSVPRQNKPRRVDLYYSSWCIRAVESKRGDGEMTSCEVLLFHHEDMGIPWEIAKLGVRQGMWGAVKKIEPGLRAYQRAKAAGAGLSPSAIMAHINTKVSAEEFMNERGSIAEVTGDKPTGKNIPKILVVGGAIALACTLDKGLLTKAVIFGVARRFARMGKRM

SEQ ID NO: 77873 - DNA, 1694 bp, Arabidopsis thaliana
  misc_feature (1)..(1694): Ceres Seq. ID no. 12580919
  misc_feature (1)..(1694): Ortholog of  Ceres SEQ ID NO 13504578 as cited in SEQ ID NO 59850
aaaacaataatccagccaccgtaggggtaattccgtaaatttgtaacagaaactccattcccgcggcgtatgcagagggcaatcccgtaaacttaacccatctccggtgatgaataatatcaattccttcacgccggagtgattttccacaaaaaataagatatgaaagcaaatcgcggcggcggagagcacggccaacacgaggctctaaagctttccagtttcttcttcatgccggagcggccacgtgattacctcgtgcttttcacacgtttctccgtcctcacgtgcctcatcgtctccgtatctcttgttctccgcgccacttttttatccccttccgctcgagactattccaccacctacggtctcaaattaaccgccgtacctcaaaaagccatagctctccctccgtccgcatccgtcggaccaaccaatatctcccatatcttcttctctatcgccggagcagctgagacatggatcgatcggagccagtacatctccttatggtggcgaaacacgacacgtggcttcgtctggctcgatgaaccggtgaaaatccctgaaaatcactccgatgtcagattctcgatcccgactcgagtttctgatccaggctggactcgattcaaattctccagctcaagagccgcggttcgaatcgctcgtataatctgggatagttatcggttaaatctaccaaatgtccggtggttcgtcatgggagatgacgataccgtcttcttcaccgagaatctcgtcaaggttctctcaaagtacgaccacgagcagatgtggtacatcggaggaaactcagagagcgtcgagcaagacgtgatgcacgcgtacgatatggcgtttggcggcggtggtttcgctctgagccgtccattagcggcgcgtttggccgccgcgatggatgattgtctccaacgttatttctatttttacggttctgatcagagaatcgcgtcttgcatcagcgagatcggcgttccgttcaccgaagaacgcggttttcatcagcttgacataagaggagatccatacgggtttctagcggcgcatccattggcaccgcttgtatcgttgcatcaccttgtttacttagacccaatgttccctaacaaaaacccgatcgagtcgttacagaccctaatgaaaccttataccttagacccgaatcgaatactccaacagattaattgtcatgatcgcaaacgtcaatggtctatatccatctcttggggatacaccattcagatatacacttacttcttgactgctacggagctgactacgccgttgcagaccttcaaaacttggcggtcttccagcgatggacctttcgtgtttaacactcggcccttgaaacctgacccctgtgagcgtccggtcacttatttcatggatggtgccgaggatgtacgggatagtgggacgaaaacttggtatagcataggggataagaactatggtcattgcggaaagattgagcatactcgattaactaaagtgaagaggatattggtgacttcaatgaagacggatcctgagtattggaacaaggcaccgaggagacagtgttgtgaggtgatggaaggaaaagtaggaaaaagaaaagagaaagaaatgttgttaaggattagaaaatgcagatctttggagaagatataaaaaaagcgttttaa

SEQ ID NO: 77874 - protein, 505 aa, Arabidopsis thaliana; identical to SEQ ID NO: 30704
  peptide (1)..(505): Ceres Seq. ID no. 12580920

SEQ ID NO: 77875 - protein, 482 aa, Arabidopsis thaliana; identical to SEQ ID NO: 30705
  peptide (1)..(482): Ceres Seq. ID no. 12580921

SEQ ID NO: 77876 - protein, 318 aa, Arabidopsis thaliana; identical to SEQ ID NO: 30706
  peptide (1)..(318): Ceres Seq. ID no. 12580922

SEQ ID NO: 77877 - DNA, 1196 bp, Arabidopsis thaliana
  misc_feature (1)..(1196): Ceres Seq. ID no. 12580938
  misc_feature (1)..(1196): Ortholog of  Ceres SEQ ID NO 13596891 as cited in SEQ ID NO 62868
  misc_feature (1)..(1196): Ortholog of  Ceres SEQ ID NO 12617235 as cited in SEQ ID NO 63990
  misc_feature (1)..(1196): Ortholog of  Ceres SEQ ID NO 13655371 as cited in SEQ ID NO 68945
gaagaagaagcagtaacaaatttggtgaagtcacgagaatcaacgatgacggcgacgaacaagcaagtcatattgaaagactacgtgagtggtttccctacggaatccgatttcgatttcactaccaccaccgtcgaacttagggttccggaaggtactaactctgttctagtgaagaatctctacttgtcatgcgatccttacatgagaattcgcatggggaaacctgatccttccactgctgctcttgctcaagcttacactcccggccagccaatccaagggtatggagtgtctagaataatagaatctggacatccagattacaagaaaggagatttactctggggtatagttgcatgggaggagtacagtgttatcactccaatgactcacgcgcatttcaagatccaacatactgatgttccattatcttattacactggacttttaggtatgcctggtatgactgcctatgctgggttttatgaagtttgttctccaaaggaaggagagacagtttatgtgtcagctgcatctggtgctgttggtcagcttgtgggacaacttgctaagatgatgggctgttatgttgttggaagcgctggaagtaaagagaaggttgatcttctgaagaccaagtttgggtttgatgatgcatttaactacaaggaagaatctgaccttactgctgccctaaaaaggtgtttccctaatggcattgacatatactttgagaatgtaggaggcaaaatgctagatgcagtgcttgtgaacatgaacatgcacgggcgtatcgctgtctgtggaatgatctcacagtacaatcttgagaaccaggaaggtgtacacaacctatccaacataatctacaaaagaatccgcattcaaggctttgtagtgtctgatttctacgacaaatactcaaagttcttggagtttgtgcttccccacattagagaagggaagataacgtacgtggaagatgtagctgatgggcttgagaaagctcccgaagctcttgtgggactcttccatggtaagaatgttgggaaacaagttgttgttgttgctcgtgagtgaaactatgtttgatacttgtactttatccaattagagtttgtgtgggtggtttttgttttatggataaagataatgtttgttatggtttcgaatcaaatagatacaaaattcgg

SEQ ID NO: 77878 - protein, 360 aa, Arabidopsis thaliana
  peptide (1)..(360): Ceres Seq. ID no. 12580939
EEEAVTNLVKSRESTMTATNKQVILKDYVSGFPTESDFDFTTTTVELRVPEGTNSVLVKNLYLSCDPYMRIRMGKPDPSTAALAQAYTPGQPIQGYGVSRIIESGHPDYKKGDLLWGIVAWEEYSVITPMTHAHFKIQHTDVPLSYYTGLLGMPGMTAYAGFYEVCSPKEGETVYVSAASGAVGQLVGQLAKMMGCYVVGSAGSKEKVDLLKTKFGFDDAFNYKEESDLTAALKRCFPNGIDIYFENVGGKMLDAVLVNMNMHGRIAVCGMISQYNLENQEGVHNLSNIIYKRIRIQGFVVSDFYDKYSKFLEFVLPHIREGKITYVEDVADGLEKAPEALVGLFHGKNVGKQVVVVARE

SEQ ID NO: 77879 - protein, 345 aa, Arabidopsis thaliana; identical to SEQ ID NO: 76666
  peptide (1)..(345): Ceres Seq. ID no. 12580940

SEQ ID NO: 77880 - protein, 292 aa, Arabidopsis thaliana; identical to SEQ ID NO: 76667
  peptide (1)..(292): Ceres Seq. ID no. 12580941

SEQ ID NO: 77881 - DNA, 2039 bp, Arabidopsis thaliana
  misc_feature (1)..(2039): Ceres Seq. ID no. 12580942
  misc_feature (1)..(2039): Ortholog of  Ceres SEQ ID NO 15225419 as cited in SEQ ID NO 0
aaatagtttgatttctgttgttgagtttatgcgatatcccaactggtgaaactgtgtttattggttcagacagagataaatggcttcaaagattattgctggcaagccggatgataccgagtatgaaatcattgaaggtgagtctgagagcgctttagcagcggggacaagcccttggatgaattcatcaacgttgaagcttcgacatcgaattggaagaggtcccttcggtgatgtttggctggctactcatcatcagtcaactgaggactatgatgagcatcatgaagtggccatcaaaatgctttatcccatcaaggaagatcaaagaagggttgtggtagataagtttgaagatctcttctctaaatgtcaaggactagagaatgtctgtctgctcaggggagtctctagtatcaatggaaagatatgtgtcgtcatgaaattctacgagggctctcttggtgacaagatggctcggcttaaaggaggaaagctttcactgccagatgttttgagatacggggttgatctggctacagggatcctggagttgcactcaaaagggtttctcattctcaatctcaagccctctaactttcttctcagtgataacgacaaggccatcctcggggatgttgggatcccttatctccttcttagtatccctttaccaagttctgatatgacagagagacttggaactccaaactatatggcaccagaacagtggcaaccggatgtcagaggtcccatgtcctttgagactgattcttggggatttggttgcagcattgttgaaatgctgactggtgtacaaccttggtctgggagatctgccgatgaaatatatgatttggtggtgagaaagcaagaaaagcttagtatccccagtagcataccgcctcctctcgagaacctacttcggggttgctttatgtatgatcttcgaagccgaccttcgatgactgacatcttactcgtcttaaagagcttgcagaactcggaggaggaacaggtcaggagaggcattgatagtagagaaatcaggaagagctcggctactcttggttatacagaatggtttctttcaaaggatcatctgcaagtgcgcgacaccgtgcgttcaagaaagcctgccaattcgtgtaagcatgagaacatggatgtgccagaaggaatggtggttggtttagaacgtgactccacagacccagatggatttgtgctagttaaagtccatggtgtacatgatccattaagggttcacgtatctgttcttgaacgggtaactaacggcttagcttctggagattgggtgcgtctgaaggtcaggaaagacaagaggcactctccggttggtgttctccattcaattgaccgtgagggaaatgtagctgttggatttattgggttgccaactctctggaaagggacatcatcgcagcttcagatggctaaagtatacagtgtgggtcaatttgtgaaactcaaagccaatgttgtcatcccgagattcaaatggatgcgtaaaggtagaggtatttgggcaactggcaggatctctcaggttctaccaaacggttgccttgaagtggacttccctggaatgttaccttttggagaggaacatggaagctatcttgcagatccggctgaagtagagattgtgaatttcaatacatgtcaaggagctgtggaaaaatatcaacatctggaggattttcattgggctgtgagacctttgcttattgctatgggtctattgacagcgatgaagttagggatctgtgtcaggaagaaaataggaaggtcaaaggatgggaaacaacgcgatggctcgactggacaaggtgactgtaagattccggatggtaagggctctgacaaatctaaatggcttgtgttcttttaggtctgctatgagacacagaccttgtctggtccatatattatactgttctagtcataataacgtttcatgtacataatgacgtttttcttttttgctctttaaaattaccaaaaagctttcacgc

SEQ ID NO: 77882 - protein, 611 aa, Arabidopsis thaliana; identical to SEQ ID NO: 45166
  peptide (1)..(611): Ceres Seq. ID no. 12580943

SEQ ID NO: 77883 - protein, 578 aa, Arabidopsis thaliana; identical to SEQ ID NO: 45167
  peptide (1)..(578): Ceres Seq. ID no. 12580944

SEQ ID NO: 77884 - protein, 537 aa, Arabidopsis thaliana; identical to SEQ ID NO: 45168
  peptide (1)..(537): Ceres Seq. ID no. 12580945

SEQ ID NO: 77885 - DNA, 2434 bp, Arabidopsis thaliana
  misc_feature (1)..(2434): Ceres Seq. ID no. 12580946
  misc_feature (1)..(2434): Ortholog of  Ceres SEQ ID NO 15169092 as cited in SEQ ID NO 60430
  misc_feature (1)..(2434): Ortholog of  Ceres SEQ ID NO 14303680 as cited in SEQ ID NO 66019
  misc_feature (1)..(2434): Ortholog of  Ceres SEQ ID NO 15224940 as cited in SEQ ID NO 0
cttcttctttctttagtgtttccaacttaaccctctctcttttcttgcaaacttttgctcggaattctatgctttgctgatctattgttttctctctgcaaaagtaatgagaagctttttgctatgttaagctttagatctgctattatttgttcctgtgagtcttttatatcttgtgtggtttctttgagaccttaagcagccattgtcacaagctgagctctctttctttctctctagttcaagattctaactttggagcaagtaagcaagtcagagagaggacaaattagctgaaatgctggagattgaaagccctacgagtctctgtttccgtacaaacactacttgtaatgctctgcttcgagagcttcagaaaatatgggttgatattggtgagagtgatgctgagaaagaccggatgctaatggaattggagaaggaatgtcttgaaatctacagaagaaaagtggacgaggctgctaattccaaggcacagcttcatcagtcattggtatcaattgaagctgaaattgcttctttactggctgctcttggagtgttcaacagccactcaccgatgaaagcaaaggaaggttcaaaatcattgaaagaaaaacttgctgctgtgaggccaatgcttgaggacttaagattgcaaaaagatgaaagaatgaagcaatttgtggatataaaagcacaaattgagaagatgagtggtgaaatatctggatacagtgaccaactcaacaaaacgatggtcggttctttggctcttgatgaacaagacctgactcttcggaagcttaacgagtatcaaacacatctccgctcgctccagaaagagaagtcggatcgtctgaacaaggttttggactatgtgaatgaggtgcacactctatgtggtgttcttggagtcgactttggtcaaactgttagtgaggttcatccgagcttacataggactgaccatgagcagtctacaaacatttctgatgatacattggatggtctacaccacatgattcataagctgaaaaccgaaaggagcgttcggtttcaaaagttaaaggatgtagcgggttcactttttgagctatggaatctaatggacacatctcaagaagaaagaacgaaatttgcaagtgtcagttatgttgtaagatcatcagaatctgatatcactgagccaaatatcctctctagtgaaacaattgaacaggtgtctgcagaagtagactgttttaataagctgaaagctagcagaatgaaggagcttgtgatgaaaagaaggactgagttagagaatctttgcagattggctcacattgaggctgacacaagcacatcgcttgagaaatcaactgctttgattgattctggattagtggacccttcagagcttcttacaaatattgaattgcatataaacaaaatcaaagaagaagcacatagccggaaagaaataatcgataggattgaccgctggttatctgcgtgcgaagaggaaaactggctagaagaatacaatcaggatgaaacccggtatagtgccggaagaggtggacatgtaaacctcaagcatgcagaacgcgcccggatcacagtaaacaagatcccatcaatggttgacaatctcatcaagaaaacacttctatgggaggacgaaacacggaaatcatttctatatgatggtgttcgattggtatccatacttgaagattataaattgacaaggaaacaacaggaagaggaaaagagacgataccgggatcaaaagaagatgcaggatctgttaataaagcggagggaatcaatttatggatcaaaaccgagtccaagaagaagcaacagtgtaagaaagaccaacggatacaatggggatgcatctgtgcctcctacgccccgcagaaactcagctggagcaacaaataacgacataatgaccaccccaagatcatactcaagccatcgccaaaacggatatttcaaggaagtaagaagactgtcaacagctcctttgaactttgtggcaataccaaaggaagactctgtctctacatacacttcggtttgcggctctgaaccagattcaccgttatataactaagtctcattaggcagcagttggttcaaccacaagaacttgagatggagtaggagttgggagttagatgaatgtaatcaaaaggaggagttactgatacagatcaagtaaccgtagacaattagtggtcgtatgtgtgtgactttgagttgacttgtgacggatacttcagggtaatagaagagtagaaaatggatgttatgttgagttgttaatttgttatagtagcttcaaaatatttcttttaatttcatcttttctttggtatgttgttcaatttgtgtggatgtgtcatgtgtgtatattttatacagattacttactctc

SEQ ID NO: 77886 - protein, 603 aa, Arabidopsis thaliana; identical to SEQ ID NO: 77257
  peptide (1)..(603): Ceres Seq. ID no. 12580947

SEQ ID NO: 77887 - protein, 562 aa, Arabidopsis thaliana; identical to SEQ ID NO: 77258
  peptide (1)..(562): Ceres Seq. ID no. 12580948

SEQ ID NO: 77888 - protein, 560 aa, Arabidopsis thaliana; identical to SEQ ID NO: 77259
  peptide (1)..(560): Ceres Seq. ID no. 12580949

SEQ ID NO: 77889 - DNA, 1099 bp, Arabidopsis thaliana
  misc_feature (1)..(1099): Ceres Seq. ID no. 12580954
  misc_feature (1)..(1099): Ortholog of  Ceres SEQ ID NO 13598387 as cited in SEQ ID NO 62757
  misc_feature (1)..(1099): Ortholog of  Ceres SEQ ID NO 13662984 as cited in SEQ ID NO 64419
aatccttttccttcttcttgttgccctagtacgagaggaccgggaaggacgcaatatataggatactagatagagagtgactgaaggagagaaaaacaaaaatggcgattgtttccgtctctaactcttttctcactttcaattctcccaatcagctccgatttagccgaagaagattctctgccatggcttcttcaactactggagtgagagtcgctgaaggagaaggcaatttgccaaaacttgtccttacttctcctcagaacagcgaggctgagatatatctcttcggaggctgcattacttcttggaaagttgcgagcggtaaagatcttctttttgtcagaccagatgctgtcttcaataagattaagcccattagcggagggattccacattgttttccacagtttggacctgggctaattcaacagcatgggtttggaaggaacatggactggtctgttgtcgattcccagaatgcagatgacaatgctgctgttactcttgagcttaaggatggtccctatagtcgagccatgtgggactttgctttccaggctctatacaaggtcattgttggcgcggactccctttccactgagctaaagattacaaacacagacgataaaccattttctttcagcactgcgttgcatacttacttccgtgcttcttctgcgggggcctccgtgagaggtctaaagggttgtaaaactctcaataaggatccagaccctaagaacccaatagagggtaaagaagacagggatgcagtcacttttcctggatttgtggataccgtctatcttgatgctcccaatgaattgcagtttgataatggcttgggtgataaaataatcatcaaaaacacaaattggtcggatgcggtcttgtggaacccgcatactcagatggaggcttgttacagagactttgtgtgcgtggaaaatgcaaagcttggggatgtcaagctagagccgggacagtcttggactgcaacacaacttctcagcatcagttgaaaacattgtactttaaacttataatgtccagtggatccattttcttaagcaataaaagttttatttcctctccc

SEQ ID NO: 77890 - protein, 307 aa, Arabidopsis thaliana; identical to SEQ ID NO: 23063
  peptide (1)..(307): Ceres Seq. ID no. 12580955

SEQ ID NO: 77891 - protein, 279 aa, Arabidopsis thaliana; identical to SEQ ID NO: 23064
  peptide (1)..(279): Ceres Seq. ID no. 12580956

SEQ ID NO: 77892 - protein, 190 aa, Arabidopsis thaliana; identical to SEQ ID NO: 23065
  peptide (1)..(190): Ceres Seq. ID no. 12580957

SEQ ID NO: 77893 - DNA, 2736 bp, Arabidopsis thaliana
  misc_feature (1)..(2736): Ceres Seq. ID no. 12580958
  misc_feature (1)..(2736): Ortholog of  Ceres SEQ ID NO 14316344 as cited in SEQ ID NO 60120
ggcggctgcggccatttttttcttctttctctcttctattctatctcttaaaccctagatttgatctgggtttttcctgattccatttagggtttctctatcttcttttttttcttcttcttcttctttctctttggtcgcatccccttttatccgagaaggatctatccaaatctttgtttgtcgaatctcctctcatggctaccgttgctcctcctgctgatcaagctacagatctgttgcagaaactatccttggactcgccagcaaaagcttcagagatccctgagcctaacaagaagactgccgtctaccagtatggaggcgttgatgttcatggtcaagttccttcttatgatcgatctttgacaccaatgcttcccagtgatgctgctgacccttcagtttgctatgttcctaatccttacaatccctaccagtattacaatgtatatgggagtggtcaagagtggactgactacccagcttacacaaatcctgagggtgttgacatgaattctggaatttatggagagaatgggactgttgtgtatcctcagggttatgggtatgcagcgtatccttactcgccagcaactagccctgctccacagcttggcggggaagggcagttgtacggtgctcagcagtatcagtatcctaactattttccaaacagtggaccgtatgcttcatctgtggctacacctacccagccggatctctctgcaaacaaacctgctggtgtgaagacactacctgcggatagcaataatgttgcttctgctgctggtatcacaaaaggaagtaatggatcagctccagtgaaaccaactaaccaggctacccttaacacctcaagtaatttgtatggtatgggtgctccaggaggaggtttggctgctggttatcaggaccccaggtatgcctatgaagggtattatgctcctgtgccgtggcacgatggctctaagtactctgatgtgcagagacctgtttctggtagtggagttgcatcctcctattctaagtctagcacagtaccttcatcgaggaatcaaaactaccgctcaaattctcactacacgagcgtgcaccagccttcatcagtgactggctatggtacagctcaggggtactacaacaggatgtatcagaacaagttatatggtcagtatggtagcacagggagatctgctttgggttatggttcatctgggtatgattcaagaacaaatggaagaggatgggcggccacagacaacaaatacagaagctggggcaggggtaacagttactattacggaaatgagaacaatgtagatggtttgaatgaacttaacaggggacctagagctaagggcacaaagaaccagaagggaaatctagatgatagcttagaggttaaggagcagactggagaatcaaatgtaactgaggttggggaggcggataacacatgtgttgttcctgacagagaacagtacaataaagaagatttcccagtggattatgcaaatgccatgttctttatcatcaagtcatacagtgaagatgatgtgcacaagagcattaaatataatgtttgggctagcacaccaaatggaaacaagaagcttgctgcagcataccaggaagctcaacagaaagctggcggctgtcccatctttctgtttttctcggtcaatgcaagtggacaatttgttggtcttgctgaaatgacaggaccagttgatttcaacacaaatgtggagtactggcagcaagataagtggaccggctctttccccctcaagtggcatattgtgaaggatgtgccaaacagtttactgaagcatattactttagagaacaatgagaacaaacctgttaccaacagcagagacacacaagaggttaagttggagcaaggtttgaagattgtgaaaattttcaaggagcatagcagcaagacttgcattttggatgatttctcattctacgaggttcgacagaagactatcttggagaagaaagccaagcaaacccagaaacaggtaagcgaggagaaggtaaccgatgaaaagaaggaatctgcaactgcagagtcagcgagcaaggaatctcctgcagctgttcaaacgtccagtgatgttaaggttgctgagaatgggtctgttgctaaaccagtcacaggcgatgtggtggcaaatggttgctaactaagaggatggtgtcgctcacggcatgggcataaaactgactagagatgaagatatgaacaatcccgtttaacgtttctcttgagaagaagattgccgtgagccttgaagcatggaaggagctttagtacctgagacggatccgtttctttgcccttagaagtttaaatcccagttatttttttttcaatcttttcttgttttcatttttccttttcttcaaaatcgcagtctcgttacaagtttatgttgggtttctttttcattttctgttgttcctaccctgtaaaaatgcgcataggacctactaaatcgtgggaagaattagagaaaaggagataaaagcagggtgggattttgttttttcatgtctgttggatttttaggcagagttttcttttcttttggtttcttgctttggtttcagacttgactctcttgagtcgtttagaatttgagatggtcttttgcctctctcgtcttgtttctgtcattctccaaagttatctgaatcaatccatgttttaagattttc

SEQ ID NO: 77894 - protein, 667 aa, Arabidopsis thaliana; identical to SEQ ID NO: 45803
  peptide (1)..(667): Ceres Seq. ID no. 12580959

SEQ ID NO: 77895 - protein, 608 aa, Arabidopsis thaliana; identical to SEQ ID NO: 45804
  peptide (1)..(608): Ceres Seq. ID no. 12580960

SEQ ID NO: 77896 - protein, 562 aa, Arabidopsis thaliana; identical to SEQ ID NO: 45805
  peptide (1)..(562): Ceres Seq. ID no. 12580961

SEQ ID NO: 77897 - DNA, 1757 bp, Arabidopsis thaliana
  misc_feature (1)..(1757): Ceres Seq. ID no. 12580962
  misc_feature (1)..(1757): Ortholog of  Ceres SEQ ID NO 13597407 as cited in SEQ ID NO 64106
gattctctctttctctctttctctcgctctctatctctctctcctctgtttgttatatcaattaatcaagaagatttcttgtgtttttttttttctgttaaagaagatttcttgggagaaaataaggtggattgaaggattagtctttaggaatggtggtggaggaggagaatagaagcatggaggaaggacttcttcagcatcaaaacgacagagatgatcgtcgtatcacagcttgtgtcatcctcagcacttttgtcgctgtttgtagtgccttcagctacggatgtgccgctggttatacttcaggcgctgagactgctatcatgaaggagttagacctttctatggcacaattttcagcgtttggctcctttctgaatgtgggaggtgcggtgggggccttgttcagcggtcaattggcagtcatcctcggcagaagacgaattctgattgatatatatcttttttttttgggtggttattaacgattaaagacgttgtgggcatgcgattttttctgcgtttttggctggctctccattgctttcgcaaagaatgtcttctggctggacttgggaagaatttccttgggcataggagtcggcttgattagctacgtggtcccagtctatattgcggaaatcactccaaaacatgttcgtggcgcatttactgcttcaaaccagcttcttcaaaacagtggagtttccctgatttatttttttgggactgtaattaattggcgggttatggccgttataggtgcaattccatgcatccttcaaacgatcggtatattttttataccggaatctccaagatggctggctaaaatccgtttaagtaaagaagtagaaagttctttgcatcgacttagagggaaagatactgatgtttcaggtgaagcagctgaaattcaggttatgacaaaaatgcttgaagaagattcaaagtctagtttctctgacatgtttcagaagaagtacagacgaactcttgtggttggaattggtttaatgttgatacaacaattatctggagctagcggtatcacatattattcaaatgccatatttagaaaagctggcttttcagagagacttggatcaatgatatttggtgtgttcgtgatcccaaaagctttggttggtctgattcttgtggatagatggggaagacgaccactcctattggcttctgctgttggaatgtccatcggatccttgcttattggagttagcttcacgttacagcaaatgaatgtgcttcctgaattgatcccaattttcgtcttcgtaaacattctggtctacttcggatgttttgcattcggtataggagggctaccttgggtcattatgtctgagatctttccgataaatataaaagtttcagcaggaacaattgtagcattaacatcatggactagtgggtggttcgtgagttacgctttcaactttatgtttgaatggagcgcacaaggaacattttacatatttgcggctgtcggaggaatgtcattcatttttatttggatgctcgtaccggaaaccaaaggacaatcattggaagaattacaagcttcgcttacggggacatcctaaatgcacatttatattgtaatatactattaattttgtttggtaaaaagataaaatttattttctgttgtcagtcgcattgcaaataataaatgtattttgtaacattatttgcatattgatattaataatattttacatttttttccttcg

SEQ ID NO: 77898 - protein, 284 aa, Arabidopsis thaliana
  peptide (1)..(284): Ceres Seq. ID no. 12580963
MAVIGAIPCILQTIGIFFIPESPRWLAKIRLSKEVESSLHRLRGKDTDVSGEAAEIQVMTKMLEEDSKSSFSDMFQKKYRRTLVVGIGLMLIQQLSGASGITYYSNAIFRKAGFSERLGSMIFGVFVIPKALVGLILVDRWGRRPLLLASAVGMSIGSLLIGVSFTLQQMNVLPELIPIFVFVNILVYFGCFAFGIGGLPWVIMSEIFPINIKVSAGTIVALTSWTSGWFVSYAFNFMFEWSAQGTFYIFAAVGGMSFIFIWMLVPETKGQSLEELQASLTGTS

SEQ ID NO: 77899 - protein, 226 aa, Arabidopsis thaliana
  peptide (1)..(226): Ceres Seq. ID no. 12580964
MTKMLEEDSKSSFSDMFQKKYRRTLVVGIGLMLIQQLSGASGITYYSNAIFRKAGFSERLGSMIFGVFVIPKALVGLILVDRWGRRPLLLASAVGMSIGSLLIGVSFTLQQMNVLPELIPIFVFVNILVYFGCFAFGIGGLPWVIMSEIFPINIKVSAGTIVALTSWTSGWFVSYAFNFMFEWSAQGTFYIFAAVGGMSFIFIWMLVPETKGQSLEELQASLTGTS

SEQ ID NO: 77900 - protein, 223 aa, Arabidopsis thaliana
  peptide (1)..(223): Ceres Seq. ID no. 12580965
MLEEDSKSSFSDMFQKKYRRTLVVGIGLMLIQQLSGASGITYYSNAIFRKAGFSERLGSMIFGVFVIPKALVGLILVDRWGRRPLLLASAVGMSIGSLLIGVSFTLQQMNVLPELIPIFVFVNILVYFGCFAFGIGGLPWVIMSEIFPINIKVSAGTIVALTSWTSGWFVSYAFNFMFEWSAQGTFYIFAAVGGMSFIFIWMLVPETKGQSLEELQASLTGTS

SEQ ID NO: 77901 - DNA, 1981 bp, Arabidopsis thaliana
  misc_feature (1)..(1981): Ceres Seq. ID no. 12580966
  misc_feature (1)..(1981): Ortholog of  Ceres SEQ ID NO 12465083 as cited in SEQ ID NO 68239
aaaacattttgttctaatcccgcaactgctaaaaacaaacccttttgtcaaaaatctctcctttcggtggtgacaggaaatggcagaagcagcatacacagtagcatcagacagtgaaaacactggagaggagaaatcatcatcatctccttcattacccgaaatcgcccttggtatcgacattggtacttctcaatgcagtatagctgtttggaacggttctcaagttcacatcttgaggaacacaagaaaccagaagctcatcaaatcatttgtcactttcaaagatgaagttcctgctggtggtgttagcaaccagctcgcacatgagcaggaaatgctaaccggagccgctatcttcaacatgaagcggctcgttggtcgtgtagacactgatcctgtggttcacgctagcaagaaccttcctttcttggttcaaactcttgatattggagttagaccgtttattgcagctttggtgaacaatgcttggagatcaacaacaccagaggaagttttagctatatttctggtggagttacgtctgatggctgaagctcagttgaaacgtcctgtgagaaatgtagtgcttacggttccggtttcgttctctaggttccagctcacacggttcgaaagagcttgcgctatggctggacttcatgttcttcgtttgatgccggaaccaactgctattgcgttgctttatgcgcaacagcagcagatgactacccatgataacatgggaagcggaagcgagaggcttgcggttatattcaatatgggagctggttactgcgatgttgcggttactgctactgctggtggtgtttcacagataaaagctttagctggtagccccattgggggtgaagacattttgcagaacacaattcgccatatcgctccacctaatgaagaagcttcggggttgcttcgtgtagcggcacaggacgcgattcacaggctaacggatcaagaaaatgtccaaattgaagtggatttgggaaatggtaacaagatatccaaggttcttgataggttagagtttgaggaagtgaaccagaaggtatttgaggaatgtgagagacttgttgtgcagtgcctgcgagatgcgagagtcaatggtggtgatatcgatgatttgataatggttggagggtgttcgtacatcccgaaagtaagaactattatcaagaacgtatgcaagaaggatgagatatacaaaggcgtgaatcctttagaagctgcggttagaggagctgctttggaaggtgcggtgacttcagggattcatgatccttttgggagcttagatctgttaaccatacaagccacacctcttgcagttggagtaagagctaacggaaacaaattcatacccgtgattccgcgtaacacaatggttccagcgcggaaagacctcttcttcacaacggttcaagacaaccagaaggaagctctgatcattatatacgaaggagaaggagagactgttgaagagaatcatcttcttggttatttcaagctcgttgggattccgccagcaccgaaaggtgttccagagatcaatgtgtgtatggacattgatgcatcaaatgctttacgggttttcgcagctgtgttgatgccgggatcttcgagtccagtggttcctgtgattgaggtgaggatgcctacggttgatgatggacatggttggtgtgctcaagctttgaatgtgaaatatggagctactcttgatttgattactcttcagagaaagatgtaagattaaaataaaatggtgttggtgatagattttagattagatgtaagatacgaggatgcttcgtatagaaaagagtttgtaaagtttgtgtgtgttttggggtttgtcgttgaagtggtaaacaatgtttatgtgtgtaatgaagtaataatgctttgcagattgtataataaactagagagtttggactttggacactttcttttgagc

SEQ ID NO: 77902 - protein, 563 aa, Arabidopsis thaliana
  peptide (1)..(563): Ceres Seq. ID no. 12580967
MAEAAYTVASDSENTGEEKSSSSPSLPEIALGIDIGTSQCSIAVWNGSQVHILRNTRNQKLIKSFVTFKDEVPAGGVSNQLAHEQEMLTGAAIFNMKRLVGRVDTDPVVHASKNLPFLVQTLDIGVRPFIAALVNNAWRSTTPEEVLAIFLVELRLMAEAQLKRPVRNVVLTVPVSFSRFQLTRFERACAMAGLHVLRLMPEPTAIALLYAQQQQMTTHDNMGSGSERLAVIFNMGAGYCDVAVTATAGGVSQIKALAGSPIGGEDILQNTIRHIAPPNEEASGLLRVAAQDAIHRLTDQENVQIEVDLGNGNKISKVLDRLEFEEVNQKVFEECERLVVQCLRDARVNGGDIDDLIMVGGCSYIPKVRTIIKNVCKKDEIYKGVNPLEAAVRGAALEGAVTSGIHDPFGSLDLLTIQATPLAVGVRANGNKFIPVIPRNTMVPARKDLFFTTVQDNQKEALIIIYEGEGETVEENHLLGYFKLVGIPPAPKGVPEINVCMDIDASNALRVFAAVLMPGSSSPVVPVIEVRMPTVDDGHGWCAQALNVKYGATLDLITLQRKM

SEQ ID NO: 77903 - protein, 477 aa, Arabidopsis thaliana
  peptide (1)..(477): Ceres Seq. ID no. 12580968
MLTGAAIFNMKRLVGRVDTDPVVHASKNLPFLVQTLDIGVRPFIAALVNNAWRSTTPEEVLAIFLVELRLMAEAQLKRPVRNVVLTVPVSFSRFQLTRFERACAMAGLHVLRLMPEPTAIALLYAQQQQMTTHDNMGSGSERLAVIFNMGAGYCDVAVTATAGGVSQIKALAGSPIGGEDILQNTIRHIAPPNEEASGLLRVAAQDAIHRLTDQENVQIEVDLGNGNKISKVLDRLEFEEVNQKVFEECERLVVQCLRDARVNGGDIDDLIMVGGCSYIPKVRTIIKNVCKKDEIYKGVNPLEAAVRGAALEGAVTSGIHDPFGSLDLLTIQATPLAVGVRANGNKFIPVIPRNTMVPARKDLFFTTVQDNQKEALIIIYEGEGETVEENHLLGYFKLVGIPPAPKGVPEINVCMDIDASNALRVFAAVLMPGSSSPVVPVIEVRMPTVDDGHGWCAQALNVKYGATLDLITLQRKM

SEQ ID NO: 77904 - protein, 468 aa, Arabidopsis thaliana
  peptide (1)..(468): Ceres Seq. ID no. 12580969
MKRLVGRVDTDPVVHASKNLPFLVQTLDIGVRPFIAALVNNAWRSTTPEEVLAIFLVELRLMAEAQLKRPVRNVVLTVPVSFSRFQLTRFERACAMAGLHVLRLMPEPTAIALLYAQQQQMTTHDNMGSGSERLAVIFNMGAGYCDVAVTATAGGVSQIKALAGSPIGGEDILQNTIRHIAPPNEEASGLLRVAAQDAIHRLTDQENVQIEVDLGNGNKISKVLDRLEFEEVNQKVFEECERLVVQCLRDARVNGGDIDDLIMVGGCSYIPKVRTIIKNVCKKDEIYKGVNPLEAAVRGAALEGAVTSGIHDPFGSLDLLTIQATPLAVGVRANGNKFIPVIPRNTMVPARKDLFFTTVQDNQKEALIIIYEGEGETVEENHLLGYFKLVGIPPAPKGVPEINVCMDIDASNALRVFAAVLMPGSSSPVVPVIEVRMPTVDDGHGWCAQALNVKYGATLDLITLQRKM

SEQ ID NO: 77905 - DNA, 1776 bp, Arabidopsis thaliana
  misc_feature (1)..(1776): Ceres Seq. ID no. 12580977
  misc_feature (1)..(1776): Ortholog of  Ceres SEQ ID NO 13654166 as cited in SEQ ID NO 68381
  misc_feature (1)..(1776): Ortholog of  Ceres SEQ ID NO 13599720 as cited in SEQ ID NO 0
acgtgaaaaccatatatcgcatcttctcattcttctttcattgccctcattaaaacacacatcatatcgcccccaaaattttgatttgattagagaggtgtgtggaaaatggcggaagagtatgccgagtgtttgctagagaagaacttccatgaggattgttctggctgcaaggttgatcagatgaagaggcttcgccgtggatttcccttctgggagctttttaccgtttggatcatcgttctttgcaccgctttgcccatttcttctctattcccctttctctactttatgattgatgatttcaacattgcaaagaaggaagaggacattgggttctacgctggatttgttggttgctctttcatgctcggacgagcttttacatctgtggcatggggacttgttgctgatcgttatggtagaaaacctgtaatcctcataggaaccgcttcagtggtcgtttttaatactctgtttggcctaagtttaaatttctggatggctattatcacaagattttgcctcggtagtttcaacggtttacttggtcctatcaaggcttacgcaatggaaatattccgtgatgagtatcaaggtttagcactctcagcagttagtacagcttggggaattggactcatcattggccctgctataggaggttttcttgctcagcctgcaaagcaatatccaagtttattctcacaggactccatttttggcaaatttcccttctttttgccatgcttagcaatatccgtttttgcattcttggtgaccatagtttcatcaaggattccggaaacattgcacaatcacaagtttaatgatgatgagtcttatgatgctctcaaagatttgtctgatgaccctgaatctaataaagtggcagagagaaatggaaaaagttctctcttgaacaactggccattaatttcatctatcatcgtatactgcgtcttttcactacatgatatggcttacacagagatcttttcattgtgggcaaacagtccgaggaaatatggaggtttgggatactccactgcagatgttggttctgttcttgccttttcaggctttggtctccttatctttcagctttcgctctactcttacgcagagaggcttttaggacctatcatagttacacgtatatctgggagcctagcaatggtcgtcttatcatgttacccactaatagcaaagttatctggtttagcccttaccgtgactgtaacttctgcatccgtagcaaagagtgttttaggtacttctgctataactggattattcatccttcaaaacaaggctgtgagacaagaccaaagaggagcagctaatggaattgccatgacagcgatgtctcttttcaaagccataggtccagcagcagcaggaatcattttttcgtggagcgagaaacgtcagggtgctgcttttctccctggcacccaaatggtattctttatactgaatgtggttttggcacttggagttgtattgacattcaaaccatttctagctgaaacacaacagtagaaaatgatgaagattttgatggtattcaaattacataatcagaatgtattgtataatatatagatttgtatgtctgatccaaagttagattagaaaaatggcaagagaaaaagaaaaaaaacttgttagaattgttgtcatcatcctttgtatgttataggacaagttgttcacaaaattttgtctaatgtgtcagaaccattgtaagaaggattcaataatgttttttgt

SEQ ID NO: 77906 - protein, 478 aa, Arabidopsis thaliana
  peptide (1)..(478): Ceres Seq. ID no. 12580978
MAEEYAECLLEKNFHEDCSGCKVDQMKRLRRGFPFWELFTVWIIVLCTALPISSLFPFLYFMIDDFNIAKKEEDIGFYAGFVGCSFMLGRAFTSVAWGLVADRYGRKPVILIGTASVVVFNTLFGLSLNFWMAIITRFCLGSFNGLLGPIKAYAMEIFRDEYQGLALSAVSTAWGIGLIIGPAIGGFLAQPAKQYPSLFSQDSIFGKFPFFLPCLAISVFAFLVTIVSSRIPETLHNHKFNDDESYDALKDLSDDPESNKVAERNGKSSLLNNWPLISSIIVYCVFSLHDMAYTEIFSLWANSPRKYGGLGYSTADVGSVLAFSGFGLLIFQLSLYSYAERLLGPIIVTRISGSLAMVVLSCYPLIAKLSGLALTVTVTSASVAKSVLGTSAITGLFILQNKAVRQDQRGAANGIAMTAMSLFKAIGPAAAGIIFSWSEKRQGAAFLPGTQMVFFILNVVLALGVVLTFKPFLAETQQ

SEQ ID NO: 77907 - protein, 453 aa, Arabidopsis thaliana
  peptide (1)..(453): Ceres Seq. ID no. 12580979
MKRLRRGFPFWELFTVWIIVLCTALPISSLFPFLYFMIDDFNIAKKEEDIGFYAGFVGCSFMLGRAFTSVAWGLVADRYGRKPVILIGTASVVVFNTLFGLSLNFWMAIITRFCLGSFNGLLGPIKAYAMEIFRDEYQGLALSAVSTAWGIGLIIGPAIGGFLAQPAKQYPSLFSQDSIFGKFPFFLPCLAISVFAFLVTIVSSRIPETLHNHKFNDDESYDALKDLSDDPESNKVAERNGKSSLLNNWPLISSIIVYCVFSLHDMAYTEIFSLWANSPRKYGGLGYSTADVGSVLAFSGFGLLIFQLSLYSYAERLLGPIIVTRISGSLAMVVLSCYPLIAKLSGLALTVTVTSASVAKSVLGTSAITGLFILQNKAVRQDQRGAANGIAMTAMSLFKAIGPAAAGIIFSWSEKRQGAAFLPGTQMVFFILNVVLALGVVLTFKPFLAETQQ

SEQ ID NO: 77908 - protein, 417 aa, Arabidopsis thaliana
  peptide (1)..(417): Ceres Seq. ID no. 12580980
MIDDFNIAKKEEDIGFYAGFVGCSFMLGRAFTSVAWGLVADRYGRKPVILIGTASVVVFNTLFGLSLNFWMAIITRFCLGSFNGLLGPIKAYAMEIFRDEYQGLALSAVSTAWGIGLIIGPAIGGFLAQPAKQYPSLFSQDSIFGKFPFFLPCLAISVFAFLVTIVSSRIPETLHNHKFNDDESYDALKDLSDDPESNKVAERNGKSSLLNNWPLISSIIVYCVFSLHDMAYTEIFSLWANSPRKYGGLGYSTADVGSVLAFSGFGLLIFQLSLYSYAERLLGPIIVTRISGSLAMVVLSCYPLIAKLSGLALTVTVTSASVAKSVLGTSAITGLFILQNKAVRQDQRGAANGIAMTAMSLFKAIGPAAAGIIFSWSEKRQGAAFLPGTQMVFFILNVVLALGVVLTFKPFLAETQQ

SEQ ID NO: 77909 - DNA, 1220 bp, Arabidopsis thaliana
  misc_feature (1)..(1220): Ceres Seq. ID no. 12580985
  misc_feature (1)..(1220): Ortholog of  Ceres SEQ ID NO 14311330 as cited in SEQ ID NO 54204
ctgcttcttcttcgccgtctctgtgcggcctcttcctcttcctcttctaaacaatgacggaggaagaggtagctatggaagtggaagctctagaagcagtttacagcgaagactgcgttatactggattcgtatcctcctcatcttcacctccatatcaagccccgtaccgccgaaatctcttctcagcagtttgtggaagccgttgttagattccaagcaggttctaagtatccagatgaaccacctcggattagtctgattgaatccaagggtcttgacgagcaaaggcaaaagcttttgattggcatagtgcaagagaaagcttctcaactatcatcttctttaatgcttgtagaactttgtgagtggagaggctcacaattatgaatcacccggagggagattgtccactgtgtttgtatccgttattccctgaggatggcgggagtaaacaaatgccatttatgaagctgatgtcttgttttcattgtttccactgtgagtgcatcattaggtggtggaattggcttcatgcacaggaagaggctgattcgaaatctggtgacactttacatatgcgtagaggatcaactgctcgagaaggtaattctggatcagcagataaaagcttgggaaactgtccagtgtgccgcaaaatttttcactcgagtgacattgaacatgttcttgacttagttggtgctcaatcatctctacaggactctagtttaataccaggcaaggaccaagacccgctgctccagtcagattcagagaacataagaagagagcggtttgagtctattctaaagacgcaggaagaaaagggtggtttggttcaaccgaagaaaaacatatcggtggtgcccggtatgtatcttcctccaccagctcatgcatcaacgtcacgaaacgaagaagaagaagctggtgaaagccaagaacaaggagaagaggaacccaaagaagctgaatcagagacaaactctagcagctccaccaacaggagaggtcgagggagatggagaggcagaggcagaagcagaggccggggacctactgtcaatgaaaggaagccgaattcgcaagatccaagaaaaccgacgagacaatgggtgcagagagccagagaaggagacaaataatttatgctaatcttgtgtgatacatcaaactcaaactcaaacacaagatatatatatattgtgagcatattac

SEQ ID NO: 77910 - protein, 253 aa, Arabidopsis thaliana; identical to SEQ ID NO: 48880
  peptide (1)..(253): Ceres Seq. ID no. 12580986

SEQ ID NO: 77911 - protein, 229 aa, Arabidopsis thaliana
  peptide (1)..(229): Ceres Seq. ID no. 12580987
MPFMKLMSCFHCFHCECIIRWWNWLHAQEEADSKSGDTLHMRRGSTAREGNSGSADKSLGNCPVCRKIFHSSDIEHVLDLVGAQSSLQDSSLIPGKDQDPLLQSDSENIRRERFESILKTQEEKGGLVQPKKNISVVPGMYLPPPAHASTSRNEEEEAGESQEQGEEEPKEAESETNSSSSTNRRGRGRWRGRGRSRGRGPTVNERKPNSQDPRKPTRQWVQRAREGDK

SEQ ID NO: 77912 - protein, 226 aa, Arabidopsis thaliana
  peptide (1)..(226): Ceres Seq. ID no. 12580988
MKLMSCFHCFHCECIIRWWNWLHAQEEADSKSGDTLHMRRGSTAREGNSGSADKSLGNCPVCRKIFHSSDIEHVLDLVGAQSSLQDSSLIPGKDQDPLLQSDSENIRRERFESILKTQEEKGGLVQPKKNISVVPGMYLPPPAHASTSRNEEEEAGESQEQGEEEPKEAESETNSSSSTNRRGRGRWRGRGRSRGRGPTVNERKPNSQDPRKPTRQWVQRAREGDK

SEQ ID NO: 77913 - DNA, 1877 bp, Arabidopsis thaliana
  misc_feature (1)..(1877): Ceres Seq. ID no. 12581011
  misc_feature (1)..(1877): Ortholog of  Ceres SEQ ID NO 13623250 as cited in SEQ ID NO 0
gtgatcgaaagataccaaactaaagagtttaactttcttcttccttcttctttacttcaacatctgatattttctctctctcttttattcagtctgaaacaatatttctcggtagattaagatctaaagctcgttgatctagattcttgtttctatttttgtgtgttttaggctttgttggttttaccaagtgttgtgattcagtttgttttgaggtctgagtctatgggggagattgtggttttaagtagtgatgatggtatggagactataaagaacagagtaaagtcatcggaagttgttcagtgggagaagtatttgcctaaaactgtacttagggttttgttagttgaatctgattactcaactcgtcaaatcatcactgcccttcttcgtaaatgctgttacaaagttgtagctgtttctgatggtttagctgcgtgggaggttctaaaggagaagtcacataacattgatcttatactaacagagctggatttgccatctatatctggttttgctctgcttgctttggtaatggagcatgaagcttgcaagaacattcctgtcataagtacgatgtgatgtcttctcaagattcgataaaaatggtgttgaagtgtatgctgagaggtgctgctgattatctaatcaaaccaatgaggaaaaacgagttgaaaaatctatggcaacatgtttggagaagactgactgtaaattttttatttccttttttgaggtttccttgtgttgaagtttgaaacttgaaagacttattgtcttttttggttatggatcagttgcgtgatgatcctactgctcatgctcaaagcttaccagcttcacagcacaaccttgaagatactgatgaaacttgtgaagattccagatatcattcagatcaaggaagtggtgctcaggctatcaattacaatggtcacaataagctgatggagaatggcaaatcagtggatgaaagagacgagtttaaggaaacttttgatgtgacaatggatttgattggtggaattgacaagcgtcctgatagtatttataaagacaagagtcgagatgagtgtgttggtcctgagcttggactttctctgaaaagatcttgctctgtaagttttgagaaccaagatgaaagcaagcatcaaaagcttagcctctctgatgcgtcggccttctcaagatttgaggaaagcaagtcagcagaaaaagccgtcgttgctttagaggagagtacttcaggtgagccaaagacaccaaccgaatcacatgaaaagttaagaaaagtaacatctgatcaaggaagcgccacaacgagcagcaaccaggagaatatcggatcatcaagcgtaagcttccgtaaccaagttcttcagtccacagtaacgaatcagaagcaagattcacccataccggtagaatcaaatcgcgagaaagcagctagcaaggaagtagaagctggttctcaaagcaccaatgaggggattgctggacaaagcagtagcacagagaaaccaaaggaagaagaaagtgcgaaacaacgttggagtagaagccagagagaagctgcattgatgaagttccggttgaagaggaaagatcgatgctttgacaaaaaggttcggtaccagagcaggaagaagctagcagaacaacgtcctcgagtgaaaggccagttcgtgcgaaccgtgaattcagacgcgtctacaaaatcatgaagagctctttcagtttttcctctgatttcttttgttgattttataacagaaacttatttagcttttgcaatctttagtgtgctttttttttttatgtatttgattggcttcttcttctcagctaatatgagatactggggcaacttttgt

SEQ ID NO: 77914 - protein, 311 aa, Arabidopsis thaliana
  peptide (1)..(311): Ceres Seq. ID no. 12581012
MDQLRDDPTAHAQSLPASQHNLEDTDETCEDSRYHSDQGSGAQAINYNGHNKLMENGKSVDERDEFKETFDVTMDLIGGIDKRPDSIYKDKSRDECVGPELGLSLKRSCSVSFENQDESKHQKLSLSDASAFSRFEESKSAEKAVVALEESTSGEPKTPTESHEKLRKVTSDQGSATTSSNQENIGSSSVSFRNQVLQSTVTNQKQDSPIPVESNREKAASKEVEAGSQSTNEGIAGQSSSTEKPKEEESAKQRWSRSQREAALMKFRLKRKDRCFDKKVRYQSRKKLAEQRPRVKGQFVRTVNSDASTKS

SEQ ID NO: 77915 - protein, 258 aa, Arabidopsis thaliana
  peptide (1)..(258): Ceres Seq. ID no. 12581013
MENGKSVDERDEFKETFDVTMDLIGGIDKRPDSIYKDKSRDECVGPELGLSLKRSCSVSFENQDESKHQKLSLSDASAFSRFEESKSAEKAVVALEESTSGEPKTPTESHEKLRKVTSDQGSATTSSNQENIGSSSVSFRNQVLQSTVTNQKQDSPIPVESNREKAASKEVEAGSQSTNEGIAGQSSSTEKPKEEESAKQRWSRSQREAALMKFRLKRKDRCFDKKVRYQSRKKLAEQRPRVKGQFVRTVNSDASTKS

SEQ ID NO: 77916 - protein, 238 aa, Arabidopsis thaliana
  peptide (1)..(238): Ceres Seq. ID no. 12581014
MDLIGGIDKRPDSIYKDKSRDECVGPELGLSLKRSCSVSFENQDESKHQKLSLSDASAFSRFEESKSAEKAVVALEESTSGEPKTPTESHEKLRKVTSDQGSATTSSNQENIGSSSVSFRNQVLQSTVTNQKQDSPIPVESNREKAASKEVEAGSQSTNEGIAGQSSSTEKPKEEESAKQRWSRSQREAALMKFRLKRKDRCFDKKVRYQSRKKLAEQRPRVKGQFVRTVNSDASTKS

SEQ ID NO: 77917 - DNA, 1212 bp, Arabidopsis thaliana
  misc_feature (1)..(1212): Ceres Seq. ID no. 12581019
  misc_feature (1)..(1212): Ortholog of  Ceres SEQ ID NO 14311044 as cited in SEQ ID NO 53643
aaagaggaaaatcccaacaataaagagcaaacgatcttacagctcataatatttcgttaattatcaaattgctaataggagaaaaaaatgggtcaagctttgggttgtattcaagttgatcagtcgaatgtagcaatcaaagagacttttgggaaattcgacgaagttcttgagccgggttgtcactgtttgccatggtgtttgggaagtcaagtcgctggtcacctttctttacgtgttcaacagctcgatgttcgctgcgagacaaagactaaggataatgtgtttgtcacggttgttgcttccattcaataccgtgccttagcggagagtgctcaagatgctttttacaagctcagcaacacgaggaatcagattcaagcttatgtctttgatgtgatccgagcaagtgtacctaagctggatctagactctacctttgagcaaaagaatgacattgcaaaaaccgttgagactgagctcgaaaaggctatgtcgcattacgggtatgagattgttcagacactgattgtggatatcgagcctgatgtgcacgtcaagagggcaatgaatgagatcaatgctgcttctagaatgagagaggcagcgagtgagaaagctgaggcagagaagattctgcagatcaagcgtgctgagggagaagctgaatcgaaatacctttcaggtatgggtatagcccgtcagagacaagccattgtggacggtctgagaaacagcgtcctcgccttctccgagtctgttccaggaacatcttccaaagacgtgatggatatggttcttgtgactcagtactttgacacattgaaggaaattggtgcttcttcgaagtcaaactcggtgttcataccgcacggtccaggcgctgttagggacattgcttcacagatcagggatggtcttcttcagggtaactctgctgctgagtagagaaatgtctcaaagtacaaaaaggctttttcagagttttagagttgtgttactacttgctactcagtttatcttttagcggttggctctatatgggttcttaaatttcttatcgtttctctcttctaggcttgtggacttgatccattttcttgttttatgggtttgtggatagagtttgggcttgaaaaatatttgtgttattttgggttttaatgtcgttaactcgttattaatgtttaaacagtggttaaagaatttgtt

SEQ ID NO: 77918 - protein, 286 aa, Arabidopsis thaliana; identical to SEQ ID NO: 23094
  peptide (1)..(286): Ceres Seq. ID no. 12581020

SEQ ID NO: 77919 - protein, 151 aa, Arabidopsis thaliana; identical to SEQ ID NO: 23095
  peptide (1)..(151): Ceres Seq. ID no. 12581021

SEQ ID NO: 77920 - DNA, 1881 bp, Arabidopsis thaliana
  misc_feature (1)..(1881): Ceres Seq. ID no. 12581026
  misc_feature (1)..(1881): Ortholog of  Ceres SEQ ID NO 15179918 as cited in SEQ ID NO 57077
gtttccgcacaaagcaaaaaaatctctgtaaaagcagaacgataatggagtcacaattatggaattggatcttacctcttttgatctcttctctcctcatctccttcgtcgctttctatggattcttcgtcaaaccgaagcggaacggtctccgtcacgatcggaaaactgtttctaccgtcacctccgacgtcggatctgttaatattaccggagatactgtcgctgatgtcattgttgttggagctggtgttgctggttctgctcttgcttatactcttggaaaggataaacgccgagttcatgtgattgaaagagatttatcggagcctgatcgtattgttggggagttgttacagcctgggggttacctcaagttactggagttgggaattgaagattgtgtggaagaaatagatgctcagcgtgtgtatggttatgcactttttaaaaatgggaaacgcattcgcttagcttatcctttggagaagtttcacgaagatgtatctggaaggagctttcacaatggacgttttattcaaagaatgcgggagaaagctgcttcacttcccaatgttcagctagagcaaggaacagttctttctcttctagaagagaatgggactatcaaaggtgtgagatataagaataaagcaggagaggaacaaaccgcatttgcagctttgactatagtttgtgatggttgtttctcaaacctgcgtcgctctttgtgcaatcctcaggtcgaggtgccttcttgttttgtcgggttggtcctagagaactgcaatctcccatatgcaaaccatggacatgtcgtcttagcagatccatcaccaattttgatgtatccaattagtagcacagaggtgcggtgcctagttgatgttcccggccagaaagtgccgtccattgcaaatggtgaaatgaaaaactatttgaagactgttgtggctcctcagatgcctcatgaggtctatgactctttcattgctgcggttgataaaggaaatattaagtccatgccaaacagaagcatgccagcttctccttatcctactccaggggctctgttaatgggagatgcatttaacatgcgtcatcctttgacgggtggaggaatgacggttgcattagctgacattgttgtcctgcgtaatctccttagaccgctgcgtgatcttagtgacggcgctagtctctgcaaatatcttgaatcattttacactctgcgaaagccagttgcagcaacaatcaacacccttgcgaatgctctttaccaagtgttctgttcatcagaaaatgaagcaagaaacgagatgagggaagcttgcttcgattatctgggcctcgggggtatgtgcacaagtggaccagtatctttgctttcgggtttgaaccctcgaccattaacacttgtctgccatttctttgcggttgcggtttatggagtcatacggttgttaatcccattcccttccccaaaacgaatctggcttggagccaaattaatctcgggagcatcggggataatatttccgataataaaagcggaaggagttaggcagatgtttttcccagcaactgtacctgcatactactacaaagctcctacagttggagaaaccaaatgttcatagttccaaataattctgtcacgagaaatgccatacaaaagaaaatgaaagttgtggattgcatttggtgtgtttgttgtgtaagtgttctttaaacgtataaaagtgatgatactgcgatgattatctctgttttttttatataggtatatgatggttgtatcttagttgcaaacggtataccattcttttacatatatccaagtcgctgcgttataaaatttggtttttaatccgctgtttc

SEQ ID NO: 77921 - protein, 545 aa, Arabidopsis thaliana
  peptide (1)..(545): Ceres Seq. ID no. 12581027
FRTKQKNLCKSRTIMESQLWNWILPLLISSLLISFVAFYGFFVKPKRNGLRHDRKTVSTVTSDVGSVNITGDTVADVIVVGAGVAGSALAYTLGKDKRRVHVIERDLSEPDRIVGELLQPGGYLKLLELGIEDCVEEIDAQRVYGYALFKNGKRIRLAYPLEKFHEDVSGRSFHNGRFIQRMREKAASLPNVQLEQGTVLSLLEENGTIKGVRYKNKAGEEQTAFAALTIVCDGCFSNLRRSLCNPQVEVPSCFVGLVLENCNLPYANHGHVVLADPSPILMYPISSTEVRCLVDVPGQKVPSIANGEMKNYLKTVVAPQMPHEVYDSFIAAVDKGNIKSMPNRSMPASPYPTPGALLMGDAFNMRHPLTGGGMTVALADIVVLRNLLRPLRDLSDGASLCKYLESFYTLRKPVAATINTLANALYQVFCSSENEARNEMREACFDYLGLGGMCTSGPVSLLSGLNPRPLTLVCHFFAVAVYGVIRLLIPFPSPKRIWLGAKLISGASGIIFPIIKAEGVRQMFFPATVPAYYYKAPTVGETKCS

SEQ ID NO: 77922 - protein, 531 aa, Arabidopsis thaliana; identical to SEQ ID NO: 27103
  peptide (1)..(531): Ceres Seq. ID no. 12581028

SEQ ID NO: 77923 - protein, 364 aa, Arabidopsis thaliana; identical to SEQ ID NO: 27104
  peptide (1)..(364): Ceres Seq. ID no. 12581029

SEQ ID NO: 77924 - DNA, 2549 bp, Arabidopsis thaliana
  misc_feature (1)..(2549): Ceres Seq. ID no. 12581050
  misc_feature (1)..(2549): Ortholog of  Ceres SEQ ID NO 12587870 as cited in SEQ ID NO 63523
gtttgctttacccttatttggccattcctgtcttccactttgtcatcttttccctttctgatgggatccgccgccgaactcacggagcccaccaccgggaccgagaagcttcaccagccaatagaagttgaagaagatgacgaacaaattgttgatttggagaggaaaacattccgtcatggaaagggacacgatactagtgtggacagtagtacaatcaccaacaccagctcgtcgtcgtcttctagcttttccggtgatggtggaacggaagagacccccgatttccacagcaacggcgatggagaacataccgatttagtaaatttggaggtcccggagctagaaactgaaatcgtatttcaccaagagcatgacgacgggaagaattgcatcgtcttcttcgacggagaacaaggttctgagtcagctggtgccatacctgatgctcatgaggagtctcaaactgctgacttgaatggggagcaaacgcagttagaacctgaaaacggttcaacttctgaggataacgaaagatctcgtgaaattgaagaagtactagatggtgatgtctctaaagacttggatgctgttgatccactcgctggtgaggtgatagaggaggaggtggacttcgaagatgttgaatatcatgatgtggagaatatgatggataagcaagagacacatgatttgtactgtccaaactgcgattcttgcatcaccaaaaaggttatcctcaaaagaaggaaacggaagatccgtcgtcatgagctgggagattcaaagcggcctcatttgactgagcctctttttcattcggaagacaatttgccatctctagatggcggtgaaaactctgcaaatgagtcatttgtcttcaagtgcttgtcatgctttaccatatttattcccaaaggggtgagttcaaagccgattcctccccgtcaaggagttgaggggttaaagattcagccaaaccctcaagtggaagctacaggcgattccaattggttcagttcaatatttggcctcaacaaaaaggaatcagctattcagcaaggtggggcatcatctagtgtcttggaagctaatccgccaccacgtgagtccattgtcccagtagttaatccatcgcgtggtaacctaagtcctatgcgaaaggatacgacaggctcagccgttgttcagcctgatgcagccacttcgattcaagttgcaaaatcaaacgatacaagcgaaattgtaaacaatggagctattgttggagacgggcaaaagtttctggctcctatggtggaggagcaaacacagcaaaagattgacaatgatgattctagtacagcagacgggaatcacacgtcagacaaaggacgtctctccccaattcaaccatctcatggcatgagtatactaaacacagtgactaacggacccgacggattgaaagtagaaactacaattcatgaagaaggtgcccctcttctgtttgaaggaaaagacactcctgacacaagcacggcagattttggtctgaccaaagtaacaggtgtgatggacacaggtgacagaggagttattaccggtccagcaaatcctgaaattgatatttcagcagggaatttgctggaagaagggtctctaagggaaccgttaatgagacgagttgttgttcaaggacgtaaactggaaatcttgaaaagcattgtctacggaggtctactagaagccatcacaagccttggtgttatttcatctgccgctggttctggtgcttcaatgttgaatattctggtcttggggcttgcaaacttgcttggcgggcttattcttattattcataatctccaagaacttagagaggaggaacccataagaacaacaacagaagataaccagactaacggtagagaagaagaagaaggtcggtataagcgactccttggacgaagagaaaatttcacacttcacgcaacagtcgcaatcttatccttcataatcaccggaatactccctcctgtagtctactatttctcattcagtgaaaaacacaacaaagactacaaagttgcttcagttttcggggcatctctattctgcatcgtcttgctcgccatagccaaagctcatgtgaggtacccgagaggcagctacctgaagagcattctgtactacgggtcaattgctgtatcggtgtcggggatttcttatgtggttggtaactttctggaacagttgcttgagaagcatggatggtctgatggatcggaaacacctgtgggacagatgatgctttcatcacttatgggaagaaaagccggctttggatactcatcatcgtactgaaactgaatcttgcctggagaatgatccaaactgaaacttgctgcttttctcttttactctgcttttgtgagctctcgttccaaatctttgttgtcggcaaatctttgttgtgacttgtgagtgtagaagaaagtcgtttccacttgtagaataaactaaaataagcataacataataatgatggaagatctgtgccttttaat

SEQ ID NO: 77925 - protein, 781 aa, Arabidopsis thaliana
  peptide (1)..(781): Ceres Seq. ID no. 12581051
VCFTLIWPFLSSTLSSFPFLMGSAAELTEPTTGTEKLHQPIEVEEDDEQIVDLERKTFRHGKGHDTSVDSSTITNTSSSSSSSFSGDGGTEETPDFHSNGDGEHTDLVNLEVPELETEIVFHQEHDDGKNCIVFFDGEQGSESAGAIPDAHEESQTADLNGEQTQLEPENGSTSEDNERSREIEEVLDGDVSKDLDAVDPLAGEVIEEEVDFEDVEYHDVENMMDKQETHDLYCPNCDSCITKKVILKRRKRKIRRHELGDSKRPHLTEPLFHSEDNLPSLDGGENSANESFVFKCLSCFTIFIPKGVSSKPIPPRQGVEGLKIQPNPQVEATGDSNWFSSIFGLNKKESAIQQGGASSSVLEANPPPRESIVPVVNPSRGNLSPMRKDTTGSAVVQPDAATSIQVAKSNDTSEIVNNGAIVGDGQKFLAPMVEEQTQQKIDNDDSSTADGNHTSDKGRLSPIQPSHGMSILNTVTNGPDGLKVETTIHEEGAPLLFEGKDTPDTSTADFGLTKVTGVMDTGDRGVITGPANPEIDISAGNLLEEGSLREPLMRRVVVQGRKLEILKSIVYGGLLEAITSLGVISSAAGSGASMLNILVLGLANLLGGLILIIHNLQELREEEPIRTTTEDNQTNGREEEEGRYKRLLGRRENFTLHATVAILSFIITGILPPVVYYFSFSEKHNKDYKVASVFGASLFCIVLLAIAKAHVRYPRGSYLKSILYYGSIAVSVSGISYVVGNFLEQLLEKHGWSDGSETPVGQMMLSSLMGRKAGFGYSSSY

SEQ ID NO: 77926 - protein, 761 aa, Arabidopsis thaliana
  peptide (1)..(761): Ceres Seq. ID no. 12581052
MGSAAELTEPTTGTEKLHQPIEVEEDDEQIVDLERKTFRHGKGHDTSVDSSTITNTSSSSSSSFSGDGGTEETPDFHSNGDGEHTDLVNLEVPELETEIVFHQEHDDGKNCIVFFDGEQGSESAGAIPDAHEESQTADLNGEQTQLEPENGSTSEDNERSREIEEVLDGDVSKDLDAVDPLAGEVIEEEVDFEDVEYHDVENMMDKQETHDLYCPNCDSCITKKVILKRRKRKIRRHELGDSKRPHLTEPLFHSEDNLPSLDGGENSANESFVFKCLSCFTIFIPKGVSSKPIPPRQGVEGLKIQPNPQVEATGDSNWFSSIFGLNKKESAIQQGGASSSVLEANPPPRESIVPVVNPSRGNLSPMRKDTTGSAVVQPDAATSIQVAKSNDTSEIVNNGAIVGDGQKFLAPMVEEQTQQKIDNDDSSTADGNHTSDKGRLSPIQPSHGMSILNTVTNGPDGLKVETTIHEEGAPLLFEGKDTPDTSTADFGLTKVTGVMDTGDRGVITGPANPEIDISAGNLLEEGSLREPLMRRVVVQGRKLEILKSIVYGGLLEAITSLGVISSAAGSGASMLNILVLGLANLLGGLILIIHNLQELREEEPIRTTTEDNQTNGREEEEGRYKRLLGRRENFTLHATVAILSFIITGILPPVVYYFSFSEKHNKDYKVASVFGASLFCIVLLAIAKAHVRYPRGSYLKSILYYGSIAVSVSGISYVVGNFLEQLLEKHGWSDGSETPVGQMMLSSLMGRKAGFGYSSSY

SEQ ID NO: 77927 - protein, 559 aa, Arabidopsis thaliana
  peptide (1)..(559): Ceres Seq. ID no. 12581053
MMDKQETHDLYCPNCDSCITKKVILKRRKRKIRRHELGDSKRPHLTEPLFHSEDNLPSLDGGENSANESFVFKCLSCFTIFIPKGVSSKPIPPRQGVEGLKIQPNPQVEATGDSNWFSSIFGLNKKESAIQQGGASSSVLEANPPPRESIVPVVNPSRGNLSPMRKDTTGSAVVQPDAATSIQVAKSNDTSEIVNNGAIVGDGQKFLAPMVEEQTQQKIDNDDSSTADGNHTSDKGRLSPIQPSHGMSILNTVTNGPDGLKVETTIHEEGAPLLFEGKDTPDTSTADFGLTKVTGVMDTGDRGVITGPANPEIDISAGNLLEEGSLREPLMRRVVVQGRKLEILKSIVYGGLLEAITSLGVISSAAGSGASMLNILVLGLANLLGGLILIIHNLQELREEEPIRTTTEDNQTNGREEEEGRYKRLLGRRENFTLHATVAILSFIITGILPPVVYYFSFSEKHNKDYKVASVFGASLFCIVLLAIAKAHVRYPRGSYLKSILYYGSIAVSVSGISYVVGNFLEQLLEKHGWSDGSETPVGQMMLSSLMGRKAGFGYSSSY

SEQ ID NO: 77928 - DNA, 1412 bp, Arabidopsis thaliana
  misc_feature (1)..(1412): Ceres Seq. ID no. 12581070
  misc_feature (1)..(1412): Ortholog of  Ceres SEQ ID NO 13595916 as cited in SEQ ID NO 69273
aaaatttctccatcaggttcaggtctcgatcgaattgatttgaaatgggttcgtttgggatgctttcgaggagaacgttgggcactgatatgcccgtcatggctcagattcggagtttgatggcggaattgacgaaccccatgtctctcgcccagggagtggtgcattggcagcctcctcaaaaggccttagagaaggtcaaggagcttgtctgggatcctatcattagttcttatggccccgatgaaggtcttcccgagttgagacaggctcttctcaaaaagctgcgtgaagaaaacaagctaaccaattcacaagtgatggttactgcaggtgccaatcaggcgtttgtgaaccttgttattacattatgtgatgctggtgattcggttgtcatgtttgagccatactacttcaactcctacatggcctttcagatgacaggagtcaccaacataattgttggtcctggccagtcagacactctctatcctgacgctgactggttagagaggacactgtctgagtctaaaccgactccgaaagttgtaactgttgtgaatcctggtaacccaagtggcacctatgtccctgaaccgctgcttaagaggattgctcaaatatgcaaagatgcagggtgctggctgattgtagataacacatacgagtatttcatgtatgacggtttaaaacattgttgcgttgagggagaccacattgttaatgtcttctctttctctaaaacctatggcatgatgggttggaggcttggatatatagcttactcagagagattagatgggtttgcaacagagcttgtgaaaattcaggacaacatcccaatctgtgctgccataatctcgcagcgactggctgtatacgcattagaggaaggttctgggtggataacggaacgggtaaagagtctagtgaagaacagggatattgtgaaagaggcgcttgagccgctggggaaggagaacgttaagggaggagaaggagcgatatacctgtgggcaaaactgccagagggacacagagatgatttcaaggtggtgcggtggctggctcaccgccatggtgtggtggtgatcccggggtgtgcaagtggtagccccgggtatctccgggtttcctttggagggttgcaggaggttgaaatgagagctgcagcggcgaggctgaggaaaggaatagaggagctgcttcaccatggaatggtggagtgagacgttgtttaaagaagggtcaaaagatggttactttgcgtttggttgaagctatatagttgttttaaaaagaaataaaagagtgtttgtttattcaataatcaatatagctgattcttctttacaaagtcattgtatttgggatgttgttaccaatggttgaatccttaacccctttggtgt

SEQ ID NO: 77929 - protein, 394 aa, Arabidopsis thaliana; identical to SEQ ID NO: 75305
  peptide (1)..(394): Ceres Seq. ID no. 12581071

SEQ ID NO: 77930 - protein, 389 aa, Arabidopsis thaliana; identical to SEQ ID NO: 75306
  peptide (1)..(389): Ceres Seq. ID no. 12581072

SEQ ID NO: 77931 - protein, 379 aa, Arabidopsis thaliana; identical to SEQ ID NO: 75307
  peptide (1)..(379): Ceres Seq. ID no. 12581073

SEQ ID NO: 77932 - DNA, 1618 bp, Arabidopsis thaliana
  misc_feature (1)..(1618): Ceres Seq. ID no. 12581090
  misc_feature (1)..(1618): Ortholog of  Ceres SEQ ID NO 13597407 as cited in SEQ ID NO 64106
gcttcaaccccacaagtaaactctctctgattctctctttctctctttctctcgctctctatctctctctcctctgtttgttatatcaattaatcaagaagatttcttgtgtttttttttttctgttaaagaagatttcttgggagaaaataaggtggattgaaggattagtctttaggaatggtggtggaggaggagaatagaagcatggaggaaggacttcttcagcatcaaaacgacagagatgatcgtcgtatcacagcttgtgtcatcctcagcacttttgtcgctgtttgtagtgccttcagctacggatgtgccgctggttatacttcaggcgctgagactgctatcatgaaggagttagacctttctatggcacaattttcagcgtttggctcctttctgaatgtgggaggtgcggtgggggccttgttcagcggtcaattggcagtcatcctcggcagaagacgaacgttgtgggcatgcgattttttctgcgtttttggctggctctccattgctttcgcaaagaatgtcttctggctggacttgggaagaatttccttgggcataggagtcggcttgattagctacgtggtcccagtctatattgcggaaatcactccaaaacatgttcgtggcgcatttactgcttcaaaccagcttcttcaaaacagtggagtttccctgatttatttttttgggactgtaattaattggcgggttatggccgttataggtgcaattccatgcatccttcaaacgatcggtatattttttataccggaatctccaagatggctggctaaaatccgtttaagtaaagaagtagaaagttctttgcatcgacttagagggaaagatactgatgtttcaggtgaagcagctgaaattcaggttatgacaaaaatgcttgaagaagattcaaagtctagtttctctgacatgtttcagaagaagtacagacgaactcttgtggttggaattggtttaatgttgatacaacaattatctggagctagcggtatcacatattattcaaatgccatatttagaaaagctggcttttcagagagacttggatcaatgatatttggtgtgttcgtgatcccaaaagctttggttggtctgattcttgtggatagatggggaagacgaccactcctattggcttctgctgttggaatgtccatcggatccttgcttattggagttagcttcacgttacagcaaatgaatgtgcttcctgaattgatcccaattttcgtcttcgtaaacattctggtctacttcggatgttttgcattcggtataggagggctaccttgggtcattatgtctgagatctttccgataaatataaaagtttcagcaggaacaattgtagcattaacatcatggactagtgggtggttcgtgagttacgctttcaactttatgtttgaatggagcgcacaaggtctttattttctctattacttttttattaatttggataaaacaatttaccaaaaaaagttaagagttatctttataaaaatacacaaatcaaacataaagttatttaaaaatcgtgttcgaattttgacatttgtatcaaacagttttagatgtg

SEQ ID NO: 77933 - protein, 479 aa, Arabidopsis thaliana
  peptide (1)..(479): Ceres Seq. ID no. 12581091
MVVEEENRSMEEGLLQHQNDRDDRRITACVILSTFVAVCSAFSYGCAAGYTSGAETAIMKELDLSMAQFSAFGSFLNVGGAVGALFSGQLAVILGRRRTLWACDFFCVFGWLSIAFAKNVFWLDLGRISLGIGVGLISYVVPVYIAEITPKHVRGAFTASNQLLQNSGVSLIYFFGTVINWRVMAVIGAIPCILQTIGIFFIPESPRWLAKIRLSKEVESSLHRLRGKDTDVSGEAAEIQVMTKMLEEDSKSSFSDMFQKKYRRTLVVGIGLMLIQQLSGASGITYYSNAIFRKAGFSERLGSMIFGVFVIPKALVGLILVDRWGRRPLLLASAVGMSIGSLLIGVSFTLQQMNVLPELIPIFVFVNILVYFGCFAFGIGGLPWVIMSEIFPINIKVSAGTIVALTSWTSGWFVSYAFNFMFEWSAQGLYFLYYFFINLDKTIYQKKLRVIFIKIHKSNIKLFKNRVRILTFVSNSFRC

SEQ ID NO: 77934 - protein, 470 aa, Arabidopsis thaliana
  peptide (1)..(470): Ceres Seq. ID no. 12581092
MEEGLLQHQNDRDDRRITACVILSTFVAVCSAFSYGCAAGYTSGAETAIMKELDLSMAQFSAFGSFLNVGGAVGALFSGQLAVILGRRRTLWACDFFCVFGWLSIAFAKNVFWLDLGRISLGIGVGLISYVVPVYIAEITPKHVRGAFTASNQLLQNSGVSLIYFFGTVINWRVMAVIGAIPCILQTIGIFFIPESPRWLAKIRLSKEVESSLHRLRGKDTDVSGEAAEIQVMTKMLEEDSKSSFSDMFQKKYRRTLVVGIGLMLIQQLSGASGITYYSNAIFRKAGFSERLGSMIFGVFVIPKALVGLILVDRWGRRPLLLASAVGMSIGSLLIGVSFTLQQMNVLPELIPIFVFVNILVYFGCFAFGIGGLPWVIMSEIFPINIKVSAGTIVALTSWTSGWFVSYAFNFMFEWSAQGLYFLYYFFINLDKTIYQKKLRVIFIKIHKSNIKLFKNRVRILTFVSNSFRC

SEQ ID NO: 77935 - protein, 421 aa, Arabidopsis thaliana
  peptide (1)..(421): Ceres Seq. ID no. 12581093
MKELDLSMAQFSAFGSFLNVGGAVGALFSGQLAVILGRRRTLWACDFFCVFGWLSIAFAKNVFWLDLGRISLGIGVGLISYVVPVYIAEITPKHVRGAFTASNQLLQNSGVSLIYFFGTVINWRVMAVIGAIPCILQTIGIFFIPESPRWLAKIRLSKEVESSLHRLRGKDTDVSGEAAEIQVMTKMLEEDSKSSFSDMFQKKYRRTLVVGIGLMLIQQLSGASGITYYSNAIFRKAGFSERLGSMIFGVFVIPKALVGLILVDRWGRRPLLLASAVGMSIGSLLIGVSFTLQQMNVLPELIPIFVFVNILVYFGCFAFGIGGLPWVIMSEIFPINIKVSAGTIVALTSWTSGWFVSYAFNFMFEWSAQGLYFLYYFFINLDKTIYQKKLRVIFIKIHKSNIKLFKNRVRILTFVSNSFRC

SEQ ID NO: 77936 - DNA, 1756 bp, Arabidopsis thaliana
  misc_feature (1)..(1756): Ceres Seq. ID no. 12581094
  misc_feature (1)..(1756): Ortholog of  Ceres SEQ ID NO 13581563 as cited in SEQ ID NO 58942
  misc_feature (1)..(1756): Ortholog of  Ceres SEQ ID NO 13658707 as cited in SEQ ID NO 66286
  misc_feature (1)..(1756): Ortholog of  Ceres SEQ ID NO 13654528 as cited in SEQ ID NO 68080
tctctctgagtgtctggttacatttggcgcgaaaagttcttcactttatagcttttttatctctttaattatccgacagcttcgttacaaataaagatgtcagtggtaacaatcttgatactggcattaaccagtgttattcccatttacgcaaacgttcacggcgccgggaaaatatgcgacgaacttggccggcgatcattgagtacaagaccacacagtgtctccattacagattttggagctgttggagatggcaaaacgctcaacactcttgcgtttcaaaacgccgttttctatcttatgtctttcgccgacaaaggtggggcccagctctatgttccgccgggacattggctcaccgggagttttagcctcaccagccacctcactctctttctcgaaaacggcgccgttatagtcgcttctcaggatccatcgcattgggaagtggttgatcctttaccttcatacggaaggggaattgatttgcctgggaagcgatacaagagtttgatcaacggtaacaagctacatgatgttgttgtaacaggtgataatggaactatagatggtcaaggcttggtttggtgggatcggtttacttctcattccttaaagtataaccgtcctcacctcatcgagtttctttcttctgaaaatgtaattgtctccaatcttacgttcttgaatgctcctgcttattcaatctattcaatctactctagccatgtatatattcataagatattggcccattcttctcctaaatctccttatacaatcggtattgtaccagattcttctgattacgtctgcatccaaaactctaccattaacgtggggtatgacgcgatttccctcaaaagcggttgggatgaatatggaattgcctattctcgtcccactgaaaatgttcatataagaaatgtgtaccttcgaggagcttctggttcctctatctcctttggcagtgaaatgtctggtggaatatctgatgtcgtggttgataacgctcatatacactactcgttaaccggcattgcctttagaaccacaaaaggcagaggtggttatatcaaagagatcgatatttcaaacatcgatatgttgagaataggtactgccattgttgctaatggtagctttggatctcaccctgatgataaatatgatgtgaatgctctcccacttgtgagtcacatcagattaagcaacatttctggagagaacattggcattgcggggaaattgtttgggatcaaagaatctccatttagctcagtgactttgtcgaatgtttctttgtcgatgagctcaggttcttctgtttcttggcaatgctcctacgtttacgggtcctcggagtcagtcattcctgaaccgtgtcccgagctgaagagagatgctgatgcttacggtagagctgcagtctagtgaaacagactgcaaaagaaaaaagaaaaaaaaagcaagaaacatttcttgggattctttgataggattcaattcatcaatcatttcatattttgtggagttagagaaggtcagattctttcctcaagtaaaccacattgtctttagatcatacatgttcctttcggttattctggtttcctatttttatgttgtttgcatattctgagataagaaatctgtacaggttcatttcttcattcatgtgtaaacaaagaaattttgtttcagcagttttccacaagccattaataataaaaaggagagatagtttcatttt

SEQ ID NO: 77937 - protein, 446 aa, Arabidopsis thaliana
  peptide (1)..(446): Ceres Seq. ID no. 12581095
MSVVTILILALTSVIPIYANVHGAGKICDELGRRSLSTRPHSVSITDFGAVGDGKTLNTLAFQNAVFYLMSFADKGGAQLYVPPGHWLTGSFSLTSHLTLFLENGAVIVASQDPSHWEVVDPLPSYGRGIDLPGKRYKSLINGNKLHDVVVTGDNGTIDGQGLVWWDRFTSHSLKYNRPHLIEFLSSENVIVSNLTFLNAPAYSIYSIYSSHVYIHKILAHSSPKSPYTIGIVPDSSDYVCIQNSTINVGYDAISLKSGWDEYGIAYSRPTENVHIRNVYLRGASGSSISFGSEMSGGISDVVVDNAHIHYSLTGIAFRTTKGRGGYIKEIDISNIDMLRIGTAIVANGSFGSHPDDKYDVNALPLVSHIRLSNISGENIGIAGKLFGIKESPFSSVTLSNVSLSMSSGSSVSWQCSYVYGSSESVIPEPCPELKRDADAYGRAAV

SEQ ID NO: 77938 - protein, 377 aa, Arabidopsis thaliana; identical to SEQ ID NO: 48553
  peptide (1)..(377): Ceres Seq. ID no. 12581096

SEQ ID NO: 77939 - DNA, 1003 bp, Arabidopsis thaliana
  misc_feature (1)..(1003): Ceres Seq. ID no. 12581104
  misc_feature (1)..(1003): Ortholog of  Ceres SEQ ID NO 15170807 as cited in SEQ ID NO 52723
  misc_feature (1)..(1003): Ortholog of  Ceres SEQ ID NO 12611846 as cited in SEQ ID NO 59904
  misc_feature (1)..(1003): Ortholog of  Ceres SEQ ID NO 14303535 as cited in SEQ ID NO 68728
  misc_feature (1)..(1003): Ortholog of  Ceres SEQ ID NO 12635196 as cited in SEQ ID NO 0
  misc_feature (1)..(1003): Ortholog of  Ceres SEQ ID NO 15179463 as cited in SEQ ID NO 0
attcgtcttctccaattttctcgcgaagaaaactttcctactttgtttcaatccaaacgagtcaaaatgcttctcaagactgtttcttcatcttcttcttcagctctctcgctggtgaatttccatggcgtgaagaaggatgtgtctcctttgttaccttccatttcatcgaatcttcgagtttcttctggaaaatctggaaacttaactttctcttttcgcgcatctaaaagctcaaccaccgacgcgctaagcggcgttgtcttcgagccgtttaaggaagtaaaaaaggagctcgatctcgtccctaccagctctcatctctcactcgctcgacaaaagtactcagacgagtgcgaagccgccattaacgagcagatcaatgtggaatacaatgtctcgtatgtgtatcacgctatgtatgcttactttgatcgggataacatcgcgctcaaaggtcttgccaagttctttaaggaatcaagtttggaagaaagagagcatgctgagaagttaatggagtatcagaacaaacgtggtgggagggttaagttacagtccattgtaatgcctctttcagagtttgaacatgttgacaaaggagatgctctttatggcatggagcttgctctgtcactggagaaactagttaatgagaagctcttaaaccttcacagtgttgcttcgaagaacaatgatgtccacttggcagattttattgagagcgagtttctgacagagcaggtggaagcaatcaagttgatctcagaatatgtggctcaactgcgacgagttggcaaaggacacggaacatggcatttcaatcagatgcttctggaagggtaagcagcttcgagggactcttgtgtctactgtgtttctatatgtgtctactttatgtttagttctttagcttttacgattttgtgaggtagtagacttctttttctgtaagagacaaaagacatgatcacataactttatattctggtataaggttcat

SEQ ID NO: 77940 - protein, 281 aa, Arabidopsis thaliana
  peptide (1)..(281): Ceres Seq. ID no. 12581105
IRLLQFSREENFPTLFQSKRVKMLLKTVSSSSSSALSLVNFHGVKKDVSPLLPSISSNLRVSSGKSGNLTFSFRASKSSTTDALSGVVFEPFKEVKKELDLVPTSSHLSLARQKYSDECEAAINEQINVEYNVSYVYHAMYAYFDRDNIALKGLAKFFKESSLEEREHAEKLMEYQNKRGGRVKLQSIVMPLSEFEHVDKGDALYGMELALSLEKLVNEKLLNLHSVASKNNDVHLADFIESEFLTEQVEAIKLISEYVAQLRRVGKGHGTWHFNQMLLEG

SEQ ID NO: 77941 - protein, 259 aa, Arabidopsis thaliana
  peptide (1)..(259): Ceres Seq. ID no. 12581106
MLLKTVSSSSSSALSLVNFHGVKKDVSPLLPSISSNLRVSSGKSGNLTFSFRASKSSTTDALSGVVFEPFKEVKKELDLVPTSSHLSLARQKYSDECEAAINEQINVEYNVSYVYHAMYAYFDRDNIALKGLAKFFKESSLEEREHAEKLMEYQNKRGGRVKLQSIVMPLSEFEHVDKGDALYGMELALSLEKLVNEKLLNLHSVASKNNDVHLADFIESEFLTEQVEAIKLISEYVAQLRRVGKGHGTWHFNQMLLEG

SEQ ID NO: 77942 - protein, 142 aa, Arabidopsis thaliana
  peptide (1)..(142): Ceres Seq. ID no. 12581107
MYAYFDRDNIALKGLAKFFKESSLEEREHAEKLMEYQNKRGGRVKLQSIVMPLSEFEHVDKGDALYGMELALSLEKLVNEKLLNLHSVASKNNDVHLADFIESEFLTEQVEAIKLISEYVAQLRRVGKGHGTWHFNQMLLEG

SEQ ID NO: 77943 - DNA, 999 bp, Arabidopsis thaliana
  misc_feature (1)..(999): Ceres Seq. ID no. 12581112
  misc_feature (1)..(999): Ortholog of  Ceres SEQ ID NO 15177965 as cited in SEQ ID NO 58545
gcggaaacttacgccggcggcacaaactttgtgtcttgctcaagatgattgcgtcgaattttatgtaaacaattggctctccgatgttgtcagccatggatgttatgattcactcttcaagctttctcctcccttgcgacgaaacttgtgggacgagatacgctctcgttgttcttaaccagaatttaccacgattcactcctcttctctgggaacatgcaaaacttcgtctctgtgctgatggaggcgctaatcgcatctacgacgaattacctctcttcttccctcacgaagacccttttgtcattcgaaacaggtataagcccgatgttatcaagggagatatggattctatacgccgtgacgtcctcgacttttatgtttactggggaactaaggttatagatgaatctcatgatcaagataccactgatcttgataaatgcatttcgtatatccgtcactctactttgaatcaggagagttccagaattcttgccactggagcactcgggggaagattcgatcatgaagccggtaatctcaacgtcttatatcgatatccagacacaaggatagtccttttatctgatgattgtctcatccaactccttccaaagactcatcgacatgaaatacatattcactcttctcttcaaggacctcactgtggacttatacccattggaactccatctgccaataccactacctcagggcttaaatgggatctcagcaacactgagatgagatttggtgggttgataagtacatcgaacttggttaaagaagagataatcacagtcgaatcggattcggatcttctctggactatttccatcaagaagacaggacttcctgtacaagaccataaaccttagtggcgccactctttagttttatacgctactattatattcatgatgcatcgaagaattacttcaacattattgtgttgatttgttttcactataccagcaaataacaatttattgcctt

SEQ ID NO: 77944 - protein, 265 aa, Arabidopsis thaliana
  peptide (1)..(265): Ceres Seq. ID no. 12581113
MLSAMDVMIHSSSFLLPCDETCGTRYALVVLNQNLPRFTPLLWEHAKLRLCADGGANRIYDELPLFFPHEDPFVIRNRYKPDVIKGDMDSIRRDVLDFYVYWGTKVIDESHDQDTTDLDKCISYIRHSTLNQESSRILATGALGGRFDHEAGNLNVLYRYPDTRIVLLSDDCLIQLLPKTHRHEIHIHSSLQGPHCGLIPIGTPSANTTTSGLKWDLSNTEMRFGGLISTSNLVKEEIITVESDSDLLWTISIKKTGLPVQDHKP

SEQ ID NO: 77945 - protein, 261 aa, Arabidopsis thaliana
  peptide (1)..(261): Ceres Seq. ID no. 12581114
MDVMIHSSSFLLPCDETCGTRYALVVLNQNLPRFTPLLWEHAKLRLCADGGANRIYDELPLFFPHEDPFVIRNRYKPDVIKGDMDSIRRDVLDFYVYWGTKVIDESHDQDTTDLDKCISYIRHSTLNQESSRILATGALGGRFDHEAGNLNVLYRYPDTRIVLLSDDCLIQLLPKTHRHEIHIHSSLQGPHCGLIPIGTPSANTTTSGLKWDLSNTEMRFGGLISTSNLVKEEIITVESDSDLLWTISIKKTGLPVQDHKP

SEQ ID NO: 77946 - protein, 258 aa, Arabidopsis thaliana
  peptide (1)..(258): Ceres Seq. ID no. 12581115
MIHSSSFLLPCDETCGTRYALVVLNQNLPRFTPLLWEHAKLRLCADGGANRIYDELPLFFPHEDPFVIRNRYKPDVIKGDMDSIRRDVLDFYVYWGTKVIDESHDQDTTDLDKCISYIRHSTLNQESSRILATGALGGRFDHEAGNLNVLYRYPDTRIVLLSDDCLIQLLPKTHRHEIHIHSSLQGPHCGLIPIGTPSANTTTSGLKWDLSNTEMRFGGLISTSNLVKEEIITVESDSDLLWTISIKKTGLPVQDHKP

SEQ ID NO: 77947 - DNA, 682 bp, Arabidopsis thaliana
  misc_feature (1)..(682): Ceres Seq. ID no. 12581182
  misc_feature (1)..(682): Ortholog of  Ceres SEQ ID NO 13655108 as cited in SEQ ID NO 62996
acaaaaccttacattgctttccatttaaaactctcttcttcttttttgttctctctctctcttcatggaagctcaacaccttcatgccaagcctcatgctgaaggagaatggtccacaggcttctgtgattgcttttctgactgcaaaaattgttgtatcacattctggtgtccatgtatcacctttggccaagtcgccgagattgtagatcgaggatccacatcgtgtggtactgctggagctctatacgcgttgatagccgtagtaactggttgtgcatgtatatactcatgtttctatcgtggaaagatgagagctcaatataatattaaaggagatgattgtactgattgccttaaacatttctgctgtgagctttgttctttgacccaacaataccgtgaactcaagcaccgcggttacgatatgagtcttggatgggcggggaacgtggagagacaacagaatcaaggaggtgtggccatgggtgctccggtcttccaaggcggcatgacccgctaagaattatttctttatgtaattcatttgtcttttatatgtagtaataaaacgaggtttaatcctctgtttgtgttgttaatatgcttgttgtgatttgaacaaaaaaaaatgcttgttgtgaaagtttagacatacagtatatgaatgtttcttcattgt

SEQ ID NO: 77948 - protein, 152 aa, Arabidopsis thaliana; identical to SEQ ID NO: 27254
  peptide (1)..(152): Ceres Seq. ID no. 12581183

SEQ ID NO: 77949 - DNA, 1773 bp, Arabidopsis thaliana
  misc_feature (1)..(1773): Ceres Seq. ID no. 12581184
  misc_feature (1)..(1773): Ortholog of  Ceres SEQ ID NO 14302935 as cited in SEQ ID NO 20442
acgagcaacgtcaatatctacgaaaagaatatttattttcttgaattcaagaaaaattctcgggatccgaactcaatatttgttctcttctcttctctctctctttgcccgtgattactgattactgtgttaattatttttattctgcgtacgttacgtaagagagatattgaggaatggctgcgaagaaggtttttggatcggcggaagcgagtaatttggtgacggagcttcgtcggagttttgatgatggtgtgacacgtggttatgaatggagagtgactcagcttaagaaactgatgattatttgtgataatcatgagcctgagatcgtcgcggctcttcgcgatgatcttggtaagcctgagcttgaatcttctgtttatgaggtatctctactgagaaactctatcaagttggctcttaagcagctaaagaactggatggctccggagaaggcaaagacttctctaacaacgtttcctgcatccgcggagattgtgtctgagcctcttggtgttgtgctagtgatctcggcttggaactatccttttctgttgtctattgatcctgttattggtgcaatttctgctgggaatgctgttgttttaaagccatcagaattggctccagcttcgtcagctctgctcactaagttactggaacagtatcttgatccttctgcggtgcgagttgtcgaaggagctgttaccgaaacaagtgctctgctagagcagaagtgggacaagatattctacacaggtagttcaaaaatcggacgtgtcataatggcggcagctgcgaagcatctcacaccggttgttctagagcttggaggaaaatctcctgtcgttgtagactcggataccgatttgaaagttaccgtcaggcggataatcgtaggcaaatggggttgtaacaacggacaggcgtgcgtttcgccggactatatcttgacgacaaaagaatatgctcctaaattgattgatgccatgaagcttgaattggagaaattttatgggaagaaccctatagagtcgaaagatatgtcacgtatcgtaaactcgaatcactttgatcgcttgtctaagttgttagacgagaaggaagtttctgacaaaattgtctatggtggtgaaaaggacagagaaaacttgaaaattgctccgacaatcttgctcgatgtaccattagattctctgatcatgagtgaagaaatatttggccctctccttccaatcctcacgcttaacaacttggaagagagctttgacgtgattcgttctcgacctaagccacttgcggcatacttgtttacacataacaagaagttgaaagagagattcgcagcgacagtctccgctggaggcatagtagtcaatgacatagctgttcatcttgcacttcacacattgccattcggaggagttggtgaaagtggaatgggtgcttaccatggtaaattctcatttgatgcttttagtcacaagaaggcggttctctacagaagccttttcggtgattcagccgtcaggtatccgccatactcgagaggaaagcttagattgttaaaagcccttgtcgacagcaatatattcgatttattcaaagtccttctcggtttagcttaaacggtaaaaagaccgaggacacttccctttgtaccttatttacttgttttatttttcaaacatggacttagttggttgatatgttttggtttggtgttgattctatgaatattgaagttgataaataaaagattttcggttg

SEQ ID NO: 77950 - protein, 484 aa, Arabidopsis thaliana
  peptide (1)..(484): Ceres Seq. ID no. 12581185
MAAKKVFGSAEASNLVTELRRSFDDGVTRGYEWRVTQLKKLMIICDNHEPEIVAALRDDLGKPELESSVYEVSLLRNSIKLALKQLKNWMAPEKAKTSLTTFPASAEIVSEPLGVVLVISAWNYPFLLSIDPVIGAISAGNAVVLKPSELAPASSALLTKLLEQYLDPSAVRVVEGAVTETSALLEQKWDKIFYTGSSKIGRVIMAAAAKHLTPVVLELGGKSPVVVDSDTDLKVTVRRIIVGKWGCNNGQACVSPDYILTTKEYAPKLIDAMKLELEKFYGKNPIESKDMSRIVNSNHFDRLSKLLDEKEVSDKIVYGGEKDRENLKIAPTILLDVPLDSLIMSEEIFGPLLPILTLNNLEESFDVIRSRPKPLAAYLFTHNKKLKERFAATVSAGGIVVNDIAVHLALHTLPFGGVGESGMGAYHGKFSFDAFSHKKAVLYRSLFGDSAVRYPPYSRGKLRLLKALVDSNIFDLFKVLLGLA

SEQ ID NO: 77951 - protein, 443 aa, Arabidopsis thaliana
  peptide (1)..(443): Ceres Seq. ID no. 12581186
MIICDNHEPEIVAALRDDLGKPELESSVYEVSLLRNSIKLALKQLKNWMAPEKAKTSLTTFPASAEIVSEPLGVVLVISAWNYPFLLSIDPVIGAISAGNAVVLKPSELAPASSALLTKLLEQYLDPSAVRVVEGAVTETSALLEQKWDKIFYTGSSKIGRVIMAAAAKHLTPVVLELGGKSPVVVDSDTDLKVTVRRIIVGKWGCNNGQACVSPDYILTTKEYAPKLIDAMKLELEKFYGKNPIESKDMSRIVNSNHFDRLSKLLDEKEVSDKIVYGGEKDRENLKIAPTILLDVPLDSLIMSEEIFGPLLPILTLNNLEESFDVIRSRPKPLAAYLFTHNKKLKERFAATVSAGGIVVNDIAVHLALHTLPFGGVGESGMGAYHGKFSFDAFSHKKAVLYRSLFGDSAVRYPPYSRGKLRLLKALVDSNIFDLFKVLLGLA

SEQ ID NO: 77952 - protein, 395 aa, Arabidopsis thaliana; identical to SEQ ID NO: 74729
  peptide (1)..(395): Ceres Seq. ID no. 12581187

SEQ ID NO: 77953 - DNA, 1839 bp, Arabidopsis thaliana
  misc_feature (1)..(1839): Ceres Seq. ID no. 12581193
  misc_feature (1)..(1839): Ortholog of  Ceres SEQ ID NO 15169511 as cited in SEQ ID NO 65927
atttcttcttcacctttagatttttcctcgcttaatttctcaataacgctctcagagagaccatttgatgaagcttctcgcttctggaatttgaaaaggatttgataagacgagttcatagaagattaccgcaagttcatcaactttttgaacttgttatggagataatctcactgaacgttgtgccccagtgctctgtggttacttggagtagtaaattagcaacgaaaagattggtcccaaatcggtcaagtttgttattctcaggggtcaaaaaatccagacttgtgattcgaagtggaaattccgatggttatgttgttggtgagaatgatgacttgggtcgtatagccagaagaggagaatcaacgtcaaaggttttgattcctggtttgcctgatgaatcaaatggtgaaattgctgctcgaatcagtcattctcactgcgagtggaagcccaagcttagagtacattatgagaaagccggttgtgacaatctcgatgctcctgcggtgttgtttcttcctggctttggcgttggttcatttcactatgagaagcagcttaccgatttgggaagggattatcgagtatgggctattgattttcttggacagggtttatctctccctactgaagatcctactaccatgactgaagaaaccagttcctcggaagataaggaaccattttggggatttggtgacaaaactgaaccgtgggctgatcaacttgtattctctctggatctctggagggatcaagttcagtattttgtagaagaggttatcggtgagcctgtgtacattgcagggaactcacttggagggtatgtagctctctactttgcagcaacccatcctcacctggttaagggtgttaccttgcttaatgcaacacctttctggggtttcttccctaatccagtaagatccccaaagctagcacgtctctttccatggcccggagcattccctctgccggaaagagtgaaaaaaatcacagaattggtgtggcaaaagataagtgatcctgaaagcatagctgagatacttaaacaggtctacacagaccattctatcaatgtggataaagtattctcacgtattgtggaggtcacacagcatccggctgctgcagcatcgtttgcttcaatcatgcttgctcctggtggagagctatctttctccgaagctttatctaggtgtaaggaaaacaatgttcagatatgtctcatgtatggaagagaagatccatgggtgagaccgttatggggaaagaagataaagaaggaaatccccaacgctccatactacgagatcagcccagcgggtcactgcccacacgatgaagtccctgaggtggtgaactatctgatgcgcgggtggatcaagcacctggagtctggtggttttgaagcgctcccgcttttggaggacactgaagaagattgggaggagtccaggattggtagagaaattgagttcccgagagatggttggaaaaaagcagtgaatctgtggttatatgggtcaaactatacgtactggagaggagttagagaatctttcagatccagttttataagggtgtttggagggaagtctgcatagaagaagcatggaacagtcgtctagtgtaaattaattgtaatctatgttgcatccgatgctagctatataatgttgtctgtagaatcaagtttctaaaatgttcaaaaggaaaagttagaaaaatatctacttgatagttagtcacctaaatcgaaggaactcctttcttgcattgttgtatataatccacaggttcagattaatataggaaggcgacattgcaggc

SEQ ID NO: 77954 - protein, 484 aa, Arabidopsis thaliana
  peptide (1)..(484): Ceres Seq. ID no. 12581194
MEIISLNVVPQCSVVTWSSKLATKRLVPNRSSLLFSGVKKSRLVIRSGNSDGYVVGENDDLGRIARRGESTSKVLIPGLPDESNGEIAARISHSHCEWKPKLRVHYEKAGCDNLDAPAVLFLPGFGVGSFHYEKQLTDLGRDYRVWAIDFLGQGLSLPTEDPTTMTEETSSSEDKEPFWGFGDKTEPWADQLVFSLDLWRDQVQYFVEEVIGEPVYIAGNSLGGYVALYFAATHPHLVKGVTLLNATPFWGFFPNPVRSPKLARLFPWPGAFPLPERVKKITELVWQKISDPESIAEILKQVYTDHSINVDKVFSRIVEVTQHPAAAASFASIMLAPGGELSFSEALSRCKENNVQICLMYGREDPWVRPLWGKKIKKEIPNAPYYEISPAGHCPHDEVPEVVNYLMRGWIKHLESGGFEALPLLEDTEEDWEESRIGREIEFPRDGWKKAVNLWLYGSNYTYWRGVRESFRSSFIRVFGGKSA

SEQ ID NO: 77955 - protein, 320 aa, Arabidopsis thaliana
  peptide (1)..(320): Ceres Seq. ID no. 12581195
MTEETSSSEDKEPFWGFGDKTEPWADQLVFSLDLWRDQVQYFVEEVIGEPVYIAGNSLGGYVALYFAATHPHLVKGVTLLNATPFWGFFPNPVRSPKLARLFPWPGAFPLPERVKKITELVWQKISDPESIAEILKQVYTDHSINVDKVFSRIVEVTQHPAAAASFASIMLAPGGELSFSEALSRCKENNVQICLMYGREDPWVRPLWGKKIKKEIPNAPYYEISPAGHCPHDEVPEVVNYLMRGWIKHLESGGFEALPLLEDTEEDWEESRIGREIEFPRDGWKKAVNLWLYGSNYTYWRGVRESFRSSFIRVFGGKSA

SEQ ID NO: 77956 - DNA, 1644 bp, Arabidopsis thaliana
  misc_feature (1)..(1644): Ceres Seq. ID no. 12581204
  misc_feature (1)..(1644): Ortholog of  Ceres SEQ ID NO 14311857 as cited in SEQ ID NO 51473
  misc_feature (1)..(1644): Ortholog of  Ceres SEQ ID NO 14303094 as cited in SEQ ID NO 66388
ctcgcgttatctccttttgtcgatttagccctaacctatacggctgctacatccagatttcctcatcctctattagggaagaagaaccaaaaccctaatcctatcttctcctcttataaatcgcttcaacaacagtttctttctcttctgatttgatccatgatttctcatctggaaccctagtttatacatccatcgggtgttactgttctttatctgggcaatcagtggttagtcaaaagtataggattttcatttaaagatttgattttgcgttgaaatcgaacgaacccagatttcatattttgtctctgttttggctttttttatctttttaggtgtttttgttccttttgtatatctgtcgagacttctaggtgtgaaatcaaagcttgtttggtttatatcgatcttggttttagctgaatcgttgttaagatggctggaggtggaaacaggagagatgaaggatcgatcacgatccagagcactaatttgtttgcagcattggacactcgtaagaagaagaagaagtctgacaaggcagggaagagcaaagggtcttctaagtcacgagagccagagaaggagcctgagcctcaggtctattgggctcctacgcctttgaaagttaagtcttgggctgatattgatgatgaagacgacgatgatgactattatgcaaccactgctcctcctcagtctggttggagtacttctctgccttcccatactgattccaaagacgttcatgttgaggaaagtgaaagtgaggaagatattcttgatgaaggtgatgatgatgtggaggaagagcaggaacaggaaacagaggtacaggttcatccagagcctgaggtgaagaaagctcctgaagttcctgcacctcctaaagaggcagagaggcaactttccaagaaagagaggaaaaagaaggaacttgctgagcttgaagctttgttggctgattttggagttgcccccaaggagaacaatggcctagaggaatctcaagaggctggacaagaaaagaaagaagatgtcaatggagagggagagaagaaggagaatgcagcaggtggggagtcaaaggcatcaaaaaagaagaaaaagaaggataagcagaaggaggtaaaagaatctcaagagcaacaagcaaacaacaatgccgatgctgtagatgaagctgctgggtctgaaccaactgaggaagaatctccaattgacgtcaaggaaaggataaagaagcttgcatccatgaagaagaagaagtcaggcaaagaggtggatgctgcagctaaagctgctgcggaggaggcagctgcaagacgtaagaagctggccgcggcaaagaagaaggagaagaatcactataaccaacagcctgtgcggtaaaatcctgaatcaccaccattttgatcttgatggaaatgcaaatatgaacatgtatttcgccgtatattgttcatatgagtctctgtcctaataaatcttttgaagggtctggttcttagagttaaagacattgaatcctttttctagtcttattacaatgaacaggctaaagacaaaactactctctggagattttcatttctttttgaaacacctttgttttcttaatatcagaccttttttaggttc

SEQ ID NO: 77957 - protein, 318 aa, Arabidopsis thaliana; identical to SEQ ID NO: 28893
  peptide (1)..(318): Ceres Seq. ID no. 12581205

SEQ ID NO: 77958 - DNA, 974 bp, Arabidopsis thaliana
  misc_feature (1)..(974): Ceres Seq. ID no. 12581208
  misc_feature (1)..(974): Ortholog of  Ceres SEQ ID NO 13597604 as cited in SEQ ID NO 65175
acaacaacaacaacaacaacaacccaaaacccaattttgttacctcttctttcctcaatcctaaagtcaaaacaaacaaaaagcttccattttttttctttgattatcttcaatcggaatttcaggtgtgagagatgggttctgaaggaccaaaagcaataacgattcatgtgactggtttcaagaaatttcttggggtttcagagaatcctactgagaagatagctaatggtttgaaatcgtatgtggagaaacgaggtttgccttctggattgtgtcttggtagctgtagtgttcttgacactgctggggaaggtgcaaaatctaagctttatgaggttttggagtctagtgttgtctctggagataagaacaacaatggaactgttgtctggcttcatctcggggtgaatagcggagcgacaaaattcgccattgaaagacaggcagtgaacgaagctcatttccgttgtcctgatgaattgggctggcaaccgcagcggcttcccatagttgttgaagatggaggcatttcaaaggcaaaagagacttcatgctcgacggagtccattttccagttattaaagaagaaaggctttgaggttgttcaatcagacgatgctggacgttttgtatgcaactacgtgtactatcactctctaaggttcgcagagcaaaagggacacaagtctctgttcgttcacgttcctctcttctccaaaatcgatgaagatactcaaatgcagttcgtggcttcactcttggaggcaattgcagctacttgctagtgtttataagaatccactaaagccaaatattgtaagtatacaatgtatatgatccatttgtctttctatgaagctctttgtgttcttttgttggaaggtttggggatataaaaagacgattgcttttggttctcaaagatcctttgtgattgtctctgactctctgtaataaaagaagtctctctc

SEQ ID NO: 77959 - protein, 217 aa, Arabidopsis thaliana; identical to SEQ ID NO: 28687
  peptide (1)..(217): Ceres Seq. ID no. 12581209

SEQ ID NO: 77960 - DNA, 652 bp, Arabidopsis thaliana
  misc_feature (1)..(652): Ceres Seq. ID no. 12581221
  misc_feature (1)..(652): Ortholog of  Ceres SEQ ID NO 13575779 as cited in SEQ ID NO 20515
atggcttctctagggtttcagccaccagactcaaacagagagtgaaaatgccggcgggacacggagtgagggcgagaacaagagatctgttcgcgagaccattcaggaagaagggttatattccactctccacttacctcagaaccttcaaggtcggcgattacgtcgatgtcaaggttaatggagctatccacaagggtatgcctcataagttctaccatggtcgtactggtcgcatctggaatgtcactaagcgtgccgttggtgttgaagtcaacaaacagattgggaacagaatcataaggaagaggatacatgtgcgtgtggagcatgtgcaacagtcaaggtgtgctgaggagtttaaactcagaaagaagcagaacgatgtgcttaaggctgatgctaaagccagaggagagactatcagcaccaagagacagcctaaaggtcctaaaccgggtttcatggtcgaaggtatgacattggagactgtcactcccattccttacgatgttgtcaacgatctcaagggtggttattgagttttttccattttattatcattctctactcagaatttttgcacttgcttttttaatgatgtttttgtatcaattaagactaatttctatatggtatgaaagtgcaattc

SEQ ID NO: 77961 - protein, 179 aa, Arabidopsis thaliana
  peptide (1)..(179): Ceres Seq. ID no. 12581222
GFSRVSATRLKQRVKMPAGHGVRARTRDLFARPFRKKGYIPLSTYLRTFKVGDYVDVKVNGAIHKGMPHKFYHGRTGRIWNVTKRAVGVEVNKQIGNRIIRKRIHVRVEHVQQSRCAEEFKLRKKQNDVLKADAKARGETISTKRQPKGPKPGFMVEGMTLETVTPIPYDVVNDLKGGY

SEQ ID NO: 77962 - protein, 164 aa, Arabidopsis thaliana; identical to SEQ ID NO: 20517
  peptide (1)..(164): Ceres Seq. ID no. 12581223

SEQ ID NO: 77963 - protein, 113 aa, Arabidopsis thaliana; identical to SEQ ID NO: 20518
  peptide (1)..(113): Ceres Seq. ID no. 12581224

SEQ ID NO: 77964 - DNA, 1805 bp, Arabidopsis thaliana
  misc_feature (1)..(1805): Ceres Seq. ID no. 12581231
  misc_feature (1)..(1805): Ortholog of  Ceres SEQ ID NO 14311219 as cited in SEQ ID NO 56635
  misc_feature (1)..(1805): Ortholog of  Ceres SEQ ID NO 15169615 as cited in SEQ ID NO 66708
  misc_feature (1)..(1805): Ortholog of  Ceres SEQ ID NO 15169619 as cited in SEQ ID NO 67512
gagagaaatcagcttcaagcttaagagagcttcgaaagcgaaagcgacgatttcttctccatcgtgagagcaaatctccagagccgttttctcttcttcttcttcctcctcgcgccgtctctgaaactccatcatcgtatcaatcaaattgcttcctcctccaaattgaaaaacaatggaattggattcggagaacaaattgttgaagacgggtttggttatagtggcgacacttgttatagccaaactcatcttctctttcttcacttctgattctaagaagaagcgtcttcctcctactcttaaagcttggcctccattggttggaagtcttatcaaattcttgaaaggacctattattatgcttagagaggaataccctaagcttggaagtgtgtttactgttaatcttgttcacaaaaagattacttttcttattggtcctgaagtctctgctcattttttcaaagcttctgaatctgatcttagtcagcaggaagtgtatcagttcaatgtccctacttttggtcctggagttgttttcgatgttgattattctgttcgtcaggagcagtttcggttcttcactgaggcacttagagttaacaagttgaagggttatgtggatatgatggttactgaagctgaggattacttctctaaatggggagagagtggtgaagttgatattaaggttgagctagagaggctcatcatcttgactgcaagtagatgtttactgggtcgagaagttcgtgatcagctttttgatgatgtctctgctttgttccatgaccttgacaatggaatgcttcccatcagtgttctcttcccatatctcccaattccagctcaccgccgtcgtgaccgtgcccgagaaaagctttcggagattttcgcaaaaatcattgggtcgagaaaacgctctggaaaaacagagaacgacatgctgcagtgtttcatcgaatcaaagtacaaagatggtagacagacaaccgaatctgaagtcactggtttgctcattgctgctctgtttgcaggacaacacacgagctctatcacttccacctggaccggtgcttatctgatgcgatacaaagagtacttctcagctgctcttgatgagcagaagaacctgattgcgaaacatggagacaagatcgatcatgatatcttatccgagatggatgttctctaccgctgcattaaggaagcgttgaggcttcaccctccactcatcatgttaatgagagcctcgcacagtgatttcagcgtgacagctcgggatggaaaaacttacgatatcccaaagggtcacatcgttgcaacctcccctgcatttgccaaccgcttaccgcacatcttcaaagaccccgacacctacgacccagaaagattctcccctggaagagaagaggacaaagccgcaggggcattctcgtacattgcattcggagggggaaggcacgggtgccttggagagccgtttgcttacctgcagatcaaagccatatggagtcatttgttgaggaacttcgagcttgagctagtttcaccgttccctgagattgactggaacgctatggtggttggagttaaaggcaatgtgatggtgcgttacaagaggcgccagctttcttaaagacaagtttaaggttattgcagctttggatttttctctctggtttctgctttgcttttgtccctctctggttttagttttgttgttgaataattcttctgtttttataaactgttgttactctttaattgacatttatttttaagcttcctaagtttgttgg

SEQ ID NO: 77965 - protein, 488 aa, Arabidopsis thaliana; identical to SEQ ID NO: 39837
  peptide (1)..(488): Ceres Seq. ID no. 12581232

SEQ ID NO: 77966 - protein, 426 aa, Arabidopsis thaliana; identical to SEQ ID NO: 39838
  peptide (1)..(426): Ceres Seq. ID no. 12581233

SEQ ID NO: 77967 - protein, 337 aa, Arabidopsis thaliana; identical to SEQ ID NO: 39839
  peptide (1)..(337): Ceres Seq. ID no. 12581234

SEQ ID NO: 77968 - DNA, 1683 bp, Arabidopsis thaliana
  misc_feature (1)..(1683): Ceres Seq. ID no. 12581235
  misc_feature (1)..(1683): Ortholog of  Ceres SEQ ID NO 15176349 as cited in SEQ ID NO 58789
aaaatctatcaagggtttgccgtacaaaggtatcggaggagagagtaaagggtaaacaaaagagagactggtttacttcttcttcgtgtgcgagtagctttttcctgcgattctcatcgagttttggttagtgctttgttatcaaggtgaaaatcgatttgaagatggcgagcgaaagtcctgatgttgctgttgtagctccggtggtggagaatggcggcgctgagtcctctaatggtaaagaggaacaattggaatctgagctttcgaagaagcttgagattgcagaagatggtcaagaggagaacgatggagaagaaggaagcaaagctgagacttcaacgaagaagaagaagaagaaaaataaaagcaagaagaagaaggaactccctcaacagactgatccaccttcaattcctgtcgttgagctcttcccatcaggagagtttcctgaaggtgaaatccaagagtataaggatgataatctttggagaacaacatctgaagagaagagagagctggagcgttttgaaaagccaatatataactctgttcgccgagctgcagaagttcatcgccaggttcgtaaatatgtcagaagcatagtgaagcctggaatgttgatgactgatatatgtgagaccctagagaatactgttcgtaagttgatatcagagaatggtcttcaagctggtattgcattccctacaggatgctctttgaattgggtcgctgctcattggacaccaaactctggagataagactgtacttcagtacgacgatgttatgaaattggactttggaacacatattgatgggcatattattgactgtgcatttacagttgccttcaaccctatgttcgatcctctcttagcagcctctcgtgaagctacgtataccggtatcaaggaagctgggatcgatgtccgtctctgtgatatcggtgctgctattcaggaggtcatggagtcttatgaggttgaaatcaacggaaaggtcttccaagttaaaagtatccgaaacttgaatggtcacagcattggaccctatcagatacatgctgggaaatctgttcctatcgtaaaaggaggcgagcagacaaagatggaagagggcgagttttatgccatcgaaacatttggatcaaccgggaaaggatatgtgagagaagacctagaatgtagccattacatgaagaactttgacgctggccacgtccccttgaggttgcctagagcaaaacaactccttgcaaccattaacaagaatttctcgactctcgccttctgcagacgttatttggaccgcattggtgaaaccaaatacttaatggctctaaagaatctttgtgactctggcattgttcagccgtatcctcctctgtgtgatgtgaaaggaagctatgtatcacagtttgaacacaccattttactgcgacctacttgcaaagaagttctctccaagggagacgactactgattcagatcctctgttttgctctgtttacctttattatctcatactgttgtcgagattgtacacttgcttgtttcttttgtcgtcgttaacacaagctttgaatccttttataaaaagcttcagtgcctctgttaaaaaaaaactatgtatttgccatgaacatgaatttgctcatcaatcttactagaagttgattgat

SEQ ID NO: 77969 - protein, 439 aa, Arabidopsis thaliana; identical to SEQ ID NO: 21518
  peptide (1)..(439): Ceres Seq. ID no. 12581236

SEQ ID NO: 77970 - protein, 288 aa, Arabidopsis thaliana; identical to SEQ ID NO: 21519
  peptide (1)..(288): Ceres Seq. ID no. 12581237

SEQ ID NO: 77971 - protein, 286 aa, Arabidopsis thaliana; identical to SEQ ID NO: 21520
  peptide (1)..(286): Ceres Seq. ID no. 12581238

SEQ ID NO: 77972 - DNA, 811 bp, Arabidopsis thaliana
  misc_feature (1)..(811): Ceres Seq. ID no. 12581260
  misc_feature (1)..(811): Ortholog of  Ceres SEQ ID NO 14308727 as cited in SEQ ID NO 58726
  misc_feature (1)..(811): Ortholog of  Ceres SEQ ID NO 13663517 as cited in SEQ ID NO 66850
atcttagggtttcgcgagatctcactctcactgagatagcttagcaatggagcagtcagaagagggtcaacagcaacagcaacagggagtgatggattatgtacctcctcatgcttatcagagtgggccagtaaatgcagcttcccatatggcattccaacaagctcaccacttccaccaccaccatcagcagcaacaacagcagcagcttcagatgttctgggctaaccaaatgcaagagatcgagcataccactgatttcaagaaccacacccttcccctagcccgcatcaagaagatcatgaaagctgatgaagatgtgaggatgatctctgcggaggctcctgtgatttttgccaaggcctgtgagatgttcattttggagctcactctacgtgcttggatccacaccgaggagaacaagaggaggaccttgcagaagaacgacatcgccgctgccatttccaggaccgacgtgtttgatttccttgtggacataatcccgagggacgagctgaaagaagaaggtttaggcgtgaccaaagggaccataccatcggtggtgggttccccgccatactattacttgcaacaacaggggatgatgcaacactggccccaggagcaacaccctgatgagtcttaaaacttttcccctttcgtttgtttggttgtatcgtagtaaggtagctctgctctgctgggaaccatttctattgtgttctgtaatgacatgttagtatatccccagtctatatctatggcaatgcagtttctgttctcatgtgcattaaataataacaagaatgat

SEQ ID NO: 77973 - protein, 199 aa, Arabidopsis thaliana; identical to SEQ ID NO: 25138
  peptide (1)..(199): Ceres Seq. ID no. 12581261

SEQ ID NO: 77974 - protein, 184 aa, Arabidopsis thaliana; identical to SEQ ID NO: 25139
  peptide (1)..(184): Ceres Seq. ID no. 12581262

SEQ ID NO: 77975 - protein, 165 aa, Arabidopsis thaliana; identical to SEQ ID NO: 25140
  peptide (1)..(165): Ceres Seq. ID no. 12581263

SEQ ID NO: 77976 - DNA, 1518 bp, Arabidopsis thaliana
  misc_feature (1)..(1518): Ceres Seq. ID no. 12581306
  misc_feature (1)..(1518): Ortholog of  Ceres SEQ ID NO 13659033 as cited in SEQ ID NO 66372
  misc_feature (1)..(1518): Ortholog of  Ceres SEQ ID NO 13655724 as cited in SEQ ID NO 68973
  misc_feature (1)..(1518): Ortholog of  Ceres SEQ ID NO 12625899 as cited in SEQ ID NO 69079
attaatctctctctgcctctactcactggatcatcatagctccaaacttgtaccagtcgcatcaaagcaagttttggtgaagaagaagagacgaggtcttcctcttactgtggtggtgacattttctctaaaaagaaagtctccgatatgtcgcagagatggagtagaaagaagagtagacttccattagcgggtctcctctttattctcgttgtcacctttatgattctcttcaacgagcgtagcattcagcagatccatcaccacgccgcgagtcacactcaaaatctccgagaaccttccacgttcgatttcgtcaagcctaatgttcctcggattaactacttgggagctcatgaggttttggatagattcagcaaatgcaactcgacgaaagagtacagtgggaagaaaatcggatgggttgacccgtttgaagaccacccgggtcaagtaacaaaggaggagcagaaatgtgatgtcttttctgggaaatgggtctttgataattcatcatcataccctttacacaaggaatctcagtgtccttacatgtccgaccagttggcttgtcagaagcatggtaggaaggatttggagtatcagcattggagatggcaacctcatgcctgcaacttgaagagatggaatgcgatagaaatgtgggagaagctgagaggaaagagattgatgtttgttggagactcgttaaacagaggccaatggatttcaatggtttgtctcttacagtctgtcattccacgtgacaagcagtctatgtctcctaacgctcacctcaccattttcagggctgaggactacaatgccacagtggagtttctctgggcaccgttgctcgtggagtcgaattctgatgaccctgttaatcacagattgagcgagcggattatccgacccgattctgttcttaaacatgcatcaaagtggcaacatgctgatattctaatcttcaacacctacttatggtggagacaagactctgtcaagctccgatggagcagtgaagaaaaagggtcatgcgaggaggtgaagagcgccgagggaatggagatggcaatggatagttggggtgattgggttgctaacaatgtcgatccaaacaaaaagcgagttttcttcgttacaatgtctcctacacatcaatggagccgagaatggaacccgggaagcgaaggaaactgctacggggagaagaaaccaatagaggaagagagttattggggaagtgggtcggacattccgacaatgaggatggtgaagagagttttggagagattgggaccaaaggtctcagttataaacatcactcagttgtctgagtatcgaaaagatggtcatccatcggtgtaccggaaattctgggaacctctaaatgaagaccggttgaaaaacccggcatcgtattctgactgtactcattggtgtgtacctggagttcctgatgtctggaatcaattgcttttccattttttgtgaaaatgaaatgaatataacctt

SEQ ID NO: 77977 - protein, 449 aa, Arabidopsis thaliana; identical to SEQ ID NO: 38720
  peptide (1)..(449): Ceres Seq. ID no. 12581307

SEQ ID NO: 77978 - protein, 424 aa, Arabidopsis thaliana; identical to SEQ ID NO: 38721
  peptide (1)..(424): Ceres Seq. ID no. 12581308

SEQ ID NO: 77979 - protein, 314 aa, Arabidopsis thaliana; identical to SEQ ID NO: 38722
  peptide (1)..(314): Ceres Seq. ID no. 12581309

SEQ ID NO: 77980 - DNA, 1500 bp, Arabidopsis thaliana
  misc_feature (1)..(1500): Ceres Seq. ID no. 12581320
  misc_feature (1)..(1500): Ortholog of  Ceres SEQ ID NO 14308851 as cited in SEQ ID NO 55618
gtcgaagcctttggacccgtttttatatttactcctcccattcccttctccttcaatccttccttcctcctcctcccttcttcttcttcccctctttcattttccagccactacaaacttttctatctctactttttttcctctcgatttcaggtagaagaaaatggctgatggtgaagacattcaacctcttgtttgcgacaatggaactggaatggttaaggctggttttgctggggatgatgcacctagagctgtgtttcctagtattgtgggtcgtcctcgtcacaccggtgtgatggttgggatggggcaaaaggatgcttatgttggcgatgaagctcaatccaaacgaggtattttaactctcaagtaccctattgagcatggaattgtcaacaattgggatgacatggagaagatttggcatcacactttctacaatgagctccgtgttgctcctgaggaacatcctattctacttaccgaggcaccgcttaacccgaaagctaatcgtgagaagatgactcaaatcatgtttgagactttcaatgcccctgctatgtatgtggctattcaggctgttctttctctttatgccagtggtcgtactaccggtattgtgctcgactctggagatggtgtgagccacactgttcctatctatgaggggtatgcacttccacatgctatcctacgtcttgatcttgctggtcgtgacctcacggatgcgctgatgaagatcctaaccgagcgtggttactctttcaccaccacagcagagcgtgaaattgtcagagacataaaggagaagctttgctacattgctcttgactacgagcaggaactcgagacagccaaaaccagctcatctgttgagaagaactacgagctacctgatgggcaagtgatcaccattggatcagagcgattccgttgtcctgaggttctttaccagccatctatgattggtatggagaatgctggtatccatgaaaccacctataactccataatgaagtgtgatgtcgacatcaggaaggacttgtacggtaacattgtgctcagtggtggaaccacaatgttccctggaatcgccgacagaatgagcaaagagatcactgctttggctccaagcagcatgaagatcaaagtcgttgcccctccagagaggaaatactctgtctggattggagggtccatcttggcctccctcagtaccttccagcagatgtggatcgcaaaggcagagtatgacgagtcaggtccatcgattgttcacaggaagtgcttctgagttcaaagttgatcatttttcagagaagaagcaccgccagggtttttccgaccatttctcaagccgggtttttaatcttccgttattctgctctttgtttttgttctcttatgttttgaaattcatgccaaatacattttcatggatttatggtaatctgtttgtagtatggtttaaaatctaatgcaactgtgtttttgagt

SEQ ID NO: 77981 - protein, 377 aa, Arabidopsis thaliana; identical to SEQ ID NO: 36003
  peptide (1)..(377): Ceres Seq. ID no. 12581321

SEQ ID NO: 77982 - protein, 360 aa, Arabidopsis thaliana; identical to SEQ ID NO: 36004
  peptide (1)..(360): Ceres Seq. ID no. 12581322

SEQ ID NO: 77983 - protein, 332 aa, Arabidopsis thaliana; identical to SEQ ID NO: 36005
  peptide (1)..(332): Ceres Seq. ID no. 12581323

SEQ ID NO: 77984 - DNA, 1788 bp, Arabidopsis thaliana
  misc_feature (1)..(1788): Ceres Seq. ID no. 12581335
  misc_feature (1)..(1788): Ortholog of  Ceres SEQ ID NO 13594209 as cited in SEQ ID NO 59089
  misc_feature (1)..(1788): Ortholog of  Ceres SEQ ID NO 15176091 as cited in SEQ ID NO 65733
  misc_feature (1)..(1788): Ortholog of  Ceres SEQ ID NO 15169599 as cited in SEQ ID NO 66096
  misc_feature (1)..(1788): Ortholog of  Ceres SEQ ID NO 15170167 as cited in SEQ ID NO 66224
  misc_feature (1)..(1788): Ortholog of  Ceres SEQ ID NO 13502874 as cited in SEQ ID NO 66298
  misc_feature (1)..(1788): Ortholog of  Ceres SEQ ID NO 14307944 as cited in SEQ ID NO 66503
  misc_feature (1)..(1788): Ortholog of  Ceres SEQ ID NO 12614124 as cited in SEQ ID NO 68392
  misc_feature (1)..(1788): Ortholog of  Ceres SEQ ID NO 14308011 as cited in SEQ ID NO 69234
accacacaacacaaaacctccaaaccaataatcagaacacagtgagatatttctctctgaagccaaagatggaaacggcgtcttctaatttctctctctcgcagatcctcaatattgaggaaccctacagctccgtaatgctcggtgtcgccgctctcttggccgttgtttgctatttctggatacaggggaagtccaaatccaagaacggaccaccgttgcctccgggaccttggccacttccgatcgtcggcaacctcccgttcctaaactctgacgtcctccacacgcaattccaagccctaaccctaaaacatggccctctcatgaagatccacctcggttccaaacttgcgatcgtcgtctcttcccctgacatggctcgcgaggttctcaaaacccacgacatcactttcgccaaccacgatctccctgaagtcggaaagatcaacacttacggtggtgaagacatcctctggtctccttacggtacccattggaggagacttcgtaagctctgcgtcatgaagatgttcactaccccaactctcgaagcttcctactccactcgccgggaagaaacccgacaaaccattgtccacatgtcggaaatggctcgtgaaggatcaccagtcaacctcggagagcaaatatttctttccattttcaacgtcgtgacaagaatgatgtggggcgccactgttgaaggagacgagagaacgagcttaggaaacgagctcaaaaccctaatatctgatatctccgacatagaagggattcaaaactactcagatttctttccgttgttctcaagattcgatttccaaggattggttaagcagatgaaaggccatgtgaagaagcttgatctcttgttcgatagagttatggagagtcacgtcaaaatggtgggaaagaagagcgaagaagaagaagatttcttgcaatacttacttagagttaaagatgatgatgagaaagctcctctgtccatgactcatgtcaagtctctcctcatggatatggttcttggtggtgtcgacacatcggttaacgcatccgaattcgccatggcagagattgtgagcagaccggaagtgttaaacaagatccgactagaacttgaccaagttgttggcaaagacaacatcgttgaggaatcacatttacctaagcttccttacctacaagcggttatgaaagagactcttaggcttcaccctacgcttcctcttcttgttcctcacagaaacagcgaaacctcggtggttgcgggatacactgtgcctaaagactccaagattttcatcaacgtttgggcgattcatagagatcctaagaattgggatgaaccaaacgagttcaaacctgagaggtttttggagaattcgcttgatttcaatggaggtgattttaagtacttgccttttgggtcaggaaggaggatttgtgcggcgattaacatggctgagagacttgttctgttcaacattgcttcacttcttcactcttttgattggaaagcacctcaaggacagaagtttgaggttgaagagaagtttggtcttgttcttaagttgaagtctccacttgtggctattcctgttccaaggttgtccgatccaaaactctatacagcttaagtaagtaagaaggaaatttggtttgagcttatgagaggaagttgaattgagttttcttgtttaaagtttatttttctttattcgtgtttggagtttgatgctttgtaaaaaaagatgtgtcaagttaaatttaattttcttatat

SEQ ID NO: 77985 - protein, 546 aa, Arabidopsis thaliana
  peptide (1)..(546): Ceres Seq. ID no. 12581336
HTTQNLQTNNQNTVRYFSLKPKMETASSNFSLSQILNIEEPYSSVMLGVAALLAVVCYFWIQGKSKSKNGPPLPPGPWPLPIVGNLPFLNSDVLHTQFQALTLKHGPLMKIHLGSKLAIVVSSPDMAREVLKTHDITFANHDLPEVGKINTYGGEDILWSPYGTHWRRLRKLCVMKMFTTPTLEASYSTRREETRQTIVHMSEMAREGSPVNLGEQIFLSIFNVVTRMMWGATVEGDERTSLGNELKTLISDISDIEGIQNYSDFFPLFSRFDFQGLVKQMKGHVKKLDLLFDRVMESHVKMVGKKSEEEEDFLQYLLRVKDDDEKAPLSMTHVKSLLMDMVLGGVDTSVNASEFAMAEIVSRPEVLNKIRLELDQVVGKDNIVEESHLPKLPYLQAVMKETLRLHPTLPLLVPHRNSETSVVAGYTVPKDSKIFINVWAIHRDPKNWDEPNEFKPERFLENSLDFNGGDFKYLPFGSGRRICAAINMAERLVLFNIASLLHSFDWKAPQGQKFEVEEKFGLVLKLKSPLVAIPVPRLSDPKLYTA

SEQ ID NO: 77986 - protein, 524 aa, Arabidopsis thaliana
  peptide (1)..(524): Ceres Seq. ID no. 12581337
METASSNFSLSQILNIEEPYSSVMLGVAALLAVVCYFWIQGKSKSKNGPPLPPGPWPLPIVGNLPFLNSDVLHTQFQALTLKHGPLMKIHLGSKLAIVVSSPDMAREVLKTHDITFANHDLPEVGKINTYGGEDILWSPYGTHWRRLRKLCVMKMFTTPTLEASYSTRREETRQTIVHMSEMAREGSPVNLGEQIFLSIFNVVTRMMWGATVEGDERTSLGNELKTLISDISDIEGIQNYSDFFPLFSRFDFQGLVKQMKGHVKKLDLLFDRVMESHVKMVGKKSEEEEDFLQYLLRVKDDDEKAPLSMTHVKSLLMDMVLGGVDTSVNASEFAMAEIVSRPEVLNKIRLELDQVVGKDNIVEESHLPKLPYLQAVMKETLRLHPTLPLLVPHRNSETSVVAGYTVPKDSKIFINVWAIHRDPKNWDEPNEFKPERFLENSLDFNGGDFKYLPFGSGRRICAAINMAERLVLFNIASLLHSFDWKAPQGQKFEVEEKFGLVLKLKSPLVAIPVPRLSDPKLYTA

SEQ ID NO: 77987 - protein, 501 aa, Arabidopsis thaliana
  peptide (1)..(501): Ceres Seq. ID no. 12581338
MLGVAALLAVVCYFWIQGKSKSKNGPPLPPGPWPLPIVGNLPFLNSDVLHTQFQALTLKHGPLMKIHLGSKLAIVVSSPDMAREVLKTHDITFANHDLPEVGKINTYGGEDILWSPYGTHWRRLRKLCVMKMFTTPTLEASYSTRREETRQTIVHMSEMAREGSPVNLGEQIFLSIFNVVTRMMWGATVEGDERTSLGNELKTLISDISDIEGIQNYSDFFPLFSRFDFQGLVKQMKGHVKKLDLLFDRVMESHVKMVGKKSEEEEDFLQYLLRVKDDDEKAPLSMTHVKSLLMDMVLGGVDTSVNASEFAMAEIVSRPEVLNKIRLELDQVVGKDNIVEESHLPKLPYLQAVMKETLRLHPTLPLLVPHRNSETSVVAGYTVPKDSKIFINVWAIHRDPKNWDEPNEFKPERFLENSLDFNGGDFKYLPFGSGRRICAAINMAERLVLFNIASLLHSFDWKAPQGQKFEVEEKFGLVLKLKSPLVAIPVPRLSDPKLYTA

SEQ ID NO: 77988 - DNA, 1030 bp, Arabidopsis thaliana
  misc_feature (1)..(1030): Ceres Seq. ID no. 12581347
  misc_feature (1)..(1030): Ortholog of  Ceres SEQ ID NO 13638441 as cited in SEQ ID NO 58066
aaatctatcttttaagcttcctccacacatagagcaagaaaatggacttttttgagctgtgtttgtagttgaaacttattcttccctttttttgtttttaggtatggagactctgcatccattctctcacctacctatctctgaccaccggttcgttgttcaagagatggtgagcttacacagctcgagtagcggtagctggactaaagaagagaacaagatgttcgaacgagctcttgcgatatacgctgaagactcgcctgatcgctggtttaaagttgcttccatgatccctggaaagactgtttttgatgttatgaagcaatatagtaagcttgaagaagacgttttcgatattgaagcaggacgtgttcccattcctggttatcctgcagcttcttctcccttggggtttgacacggacatgtgtcgtaaacggcctagtggagctagaggatctgatcaagatcgaaagaaaggagtcccttggacagaggaagaacacaggagattcttgttaggccttctcaagtacggtaaaggagattggagaaacatatcgagaaacttcgtggtgtcaaagacgccaacgcaagtggcgagccacgcccaaaagtattaccagagacagctctccggagccaaggacaaacgcaggccaagtatccatgacatcacaaccggcaatcttctcaatgccaatctcaaccgttccttttccgatcatagagatattctccctgatttagggtttatcgataaggatgatacggaggagggagtaatatttatgggtcagaatctctcttcagaaaatctgttttctccatcaccaacttcattcgaagctgccattaacttcgccggagaaaatgtcttcagtgccggagcttaaggcaacatagaatccccaaactcagcgttcttaagaatctgagttttgaaactgtaattagagaaatataagcaaaaccaagtttattatatatgtattgtgtggtttaaaagtaagaacttgtttttactctgt

SEQ ID NO: 77989 - protein, 263 aa, Arabidopsis thaliana; identical to SEQ ID NO: 74481
  peptide (1)..(263): Ceres Seq. ID no. 12581348

SEQ ID NO: 77990 - protein, 242 aa, Arabidopsis thaliana; identical to SEQ ID NO: 74482
  peptide (1)..(242): Ceres Seq. ID no. 12581349

SEQ ID NO: 77991 - protein, 224 aa, Arabidopsis thaliana
  peptide (1)..(224): Ceres Seq. ID no. 12581350
MFERALAIYAEDSPDRWFKVASMIPGKTVFDVMKQYSKLEEDVFDIEAGRVPIPGYPAASSPLGFDTDMCRKRPSGARGSDQDRKKGVPWTEEEHRRFLLGLLKYGKGDWRNISRNFVVSKTPTQVASHAQKYYQRQLSGAKDKRRPSIHDITTGNLLNANLNRSFSDHRDILPDLGFIDKDDTEEGVIFMGQNLSSENLFSPSPTSFEAAINFAGENVFSAGA

SEQ ID NO: 77992 - DNA, 745 bp, Arabidopsis thaliana
  misc_feature (1)..(745): Ceres Seq. ID no. 12581394
  misc_feature (1)..(745): Ortholog of  Ceres SEQ ID NO 12584790 as cited in SEQ ID NO 62648
aaaacaaccccttgagatttccgaagatcatcaaatccaaaaccctagaaaccgaacaaaagaagctaggactattcaatggcgtcgaaaagaattaacaaagagcttagggacttgcaaagagatcctcctgtgtcctgcagtgcaggtcctacgggagatgatatgttccaatggcaagcaactatcatgggtccagcagatagcccgtttgccggaggtgtgtttcttgttaccattcacttcccaccagattaccctttcaagccaccaaaggttgccttccggaccaaggtttatcacccaaacatcaacagtaatggaagtatctgtcttgacattctgaaagagcagtggagccctgcacttaccgtatccaaggttcttctgtcgatatgctcattgctgacggatccaaaccctgacgatcctttggttcctgaaatagcgcacatctacaagacagaccgagtcaagtacgagtccacagctcaatcctggactcagaagtatgcaatgggatgataacaagcaataatacccaccaccagtacattgcgtattaaacaggagaaataagaaagaaagaaaaaaactcagtttggcttttactttggctacttttgcttattagttttttttttttaattatatcttgaagctgtgtgttgggtgtgtacatgagctttatgccttatttgaaacattgagatcttgcaaatgcttttaagccaataatccgcta

SEQ ID NO: 77993 - protein, 148 aa, Arabidopsis thaliana; identical to SEQ ID NO: 28390
  peptide (1)..(148): Ceres Seq. ID no. 12581395

SEQ ID NO: 77994 - protein, 119 aa, Arabidopsis thaliana; identical to SEQ ID NO: 28391
  peptide (1)..(119): Ceres Seq. ID no. 12581396

SEQ ID NO: 77995 - protein, 114 aa, Arabidopsis thaliana; identical to SEQ ID NO: 28964
  peptide (1)..(114): Ceres Seq. ID no. 12581397

SEQ ID NO: 77996 - DNA, 717 bp, Arabidopsis thaliana
  misc_feature (1)..(717): Ceres Seq. ID no. 12591562
  misc_feature (1)..(717): Ortholog of  Ceres SEQ ID NO 15179194 as cited in SEQ ID NO 0
aattaagcaaaagaagaagaagaagaagtaatggcttcctctatgctctcctctgccgctgtggttacctccccggctcaagccaccatggtcgctccattcactggtttgaagtcatccgcttctttcccggtcacccgcaaggccaacaacgacattacttccatcacaagcaatgggggaagagttagctgcatgaaggtgtggccaccaatcggaaagaagaagtttgagactctatcttacctccctgaccttactgacgtcgaattggctaaggaagttgactaccttctccgcaacaaatggattccttgtgttgaattcgagttggagcacggatttgtgtaccgtgagcacggaaacactcccggatactacgatggacggtactggacaatgtggaagcttccattgttcggatgcaccgactccgctcaagtgttgaaggaagttgaagaatgcaagaaggagtacccgggcgccttcattaggatcatcggattcgacaacacccgtcaagtccaatgcatcagtttcattgcctacaagcccccaagcttcactgatgcttaaatccttttctggaatattcaatgttgactatccggaacccaattttgtatggtcaatgtaaatttaagtaattattttgccaaagtgaaaaaactgaaggtttgtttttctatcgtttcctctataaaaatctctattcat

SEQ ID NO: 77997 - protein, 181 aa, Arabidopsis thaliana
  peptide (1)..(181): Ceres Seq. ID no. 12591563
MASSMLSSAAVVTSPAQATMVAPFTGLKSSASFPVTRKANNDITSITSNGGRVSCMKVWPPIGKKKFETLSYLPDLTDVELAKEVDYLLRNKWIPCVEFELEHGFVYREHGNTPGYYDGRYWTMWKLPLFGCTDSAQVLKEVEECKKEYPGAFIRIIGFDNTRQVQCISFIAYKPPSFTDA

SEQ ID NO: 77998 - protein, 177 aa, Arabidopsis thaliana
  peptide (1)..(177): Ceres Seq. ID no. 12591564
MLSSAAVVTSPAQATMVAPFTGLKSSASFPVTRKANNDITSITSNGGRVSCMKVWPPIGKKKFETLSYLPDLTDVELAKEVDYLLRNKWIPCVEFELEHGFVYREHGNTPGYYDGRYWTMWKLPLFGCTDSAQVLKEVEECKKEYPGAFIRIIGFDNTRQVQCISFIAYKPPSFTDA

SEQ ID NO: 77999 - protein, 162 aa, Arabidopsis thaliana
  peptide (1)..(162): Ceres Seq. ID no. 12591565
MVAPFTGLKSSASFPVTRKANNDITSITSNGGRVSCMKVWPPIGKKKFETLSYLPDLTDVELAKEVDYLLRNKWIPCVEFELEHGFVYREHGNTPGYYDGRYWTMWKLPLFGCTDSAQVLKEVEECKKEYPGAFIRIIGFDNTRQVQCISFIAYKPPSFTDA

SEQ ID NO: 78000 - DNA, 1374 bp, Arabidopsis thaliana
  misc_feature (1)..(1374): Ceres Seq. ID no. 12592280
  misc_feature (1)..(1374): Ortholog of  Ceres SEQ ID NO 13592768 as cited in SEQ ID NO 20317
  misc_feature (1)..(1374): Ortholog of  Ceres SEQ ID NO 14303656 as cited in SEQ ID NO 61363
cacgcgtccgtcagtgacacatcgagtcgaagaagaacatacatttctactgaatcagatctgatctgctttgtcagtttttaaactgttctgatctaattgagatttctcaattccactcaaaatcctttaaagcttgtctctttttggtatctctgaatcaatttggggaaatcaagaggagaagtgacaatggatgcgtttagaagacaagcgagtaagcttagagaccaagtcgcaaagcagcaactggctgtgataaagcaattcagtgggactggttatgaaagctcagatgtaatggtgattgatgagcttgaaatgcaaaggcatcatcaactcgataaactttaccgctctactcgttctgcaaaggagttccagagagatattgttaaagcagctgaggcatttaccacgatcgggctcagacacattgaagcagggaccaagttgtctgaagactgttgtaggtatgggaacgaaatagtcaggaacattgatgagaatatactggccaaggctgcagctatatacggtgatgcacggaaacatgtagacaaagaacaagaagacttcaacaagcttttggcttctcaggttttggatcctctaagagctatggttgccggttctcctcttgaagatgctcgtcatcttgctcaacgttacagccgcatgagacaagaagcagagacacatgcaacggaagtctctagacggcaagcacgtgtaagagaagctccgattccagaaaacgtagcaaagcttcaactagcggaagcaaaaatgcaagagctaaaagcaaatatggcagtccttggtaaagaagcaactgctgcattagccgctgttgaatcacagcaacatagactcactttccagaggcttgtggctatggttgaaggggagaagaattatcacttaagaatagcagccatcctcagtgacattgaagccgagatggtaaccgagaaacaacacaaagaatctgctcttcctgcgattccaacagagaacggctcagagaaaacgtcatactttcttgctgaagtgattcatccattttccgctgtttcagagaaagagttagacttggacaaaggagattacatcgttgtccgaaaggtgagccaaaccggttgggctgaaggagaatgcaaaggcaaagctggttggtttcctatggcttacattgagaagcgacagagacttcccactaccaactttgctgctgaagtttactgagtctcttcttcaaagatttcattttttcttacatttgtgtctgaaaactttgtttcagttatgtcctgtccccaacaaactactactcttgttcatatttgttgatccaaaatagagtttacctcc

SEQ ID NO: 78001 - protein, 351 aa, Arabidopsis thaliana
  peptide (1)..(351): Ceres Seq. ID no. 12592281
MDAFRRQASKLRDQVAKQQLAVIKQFSGTGYESSDVMVIDELEMQRHHQLDKLYRSTRSAKEFQRDIVKAAEAFTTIGLRHIEAGTKLSEDCCRYGNEIVRNIDENILAKAAAIYGDARKHVDKEQEDFNKLLASQVLDPLRAMVAGSPLEDARHLAQRYSRMRQEAETHATEVSRRQARVREAPIPENVAKLQLAEAKMQELKANMAVLGKEATAALAAVESQQHRLTFQRLVAMVEGEKNYHLRIAAILSDIEAEMVTEKQHKESALPAIPTENGSEKTSYFLAEVIHPFSAVSEKELDLDKGDYIVVRKVSQTGWAEGECKGKAGWFPMAYIEKRQRLPTTNFAAEVY

SEQ ID NO: 78002 - protein, 315 aa, Arabidopsis thaliana
  peptide (1)..(315): Ceres Seq. ID no. 12592282
MVIDELEMQRHHQLDKLYRSTRSAKEFQRDIVKAAEAFTTIGLRHIEAGTKLSEDCCRYGNEIVRNIDENILAKAAAIYGDARKHVDKEQEDFNKLLASQVLDPLRAMVAGSPLEDARHLAQRYSRMRQEAETHATEVSRRQARVREAPIPENVAKLQLAEAKMQELKANMAVLGKEATAALAAVESQQHRLTFQRLVAMVEGEKNYHLRIAAILSDIEAEMVTEKQHKESALPAIPTENGSEKTSYFLAEVIHPFSAVSEKELDLDKGDYIVVRKVSQTGWAEGECKGKAGWFPMAYIEKRQRLPTTNFAAEVY

SEQ ID NO: 78003 - protein, 308 aa, Arabidopsis thaliana
  peptide (1)..(308): Ceres Seq. ID no. 12592283
MQRHHQLDKLYRSTRSAKEFQRDIVKAAEAFTTIGLRHIEAGTKLSEDCCRYGNEIVRNIDENILAKAAAIYGDARKHVDKEQEDFNKLLASQVLDPLRAMVAGSPLEDARHLAQRYSRMRQEAETHATEVSRRQARVREAPIPENVAKLQLAEAKMQELKANMAVLGKEATAALAAVESQQHRLTFQRLVAMVEGEKNYHLRIAAILSDIEAEMVTEKQHKESALPAIPTENGSEKTSYFLAEVIHPFSAVSEKELDLDKGDYIVVRKVSQTGWAEGECKGKAGWFPMAYIEKRQRLPTTNFAAEVY

SEQ ID NO: 78004 - DNA, 2421 bp, Arabidopsis thaliana
  misc_feature (1)..(2421): Ceres Seq. ID no. 12600453
  misc_feature (1)..(2421): Ortholog of  Ceres SEQ ID NO 14310097 as cited in SEQ ID NO 20591
tttctggttacagacagatacattccctctgagaaccaagaaaacaaaataataataaaaaaccctaattccccgctccacttctctctctcacgctctctctgtgattttagtatggaagcaacggcggaggaatcagttagtactcttgttacgacgatggttgatgagacgtatgagttcttagcgcctcgatggtttgatttcgttaatggagagactgaagatgagtctcgccgagcagaactctggtttcaatcggccttaagctgcgctccttctccttcggttcctagaatcaaagcaaggagatcgttcaaggtagaggccatgtgcaacttcaatgaagctgaagaagagacgctcaaggataaagagccgttagaaccagtagttccaattgtttctttacaatcgcagccttctcaggccaagaaagcagaagttgctccttctaaagcaagcactgttaagccgtctcgcatcagttccaaggacgcagaggtcaacaacaagaccgtagatgccaggttctccatcgttctttgggagattgtatcgctgttaagtgacgatccgacgactgagccaatagaagacaaggagaacattgctcctgcttgcacacccaaaccaccaatgcagttttctctaggggcaaagtcggtggatcttaagaagcagcaaactgctagaaagatagctagtctgctgaagaatccatctacactaaggcctaaaaaccagtctcaagccaaaggcagtcatcagaaaagtgtgaaaggggaaacgaatcttaacaacatagctagcactaccaatctgattcaagaaaatcaagccatcaaaaggcaaaagctagatgatggaaaatcaagacagattctcaatccaaaaccagcaactctgctccacaagacaagaaatggtcttgttaacactggtttcaacttatgcccttcagtcactaagcacactccgaaggaaaacagaaaggtttatgttcgtgagcaaattgcaccttttgtttcaactgctgaattgatgaagaagttccaaacaagcacgcgagacctattcgtccagaatcgacctaagctgacactgacaagaccaaaggaacccgaatttgtgacgtcccaacgagctcgtcctttgagagttaagagcagtgcagaacttgaggaagagatgttggcaaagattcccaagtttaaagctcgacctgtgaacaagaaggaatttcatcttcaaacaatggcaagggctaaccagcatgcagagacatcttcaatagcttcaacagaagtgtctaagcagcataatgatcagaagcatcaccttactgaaccaaagagccctgtgctccaaacaatgctaagagctcgtcctactatagcaaaaactactgcagaacttgagcaagaggaactggagaaggcaccaaagttcaaagcaaaacctttgaacaaaaagatatttgaaagtaaaggagaaatgggtatcttttgcaacaccaagaagcacataacgatacctcaagagtttcactttgcgacagatgagaggatatcacgaccagaatctgtcttagatatattcgacaaggaaagaggcgctgagaaagagaagaaattttatatggaactcatgtataagaaattaggagatgtaaaggcaagagttccaaaggcaaatccatatccttacacgacggactatccagtgaagagagagatggtgttgataaatcttacgtgttccaactctcaggtaccaccaaaaccagaacctaagcaatgcacacaaccagaaccgttccagttagagagtctagtaaggcacgaagaggaaatgcgaagagaaagggaagagaggaggagaatggagacagaagaagcccagaagaggctcttcaaagcacaaccagttataaaagaggacccaatccctgttccagagaaagtacgaatgcccctcacagaaattcaggagttcaatcttcatgtagagcatcgagctgttgaacgagcagattttgatcacaaagtaagcattcttttcagtcatttcagcaaacaaaagaatgcttcaataacctctgaaattgatgaatccattctattttggaaccagatcaaagagaaggagaaccagtacaaaagataccgtgaagagagtgaagctgcaaaaatggtggaggaagagagagctctgaagcaaatgagaaagacaatggttcctcatgccagacctgtgcctaacttcaacaaacccttcttacctcagaagtccaacaaggggaccacaaaagcaaaatcacccaatcttagagtgattaaaagaaccgagagaagaaccatgatggctcgaccaaccatctctgcagctactagcgcctctgctggtcagatgagatag

SEQ ID NO: 78005 - protein, 806 aa, Arabidopsis thaliana
  peptide (1)..(806): Ceres Seq. ID no. 12600454
FLVTDRYIPSENQENKIIIKNPNSPLHFSLSRSLCDFSMEATAEESVSTLVTTMVDETYEFLAPRWFDFVNGETEDESRRAELWFQSALSCAPSPSVPRIKARRSFKVEAMCNFNEAEEETLKDKEPLEPVVPIVSLQSQPSQAKKAEVAPSKASTVKPSRISSKDAEVNNKTVDARFSIVLWEIVSLLSDDPTTEPIEDKENIAPACTPKPPMQFSLGAKSVDLKKQQTARKIASLLKNPSTLRPKNQSQAKGSHQKSVKGETNLNNIASTTNLIQENQAIKRQKLDDGKSRQILNPKPATLLHKTRNGLVNTGFNLCPSVTKHTPKENRKVYVREQIAPFVSTAELMKKFQTSTRDLFVQNRPKLTLTRPKEPEFVTSQRARPLRVKSSAELEEEMLAKIPKFKARPVNKKEFHLQTMARANQHAETSSIASTEVSKQHNDQKHHLTEPKSPVLQTMLRARPTIAKTTAELEQEELEKAPKFKAKPLNKKIFESKGEMGIFCNTKKHITIPQEFHFATDERISRPESVLDIFDKERGAEKEKKFYMELMYKKLGDVKARVPKANPYPYTTDYPVKREMVLINLTCSNSQVPPKPEPKQCTQPEPFQLESLVRHEEEMRREREERRRMETEEAQKRLFKAQPVIKEDPIPVPEKVRMPLTEIQEFNLHVEHRAVERADFDHKVSILFSHFSKQKNASITSEIDESILFWNQIKEKENQYKRYREESEAAKMVEEERALKQMRKTMVPHARPVPNFNKPFLPQKSNKGTTKAKSPNLRVIKRTERRTMMARPTISAATSASAGQMR

SEQ ID NO: 78006 - protein, 768 aa, Arabidopsis thaliana
  peptide (1)..(768): Ceres Seq. ID no. 12600455
MEATAEESVSTLVTTMVDETYEFLAPRWFDFVNGETEDESRRAELWFQSALSCAPSPSVPRIKARRSFKVEAMCNFNEAEEETLKDKEPLEPVVPIVSLQSQPSQAKKAEVAPSKASTVKPSRISSKDAEVNNKTVDARFSIVLWEIVSLLSDDPTTEPIEDKENIAPACTPKPPMQFSLGAKSVDLKKQQTARKIASLLKNPSTLRPKNQSQAKGSHQKSVKGETNLNNIASTTNLIQENQAIKRQKLDDGKSRQILNPKPATLLHKTRNGLVNTGFNLCPSVTKHTPKENRKVYVREQIAPFVSTAELMKKFQTSTRDLFVQNRPKLTLTRPKEPEFVTSQRARPLRVKSSAELEEEMLAKIPKFKARPVNKKEFHLQTMARANQHAETSSIASTEVSKQHNDQKHHLTEPKSPVLQTMLRARPTIAKTTAELEQEELEKAPKFKAKPLNKKIFESKGEMGIFCNTKKHITIPQEFHFATDERISRPESVLDIFDKERGAEKEKKFYMELMYKKLGDVKARVPKANPYPYTTDYPVKREMVLINLTCSNSQVPPKPEPKQCTQPEPFQLESLVRHEEEMRREREERRRMETEEAQKRLFKAQPVIKEDPIPVPEKVRMPLTEIQEFNLHVEHRAVERADFDHKVSILFSHFSKQKNASITSEIDESILFWNQIKEKENQYKRYREESEAAKMVEEERALKQMRKTMVPHARPVPNFNKPFLPQKSNKGTTKAKSPNLRVIKRTERRTMMARPTISAATSASAGQMR

SEQ ID NO: 78007 - protein, 753 aa, Arabidopsis thaliana
  peptide (1)..(753): Ceres Seq. ID no. 12600456
MVDETYEFLAPRWFDFVNGETEDESRRAELWFQSALSCAPSPSVPRIKARRSFKVEAMCNFNEAEEETLKDKEPLEPVVPIVSLQSQPSQAKKAEVAPSKASTVKPSRISSKDAEVNNKTVDARFSIVLWEIVSLLSDDPTTEPIEDKENIAPACTPKPPMQFSLGAKSVDLKKQQTARKIASLLKNPSTLRPKNQSQAKGSHQKSVKGETNLNNIASTTNLIQENQAIKRQKLDDGKSRQILNPKPATLLHKTRNGLVNTGFNLCPSVTKHTPKENRKVYVREQIAPFVSTAELMKKFQTSTRDLFVQNRPKLTLTRPKEPEFVTSQRARPLRVKSSAELEEEMLAKIPKFKARPVNKKEFHLQTMARANQHAETSSIASTEVSKQHNDQKHHLTEPKSPVLQTMLRARPTIAKTTAELEQEELEKAPKFKAKPLNKKIFESKGEMGIFCNTKKHITIPQEFHFATDERISRPESVLDIFDKERGAEKEKKFYMELMYKKLGDVKARVPKANPYPYTTDYPVKREMVLINLTCSNSQVPPKPEPKQCTQPEPFQLESLVRHEEEMRREREERRRMETEEAQKRLFKAQPVIKEDPIPVPEKVRMPLTEIQEFNLHVEHRAVERADFDHKVSILFSHFSKQKNASITSEIDESILFWNQIKEKENQYKRYREESEAAKMVEEERALKQMRKTMVPHARPVPNFNKPFLPQKSNKGTTKAKSPNLRVIKRTERRTMMARPTISAATSASAGQMR

SEQ ID NO: 78008 - DNA, 1891 bp, Arabidopsis thaliana
  misc_feature (1)..(1891): Ceres Seq. ID no. 12600627
  misc_feature (1)..(1891): Ortholog of  Ceres SEQ ID NO 12607856 as cited in SEQ ID NO 55419
aactcatcttcacagatgtctcaagcagctctctctctttctctctctctctctcttctttctctgatcacaagggttatttgtctgaatctcattctattgagtcattattgacctctgcagagatccggacaaagttttgaaaccgaccacaagtccaagaatcatcgatcatacaacaatgtctggagactctctgctcacatctaaacaaggaggaggttctttgtccatatactcacagccaaagaatgttactaaagagttcaacggtcgtgattcccccaagaacagcaaattccaccattacagatttgagctcgagcacgatgtgaagcgattgaaaaatcaattgcagaaagagactgcaatgcgcgctcttttgctgaaagcttctgatcaaagccataagattgagctgtctcacgcatcttctcttcctcgcagtgttcaagaacttctcaccaatatagcagctatggaagctacggtctctaagctcgaacaagagatcatgtctctgcatttcttgctgattcaagaacgaaacgagagaaaacttgccgagtacaacctcacccattctctatctccacctaatgctttagatttggttagactttccgaaaagaatgaaagtctacgccctaaagaccacaaagcacaacctagaagcaaagtggcaaagtccttgcagagttttgacaatgctaatgaactatccaaggagatgatcagatgcatgagaaacatatttgtgtctctaggagagacatctgcaggatccaaatcctcacaagagactgccagtgtttcttctcgtgagaatcctccatcatcatcaacgtcatggtggtctccttcagaacactcacggatctccaggtgggcacagagtccacggatcgatattcagaagaactcagatgttttagccacagagagcgatgtgtttgatctttatacagtccaaggaaagctgagctgggctgacatcgggagttacagatctgcaactgaagtggcttcaatgtctgttgaggagaaaaggctcggatatgcttcagatgagttatggagattcaggaacctcgttgaaagacttgccagagtaaatccagcagaactaagccacaacgagaagcttgccttctggatcaacatatacaatgccatgatcatgcatgcatacttggcttacggcgtaccaaaaactgacttaaagctcttctccttgatgcaaaaggctgcttatacagttggtggccattcatacaacgcagcaacgatcgaatacatgactttaaagatgagccctcctctgcatcgtcctcaaattgctctgcttctctccattctcaagctgaaagtatcagacgaacagagacaagcggggataagtacaccggaacctctagtgtcatttgctctcagctgcgggatgcactcatctcctgcggtgagaatatactcagccgagaacgtaggagaagaacttgaagaagctcagaaagattatatccaggcgtcagtgggagtgagcccaaggggaaagttgattgtgccccaaatgcttcactgtttcgccaagaaatctgtcgatgactgcaaggttgctctgtggatttctcgtcatttgcctcctcgccaagctgcatttgttgagcagtgtattcacaggcgacaatggtggggttttctgggttcatctagtagcaaatgcggcatagttccttttgattcacggttccgatatttgtttcttccgtagcaaggcattgattcacaatgatgtgattaaagcaaatactgttccgatcctagggtttagatctatgattatttaggtgattcaatcttattttctcaaactaataaacaaataaatgga

SEQ ID NO: 78009 - protein, 529 aa, Arabidopsis thaliana
  peptide (1)..(529): Ceres Seq. ID no. 12600628
MSGDSLLTSKQGGGSLSIYSQPKNVTKEFNGRDSPKNSKFHHYRFELEHDVKRLKNQLQKETAMRALLLKASDQSHKIELSHASSLPRSVQELLTNIAAMEATVSKLEQEIMSLHFLLIQERNERKLAEYNLTHSLSPPNALDLVRLSEKNESLRPKDHKAQPRSKVAKSLQSFDNANELSKEMIRCMRNIFVSLGETSAGSKSSQETASVSSRENPPSSSTSWWSPSEHSRISRWAQSPRIDIQKNSDVLATESDVFDLYTVQGKLSWADIGSYRSATEVASMSVEEKRLGYASDELWRFRNLVERLARVNPAELSHNEKLAFWINIYNAMIMHAYLAYGVPKTDLKLFSLMQKAAYTVGGHSYNAATIEYMTLKMSPPLHRPQIALLLSILKLKVSDEQRQAGISTPEPLVSFALSCGMHSSPAVRIYSAENVGEELEEAQKDYIQASVGVSPRGKLIVPQMLHCFAKKSVDDCKVALWISRHLPPRQAAFVEQCIHRRQWWGFLGSSSSKCGIVPFDSRFRYLFLP

SEQ ID NO: 78010 - protein, 466 aa, Arabidopsis thaliana
  peptide (1)..(466): Ceres Seq. ID no. 12600629
MRALLLKASDQSHKIELSHASSLPRSVQELLTNIAAMEATVSKLEQEIMSLHFLLIQERNERKLAEYNLTHSLSPPNALDLVRLSEKNESLRPKDHKAQPRSKVAKSLQSFDNANELSKEMIRCMRNIFVSLGETSAGSKSSQETASVSSRENPPSSSTSWWSPSEHSRISRWAQSPRIDIQKNSDVLATESDVFDLYTVQGKLSWADIGSYRSATEVASMSVEEKRLGYASDELWRFRNLVERLARVNPAELSHNEKLAFWINIYNAMIMHAYLAYGVPKTDLKLFSLMQKAAYTVGGHSYNAATIEYMTLKMSPPLHRPQIALLLSILKLKVSDEQRQAGISTPEPLVSFALSCGMHSSPAVRIYSAENVGEELEEAQKDYIQASVGVSPRGKLIVPQMLHCFAKKSVDDCKVALWISRHLPPRQAAFVEQCIHRRQWWGFLGSSSSKCGIVPFDSRFRYLFLP

SEQ ID NO: 78011 - protein, 430 aa, Arabidopsis thaliana
  peptide (1)..(430): Ceres Seq. ID no. 12600630
MEATVSKLEQEIMSLHFLLIQERNERKLAEYNLTHSLSPPNALDLVRLSEKNESLRPKDHKAQPRSKVAKSLQSFDNANELSKEMIRCMRNIFVSLGETSAGSKSSQETASVSSRENPPSSSTSWWSPSEHSRISRWAQSPRIDIQKNSDVLATESDVFDLYTVQGKLSWADIGSYRSATEVASMSVEEKRLGYASDELWRFRNLVERLARVNPAELSHNEKLAFWINIYNAMIMHAYLAYGVPKTDLKLFSLMQKAAYTVGGHSYNAATIEYMTLKMSPPLHRPQIALLLSILKLKVSDEQRQAGISTPEPLVSFALSCGMHSSPAVRIYSAENVGEELEEAQKDYIQASVGVSPRGKLIVPQMLHCFAKKSVDDCKVALWISRHLPPRQAAFVEQCIHRRQWWGFLGSSSSKCGIVPFDSRFRYLFLP

SEQ ID NO: 78012 - DNA, 2993 bp, Arabidopsis thaliana
  misc_feature (1)..(2993): Ceres Seq. ID no. 12600682
  misc_feature (1)..(2993): Ortholog of  Ceres SEQ ID NO 15176051 as cited in SEQ ID NO 53434
  misc_feature (1)..(2993): Ortholog of  Ceres SEQ ID NO 15170306 as cited in SEQ ID NO 58219
  misc_feature (1)..(2993): Ortholog of  Ceres SEQ ID NO 12465091 as cited in SEQ ID NO 65947
agaacgcaaccaaataaagaaagctctcaaactcagtcttgaagcttcaactttatatctaccatatcatcaactaactaattctttttaaaatggctttagctaatgagataatgggttctcgtctaatcttcgagagatcatcatcacttgcgtctccgtttcattcgcgtttctccatcaagaagaagacacagagaacacagttctccatcaacccttttgatccgagacctatgagagccgttaactcaagcggcgttgtagcggccatcagcgaggatttggttaaaacgctgcgtattagcactgtcggtagaaaacaagagaaggaggaagaagaggagaagtcggtgaagtttaaggtgagagcagttgcgacggtgaggaacaaaaacaaagaggattttaaagaaactttggttaagcatttggatgcttttactgataaaattggtagaaacgttgtcttggagcttatgagtacccaagttgatccaaaaacgaatgagccaaagaagagtaaagcggcagttttgaaagattggtcaaagaaatcaaattcaaaggcggaaagagtccattacacggccgagttcacggtggattcagcctttggttctccgggagccatcaccgtgaccaacaaacaccaaaaagagttctttcttgagagcatcaccatcgagggtttcgcatgtggccctgttcacttcccctgcaactcttgggtccaatctcaaaaagaccatccatccaaacgaattctcttcactaatcagccttacttgccgagcgagacaccgtccggtctaagaacattaagggagaaagaattggagaatctaagaggaaatggtaaaggagaaagaaaattatcagacagaatctacgattatgatgtgtacaacgacataggaaatccggacatatcacgtgaactagcccgtcccacacttggtggccgtgaatttccttaccctagacgctgtcgaaccggccggtcttcaaccgacaccgatatgatgtctgagaggcgggtggagaaaccattaccgatgtatgtgccaagagatgagcagttcgaggagtctaagcagaacacttttgctgcatgtagacttaaggcggttttacataaccttataccttcactaaaagctagcattttggctgaggacttcgctaactttggtgagatcgatagtctttacaaagaaggcttgcttctcaagttagggtttcaagatgatatgttcaagaaattccctttaccgaagatcgtcactaccctccaaaaatcaagcgagggcttgcttagatacgacactcctaaaatagtttcaaaggataaatatgcatggcttcgagatgacgagttcgcacgccaagccatagctgggatcaacccggtcaacatagaacgagtcacgtcttatccaccggtcagcaatcttgaccctgaaatctacggaccaggtcttcactccgctctcacggaagaccacatcatcggtcaacttgatggcttaaccgtacaacaagcgttagagacgaaccgtttgtttatggtggactaccatgacatatacttaccgtttctagatagaatcaacgcgcttgatggacgcaaggcttacgcgactcgaaccatattgttcttgacccgactcggtacactcaagcctatcgccatcgagctaagcctcccttctcaatcaagctcaaaccaaaagtccaagcgcgtggtcacacctccagtagacgcaacctccaactggatgtggcagctagccaaggcccacgttgggtccaatgacgctggtgtccaccagcttgtgaatcattggttacgtactcatgcgtgtttggaaccgtttatattagctgctcatagacaattaagcgcaatgcatccgatattcaaattattagaccctcacatgaggtacactttggagatcaatgccgtggcacgacagactttgattagtgcggacggtgtgatcgagtcgtgcttcactgctggtcaatacggtctagagattagttccgctgcgtataagaacaaatggcggtttgatatggaaggtctccctgctgatctcatccgaagggggatggctgttccagacccaacacaaccacatgggcttaaattacttgttgaagactacccatacgccaacgacggtctcttattatggtccgcaatccaaacttgggtccgaacctacgtggaacgttattacgcaaactcgaacctaatccaaaccgatactgagctccaagcctggtactctgagtcaatcaacgtaggtcacgctgatcaccgcgacgccgagtggtggccgaagctttccaccgtcgaagatctcgtctccgtcatcaccaccatcatctggctcgcctcggcacaacacgcggcactcaacttcggacaatatccttacggtggctacgtcccgaaccgaccaccgctaatgcggcggttgattcccgacgagtcagatcccgagttcacgagttttatcgaagatcctcaaaagtattttttctcgtcgatgccgagtttattgcaaacgacgaagtttatggcggtggttgatacattgtcgacacattcgccggatgaggagtatatcggagagagacaacaaccgtcgatatggactggagatgctgagatcgtagatgcgttttatggattctcggcggaaatcggacggatagagaaggagattgacaagaggaatcgtgatcctagccgtaggaatcgctgtggcgcgggagtgttaccgtatgagttgatggctccgagttctgaaccgggtgttacgtgtagaggagtgcctaatagtgtatctatttagaattattcaatttttcaaagtatagagaattttataagtatataattagattttgacgcagtatggtttatttgccgatattgtaaaattcttacaaggattttattatgttgatttatt

SEQ ID NO: 78013 - protein, 926 aa, Arabidopsis thaliana
  peptide (1)..(926): Ceres Seq. ID no. 12600683
MALANEIMGSRLIFERSSSLASPFHSRFSIKKKTQRTQFSINPFDPRPMRAVNSSGVVAAISEDLVKTLRISTVGRKQEKEEEEEKSVKFKVRAVATVRNKNKEDFKETLVKHLDAFTDKIGRNVVLELMSTQVDPKTNEPKKSKAAVLKDWSKKSNSKAERVHYTAEFTVDSAFGSPGAITVTNKHQKEFFLESITIEGFACGPVHFPCNSWVQSQKDHPSKRILFTNQPYLPSETPSGLRTLREKELENLRGNGKGERKLSDRIYDYDVYNDIGNPDISRELARPTLGGREFPYPRRCRTGRSSTDTDMMSERRVEKPLPMYVPRDEQFEESKQNTFAACRLKAVLHNLIPSLKASILAEDFANFGEIDSLYKEGLLLKLGFQDDMFKKFPLPKIVTTLQKSSEGLLRYDTPKIVSKDKYAWLRDDEFARQAIAGINPVNIERVTSYPPVSNLDPEIYGPGLHSALTEDHIIGQLDGLTVQQALETNRLFMVDYHDIYLPFLDRINALDGRKAYATRTILFLTRLGTLKPIAIELSLPSQSSSNQKSKRVVTPPVDATSNWMWQLAKAHVGSNDAGVHQLVNHWLRTHACLEPFILAAHRQLSAMHPIFKLLDPHMRYTLEINAVARQTLISADGVIESCFTAGQYGLEISSAAYKNKWRFDMEGLPADLIRRGMAVPDPTQPHGLKLLVEDYPYANDGLLLWSAIQTWVRTYVERYYANSNLIQTDTELQAWYSESINVGHADHRDAEWWPKLSTVEDLVSVITTIIWLASAQHAALNFGQYPYGGYVPNRPPLMRRLIPDESDPEFTSFIEDPQKYFFSSMPSLLQTTKFMAVVDTLSTHSPDEEYIGERQQPSIWTGDAEIVDAFYGFSAEIGRIEKEIDKRNRDPSRRNRCGAGVLPYELMAPSSEPGVTCRGVPNSVSI

SEQ ID NO: 78014 - protein, 919 aa, Arabidopsis thaliana
  peptide (1)..(919): Ceres Seq. ID no. 12600684
MGSRLIFERSSSLASPFHSRFSIKKKTQRTQFSINPFDPRPMRAVNSSGVVAAISEDLVKTLRISTVGRKQEKEEEEEKSVKFKVRAVATVRNKNKEDFKETLVKHLDAFTDKIGRNVVLELMSTQVDPKTNEPKKSKAAVLKDWSKKSNSKAERVHYTAEFTVDSAFGSPGAITVTNKHQKEFFLESITIEGFACGPVHFPCNSWVQSQKDHPSKRILFTNQPYLPSETPSGLRTLREKELENLRGNGKGERKLSDRIYDYDVYNDIGNPDISRELARPTLGGREFPYPRRCRTGRSSTDTDMMSERRVEKPLPMYVPRDEQFEESKQNTFAACRLKAVLHNLIPSLKASILAEDFANFGEIDSLYKEGLLLKLGFQDDMFKKFPLPKIVTTLQKSSEGLLRYDTPKIVSKDKYAWLRDDEFARQAIAGINPVNIERVTSYPPVSNLDPEIYGPGLHSALTEDHIIGQLDGLTVQQALETNRLFMVDYHDIYLPFLDRINALDGRKAYATRTILFLTRLGTLKPIAIELSLPSQSSSNQKSKRVVTPPVDATSNWMWQLAKAHVGSNDAGVHQLVNHWLRTHACLEPFILAAHRQLSAMHPIFKLLDPHMRYTLEINAVARQTLISADGVIESCFTAGQYGLEISSAAYKNKWRFDMEGLPADLIRRGMAVPDPTQPHGLKLLVEDYPYANDGLLLWSAIQTWVRTYVERYYANSNLIQTDTELQAWYSESINVGHADHRDAEWWPKLSTVEDLVSVITTIIWLASAQHAALNFGQYPYGGYVPNRPPLMRRLIPDESDPEFTSFIEDPQKYFFSSMPSLLQTTKFMAVVDTLSTHSPDEEYIGERQQPSIWTGDAEIVDAFYGFSAEIGRIEKEIDKRNRDPSRRNRCGAGVLPYELMAPSSEPGVTCRGVPNSVSI

SEQ ID NO: 78015 - protein, 878 aa, Arabidopsis thaliana
  peptide (1)..(878): Ceres Seq. ID no. 12600685
MRAVNSSGVVAAISEDLVKTLRISTVGRKQEKEEEEEKSVKFKVRAVATVRNKNKEDFKETLVKHLDAFTDKIGRNVVLELMSTQVDPKTNEPKKSKAAVLKDWSKKSNSKAERVHYTAEFTVDSAFGSPGAITVTNKHQKEFFLESITIEGFACGPVHFPCNSWVQSQKDHPSKRILFTNQPYLPSETPSGLRTLREKELENLRGNGKGERKLSDRIYDYDVYNDIGNPDISRELARPTLGGREFPYPRRCRTGRSSTDTDMMSERRVEKPLPMYVPRDEQFEESKQNTFAACRLKAVLHNLIPSLKASILAEDFANFGEIDSLYKEGLLLKLGFQDDMFKKFPLPKIVTTLQKSSEGLLRYDTPKIVSKDKYAWLRDDEFARQAIAGINPVNIERVTSYPPVSNLDPEIYGPGLHSALTEDHIIGQLDGLTVQQALETNRLFMVDYHDIYLPFLDRINALDGRKAYATRTILFLTRLGTLKPIAIELSLPSQSSSNQKSKRVVTPPVDATSNWMWQLAKAHVGSNDAGVHQLVNHWLRTHACLEPFILAAHRQLSAMHPIFKLLDPHMRYTLEINAVARQTLISADGVIESCFTAGQYGLEISSAAYKNKWRFDMEGLPADLIRRGMAVPDPTQPHGLKLLVEDYPYANDGLLLWSAIQTWVRTYVERYYANSNLIQTDTELQAWYSESINVGHADHRDAEWWPKLSTVEDLVSVITTIIWLASAQHAALNFGQYPYGGYVPNRPPLMRRLIPDESDPEFTSFIEDPQKYFFSSMPSLLQTTKFMAVVDTLSTHSPDEEYIGERQQPSIWTGDAEIVDAFYGFSAEIGRIEKEIDKRNRDPSRRNRCGAGVLPYELMAPSSEPGVTCRGVPNSVSI

SEQ ID NO: 78016 - DNA, 1009 bp, Arabidopsis thaliana
  misc_feature (1)..(1009): Ceres Seq. ID no. 12600686
  misc_feature (1)..(1009): Ortholog of  Ceres SEQ ID NO 13594464 as cited in SEQ ID NO 51203
  misc_feature (1)..(1009): Ortholog of  Ceres SEQ ID NO 15224956 as cited in SEQ ID NO 59487
aacaaaaaccttttgattccaattgttcttctctcttcttcttcttcttcttcttcttcttcttcgccgcttcttctctctcgaattcaccccatctcaagtgtacgttagcctcctccctctaatggcgactcgtcttcagtttgagaacaactgcgaagttggtgtcttttccaaactcactaatgcctattgcttagtcgctataggaggctctgagaacttttacagtgcttttgagtcggagttagcagatgttatccctattgttaagacctctattggaggaacacgaattattgggcgtctttgtgctggaaacaagaatgggcttcttgtacctcatacaacaactgaccaagagcttcaacacttaaggaacagtctacctgatcaagttgtggtccagcgaattgatgaacgtctgtctgctcttggaaattgcattgcctgcaatgactatgtagctcttgcccacaccgatcttgataaggaaaccgaggaaataatagcggatgtacttggcgttgaagttttccgtcagacaattgcaggcaacattctcgtgggcagttactgtgccctatccaacaaaggtggaatggtccatcctcacacctcagtggaagacttggaagaactctcaacacttcttcaagtccctctcgttgcaggaaccgtgaaccgtggtagtgaagttatcgctgcgggtatgaccgttaatgattggacctctttctgcggttcagacacaactgcgactgagctctctgtcatagacagcatcttcaagctaagggaagcccaacccagctctatcgtcgatgagatgaggaagtcattgatcgatacctatgtttaaattttgtttgtttggatgacacacacatcccaacatcgccaatgtgtcaatgtcagaaaattttcatactctactgtttgcaagaattagctgttttattttatttttgtgtggtttttaacagtttaaaggaaatctgttgatgtc

SEQ ID NO: 78017 - protein, 245 aa, Arabidopsis thaliana
  peptide (1)..(245): Ceres Seq. ID no. 12600687
MATRLQFENNCEVGVFSKLTNAYCLVAIGGSENFYSAFESELADVIPIVKTSIGGTRIIGRLCAGNKNGLLVPHTTTDQELQHLRNSLPDQVVVQRIDERLSALGNCIACNDYVALAHTDLDKETEEIIADVLGVEVFRQTIAGNILVGSYCALSNKGGMVHPHTSVEDLEELSTLLQVPLVAGTVNRGSEVIAAGMTVNDWTSFCGSDTTATELSVIDSIFKLREAQPSSIVDEMRKSLIDTYV

SEQ ID NO: 78018 - DNA, 1111 bp, Arabidopsis thaliana
  misc_feature (1)..(1111): Ceres Seq. ID no. 12600756
  misc_feature (1)..(1111): Ortholog of  Ceres SEQ ID NO 14305682 as cited in SEQ ID NO 59267
  misc_feature (1)..(1111): Ortholog of  Ceres SEQ ID NO 14315060 as cited in SEQ ID NO 60039
  misc_feature (1)..(1111): Ortholog of  Ceres SEQ ID NO 13594430 as cited in SEQ ID NO 60181
  misc_feature (1)..(1111): Ortholog of  Ceres SEQ ID NO 13597809 as cited in SEQ ID NO 64598
  misc_feature (1)..(1111): Ortholog of  Ceres SEQ ID NO 14313544 as cited in SEQ ID NO 68424
  misc_feature (1)..(1111): Ortholog of  Ceres SEQ ID NO 12617960 as cited in SEQ ID NO 69051
  misc_feature (1)..(1111): Ortholog of  Ceres SEQ ID NO 13589401 as cited in SEQ ID NO 0
gccattgcttaatcctctcctctccttcacgttgagatatttttgagttttctgtgttgaattttggggaatcgaagaaattgaatttcaaaaatcaatggcggaagaaattgaaaaatctgtgccgacagaggaatctctgatggagaagatctccgagaagattcaccatcacgattcgtcgtcatcgtctgaatccgagtacgagaaacctgattctccttcggctgtgaaggcgaagatctatcgtatgtttggcagagagaagcctgttcacaaggttctcggtggtggaaagcctgctgatgtgttcttgtggagggataaaaaactatcaggtgctgttcttggtgtcgcgactgctatttgggttctgttcgagctggttgagtatcatttgttgagtcttttgtgtcacatttcgatactcgctcttggaggcctctttttgtggtccaatgctcacacacttatcaacaagacttcaccacaaattccagaaatccatgttcccgaggaggctttccttgtggttgcttcttctctgagaaacgaactaaaccaagcttttgttatcctacgaagcattgctttaggaagggacctaaaaaaattcctgatggttgttgtcggtctatggatcatctcggtggtgggcaattggttcaatttcctgactttggtgtacatttgcttcgtgatattgcacacagtcccaatgttgtatgagaaacacgaggacaaggttgatccattggcagagaaagcaatgaaggagttgcagaaacagtatgtggttttcgatgaaaaggttctctctaagattcccattgcttctctcaaggcaaaggcaaaattgggttaaaaagagagacagacgtctatggttttctttttgcatttttgatcatgtgaaattggtggtcacttgcagggttttgccgctaatggcccaactgtcctttttatgattttatcacgttttgagtacacttgttttttcttttcaaataccattttttccagctttttatggagaattcttgagctcatgaaacgtgagacattgtttcgttttgaatattccacaaatatagaagatataaatcac

SEQ ID NO: 78019 - protein, 255 aa, Arabidopsis thaliana; identical to SEQ ID NO: 41576
  peptide (1)..(255): Ceres Seq. ID no. 12600757

SEQ ID NO: 78020 - protein, 240 aa, Arabidopsis thaliana; identical to SEQ ID NO: 41577
  peptide (1)..(240): Ceres Seq. ID no. 12600758

SEQ ID NO: 78021 - protein, 204 aa, Arabidopsis thaliana; identical to SEQ ID NO: 41578
  peptide (1)..(204): Ceres Seq. ID no. 12600759

SEQ ID NO: 78022 - DNA, 1658 bp, Arabidopsis thaliana
  misc_feature (1)..(1658): Ceres Seq. ID no. 12600913
  misc_feature (1)..(1658): Ortholog of  Ceres SEQ ID NO 14308540 as cited in SEQ ID NO 58898
acgaagattctcttgctcgaacaaaaaaattctctccgcgatacttacaaagcacaagtgagctagctttgagaaagattcaatttttgagccttaagattgtgatgggagttgtgtctatttcaagttcagctgcaagatctccactcgggttgggcaacgatcttttgacacatcggtcttcacttaaaaagccatccattgttgcttttaaagccgatgattccagcaattcagctttgatcattcctcctcgtgagcaagttttgattcctgctgaaaagcataatgagaagaagagagaagtaacgaggagaaagccttgtaaaaccccgaaaaaaccgctttccttggaacataattcggctccttcgtgttcgttaggagtagattacaatgaagctgctgcaagacttgaaagcatatacaagcttagtcctgcaacaaccacattagtcgaggatgatgttgaagatggcggctctaaagccaaagtttcacggaggagaaaaaggaaagaaagtggtgaggagaagaaagtggttgtgaggaataatgtgaagaaggaaaaacgtatgagtcttgataaacggattgctttgaagagaaacgttcaagagaaaccagtcgttgcttctgttgataagaaagtaacaaagaggcagcaagaagaggagaagatcgagaggcttgtgcgggactattcagcttctaatgatatagtgagcttggactggaaaaaaatgaagatacctcctgttctttcttctactgaacatgcttggttgttcaagttgatgcaacctatgaaggctcttcttgaagtgaaagatgtattgcaaaagagcttgggaagagagcctagggaagctgaaatagccggggagatcaatatgactgcgggtgaagtaaaaaagaaaatcgaaataggtagagctgcaagaaacaaacttattaagcacaatctccggcttgtcttgtttgttatgaacaaatactttcatgagtttaccaacggaccaaaattccaagacctttgtcaagcgggtatgagagggcttatcacagcaattgaccgctttgagccgaaaaggaagtttcgtctttcgacttatggtttgttttggattagacatgccatcatacggtcaatgacaacttcaaacttcactcgtgtcccatttggacttgaatcggttagagtggagatatataaagcaaagactgagctatggtttgagatgggaagacctccaacggaggacgaggtagttgagagactcaagataacacctgagagataccgtgaagtattgagggctgcaaaaccggttttgtcactaaattcaaaacattcggttactcaagaagaattcatcaacggaatcacagatgttgatggtgttggagctaataacagcagacagcctgctcttctcaggctcgctctcgacgatgtgctcgattcattgaagccgaaagagagtctggttattcgacagaggtacggtcttgatggaaaaggcgacaggactctaggagagatagctggaaatctcaacatctctagagaaatggttaggaaacatgaagtcaaggccttgatgaagcttaagcatcaggccagagttgattaccttcgtcaatacatcgtctaa

SEQ ID NO: 78023 - protein, 551 aa, Arabidopsis thaliana
  peptide (1)..(551): Ceres Seq. ID no. 12600914
EDSLARTKKFSPRYLQSTSELALRKIQFLSLKIVMGVVSISSSAARSPLGLGNDLLTHRSSLKKPSIVAFKADDSSNSALIIPPREQVLIPAEKHNEKKREVTRRKPCKTPKKPLSLEHNSAPSCSLGVDYNEAAARLESIYKLSPATTTLVEDDVEDGGSKAKVSRRRKRKESGEEKKVVVRNNVKKEKRMSLDKRIALKRNVQEKPVVASVDKKVTKRQQEEEKIERLVRDYSASNDIVSLDWKKMKIPPVLSSTEHAWLFKLMQPMKALLEVKDVLQKSLGREPREAEIAGEINMTAGEVKKKIEIGRAARNKLIKHNLRLVLFVMNKYFHEFTNGPKFQDLCQAGMRGLITAIDRFEPKRKFRLSTYGLFWIRHAIIRSMTTSNFTRVPFGLESVRVEIYKAKTELWFEMGRPPTEDEVVERLKITPERYREVLRAAKPVLSLNSKHSVTQEEFINGITDVDGVGANNSRQPALLRLALDDVLDSLKPKESLVIRQRYGLDGKGDRTLGEIAGNLNISREMVRKHEVKALMKLKHQARVDYLRQYIV

SEQ ID NO: 78024 - protein, 517 aa, Arabidopsis thaliana
  peptide (1)..(517): Ceres Seq. ID no. 12600915
MGVVSISSSAARSPLGLGNDLLTHRSSLKKPSIVAFKADDSSNSALIIPPREQVLIPAEKHNEKKREVTRRKPCKTPKKPLSLEHNSAPSCSLGVDYNEAAARLESIYKLSPATTTLVEDDVEDGGSKAKVSRRRKRKESGEEKKVVVRNNVKKEKRMSLDKRIALKRNVQEKPVVASVDKKVTKRQQEEEKIERLVRDYSASNDIVSLDWKKMKIPPVLSSTEHAWLFKLMQPMKALLEVKDVLQKSLGREPREAEIAGEINMTAGEVKKKIEIGRAARNKLIKHNLRLVLFVMNKYFHEFTNGPKFQDLCQAGMRGLITAIDRFEPKRKFRLSTYGLFWIRHAIIRSMTTSNFTRVPFGLESVRVEIYKAKTELWFEMGRPPTEDEVVERLKITPERYREVLRAAKPVLSLNSKHSVTQEEFINGITDVDGVGANNSRQPALLRLALDDVLDSLKPKESLVIRQRYGLDGKGDRTLGEIAGNLNISREMVRKHEVKALMKLKHQARVDYLRQYIV

SEQ ID NO: 78025 - protein, 360 aa, Arabidopsis thaliana; identical to SEQ ID NO: 48598
  peptide (1)..(360): Ceres Seq. ID no. 12600916

SEQ ID NO: 78026 - DNA, 989 bp, Arabidopsis thaliana
  misc_feature (1)..(989): Ceres Seq. ID no. 12600917
  misc_feature (1)..(989): Ortholog of  Ceres SEQ ID NO 14313170 as cited in SEQ ID NO 20674
acatactcagtaagcgagtccgagtcaacaatggacgtctacggcatgtcttcaccggacttgcttcgtatcgacgaccttctcgatttctccaacgacgaaatcttctcttcctcttccaccgtcacttcctccgccgcttcctccgccgcttcttccgaaaaccctttcagctttccttcttccacctacacttctcctactctcctcaccgacttcactcacgatctctgcgttcccagtgacgacgcagctcatctcgaatggttatcgcgattcgttgacgattcattctccgatttcccagcaaatcctttaaccatgaccgttagacccgagatttcattcaccggaaaacctagaagtcgccgatcaagagcaccagcaccttccgtagctggaacttgggctccgatgtctgaatcagagctttgtcactccgtcgctaaacctaaaccgaagaaagtctacaacgctgaatcggttacggcggatggagcgaggcggtgcacgcactgtgcctcggagaaaacgccacagtggagaactggaccgcttggacctaaaacactttgtaacgcttgtggagttcgttacaaatcagggaggcttgtaccggaatacagaccggcgtcgagtccgacgtttgtattgactcagcattcgaactctcatcggaaagttatggagctccggcgacagaaggaacaacaagaatcttgcgttcgaattccgccgtttcagccgcagtaaatttgggggttttcttttcaagggtttttgtgatttggtgacgtgtcgtaatcttaacggtgatgatcacgtgaccgacgggaggggttaaggacttaattatcagtattagtttaaagtttgcaaatctctgctaattaatttgttggtaatttctattgatttttttcttgcttttgtttattggtctcacggctctccttaaagttatatcattaaatgatttcattggcggc

SEQ ID NO: 78027 - protein, 250 aa, Arabidopsis thaliana
  peptide (1)..(250): Ceres Seq. ID no. 12600918
TYSVSESESTMDVYGMSSPDLLRIDDLLDFSNDEIFSSSSTVTSSAASSAASSENPFSFPSSTYTSPTLLTDFTHDLCVPSDDAAHLEWLSRFVDDSFSDFPANPLTMTVRPEISFTGKPRSRRSRAPAPSVAGTWAPMSESELCHSVAKPKPKKVYNAESVTADGARRCTHCASEKTPQWRTGPLGPKTLCNACGVRYKSGRLVPEYRPASSPTFVLTQHSNSHRKVMELRRQKEQQESCVRIPPFQPQ

SEQ ID NO: 78028 - protein, 240 aa, Arabidopsis thaliana
  peptide (1)..(240): Ceres Seq. ID no. 12600919
MDVYGMSSPDLLRIDDLLDFSNDEIFSSSSTVTSSAASSAASSENPFSFPSSTYTSPTLLTDFTHDLCVPSDDAAHLEWLSRFVDDSFSDFPANPLTMTVRPEISFTGKPRSRRSRAPAPSVAGTWAPMSESELCHSVAKPKPKKVYNAESVTADGARRCTHCASEKTPQWRTGPLGPKTLCNACGVRYKSGRLVPEYRPASSPTFVLTQHSNSHRKVMELRRQKEQQESCVRIPPFQPQ

SEQ ID NO: 78029 - protein, 235 aa, Arabidopsis thaliana
  peptide (1)..(235): Ceres Seq. ID no. 12600920
MSSPDLLRIDDLLDFSNDEIFSSSSTVTSSAASSAASSENPFSFPSSTYTSPTLLTDFTHDLCVPSDDAAHLEWLSRFVDDSFSDFPANPLTMTVRPEISFTGKPRSRRSRAPAPSVAGTWAPMSESELCHSVAKPKPKKVYNAESVTADGARRCTHCASEKTPQWRTGPLGPKTLCNACGVRYKSGRLVPEYRPASSPTFVLTQHSNSHRKVMELRRQKEQQESCVRIPPFQPQ

SEQ ID NO: 78030 - DNA, 2128 bp, Arabidopsis thaliana
  misc_feature (1)..(2128): Ceres Seq. ID no. 12600921
  misc_feature (1)..(2128): Ortholog of  Ceres SEQ ID NO 13600216 as cited in SEQ ID NO 569
tctacatttgtttttgattagttcgcgattcatttctatcttgtctccggtcaatatttttgttcgatccgtcgatcggatattttgactggaggtttaagaagtctgaaattgttagatcgcagctatgtcgtactctgactccgattcgtcgtctcatggtggcgagtacaagaatttccgacagattacgcgtgaacgactcttgtatgagatgcttagatctgcaaagacagggagctcaaaatccacctggaaggtactaatcatggacaaacttactgtcaagataatgtcgtacgcctgcaaaatggctgatatcacacaagaaggagtttcattggttgaagacatatttagacgaagacaaccacttccttcaatggatgcaatatacttcatccagccaactaaagagaatgtcatcatgttcttgtcagacatgtctgggaaatcacccttgtacaagaaggcattcgttttcttcagttcaccggtttccaaggaactggttggtcacatcaagaaagattcgagtgtattacctcggattggagcattgagagagatgaatttggagttttttgccattgatagccagggtttcataaccgatcatgagcgagctttagaggatctttttggtgatgaggaaacttctcgaaaaggcgatgcgtgcttgaatgtgatggcttctcgaattgctacagtctttgcttcgttgcgggaattcccagcagtacgataccgagctgcaaagtcacttgatgcatcgacaatgacaactttgcgcgatttaattccaacaaagcttgcagctggaatctggaattgtctggcaaaacataagcagtcgattgaaaattttcctcaaactgaaacatgcgagctactcatccttgacagatccatagaccagattgcccctgttatacatgagtggacatatgatgctatgtgccatgatttactgaacatggaaggaaacaaatatgtacatgtgattccaagcaaatcaggcggacaaccagagaagaaagatgtgctcttagaggaacatgatcctatttggctagagcttcgacatgcacatatagcagatgctagtgaaagattgcatgacaagatgaccaatttcttatcgaaaaacaaagctgctcagcttcagggtaagagagatggagctgagctttctacaagagatttgcagaagatggttcaagcattgccacagtacagtgaacaaattgacaagctctctctccacgtagagattgctagaaaactcaacgaccttatcagagagcaaggacttcgggagcttggacaacttgaacaagaccttgtttttggtgatgctggaatgaaggatgtgattaaatatttgagtactcaagaggaggcaagccgtgaaggtaagttacgcctgttgatgatcctcgcaacaatttaccctgaaaagtttgaaggtgaaaaaggtcaaaatctaatgaagttggccaaactctcatctgatgacatgaccgctgtaaataatatgagcttacttggttcagccgtcgatgctaaaaagaataccccgggaggtttcactttgaaatttgaccttcacaagaaaaaacgagctgtcaggaaagagcgccaagaggaagcagcatggcagttatctcgtttttaccccatgattgaggaactcatcgaaaaacttagcaaaggagaattgccaaaagaggatttcccatgtatgaacgacccaagcccaagtttccacggatcaacctcactttcatcagcagcaagtagtagtcaaggtcaagctgctcagtccatgagatcaagacgcacaccaacatgggctaaacctcgaggttcagatgatggatattcaagtgattcggtattgagacatgcgtcaagcgatttcaggaagatgggacagcgaatatttgtgttcatcgtcggtggagcgactagatcagagttaaaagtatgccacaaactatccacaaaactcaaaagagaagtaatcctcggttccacgagcctggacgatcctccacagttcataacgaaattgaagcttttgactgcaaatgatgatttatctttagacgatctccaaatatga

SEQ ID NO: 78031 - protein, 666 aa, Arabidopsis thaliana
  peptide (1)..(666): Ceres Seq. ID no. 12600922
MSYSDSDSSSHGGEYKNFRQITRERLLYEMLRSAKTGSSKSTWKVLIMDKLTVKIMSYACKMADITQEGVSLVEDIFRRRQPLPSMDAIYFIQPTKENVIMFLSDMSGKSPLYKKAFVFFSSPVSKELVGHIKKDSSVLPRIGALREMNLEFFAIDSQGFITDHERALEDLFGDEETSRKGDACLNVMASRIATVFASLREFPAVRYRAAKSLDASTMTTLRDLIPTKLAAGIWNCLAKHKQSIENFPQTETCELLILDRSIDQIAPVIHEWTYDAMCHDLLNMEGNKYVHVIPSKSGGQPEKKDVLLEEHDPIWLELRHAHIADASERLHDKMTNFLSKNKAAQLQGKRDGAELSTRDLQKMVQALPQYSEQIDKLSLHVEIARKLNDLIREQGLRELGQLEQDLVFGDAGMKDVIKYLSTQEEASREGKLRLLMILATIYPEKFEGEKGQNLMKLAKLSSDDMTAVNNMSLLGSAVDAKKNTPGGFTLKFDLHKKKRAVRKERQEEAAWQLSRFYPMIEELIEKLSKGELPKEDFPCMNDPSPSFHGSTSLSSAASSSQGQAAQSMRSRRTPTWAKPRGSDDGYSSDSVLRHASSDFRKMGQRIFVFIVGGATRSELKVCHKLSTKLKREVILGSTSLDDPPQFITKLKLLTANDDLSLDDLQI

SEQ ID NO: 78032 - protein, 637 aa, Arabidopsis thaliana
  peptide (1)..(637): Ceres Seq. ID no. 12600923
MLRSAKTGSSKSTWKVLIMDKLTVKIMSYACKMADITQEGVSLVEDIFRRRQPLPSMDAIYFIQPTKENVIMFLSDMSGKSPLYKKAFVFFSSPVSKELVGHIKKDSSVLPRIGALREMNLEFFAIDSQGFITDHERALEDLFGDEETSRKGDACLNVMASRIATVFASLREFPAVRYRAAKSLDASTMTTLRDLIPTKLAAGIWNCLAKHKQSIENFPQTETCELLILDRSIDQIAPVIHEWTYDAMCHDLLNMEGNKYVHVIPSKSGGQPEKKDVLLEEHDPIWLELRHAHIADASERLHDKMTNFLSKNKAAQLQGKRDGAELSTRDLQKMVQALPQYSEQIDKLSLHVEIARKLNDLIREQGLRELGQLEQDLVFGDAGMKDVIKYLSTQEEASREGKLRLLMILATIYPEKFEGEKGQNLMKLAKLSSDDMTAVNNMSLLGSAVDAKKNTPGGFTLKFDLHKKKRAVRKERQEEAAWQLSRFYPMIEELIEKLSKGELPKEDFPCMNDPSPSFHGSTSLSSAASSSQGQAAQSMRSRRTPTWAKPRGSDDGYSSDSVLRHASSDFRKMGQRIFVFIVGGATRSELKVCHKLSTKLKREVILGSTSLDDPPQFITKLKLLTANDDLSLDDLQI

SEQ ID NO: 78033 - protein, 619 aa, Arabidopsis thaliana
  peptide (1)..(619): Ceres Seq. ID no. 12600924
MDKLTVKIMSYACKMADITQEGVSLVEDIFRRRQPLPSMDAIYFIQPTKENVIMFLSDMSGKSPLYKKAFVFFSSPVSKELVGHIKKDSSVLPRIGALREMNLEFFAIDSQGFITDHERALEDLFGDEETSRKGDACLNVMASRIATVFASLREFPAVRYRAAKSLDASTMTTLRDLIPTKLAAGIWNCLAKHKQSIENFPQTETCELLILDRSIDQIAPVIHEWTYDAMCHDLLNMEGNKYVHVIPSKSGGQPEKKDVLLEEHDPIWLELRHAHIADASERLHDKMTNFLSKNKAAQLQGKRDGAELSTRDLQKMVQALPQYSEQIDKLSLHVEIARKLNDLIREQGLRELGQLEQDLVFGDAGMKDVIKYLSTQEEASREGKLRLLMILATIYPEKFEGEKGQNLMKLAKLSSDDMTAVNNMSLLGSAVDAKKNTPGGFTLKFDLHKKKRAVRKERQEEAAWQLSRFYPMIEELIEKLSKGELPKEDFPCMNDPSPSFHGSTSLSSAASSSQGQAAQSMRSRRTPTWAKPRGSDDGYSSDSVLRHASSDFRKMGQRIFVFIVGGATRSELKVCHKLSTKLKREVILGSTSLDDPPQFITKLKLLTANDDLSLDDLQI

SEQ ID NO: 78034 - DNA, 1192 bp, Arabidopsis thaliana
  misc_feature (1)..(1192): Ceres Seq. ID no. 12600941
  misc_feature (1)..(1192): Ortholog of  Ceres SEQ ID NO 13597931 as cited in SEQ ID NO 64485
actttcgaaacctctcaccgaagctacaatgagtatcatcgcaggctcctacgagagattcatttggggtttcaagcttaaacccacgaagcacgacgccgaatctcaaaccctaactctctcccctctcttctcctacccttcccacatctccccaatcaccaccgtcgcttgttccggtcccgccgcagcttccggcggctccgacgatacaatccacctctacgaccttccctccgcttcttccctcggctctctccttgaccacaatcacgcagcttcaatcaccgctctctccttctacacaccttcttcactctccttccctcgtaatctaatctccgccgccgcagatggctccgttgctatattcgatactgatccttttgttttgcttaagtcgtttcgtcctcataagaaagcggttaatgatttagcgattcatccttcagggaagcttgctttagctgtttatcgtgatgagttctttgcgatgttgaatttagttagaggaaagaggagtttttgttgtaggttaggtcatgaagctagtcttgtgaaatttgatcctagtggtgaaaggttttacatggttgtgagtaataaagttggagttcatcagtctgaagatgctaagcttcttcttgagctcgagaatccgagccgcaagcgtattctctgtgctactcctggagagagtggaactctgttcacaggtggtgaggatcgggctataacagcttgggatacaaatagtgggaagcttgcatattccatagaagatgctcacccagctcgaatcaaaggtattgttgtgcttaccaggaatgatagtgacggctccttggaagatccatacttgattggttctgcatcgtctgatgggatcatacgtgtttgggacgtgcgaatggcggctaaagaaaatacaaaaccattagccgagacaaatactaaatcaaggcttacttgtcttgccgggtcagctcttaaatctatgagacggccacagattggaaagcaggaacctcagaaggtagacgaagagcatgaggactcagaataagagctgatttttagtgtttattgaaaaattgtgagctgacattaattttgatgcaagttttggtagaatccagtagattcttgtcgaattataattataaacattgtcttaaaccatagattttgt

SEQ ID NO: 78035 - protein, 354 aa, Arabidopsis thaliana
  peptide (1)..(354): Ceres Seq. ID no. 12600942
LSKPLTEATMSIIAGSYERFIWGFKLKPTKHDAESQTLTLSPLFSYPSHISPITTVACSGPAAASGGSDDTIHLYDLPSASSLGSLLDHNHAASITALSFYTPSSLSFPRNLISAAADGSVAIFDTDPFVLLKSFRPHKKAVNDLAIHPSGKLALAVYRDEFFAMLNLVRGKRSFCCRLGHEASLVKFDPSGERFYMVVSNKVGVHQSEDAKLLLELENPSRKRILCATPGESGTLFTGGEDRAITAWDTNSGKLAYSIEDAHPARIKGIVVLTRNDSDGSLEDPYLIGSASSDGIIRVWDVRMAAKENTKPLAETNTKSRLTCLAGSALKSMRRPQIGKQEPQKVDEEHEDSE

SEQ ID NO: 78036 - protein, 345 aa, Arabidopsis thaliana
  peptide (1)..(345): Ceres Seq. ID no. 12600943
MSIIAGSYERFIWGFKLKPTKHDAESQTLTLSPLFSYPSHISPITTVACSGPAAASGGSDDTIHLYDLPSASSLGSLLDHNHAASITALSFYTPSSLSFPRNLISAAADGSVAIFDTDPFVLLKSFRPHKKAVNDLAIHPSGKLALAVYRDEFFAMLNLVRGKRSFCCRLGHEASLVKFDPSGERFYMVVSNKVGVHQSEDAKLLLELENPSRKRILCATPGESGTLFTGGEDRAITAWDTNSGKLAYSIEDAHPARIKGIVVLTRNDSDGSLEDPYLIGSASSDGIIRVWDVRMAAKENTKPLAETNTKSRLTCLAGSALKSMRRPQIGKQEPQKVDEEHEDSE

SEQ ID NO: 78037 - protein, 190 aa, Arabidopsis thaliana
  peptide (1)..(190): Ceres Seq. ID no. 12600944
MLNLVRGKRSFCCRLGHEASLVKFDPSGERFYMVVSNKVGVHQSEDAKLLLELENPSRKRILCATPGESGTLFTGGEDRAITAWDTNSGKLAYSIEDAHPARIKGIVVLTRNDSDGSLEDPYLIGSASSDGIIRVWDVRMAAKENTKPLAETNTKSRLTCLAGSALKSMRRPQIGKQEPQKVDEEHEDSE

SEQ ID NO: 78038 - DNA, 1714 bp, Arabidopsis thaliana
  misc_feature (1)..(1714): Ceres Seq. ID no. 12600945
  misc_feature (1)..(1714): Ortholog of  Ceres SEQ ID NO 15171430 as cited in SEQ ID NO 51500
  misc_feature (1)..(1714): Ortholog of  Ceres SEQ ID NO 15176106 as cited in SEQ ID NO 60324
  misc_feature (1)..(1714): Ortholog of  Ceres SEQ ID NO 13654989 as cited in SEQ ID NO 63117
  misc_feature (1)..(1714): Ortholog of  Ceres SEQ ID NO 13584744 as cited in SEQ ID NO 69137
aacaccaaacccaaaactcccttctctttcttccttcctctccgatctccgttcacatctctctctcatctttatcttcttctttttttgccttgtgggttgaaagtttctatattttctctttctcttctgtttacataatccattttcagctcaagcagctgaagaataacgatcaagaaccaaaaaagaagaaaacgaatctgttcttagctttgatgggttcttgcttcagttctcgagtcaaagcagacatcttccacaatggtaagagcagcgatctttatggtctaagtctctcaagtcggaaatcgtcttcgactgtagcggcggctcagaagacggaaggggagatattgagttcgacccctgtcaaaagcttcacctttaacgaactcaaactcgccacaagaaacttcagaccagatagtgtgatcggagaaggtggctttggttgtgtctttaaaggctggttagatgagtccactctcactccgactaaacctggaaccggtttggtcatcgccgttaaaaagcttaaccaagaaggttttcaaggtcaccgtgaatggctgacagagatcaattacttggggcaactgagtcacccaaatctagttaaactgatcggttattgcttagaagatgaacaccgtcttctagtctacgagtttatgcaaaaaggaagtcttgagaatcatctattcagaagaggtgcatattttaagccactcccatggtttctacgggtcaatgttgcgcttgatgcagcaaaggggcttgcttttcttcacagcgatcccgtcaaagtgatataccgagacattaaagcctcgaacatcttacttgatgcggactacaacgcaaaactttctgactttggactagctagagacggtccaatgggtgatttgagttatgttagtacaagggtcatgggtacttatgggtacgccgcgcctgagtacatgtcatcaggtcacttgaatgcaagaagcgatgtgtacagtttcggagttttgcttctagagattttatctggtaagcgagcgttggatcataacagaccggctaaagaagaaaaccttgtggattgggctcgaccgtacctcacaagcaaacgtaaggttctcctaatcgtggacaatcggctagacacacagtacctacctgaagaagccgtgagaatggcaagcgtggcggtgcagtgtctctcatttgaacccaagtcgcgcccgaccatggaccaagtggtccgtgccttacaacaacttcaggacaacttgggaaaaccgagtcagaccaatccggttaaggataccaagaaacttggttttaaaactggtactactaagtcatccgaaaaacggtttacacaaaaaccttttggcaggcaccttgtgtaggtcaagttgataactgaattccaggatggacatttttccggcggtttacttgaaactgccgatatccgttttcgacggattgaatgcggttctggacaaaccgtgcaggtcaagactaataaaggatacattaaattttccggttacatgtcccatacccaaccttagagaacatgtgtagcctttagcttaggcttccttgtgtgctgttatattgagtatatatgaggtaatttttgcctcttgtgttgtaacacttgtatttttgttcctttaacatttgatgtagagatttttcctatatcttc

SEQ ID NO: 78039 - protein, 467 aa, Arabidopsis thaliana
  peptide (1)..(467): Ceres Seq. ID no. 12600946
HQTQNSLLFLPSSPISVHISLSSLSSSFFALWVESFYIFSFSSVYIIHFQLKQLKNNDQEPKKKKTNLFLALMGSCFSSRVKADIFHNGKSSDLYGLSLSSRKSSSTVAAAQKTEGEILSSTPVKSFTFNELKLATRNFRPDSVIGEGGFGCVFKGWLDESTLTPTKPGTGLVIAVKKLNQEGFQGHREWLTEINYLGQLSHPNLVKLIGYCLEDEHRLLVYEFMQKGSLENHLFRRGAYFKPLPWFLRVNVALDAAKGLAFLHSDPVKVIYRDIKASNILLDADYNAKLSDFGLARDGPMGDLSYVSTRVMGTYGYAAPEYMSSGHLNARSDVYSFGVLLLEILSGKRALDHNRPAKEENLVDWARPYLTSKRKVLLIVDNRLDTQYLPEEAVRMASVAVQCLSFEPKSRPTMDQVVRALQQLQDNLGKPSQTNPVKDTKKLGFKTGTTKSSEKRFTQKPFGRHLV

SEQ ID NO: 78040 - protein, 395 aa, Arabidopsis thaliana; identical to SEQ ID NO: 48890
  peptide (1)..(395): Ceres Seq. ID no. 12600947

SEQ ID NO: 78041 - protein, 243 aa, Arabidopsis thaliana; identical to SEQ ID NO: 48891
  peptide (1)..(243): Ceres Seq. ID no. 12600948

SEQ ID NO: 78042 - DNA, 1406 bp, Arabidopsis thaliana
  misc_feature (1)..(1406): Ceres Seq. ID no. 12601225
  misc_feature (1)..(1406): Ortholog of  Ceres SEQ ID NO 14316553 as cited in SEQ ID NO 20761
  misc_feature (1)..(1406): Ortholog of  Ceres SEQ ID NO 13502573 as cited in SEQ ID NO 60342
gaacaaaaaacaaatcaagcaaatttatttatcttggtcaagagacattgattctcttaaatttctgcaaaattaagctcagagattcacaccgcatctgaaattgtgctcagaggggttccaaatattaccagtcgttaggaagcaatcacgagttgttttaggaattagtgaacgtgataatggctagcaatgagatggaaaaatcgagtaaagagaaggaacctaaaacacctcctccttcttctactgcccctccctcttcacaggaaccttcatcggctgtgagtgctggcatggctactccagattggtctggttttcaggcatattctcctatgccgccgcctcatggttatgtggcatctagtccccaacctcacccttatatgtggggagttcagcatatgatgcctccttatggaactccgcctcatccttatgttgcaatgtatcccccaggtggcatgtacgcacatccttcaatgcctccgggttcttatccctatagcccttatgctatgccttctccaaatggaatgactgaagtttctggcaatactacaggcggcactgatggtgatgctaaacaatctgaagtgaaggaaaaattgcccatcaaaagatcaagaggaagcttgggaagtttgaacatgattacaggaaagaacaatgaacctgggaaaaactcaggagcatcagctaatggagcttactccaaaagtggggagagtgcttctgatggttcaagtgaaggaagtgatgggaactctcaaaatagttctttattgtttttccattcagctgaagcagcatcagagaatggtggttctgccaatggtccgcaaaatggaagtgctggtacacctattctaccggtgagccagaccgtaccaatcatgccaatgacagctgcaggtgttcctggcccaccaacaaatttaaatattgggatggattactggggtgctccaacttcagctggtatccctggaatgcatgggaaagtatctacaccagttcctggagttgttgctccaggctcgcgagatggtggccattcacaaccctggttacaggacgatagagaacttaagcgacagagacggaagcagtccaatagggagtctgctcgaagatcaaggttgcgtaaacaggccgaatgtgatgagctggcccaacgcgctgaggtgttgaacgaagaaaacacaaatctcagagcagaaatcaacaagctcaaaagccaatgcgaagagcttaccaccgagaacacctctctcaaggaccaactttcattattccctccacttgaaggcataagcatggacaatgaccaccaagaaccagacaccaatcaaacaggtgccgcagagagaaaggttgattcatacaaagactcaacgtga

SEQ ID NO: 78043 - protein, 407 aa, Arabidopsis thaliana
  peptide (1)..(407): Ceres Seq. ID no. 12601226
MASNEMEKSSKEKEPKTPPPSSTAPPSSQEPSSAVSAGMATPDWSGFQAYSPMPPPHGYVASSPQPHPYMWGVQHMMPPYGTPPHPYVAMYPPGGMYAHPSMPPGSYPYSPYAMPSPNGMTEVSGNTTGGTDGDAKQSEVKEKLPIKRSRGSLGSLNMITGKNNEPGKNSGASANGAYSKSGESASDGSSEGSDGNSQNSSLLFFHSAEAASENGGSANGPQNGSAGTPILPVSQTVPIMPMTAAGVPGPPTNLNIGMDYWGAPTSAGIPGMHGKVSTPVPGVVAPGSRDGGHSQPWLQDDRELKRQRRKQSNRESARRSRLRKQAECDELAQRAEVLNEENTNLRAEINKLKSQCEELTTENTSLKDQLSLFPPLEGISMDNDHQEPDTNQTGAAERKVDSYKDST

SEQ ID NO: 78044 - protein, 402 aa, Arabidopsis thaliana
  peptide (1)..(402): Ceres Seq. ID no. 12601227
MEKSSKEKEPKTPPPSSTAPPSSQEPSSAVSAGMATPDWSGFQAYSPMPPPHGYVASSPQPHPYMWGVQHMMPPYGTPPHPYVAMYPPGGMYAHPSMPPGSYPYSPYAMPSPNGMTEVSGNTTGGTDGDAKQSEVKEKLPIKRSRGSLGSLNMITGKNNEPGKNSGASANGAYSKSGESASDGSSEGSDGNSQNSSLLFFHSAEAASENGGSANGPQNGSAGTPILPVSQTVPIMPMTAAGVPGPPTNLNIGMDYWGAPTSAGIPGMHGKVSTPVPGVVAPGSRDGGHSQPWLQDDRELKRQRRKQSNRESARRSRLRKQAECDELAQRAEVLNEENTNLRAEINKLKSQCEELTTENTSLKDQLSLFPPLEGISMDNDHQEPDTNQTGAAERKVDSYKDST

SEQ ID NO: 78045 - protein, 369 aa, Arabidopsis thaliana
  peptide (1)..(369): Ceres Seq. ID no. 12601228
MATPDWSGFQAYSPMPPPHGYVASSPQPHPYMWGVQHMMPPYGTPPHPYVAMYPPGGMYAHPSMPPGSYPYSPYAMPSPNGMTEVSGNTTGGTDGDAKQSEVKEKLPIKRSRGSLGSLNMITGKNNEPGKNSGASANGAYSKSGESASDGSSEGSDGNSQNSSLLFFHSAEAASENGGSANGPQNGSAGTPILPVSQTVPIMPMTAAGVPGPPTNLNIGMDYWGAPTSAGIPGMHGKVSTPVPGVVAPGSRDGGHSQPWLQDDRELKRQRRKQSNRESARRSRLRKQAECDELAQRAEVLNEENTNLRAEINKLKSQCEELTTENTSLKDQLSLFPPLEGISMDNDHQEPDTNQTGAAERKVDSYKDST

SEQ ID NO: 78046 - DNA, 2264 bp, Arabidopsis thaliana
  misc_feature (1)..(2264): Ceres Seq. ID no. 12601237
  misc_feature (1)..(2264): Ortholog of  Ceres SEQ ID NO 15174626 as cited in SEQ ID NO 59393
  misc_feature (1)..(2264): Ortholog of  Ceres SEQ ID NO 13656177 as cited in SEQ ID NO 64997
ggacatccttgcttttggtctaactttctctctcttgcttctacgcttcttcttgtggcgtagattgttatagagagggaaaccaaaaaagggaatctcaaaagctcgagttcacagatttgacccgagtctttaatccaatctgctggttcgttttccacattcaaactcgactcttgaatatcaaatcagaagtctttgctatggctgctaccgctgctgcttctgttgtccgttacgcacctgaggatcatactcttcccaagccctggaaaggccttatcgatgatagaactggttacttgtacttttggaatcctgagaccaatgttactcagtacgagaaaccaaccccctctctacctcctaagttttctcccgccgtttctgttagctcttccgttcaggttcaacaaactgatgcctatgctcctcccaaggatgacgataagtactccagaggctctgaacgtgtgtccaggttttctgagggtggcaggagtggaccgccttattcgaacggtgctgctaatggagttggggattctgcttatggtgcagcatctaccagagttcctcttccttcatcagctccagcaagtgaactatcccctgaggcctattcccgccgtcatgaaattactgtcagtgggggccaagtaccaccacctctaatgtcctttgaagctactggttttccacctgagcttctgcgggaggtactcagtgcaggtttctctgctccaactccaattcaagctcagtcatggcccattgctatgcaaggtagggacatagtagccattgctaaaactggctcgggaaaaactttgggttacttgattcctggatttttgcatcttcaacgtatccgaaatgattcgcgaatgggcccaacaatcttggtattgtctccaacgagagagctggccacacaaatccaagaagaagctgttaaatttgggaggtcatcaagaatttcgtgtacgtgtttgtatggtggtgcaccaaagggccctcagttgagggatttagaaagaggagcagatatcgtggttgcaactcctgggagattgaatgatatccttgaaatgaggaggattagtctgcgtcagatatcttatcttgtgctagatgaggcagatagaatgttggacatgggttttgaacctcagataaggaagattgtgaaagaaattcccactaagcgtcaaacccttatgtacacagctacatggccaaagggagttaggaaaattgcagctgacttgcttgttaaccctgctcaagtcaacattggcaatgttgacgagcttgtggctaacaagtcaatcacacagcatattgaagtggtagcaccaatggagaaacagaggaggttagagcagatcttgcggtctcaggaaccaggctcaaaggtgataatattctgctcaaccaaaaggatgtgtgatcaactaacacgcaatctaacccgccaatttggagctgctgctatacatggagacaagtcccagcctgagagagacaatgttcttaatcaattccgcagtggcagaactccggttcttgtagcaaccgatgttgctgctcgtggtctggacgttaaggacatcagggcggtcgtaaactatgatttccccaatggagtggaagactatgttcatagaatcggaagaacaggaagagctggagcgactggtcaggcattcacattctttggtgatcaagattcgaaacatgcttcggatctgatcaagattttggaaggagcaaaccagcgagttcctcctcagatccgcgaaatggctacacgtggtggtgggggaatgaacaaattcagtcgttggggacctccttccggcggccgtggtcgtggtggcgactctggttatggtggcagaggtagctttgcttcccgtgacagtagaagcagcaatggatggggaagagagcgagaaaggagccgtagccctgagagattcaacagagctccaccaccgtcttccaccggatctcctcctcgcagcttccacgagacgatgatgatgaaacacagatgaaaagagagatacaaagctctgataaagccaagtgacagaagattgtgttgtgggggatttcccttatcattgtgacattatatattttttggccgatgaagaaacaaaagaaaaaaaaacaagaccaagaagactgttccctcccattggaaatttacgctcaaaactacaattgatatcttacagtttgtatttcatctt

SEQ ID NO: 78047 - protein, 619 aa, Arabidopsis thaliana
  peptide (1)..(619): Ceres Seq. ID no. 12601238
MAATAAASVVRYAPEDHTLPKPWKGLIDDRTGYLYFWNPETNVTQYEKPTPSLPPKFSPAVSVSSSVQVQQTDAYAPPKDDDKYSRGSERVSRFSEGGRSGPPYSNGAANGVGDSAYGAASTRVPLPSSAPASELSPEAYSRRHEITVSGGQVPPPLMSFEATGFPPELLREVLSAGFSAPTPIQAQSWPIAMQGRDIVAIAKTGSGKTLGYLIPGFLHLQRIRNDSRMGPTILVLSPTRELATQIQEEAVKFGRSSRISCTCLYGGAPKGPQLRDLERGADIVVATPGRLNDILEMRRISLRQISYLVLDEADRMLDMGFEPQIRKIVKEIPTKRQTLMYTATWPKGVRKIAADLLVNPAQVNIGNVDELVANKSITQHIEVVAPMEKQRRLEQILRSQEPGSKVIIFCSTKRMCDQLTRNLTRQFGAAAIHGDKSQPERDNVLNQFRSGRTPVLVATDVAARGLDVKDIRAVVNYDFPNGVEDYVHRIGRTGRAGATGQAFTFFGDQDSKHASDLIKILEGANQRVPPQIREMATRGGGGMNKFSRWGPPSGGRGRGGDSGYGGRGSFASRDSRSSNGWGRERERSRSPERFNRAPPPSSTGSPPRSFHETMMMKHR

SEQ ID NO: 78048 - protein, 462 aa, Arabidopsis thaliana
  peptide (1)..(462): Ceres Seq. ID no. 12601239
MSFEATGFPPELLREVLSAGFSAPTPIQAQSWPIAMQGRDIVAIAKTGSGKTLGYLIPGFLHLQRIRNDSRMGPTILVLSPTRELATQIQEEAVKFGRSSRISCTCLYGGAPKGPQLRDLERGADIVVATPGRLNDILEMRRISLRQISYLVLDEADRMLDMGFEPQIRKIVKEIPTKRQTLMYTATWPKGVRKIAADLLVNPAQVNIGNVDELVANKSITQHIEVVAPMEKQRRLEQILRSQEPGSKVIIFCSTKRMCDQLTRNLTRQFGAAAIHGDKSQPERDNVLNQFRSGRTPVLVATDVAARGLDVKDIRAVVNYDFPNGVEDYVHRIGRTGRAGATGQAFTFFGDQDSKHASDLIKILEGANQRVPPQIREMATRGGGGMNKFSRWGPPSGGRGRGGDSGYGGRGSFASRDSRSSNGWGRERERSRSPERFNRAPPPSSTGSPPRSFHETMMMKHR

SEQ ID NO: 78049 - protein, 427 aa, Arabidopsis thaliana
  peptide (1)..(427): Ceres Seq. ID no. 12601240
MQGRDIVAIAKTGSGKTLGYLIPGFLHLQRIRNDSRMGPTILVLSPTRELATQIQEEAVKFGRSSRISCTCLYGGAPKGPQLRDLERGADIVVATPGRLNDILEMRRISLRQISYLVLDEADRMLDMGFEPQIRKIVKEIPTKRQTLMYTATWPKGVRKIAADLLVNPAQVNIGNVDELVANKSITQHIEVVAPMEKQRRLEQILRSQEPGSKVIIFCSTKRMCDQLTRNLTRQFGAAAIHGDKSQPERDNVLNQFRSGRTPVLVATDVAARGLDVKDIRAVVNYDFPNGVEDYVHRIGRTGRAGATGQAFTFFGDQDSKHASDLIKILEGANQRVPPQIREMATRGGGGMNKFSRWGPPSGGRGRGGDSGYGGRGSFASRDSRSSNGWGRERERSRSPERFNRAPPPSSTGSPPRSFHETMMMKHR

SEQ ID NO: 78050 - DNA, 2638 bp, Arabidopsis thaliana
  misc_feature (1)..(2638): Ceres Seq. ID no. 12601269
  misc_feature (1)..(2638): Ortholog of  Ceres SEQ ID NO 13596194 as cited in SEQ ID NO 68484
agcttctctgattcgtctttctcctctgtctctgactcttcgcgaaaaccctaattagctttgtggtcttgttgttttcgccatggaagacgacggcaagagcagccccaagttaccgatccctggaaagagaaatatactaatcaccagtgctttgccttacgtcaacaacgttcctcatctcggaaacatcatcggatgtgttctgagcgctgatgtgtatgctagatactgtcgtctccgtggctataatgcgatttacatatgtggaaccgatgaatatgggactgcaactgagaccaaagctttggaggagaattgcacccccaaggaaatctgtgacaagtaccatgccattcataaagaagtttatgactggtttggtataagttttgacaagtttgggcgaacttcaactccagaacagactgaggtgtgccaagcaattttcaacaagttgtgggacaacaagtggctttcagagaacaccatgcagcagctttactgcgatacatgcaagaagttcttagctgaccggcttgttgagggttcttgtccgttcgaaggatgtaattatgattctgctcgtggagatcagtgcgaaaaatgtggaaagctcctgaatcctactgaacttaaagatccgaagtgcaaggtctgtcaaaacacaccccgaattcgcgacacagaccacctgtttattgagcttccgttactgaaagataggttggaagcgtatattaaaaagacctctgttactggatcttggagtcaaaatgctattcaaacgacaaatgcatggcttagggatgggcttagacagagatgcattacgagggatcttaagtggggagtgcctgtcccacatgagaaatacaaggacaaagtcttctatgtttggtttgatgctcctattggatacgtctcaataacgtcttgctacacatctgaatgggagaagtggtggaagaatcctgagaatgtggagctttatcagtttatggggaaagacaatgtgccatttcacactgtgatgtttccctctacccagcttggaactgaggaaaattggacactcatgaagacaatcagtgtgactgaatatttaaactatgaagacggaaagttctccaagagtaaaggtgttggagtgtttggtaatgatgtaaaagatacaaatatacctgtcgaagtgtggagatactacttgctgaccaacaggcctgaggtgtctgacacatcgttttcatggactgatttgcaagcaaaactgaatggcgagttgctgagcaacctaggcaactttgttaatcgagttctgagttttatagcaaagcctgataatgcaggttacgggtctgtcattcctgatgctcatgatgctgaatctcattctttaacaaaatcactggcggaaaaggttgaaaagtttgtggcagagtatgttgaagccatggaaaaggttaagctcaagcagggactgaaaactgctatgctgatttcaagcgaagggaactattacttgcaggcaagccaattttggaaactttacaaggaagataaacctttgtgtgcagttgttataagaactgctgctggtttagtacaccttcttgctcaattgttagaacctttcatgccatccttttcttgtgaggtatttaaacagctaaatttgcctccacaattttctctctccgacgagaggggagaggtattactagcaagtagaccatgggatattctgcctcctagccacaggataggcacccctcaacctttgttcaaggagttggaaaacgacgaagtggcacggtacagagaaaagtttgctggaagtcagtctgatagacgtgctagggatgaagcagcaaatttggcggatcaacttaataaaacaaaactttcagatgccaagaaacaaaaggcatcatcaaaaggcggaggaaaacccaaacctcaaccagctgctgatcgtgaaataactatggcaagacttgatatccgagttggtaaaattgtgaaggctgagaaacatcccaaggcagatgcattgtatgtagaagaaattgatgttgggggtggtgaaattcgcactgttgtcagtggactggtcaaatatatacctcttgaggaaatgcagaatcgtatggtttgtgttctttgcaacttgaaaccggcgaaaatgagggatattgtgtcacaagcaatggttcttgcagcttccagtagtgatggaagcaaggtggagttagttgagccccctaaaactgctaatattggagagcgagttacatttcccgggtttgaaggcgagccagacgatgtcttaaacccaaagaagaaagtatgggagacgcttttggttgatctaaacacaaaagagaatctagttgcttgctacaaagatgtgcccttcactacatctgcaggtgtatgcaaagtttcatccatcagcaatggcacgatccggtaaaagcttacttgagccataagcaaactaatattctccatttctatctttctctgtaagagaaacgaaattcggagattttcatttgaaaatttgattctaattacaaacatgttcttgtaaacttaaagcttggtacaattgttgttattgattgatgttgtg

SEQ ID NO: 78051 - protein, 797 aa, Arabidopsis thaliana
  peptide (1)..(797): Ceres Seq. ID no. 12601270
MEDDGKSSPKLPIPGKRNILITSALPYVNNVPHLGNIIGCVLSADVYARYCRLRGYNAIYICGTDEYGTATETKALEENCTPKEICDKYHAIHKEVYDWFGISFDKFGRTSTPEQTEVCQAIFNKLWDNKWLSENTMQQLYCDTCKKFLADRLVEGSCPFEGCNYDSARGDQCEKCGKLLNPTELKDPKCKVCQNTPRIRDTDHLFIELPLLKDRLEAYIKKTSVTGSWSQNAIQTTNAWLRDGLRQRCITRDLKWGVPVPHEKYKDKVFYVWFDAPIGYVSITSCYTSEWEKWWKNPENVELYQFMGKDNVPFHTVMFPSTQLGTEENWTLMKTISVTEYLNYEDGKFSKSKGVGVFGNDVKDTNIPVEVWRYYLLTNRPEVSDTSFSWTDLQAKLNGELLSNLGNFVNRVLSFIAKPDNAGYGSVIPDAHDAESHSLTKSLAEKVEKFVAEYVEAMEKVKLKQGLKTAMLISSEGNYYLQASQFWKLYKEDKPLCAVVIRTAAGLVHLLAQLLEPFMPSFSCEVFKQLNLPPQFSLSDERGEVLLASRPWDILPPSHRIGTPQPLFKELENDEVARYREKFAGSQSDRRARDEAANLADQLNKTKLSDAKKQKASSKGGGKPKPQPAADREITMARLDIRVGKIVKAEKHPKADALYVEEIDVGGGEIRTVVSGLVKYIPLEEMQNRMVCVLCNLKPAKMRDIVSQAMVLAASSSDGSKVELVEPPKTANIGERVTFPGFEGEPDDVLNPKKKVWETLLVDLNTKENLVACYKDVPFTTSAGVCKVSSISNGTIR

SEQ ID NO: 78052 - protein, 661 aa, Arabidopsis thaliana
  peptide (1)..(661): Ceres Seq. ID no. 12601271
MQQLYCDTCKKFLADRLVEGSCPFEGCNYDSARGDQCEKCGKLLNPTELKDPKCKVCQNTPRIRDTDHLFIELPLLKDRLEAYIKKTSVTGSWSQNAIQTTNAWLRDGLRQRCITRDLKWGVPVPHEKYKDKVFYVWFDAPIGYVSITSCYTSEWEKWWKNPENVELYQFMGKDNVPFHTVMFPSTQLGTEENWTLMKTISVTEYLNYEDGKFSKSKGVGVFGNDVKDTNIPVEVWRYYLLTNRPEVSDTSFSWTDLQAKLNGELLSNLGNFVNRVLSFIAKPDNAGYGSVIPDAHDAESHSLTKSLAEKVEKFVAEYVEAMEKVKLKQGLKTAMLISSEGNYYLQASQFWKLYKEDKPLCAVVIRTAAGLVHLLAQLLEPFMPSFSCEVFKQLNLPPQFSLSDERGEVLLASRPWDILPPSHRIGTPQPLFKELENDEVARYREKFAGSQSDRRARDEAANLADQLNKTKLSDAKKQKASSKGGGKPKPQPAADREITMARLDIRVGKIVKAEKHPKADALYVEEIDVGGGEIRTVVSGLVKYIPLEEMQNRMVCVLCNLKPAKMRDIVSQAMVLAASSSDGSKVELVEPPKTANIGERVTFPGFEGEPDDVLNPKKKVWETLLVDLNTKENLVACYKDVPFTTSAGVCKVSSISNGTIR

SEQ ID NO: 78053 - protein, 491 aa, Arabidopsis thaliana
  peptide (1)..(491): Ceres Seq. ID no. 12601272
MGKDNVPFHTVMFPSTQLGTEENWTLMKTISVTEYLNYEDGKFSKSKGVGVFGNDVKDTNIPVEVWRYYLLTNRPEVSDTSFSWTDLQAKLNGELLSNLGNFVNRVLSFIAKPDNAGYGSVIPDAHDAESHSLTKSLAEKVEKFVAEYVEAMEKVKLKQGLKTAMLISSEGNYYLQASQFWKLYKEDKPLCAVVIRTAAGLVHLLAQLLEPFMPSFSCEVFKQLNLPPQFSLSDERGEVLLASRPWDILPPSHRIGTPQPLFKELENDEVARYREKFAGSQSDRRARDEAANLADQLNKTKLSDAKKQKASSKGGGKPKPQPAADREITMARLDIRVGKIVKAEKHPKADALYVEEIDVGGGEIRTVVSGLVKYIPLEEMQNRMVCVLCNLKPAKMRDIVSQAMVLAASSSDGSKVELVEPPKTANIGERVTFPGFEGEPDDVLNPKKKVWETLLVDLNTKENLVACYKDVPFTTSAGVCKVSSISNGTIR

SEQ ID NO: 78054 - DNA, 1266 bp, Arabidopsis thaliana
  misc_feature (1)..(1266): Ceres Seq. ID no. 12601362
  misc_feature (1)..(1266): Ortholog of  Ceres SEQ ID NO 13598234 as cited in SEQ ID NO 63461
  misc_feature (1)..(1266): Ortholog of  Ceres SEQ ID NO 13597254 as cited in SEQ ID NO 63858
  misc_feature (1)..(1266): Ortholog of  Ceres SEQ ID NO 12622778 as cited in SEQ ID NO 67562
aatcaggttccacatttggctttgcacaccttccttgatcctatcaatggcggatctgaaatcaaccttcctcgacgtttactctgttctcaagtctgatctgcttcaagatccttcctttgaattcacccacgaatctcgtcaatggcttgaacggatgcttgactacaatgtacgcggagggaagctaaatcgtggtctctctgtggttgatagctacaagctgttgaagcaaggtcaagacttgacggagaaagagactttcctctcatgtgctcttggttggtgcattgaatggcttcaagcttatttccttgtgcttgatgacatcatggacaactctgtcacacgccgtggccagccttgttggtttagaaagccaaaggttggtatgattgccattaacgatgggattctacttcgcaatcatatccacaggattctcaaaaagcacttcagggaaatgccttactatgttgacctcgttgatttgtttaacgaggtagagtttcaaacagcttgcggccagatgattgatttgatcaccacctttgatggagaaaaagatttgtctaagtactccttgcaaatccatcggcgtattgttgagtacaaaacagcttattactcattttatcttcctgttgcttgcgcattgctcatggcgggagaaaatttggaaaaccatactgatgtgaagactgttcttgttgacatgggaatttactttcaagtacaggatgattatctggactgttttgctgatcctgagacacttggcaagatagggacagacatagaagatttcaaatgctcctggttggtagttaaggcattggaacgctgcagtgaagaacaaactaagatactatacgagaactatggtaaagccgaaccatcaaacgttgctaaggtgaaagctctctacaaagagcttgatctcgagggagcgttcatggaatatgagaaggaaagctatgagaagctgacaaagttgatcgaagctcaccagagtaaagcaattcaagcagtgctaaaatctttcttggctaagatctacaagaggcagaagtagagacatactcgggcctctctccgttttattcttctgacatttatgtattggtgcatgacttcttttgccttagatcttatgttcccttccgaaaatagaatttgagattcttgttcatgcttatagtatagagacttagaaaatgtctatgtttcttttaatttctgaataaaaaatgtgcaatcagtgat

SEQ ID NO: 78055 - protein, 357 aa, Arabidopsis thaliana
  peptide (1)..(357): Ceres Seq. ID no. 12601363
IRFHIWLCTPSLILSMADLKSTFLDVYSVLKSDLLQDPSFEFTHESRQWLERMLDYNVRGGKLNRGLSVVDSYKLLKQGQDLTEKETFLSCALGWCIEWLQAYFLVLDDIMDNSVTRRGQPCWFRKPKVGMIAINDGILLRNHIHRILKKHFREMPYYVDLVDLFNEVEFQTACGQMIDLITTFDGEKDLSKYSLQIHRRIVEYKTAYYSFYLPVACALLMAGENLENHTDVKTVLVDMGIYFQVQDDYLDCFADPETLGKIGTDIEDFKCSWLVVKALERCSEEQTKILYENYGKAEPSNVAKVKALYKELDLEGAFMEYEKESYEKLTKLIEAHQSKAIQAVLKSFLAKIYKRQK

SEQ ID NO: 78056 - protein, 342 aa, Arabidopsis thaliana
  peptide (1)..(342): Ceres Seq. ID no. 12601364
MADLKSTFLDVYSVLKSDLLQDPSFEFTHESRQWLERMLDYNVRGGKLNRGLSVVDSYKLLKQGQDLTEKETFLSCALGWCIEWLQAYFLVLDDIMDNSVTRRGQPCWFRKPKVGMIAINDGILLRNHIHRILKKHFREMPYYVDLVDLFNEVEFQTACGQMIDLITTFDGEKDLSKYSLQIHRRIVEYKTAYYSFYLPVACALLMAGENLENHTDVKTVLVDMGIYFQVQDDYLDCFADPETLGKIGTDIEDFKCSWLVVKALERCSEEQTKILYENYGKAEPSNVAKVKALYKELDLEGAFMEYEKESYEKLTKLIEAHQSKAIQAVLKSFLAKIYKRQK

SEQ ID NO: 78057 - protein, 305 aa, Arabidopsis thaliana
  peptide (1)..(305): Ceres Seq. ID no. 12601365
MLDYNVRGGKLNRGLSVVDSYKLLKQGQDLTEKETFLSCALGWCIEWLQAYFLVLDDIMDNSVTRRGQPCWFRKPKVGMIAINDGILLRNHIHRILKKHFREMPYYVDLVDLFNEVEFQTACGQMIDLITTFDGEKDLSKYSLQIHRRIVEYKTAYYSFYLPVACALLMAGENLENHTDVKTVLVDMGIYFQVQDDYLDCFADPETLGKIGTDIEDFKCSWLVVKALERCSEEQTKILYENYGKAEPSNVAKVKALYKELDLEGAFMEYEKESYEKLTKLIEAHQSKAIQAVLKSFLAKIYKRQK

SEQ ID NO: 78058 - DNA, 2048 bp, Arabidopsis thaliana
  misc_feature (1)..(2048): Ceres Seq. ID no. 12601663
  misc_feature (1)..(2048): Ortholog of  Ceres SEQ ID NO 12581696 as cited in SEQ ID NO 55411
atgtgggagtcaaatatatgttgtgatccgttaacttcaaagcaaattactgtttattcacagaagcttggacgcgtacggcttcgatttccttatatatatatattacacataaatctgccgtcttggagattggaaacatatctcaagcttcttcttcgtgttacgcactttcttcttcttcttctctctctctctttcttcttcgtcttcgatcacagaagacagaattcaatgtcgtcgacctacaagctcaatcacactgattcatttgcaaatggagatgcaaagagtttgttgccgaacccagagaatggtttcactcatttgacttcacttgctcaatcagagaaggctgttcaggagcttcttcttcaacagactcctatgcaggctactgacgaccatctcgttgagttctctgaggctttgagaactgttgcaaaggcactaaggggagctgctgaaggaaaggcgttggctcaagctgaggctgctgaatggaagcgtagatacgagttagagaggtctaagaacgtggagttgcagcataaagaactgtcaaatggagtgtgtgccgatgaatctaatggtcaaaggatggagcacttagcaaagtctccgcggctttatgctcaggaaatcagttctaatggcatggagactatttgctctcatgaagtgctccaagatggtggatttaacagttttaataacaaattgaagaggaaggcatcatttaaactttcatggggatgtaaggggatggctaatgatcaacacaaaaaagaaattgtttcgtttgagagagggaatatcagcacagcagagcgcagtagtaaacagatttcactgacatgggagtctgatccacaaactgtacttattatcactaagcctaattcaacttccgtgcgagttctctctgtggatatggtcagatggttgagaacgcaaaaaggactaaatatttatgtggaacctcgagtaaaggaagaactcttatcagaatcaagttccttcaacttcgtacaaacttgggaagatgacaaggaaatttcacttctacacacaaaggttgaccttcttataactcttggtggggatggcacagtgctatgggctgcatcgatgtttaaaggaccagtgcctccaattgttccattctccatgggatctcttggatttatgactccttttcacagcgaacaataccgagattgtcttgaagcgattttgaagggtcctatcagtataacactacgacacaggttgcagtgtcacatcatcagagataaagcaacacatgaatatgaaccagaggagactatgcttgttctgaatgaagtcaccattgaccgtggaatatcttcttacctcacaaaccttgaatgctactgtgacaactcattcgtcacatgtgtgcaaggcgatggacttatactgtctacaacatctggtagcaccgcgtattcacttgctgctggagggtcaatggtccatcctcaggttcctgggatcttattcacgcctatctgtccgcattctctatcattccgcccactaatattaccggaacacgtgacagtgagagtccaagtgccattcaacagcagaagctccgcttgggtctcctttgatgggaaagaccggaaacagcttgaagcaggggatgcactagtgtgtagcatggcaccatggcccgtctcaaccgcttgtcaagttgaatccactaacgacttcttacgcagcatccacgatggtcttcactggaacctaagaaagactcaatctgctgatggaccttagaaacaaattcctccagcttttttctctttcattcttaaccaataaccatatatagtctcgacgtctatctatctatctatatgcatatagataaatgtgaaatggaaagtgatgggttctgtgatagaatgtggtctgtatccattgttgtgtagagaatgtaataatgtagctgctatgacccataattctgttgatgtgataatcactcaaagttaatgaatcaaagatatttctgc

SEQ ID NO: 78059 - protein, 602 aa, Arabidopsis thaliana
  peptide (1)..(602): Ceres Seq. ID no. 12601664
MWESNICCDPLTSKQITVYSQKLGRVRLRFPYIYILHINLPSWRLETYLKLLLRVTHFLLLLLSLSFFFVFDHRRQNSMSSTYKLNHTDSFANGDAKSLLPNPENGFTHLTSLAQSEKAVQELLLQQTPMQATDDHLVEFSEALRTVAKALRGAAEGKALAQAEAAEWKRRYELERSKNVELQHKELSNGVCADESNGQRMEHLAKSPRLYAQEISSNGMETICSHEVLQDGGFNSFNNKLKRKASFKLSWGCKGMANDQHKKEIVSFERGNISTAERSSKQISLTWESDPQTVLIITKPNSTSVRVLSVDMVRWLRTQKGLNIYVEPRVKEELLSESSSFNFVQTWEDDKEISLLHTKVDLLITLGGDGTVLWAASMFKGPVPPIVPFSMGSLGFMTPFHSEQYRDCLEAILKGPISITLRHRLQCHIIRDKATHEYEPEETMLVLNEVTIDRGISSYLTNLECYCDNSFVTCVQGDGLILSTTSGSTAYSLAAGGSMVHPQVPGILFTPICPHSLSFRPLILPEHVTVRVQVPFNSRSSAWVSFDGKDRKQLEAGDALVCSMAPWPVSTACQVESTNDFLRSIHDGLHWNLRKTQSADGP

SEQ ID NO: 78060 - protein, 524 aa, Arabidopsis thaliana; identical to SEQ ID NO: 48902
  peptide (1)..(524): Ceres Seq. ID no. 12601665

SEQ ID NO: 78061 - protein, 473 aa, Arabidopsis thaliana; identical to SEQ ID NO: 48903
  peptide (1)..(473): Ceres Seq. ID no. 12601666

SEQ ID NO: 78062 - DNA, 1395 bp, Arabidopsis thaliana
  misc_feature (1)..(1395): Ceres Seq. ID no. 12602443
  misc_feature (1)..(1395): Ortholog of  Ceres SEQ ID NO 14308586 as cited in SEQ ID NO 55143
  misc_feature (1)..(1395): Ortholog of  Ceres SEQ ID NO 14314308 as cited in SEQ ID NO 57259
  misc_feature (1)..(1395): Ortholog of  Ceres SEQ ID NO 15226216 as cited in SEQ ID NO 62291
accaagttcatacatggtacaaagctttagcaagttgtcgaatttcatcctacaattgaattttctctttactatttcaaagtttgaatgctcctctgttttcttcgttggttcattgagaaaaaaggaacagactttttacttgtgccattgaccaagaaccacaaagaggaggaaatcaaatggtttttgggagtttgatggattgattgattattcagcaaatcccacagaagaaatcagaagctgcttcttattttttggtcacgaccagtcttaatcaaagtagttcgtctcctacttgttattaaaagtgtatatttctgttgggagtttctgttctcctaccacctcattgacctttaatgatggactcatagtttggtgccaagtgacccaaaaaaaaaaaaaaaaaagtcgatcttgaagatttcatactttttctggcaattctgtttggtttcagaggaaggagtcaaaacaatggggatcgtttcagaagaagccattgatgaattccaagagctgatggatcaagttgaggagccactgaagaaaacttatgagagagtccatcagggatatctaagggagaatttgggtcgttttctgaaagcacgagactggaacgtatgcaaagctcacacaatgctggttgagtgtttgcgttggagggtggataatgaaattgacagtatcctatctaaaccaattgttcctactgagttgtatagggatgtacgagattctcaactcataggaatgtcaggttacaccaaagagggcttgccggtctttgctattggcgtcggcctcagcacatttgacaaagcttctgttcactactatgtccaatctcacatacaaatcaatgaatatagagaccgtgttttactgccttctatttctaagaagaatgggaggccaatcaccacctgcgtcaaggttctagacatgacggggttgaagctttcagctctaagccaaatcaagttagtgactatcatatcgaccattgatgatctcaactatccagagaagacaaacacgtactatgttgtgaacgctccatatatattttccgcatgttggaagggttgtaaaacctcttttacaagagaggacaaggaaaaaagttcatgtcttatccggttgcggaagggatgaattattgaagtgaatgcttctgagggaattccttcagtgcctccacaactgagatatatattttacaggtgagctagcaattcaaatgagtaagggagtactgagctgtgtccgctccctagccatgcaaatgtaaagcgaaaagaagagaataaatcttgaactgaatgcacttctggttttatgtatagtattatttgatcctctaatgtagcaaatttatttgtg

SEQ ID NO: 78063 - protein, 227 aa, Arabidopsis thaliana
  peptide (1)..(227): Ceres Seq. ID no. 12602444
MGIVSEEAIDEFQELMDQVEEPLKKTYERVHQGYLRENLGRFLKARDWNVCKAHTMLVECLRWRVDNEIDSILSKPIVPTELYRDVRDSQLIGMSGYTKEGLPVFAIGVGLSTFDKASVHYYVQSHIQINEYRDRVLLPSISKKNGRPITTCVKVLDMTGLKLSALSQIKLVTIISTIDDLNYPEKTNTYYVVNAPYIFSACWKGCKTSFTREDKEKSSCLIRLRKG

SEQ ID NO: 78064 - protein, 212 aa, Arabidopsis thaliana
  peptide (1)..(212): Ceres Seq. ID no. 12602445
MDQVEEPLKKTYERVHQGYLRENLGRFLKARDWNVCKAHTMLVECLRWRVDNEIDSILSKPIVPTELYRDVRDSQLIGMSGYTKEGLPVFAIGVGLSTFDKASVHYYVQSHIQINEYRDRVLLPSISKKNGRPITTCVKVLDMTGLKLSALSQIKLVTIISTIDDLNYPEKTNTYYVVNAPYIFSACWKGCKTSFTREDKEKSSCLIRLRKG

SEQ ID NO: 78065 - protein, 172 aa, Arabidopsis thaliana
  peptide (1)..(172): Ceres Seq. ID no. 12602446
MLVECLRWRVDNEIDSILSKPIVPTELYRDVRDSQLIGMSGYTKEGLPVFAIGVGLSTFDKASVHYYVQSHIQINEYRDRVLLPSISKKNGRPITTCVKVLDMTGLKLSALSQIKLVTIISTIDDLNYPEKTNTYYVVNAPYIFSACWKGCKTSFTREDKEKSSCLIRLRKG

SEQ ID NO: 78066 - DNA, 2864 bp, Arabidopsis thaliana
  misc_feature (1)..(2864): Ceres Seq. ID no. 12602467
  misc_feature (1)..(2864): Ortholog of  Ceres SEQ ID NO 12465083 as cited in SEQ ID NO 68239
cttacgacaacctctcctgctcttcgttttctctctacgacgataaaacccagatttgggttcaagcttccataactttaaacccctctcgcgatccaggttgctatcaaatacttgggagcccccagtattattgaataacacagcctgacaatgagtgtagtcgggtttgattttggaaacgagaattgccttgttgccgttgcgaggcaaagaggtatcgacgtcgtgcttaatgatgagtccaatcgtgagactcctgctattgtctgcttcggtgacaagcagcgcttcatcggcactgctggagctgcttctaccatgatgaaccctaaaaactccatctctcaaattaagcgcttaattggtcgccagttttccgaccctgagcttcaaagggatatcaaatcccttcccttttctgtcaccgaaggccctgatggctatcctttgatacatgctaattatttgggagagaagcgagcctttaccccgactcaagtcatgggcatgatgttgtctaacctgaaaggtattgccgagaagaatttgaatacagctgttgtcgactgctgtattggtattcctgtttactttaccgacctccagcgtagggctgttctcgatgctgccactattgctggcttgcatcccttgcgcttgatccacgagactacagctacggctttggcatatggtatttataagacagatttgccagagagtgaccagctcaatgttgcattcattgacattggacacgcaagcatgcaagtctgtattgcaggctttaaaaaaggacagctcaaaatcttgtctcacgctttcgatcgctcccttgggggaagggactttgatgaagttcttttcaatcattttgctgctaagttcaaggacgagtacaagattgacgtctcccagaatgctaaggcttctctcaggctccgtgctacatgcgagaaactgaaaaaggttctaagcgctaatcctctggcaccgttgaatatcgagtgtttgatggatgagaaagatgttaggggtgtcatcaagagggaagagtttgaagagatcagcatcccgattttggagcgtgtaaagaggcctctagagaaagctctctctgatgcaggcctcactgttgaagatgtacatatggttgaggttattggctctggctctcgtgtccctgctatgatcaagattctaactgagttttttggtaaggagcccaggcggacaatgaatgcaagtgagtgtgtgtcaaggggatgtgccttgcagtgtgccattctcagtccgacctttaaagttcgcgaattccaggttcatgagagcttccctttctcaatttctctcgcttggaaaggagcagcttctgaagctcaaaatggaggagctgagaatcagcagagcaccattgtttttcccaaaggaaatcccattcctagtgtcaaggctctaacgttttatcgttctggaacattctctgttgatgtgcagtacagtgatgtgaacgatttgcaagcacctccaaaaatcagcacatacacgattggtccgttccagtcatcaaaaggcgagagggcaaagcttaaagtgaaagtgagattgaaccttcatggaatcgtctcagttgaatctgcaactcttttggaagaggaagaagttgaagttccggtcacaaaagaacattcagaggaaactactaagatggactctgacaaagcttctgctgaggcagctcctgcttctggagactgtgatgtaaacatgcaggacgccaaagacaccagtgatgcaactggtactgacaatggtgttccagagtctgctgagaagccggtgcaaatggaaactgattcaaaggctgaggctccaaagaagaaggtgaagaaaacaaatgtaccactgtctgaattggtctatggtgccttgaaaactgtggaggtcgaaaaggcagtggagaaggaatttgagatggctttgcaagacagagttatggaagagaccaaggaccggaagaatgctgttgagtcttatgtttatgatatgcggaacaaactgagtgacaaataccaggaatatatcactgactcggagagggaagcattcctggcgaatctgcaggaagttgaggattggttgtatgaagatggggaagatgagaccaaaggtgtttatgttgcgaagctcgaggagctcaagaaggtgggtgaccctgttgaagtgcgttacaaggagtcattggaaagagggtcggtcattgatcagcttggttactgtattaacagctacagagaggcagctatgtctactgatcccaagtttgatcacattgaattggcagagaagcaaaaggttttgaacgagtgtgtggaagcagaagcatggctgcggggaaagcagcagcagcaggacacacttcccaagtatgccacaccggctctcttgtcagctgacgttaaaagcaaggcagaggcattggacaagttttgcaggcctataatgaccaaaccaaagccggtggctaaagcagaggcaccacaagccaagggaggtgagcaggcggatgagggcaagagtgagccagagcaaccagcttctgccgaaccaatggagactgagaatcccgcggaaggtagtacctaaatgaatgacgagagagagatggtgttgtatcgattttgttcttaactctttttgatttacctagtggaacctctttttctggtttcgctattattcccggaaaaaatctatattgttaattcttccttttcgaaaacaatttttaggaagcatcttttttcttattgttccttgtggttttgtttttaatttgaaagtcattttttctgctcctc

SEQ ID NO: 78067 - protein, 831 aa, Arabidopsis thaliana
  peptide (1)..(831): Ceres Seq. ID no. 12602468
MSVVGFDFGNENCLVAVARQRGIDVVLNDESNRETPAIVCFGDKQRFIGTAGAASTMMNPKNSISQIKRLIGRQFSDPELQRDIKSLPFSVTEGPDGYPLIHANYLGEKRAFTPTQVMGMMLSNLKGIAEKNLNTAVVDCCIGIPVYFTDLQRRAVLDAATIAGLHPLRLIHETTATALAYGIYKTDLPESDQLNVAFIDIGHASMQVCIAGFKKGQLKILSHAFDRSLGGRDFDEVLFNHFAAKFKDEYKIDVSQNAKASLRLRATCEKLKKVLSANPLAPLNIECLMDEKDVRGVIKREEFEEISIPILERVKRPLEKALSDAGLTVEDVHMVEVIGSGSRVPAMIKILTEFFGKEPRRTMNASECVSRGCALQCAILSPTFKVREFQVHESFPFSISLAWKGAASEAQNGGAENQQSTIVFPKGNPIPSVKALTFYRSGTFSVDVQYSDVNDLQAPPKISTYTIGPFQSSKGERAKLKVKVRLNLHGIVSVESATLLEEEEVEVPVTKEHSEETTKMDSDKASAEAAPASGDCDVNMQDAKDTSDATGTDNGVPESAEKPVQMETDSKAEAPKKKVKKTNVPLSELVYGALKTVEVEKAVEKEFEMALQDRVMEETKDRKNAVESYVYDMRNKLSDKYQEYITDSEREAFLANLQEVEDWLYEDGEDETKGVYVAKLEELKKVGDPVEVRYKESLERGSVIDQLGYCINSYREAAMSTDPKFDHIELAEKQKVLNECVEAEAWLRGKQQQQDTLPKYATPALLSADVKSKAEALDKFCRPIMTKPKPVAKAEAPQAKGGEQADEGKSEPEQPASAEPMETENPAEGST

SEQ ID NO: 78068 - protein, 775 aa, Arabidopsis thaliana
  peptide (1)..(775): Ceres Seq. ID no. 12602469
MMNPKNSISQIKRLIGRQFSDPELQRDIKSLPFSVTEGPDGYPLIHANYLGEKRAFTPTQVMGMMLSNLKGIAEKNLNTAVVDCCIGIPVYFTDLQRRAVLDAATIAGLHPLRLIHETTATALAYGIYKTDLPESDQLNVAFIDIGHASMQVCIAGFKKGQLKILSHAFDRSLGGRDFDEVLFNHFAAKFKDEYKIDVSQNAKASLRLRATCEKLKKVLSANPLAPLNIECLMDEKDVRGVIKREEFEEISIPILERVKRPLEKALSDAGLTVEDVHMVEVIGSGSRVPAMIKILTEFFGKEPRRTMNASECVSRGCALQCAILSPTFKVREFQVHESFPFSISLAWKGAASEAQNGGAENQQSTIVFPKGNPIPSVKALTFYRSGTFSVDVQYSDVNDLQAPPKISTYTIGPFQSSKGERAKLKVKVRLNLHGIVSVESATLLEEEEVEVPVTKEHSEETTKMDSDKASAEAAPASGDCDVNMQDAKDTSDATGTDNGVPESAEKPVQMETDSKAEAPKKKVKKTNVPLSELVYGALKTVEVEKAVEKEFEMALQDRVMEETKDRKNAVESYVYDMRNKLSDKYQEYITDSEREAFLANLQEVEDWLYEDGEDETKGVYVAKLEELKKVGDPVEVRYKESLERGSVIDQLGYCINSYREAAMSTDPKFDHIELAEKQKVLNECVEAEAWLRGKQQQQDTLPKYATPALLSADVKSKAEALDKFCRPIMTKPKPVAKAEAPQAKGGEQADEGKSEPEQPASAEPMETENPAEGST

SEQ ID NO: 78069 - protein, 774 aa, Arabidopsis thaliana
  peptide (1)..(774): Ceres Seq. ID no. 12602470
MNPKNSISQIKRLIGRQFSDPELQRDIKSLPFSVTEGPDGYPLIHANYLGEKRAFTPTQVMGMMLSNLKGIAEKNLNTAVVDCCIGIPVYFTDLQRRAVLDAATIAGLHPLRLIHETTATALAYGIYKTDLPESDQLNVAFIDIGHASMQVCIAGFKKGQLKILSHAFDRSLGGRDFDEVLFNHFAAKFKDEYKIDVSQNAKASLRLRATCEKLKKVLSANPLAPLNIECLMDEKDVRGVIKREEFEEISIPILERVKRPLEKALSDAGLTVEDVHMVEVIGSGSRVPAMIKILTEFFGKEPRRTMNASECVSRGCALQCAILSPTFKVREFQVHESFPFSISLAWKGAASEAQNGGAENQQSTIVFPKGNPIPSVKALTFYRSGTFSVDVQYSDVNDLQAPPKISTYTIGPFQSSKGERAKLKVKVRLNLHGIVSVESATLLEEEEVEVPVTKEHSEETTKMDSDKASAEAAPASGDCDVNMQDAKDTSDATGTDNGVPESAEKPVQMETDSKAEAPKKKVKKTNVPLSELVYGALKTVEVEKAVEKEFEMALQDRVMEETKDRKNAVESYVYDMRNKLSDKYQEYITDSEREAFLANLQEVEDWLYEDGEDETKGVYVAKLEELKKVGDPVEVRYKESLERGSVIDQLGYCINSYREAAMSTDPKFDHIELAEKQKVLNECVEAEAWLRGKQQQQDTLPKYATPALLSADVKSKAEALDKFCRPIMTKPKPVAKAEAPQAKGGEQADEGKSEPEQPASAEPMETENPAEGST

SEQ ID NO: 78070 - DNA, 1602 bp, Arabidopsis thaliana
  misc_feature (1)..(1602): Ceres Seq. ID no. 12602739
  misc_feature (1)..(1602): Ortholog of  Ceres SEQ ID NO 15177285 as cited in SEQ ID NO 52481
  misc_feature (1)..(1602): Ortholog of  Ceres SEQ ID NO 13594068 as cited in SEQ ID NO 58624
atttcacactttttctgtctgttacgattcttgcttgatttctttctaaacaaagcaaaagttgtctttttggagttgtgagcaactaattctctgaaattgaggaagagaaagcgagaaggtttttttggagtcagagacagaagaagaatttaacagattcttgtcggaaacatggatacgagtgaagcaaggaaccgtaaagttgttgcagttgaacaattcgatctcgaagtccctgagactgctcatcagattagcagcgattcatggtttcaggtagcttttgttctaacgaccggtataaacagtgcctatgtgttgggatattccgggacagtcatggttcctttgggttggattggtggtgtggttggtctcattcttgctaccgcaatctctctttacgcaaacactcttatcgccaaacttcatgagtttggtggcaaaagacacattcgttatagagatcttgcaggcttcatctatggtaaaaagatgtatcgtgttacatggggattgcaatatgtcaatcttttcatgattaattgtggcttcatcatacttgctggttcagccttaaaggctgtttatgtactttttagagatgatagtctcatgaaactgcctcacttcatcgccatcgcgggtgttgtatgcgcgattttcgcaatcggtattcctcatttatcagctcttggaatctggctaggagtttcaacaatcctcagcataatctacattattgttgcaatagttctatcagctaaagatggagtaaacaagcctgaaagagattacaacatacaaggatcatcaataaacaaactctttaccataacaggagcagctgcaaatctagttttcgcattcaacacgggaatgctcccggaaatacaggccacggtgaagcaaccggtcgttaaaaacatgatgaaggctctgtattttcaattcactgttggtgttttacctatgtacgcggttacattcatcggatattgggcttacgggtcctcgacatcgacttatctcttaaacagcgtcagtggacctgtttgggtcaaagcactcgctaacatttcagcttttctccaatctgttatctctttacatatttttgcaagtccgacttatgagtatatggacacaaagtatggagtcaaaggaagtccattggcaatgaagaatctgttgtttagaacagtagcaagaggaagctacattgcggtgagcactcttctctctgcgcttttaccgtttctcggagatttcatgagccttaccggagcgataagcacgttccctctcacattcatattagcgaatcacatgtatcttgttgctatgaatgatgagcttagtcttgtgcaaaagctatggcattggctcaatgtttgcttctttggattaatgtctcttgctgctgctattgctgctgttagactcatctctgttgactccaagaacttccatgtttttgctgatgtttgattaaaatgtcttcgacatttttaacgatgtaatctttataccaattagaaaaaatttgtaatccttttgttgttacttttattatttcaaatgaaagaaattttttat

SEQ ID NO: 78071 - protein, 439 aa, Arabidopsis thaliana; identical to SEQ ID NO: 41864
  peptide (1)..(439): Ceres Seq. ID no. 12602740

SEQ ID NO: 78072 - protein, 383 aa, Arabidopsis thaliana; identical to SEQ ID NO: 41865
  peptide (1)..(383): Ceres Seq. ID no. 12602741

SEQ ID NO: 78073 - protein, 331 aa, Arabidopsis thaliana; identical to SEQ ID NO: 41866
  peptide (1)..(331): Ceres Seq. ID no. 12602742

SEQ ID NO: 78074 - DNA, 1098 bp, Arabidopsis thaliana
  misc_feature (1)..(1098): Ceres Seq. ID no. 12603289
  misc_feature (1)..(1098): Ortholog of  Ceres SEQ ID NO 14310616 as cited in SEQ ID NO 55699
  misc_feature (1)..(1098): Ortholog of  Ceres SEQ ID NO 13596519 as cited in SEQ ID NO 62572
  misc_feature (1)..(1098): Ortholog of  Ceres SEQ ID NO 12625108 as cited in SEQ ID NO 68102
gtccctatccaatacacatctctctctctcttattaactcaatgacggcgactgcgtttagggtcggcttgtggttggccgttacggcttcctttctcttaaccgcaacaaacgccaaaatccccggcgtttacagtggcggaccgtggcagaatgcacacgccactttctacggtggcagtgacgcctccggcacaatgggcggcgcgtgtgggtacgggaacttgtacagccaaggatacggtgtgaacacggcggcgttgagcactgctttgttcaacaacggattcagctgtggtgcttgttttgagattaagtgtactgatgatccgagatggtgtgttccgggaaatccatctattcttgtgacggcgacgaacttttgtccgccgaattttgctcagccgagtgacgacggagggtggtgcaatccgccgcgcgagcattttgatctcgccatgcctatgttcctcaagatcggtctataccgtgcaggcattgtccccgtctcctatcgcagggtaccttgtcggaagataggagggataagattcacagtaaacggattcagatacttcaatcttgttctggtaactaacgttgccggcgccggagatattaacggagttagcgtaaagggatcaaagacagattgggtgaggatgagtcggaactggggacagaactggcaatccaacgccgttctcatcggccaatcactctctttccgagtcaccgcctctgaccgacgttcttctacctcatggaacgttgctcctgccacgtggcagtttggtcagactttctccggcaaaaactttcgagtctgaaatctgaaaaaccacccaaaagatgttttttaattttattttttacaatggaagaagacacaaacaagaagagagatgagacattttccagccctgggttttccctttaattttcttgggaatattccggtggcttgtggaaaatatttccgtttttagtattattatcagcaaaatttcttttaatctttgcgatttacgagtgatttgtttttctcttggttattttgttcctttaattatttcgttggtggcatcttcgttctgc

SEQ ID NO: 78075 - protein, 275 aa, Arabidopsis thaliana
  peptide (1)..(275): Ceres Seq. ID no. 12603290
PYPIHISLSLINSMTATAFRVGLWLAVTASFLLTATNAKIPGVYSGGPWQNAHATFYGGSDASGTMGGACGYGNLYSQGYGVNTAALSTALFNNGFSCGACFEIKCTDDPRWCVPGNPSILVTATNFCPPNFAQPSDDGGWCNPPREHFDLAMPMFLKIGLYRAGIVPVSYRRVPCRKIGGIRFTVNGFRYFNLVLVTNVAGAGDINGVSVKGSKTDWVRMSRNWGQNWQSNAVLIGQSLSFRVTASDRRSSTSWNVAPATWQFGQTFSGKNFRV

SEQ ID NO: 78076 - protein, 262 aa, Arabidopsis thaliana
  peptide (1)..(262): Ceres Seq. ID no. 12603291
MTATAFRVGLWLAVTASFLLTATNAKIPGVYSGGPWQNAHATFYGGSDASGTMGGACGYGNLYSQGYGVNTAALSTALFNNGFSCGACFEIKCTDDPRWCVPGNPSILVTATNFCPPNFAQPSDDGGWCNPPREHFDLAMPMFLKIGLYRAGIVPVSYRRVPCRKIGGIRFTVNGFRYFNLVLVTNVAGAGDINGVSVKGSKTDWVRMSRNWGQNWQSNAVLIGQSLSFRVTASDRRSSTSWNVAPATWQFGQTFSGKNFRV

SEQ ID NO: 78077 - protein, 210 aa, Arabidopsis thaliana; identical to SEQ ID NO: 36530
  peptide (1)..(210): Ceres Seq. ID no. 12603292

SEQ ID NO: 78078 - DNA, 2580 bp, Arabidopsis thaliana
  misc_feature (1)..(2580): Ceres Seq. ID no. 12604147
  misc_feature (1)..(2580): Ortholog of  Ceres SEQ ID NO 15168429 as cited in SEQ ID NO 57818
agtctctctctctctttatctctccacaatttgctgctttaacctctctctctctctctctcatcacaccatgtgggatgtggctatagcagtcttcactgcatcttcctcctcactttcttctctctctttctcttaatttctttttttccagatttttctctgattcccatcttttccctcgaatgatcggttgagagaagatggtttcagagacttggtttcgtaatctgtggaggtttccaaagaaacatgatggtcataaagataaggcggttctaggagtattagcgtttgaggttgcgagtttgttgtcgaagcttgttcatttgtggcagtcattaagtgataagaatgttgcaaggcttagggacgagattacacattccactggtataaagaagttagtttcagaagatgatgattttattgtgaggttaatacgtgatgaaatgatggagaacgttgagaatgtagcgaaagctgtggctaggcttgcgaggaaatgcaacgatcccaagttgaagtgctttgagaattgttttagtgatatgatgaagactggagctgacccttatggttggcagtttgggtggaagaaaatggataagaaagctaagaaaatggaacgtttcatatcatctaatgctagtctctaccaggagactgagattcttgctgatcttgaacagactttcaagagaatgaagagcaatgaatctgctactgacaatcttttggagtatcagaaaaaagttacatggaaaagacacgaagtgaagaatctgcgggatgtgtctctttggaaccgtacttatgactataccgtcattctcttggttagatcagttttcacaatccttagcaggactaaacatgtttttggcattagttacagagtggaagcaagtgatgttagctctgcagattctgattttattggccgcagccactccgtttctactattttaactcctgtatctcataaatctgagtctagtggtcttcctagatttgcttctggcccccttggaagatttaccggtccagcatcgggttcagctgctacaaggtccacgaagatgagtgatttcctttcgggttctctcagcgccgaatcacctaagtcaggtcctcttgttgcagaaaaacacaaacgtttcaagttttactctggtcagcttgggaagatcacctccaaatcaggaccacttatcggaatgggcaaaaacaacaagaagatggggcagaccccggaaaggccttcaatttcctcagtgaaaaagcaattgaaagccaaccgattaacacaggttggcccatttaaaggctgtatggtgtctcacgatgggattacgcctctcagcactagggcccggaatggagctaggaatagtagtgctgagcatcacattcttgaagataattctaactctgttcacgttgaaaacttgacacttccttcccgacccaagctgtcagatgctgctcctaatacccttggtaccgcttgcttagcattacactatgctaatgtcatcatcgtgatagagagatttgttgcgtctcctcacttgataggagatgatgcaagagacgacctttacaacatgttaccggcgagcgtgagaacatcgcttagagaaaggctaaaaccttactcgaaaaacttgagttcttccacagtttatgatccaggcctagcaagagaatggacagacgcaatggcgggtatcttggaatggttgggtccattagctcacaacatgataaaatggcaatctgagcggagttacgagcaccaaagcttggtttcaaggacgcacatagttcttgcacaaacccttttctttgcaaaccagcagaagacagaagccatcattaccgagcttctcgtaggcctcaattatgtctggagatttggcagagaactcaatgccaaggctcttcaggagtgtaccagtagtaaaacccttgagaaatgcttggacacagataactagtgaagctctccaagacgacacacacaagtctggatttttactacctcgttgacctaaaccggcactggatctcacccactgggtaaaccataccgtgggcgcgccctgtatcctatgcagcttggaccaaaccagagtacggaaaggtgctcgattaattacatgagaggtattatgatctgagcacctctttatcttcttccccgtttactattctgcttcgtggattgcaaaattctgacttgtagtaggatgatgatgcgttgtatattgttctatgatttttattgtggtgagttacatactgcatatatacgtatgtgccaaggttgttttagattctgtaatactcgttggtgatacagaagattccttaaattccgatttgtccaagttttgtcctgtattattattactcgtccttggtcttctcctcccttttggtcaactgtattcgtatgtgggtttgtcaaagtttgaaattaaagtcaatagatttcttagttgattattgtttcttcagtctacatgtttaaattttatgatataagttttatgaatgaatcgcacttgatct

SEQ ID NO: 78079 - protein, 599 aa, Arabidopsis thaliana
  peptide (1)..(599): Ceres Seq. ID no. 12604148
MVSETWFRNLWRFPKKHDGHKDKAVLGVLAFEVASLLSKLVHLWQSLSDKNVARLRDEITHSTGIKKLVSEDDDFIVRLIRDEMMENVENVAKAVARLARKCNDPKLKCFENCFSDMMKTGADPYGWQFGWKKMDKKAKKMERFISSNASLYQETEILADLEQTFKRMKSNESATDNLLEYQKKVTWKRHEVKNLRDVSLWNRTYDYTVILLVRSVFTILSRTKHVFGISYRVEASDVSSADSDFIGRSHSVSTILTPVSHKSESSGLPRFASGPLGRFTGPASGSAATRSTKMSDFLSGSLSAESPKSGPLVAEKHKRFKFYSGQLGKITSKSGPLIGMGKNNKKMGQTPERPSISSVKKQLKANRLTQVGPFKGCMVSHDGITPLSTRARNGARNSSAEHHILEDNSNSVHVENLTLPSRPKLSDAAPNTLGTACLALHYANVIIVIERFVASPHLIGDDARDDLYNMLPASVRTSLRERLKPYSKNLSSSTVYDPGLAREWTDAMAGILEWLGPLAHNMIKWQSERSYEHQSLVSRTHIVLAQTLFFANQQKTEAIITELLVGLNYVWRFGRELNAKALQECTSSKTLEKCLDTDN

SEQ ID NO: 78080 - protein, 516 aa, Arabidopsis thaliana
  peptide (1)..(516): Ceres Seq. ID no. 12604149
MMENVENVAKAVARLARKCNDPKLKCFENCFSDMMKTGADPYGWQFGWKKMDKKAKKMERFISSNASLYQETEILADLEQTFKRMKSNESATDNLLEYQKKVTWKRHEVKNLRDVSLWNRTYDYTVILLVRSVFTILSRTKHVFGISYRVEASDVSSADSDFIGRSHSVSTILTPVSHKSESSGLPRFASGPLGRFTGPASGSAATRSTKMSDFLSGSLSAESPKSGPLVAEKHKRFKFYSGQLGKITSKSGPLIGMGKNNKKMGQTPERPSISSVKKQLKANRLTQVGPFKGCMVSHDGITPLSTRARNGARNSSAEHHILEDNSNSVHVENLTLPSRPKLSDAAPNTLGTACLALHYANVIIVIERFVASPHLIGDDARDDLYNMLPASVRTSLRERLKPYSKNLSSSTVYDPGLAREWTDAMAGILEWLGPLAHNMIKWQSERSYEHQSLVSRTHIVLAQTLFFANQQKTEAIITELLVGLNYVWRFGRELNAKALQECTSSKTLEKCLDTDN

SEQ ID NO: 78081 - protein, 515 aa, Arabidopsis thaliana
  peptide (1)..(515): Ceres Seq. ID no. 12604150
MENVENVAKAVARLARKCNDPKLKCFENCFSDMMKTGADPYGWQFGWKKMDKKAKKMERFISSNASLYQETEILADLEQTFKRMKSNESATDNLLEYQKKVTWKRHEVKNLRDVSLWNRTYDYTVILLVRSVFTILSRTKHVFGISYRVEASDVSSADSDFIGRSHSVSTILTPVSHKSESSGLPRFASGPLGRFTGPASGSAATRSTKMSDFLSGSLSAESPKSGPLVAEKHKRFKFYSGQLGKITSKSGPLIGMGKNNKKMGQTPERPSISSVKKQLKANRLTQVGPFKGCMVSHDGITPLSTRARNGARNSSAEHHILEDNSNSVHVENLTLPSRPKLSDAAPNTLGTACLALHYANVIIVIERFVASPHLIGDDARDDLYNMLPASVRTSLRERLKPYSKNLSSSTVYDPGLAREWTDAMAGILEWLGPLAHNMIKWQSERSYEHQSLVSRTHIVLAQTLFFANQQKTEAIITELLVGLNYVWRFGRELNAKALQECTSSKTLEKCLDTDN

SEQ ID NO: 78082 - DNA, 1332 bp, Arabidopsis thaliana
  misc_feature (1)..(1332): Ceres Seq. ID no. 12604676
  misc_feature (1)..(1332): Ortholog of  Ceres SEQ ID NO 13657789 as cited in SEQ ID NO 66154
gatgcgtactgtgaccattacatactacagttagctttcttctctagccgtcgaagtttcacgcgccgccgtgagaaaatgcagcacacaccggagcaaccgagagtcactctttacataatcctcaccaccgcgtttctctctctatgtttcctcctctctctctcttcctcttcccagtactcttcatcttcctacaccggacgacccgatgatctacgacccgacccgagactctttccttcttcctccaaaatcgccgccgatacagctcctccttcaatcgcttacctaatttccggatcttctggtgacacgcgacgaatccttcgacttctctacgctacttaccatcctcgaaatcgatatcttcttcatctcgatagcttagcgacacaatctgaacgagatcggctcgctgttgatgtacaagatgtaccgatttttagagctgcaaggaatgttgatgttattgggaagcctgatttcgcgtatcagagaggatcgtctccgatggcttctacgcttcatggtgcttcgattcttcttagattgtcaggaacttgggattggtttgttagtattagtgttgatgattatcctctcgttactcaagatgagcttcttcatattatgtcacatttgcctaaggacttgaattttgtgaaccacactagctacattggttggaaagagtccaggaagttgaagccagttattgttgatccagggctctatcttgtggagaaaaccgatatgtttttcgcttcgcagaaacgagagttgcctaaggctttcaagttattctcaggtccatctttctccatcttaagccggaatttcatggagcactgtgtcttaggcactgacaacttccctcggactctactcatgtacttgtccaacacacctgattctctttccaactacttcccaactatcctctgcaacacggataccttcaaaaagaccatcatgaacaacaacttactctacctagcttctaacgacacttctaaagaaagataccatcagcttgatcacaaagagttcacagaaatggttgactccggagcagcttttgcaagaggattcaggtacgacgacactgtccttgatcgcatcgatcatgaacttctgggacgcaaacctggtgaagttgtgcctggtggttggtgtttaggagattctagtaaaaaccgtagctcgtgttccgtctggggtgactcgggtatccttcggcccggttctggttccgataggctcgagagacgaattgttgagttactatcaaacgattggttcagattgcaccaatgcgtacctgaatga

SEQ ID NO: 78083 - protein, 443 aa, Arabidopsis thaliana; identical to SEQ ID NO: 49242
  peptide (1)..(443): Ceres Seq. ID no. 12604677

SEQ ID NO: 78084 - protein, 417 aa, Arabidopsis thaliana; identical to SEQ ID NO: 49243
  peptide (1)..(417): Ceres Seq. ID no. 12604678

SEQ ID NO: 78085 - protein, 272 aa, Arabidopsis thaliana; identical to SEQ ID NO: 49244
  peptide (1)..(272): Ceres Seq. ID no. 12604679

SEQ ID NO: 78086 - DNA, 2427 bp, Arabidopsis thaliana
  misc_feature (1)..(2427): Ceres Seq. ID no. 12605047
  misc_feature (1)..(2427): Ortholog of  Ceres SEQ ID NO 13590691 as cited in SEQ ID NO 66290
gatcttcattattttagatttgaccgtttagaaaagtaagaaccagaccgtaccgaaccaaaacgaaccagagccagacgactccttaacggcggctaagctatctgtaaaccgaccgaaccacacagccacaggcacacaaatcaaaccttctagaaatcaaagagagacatttattctctaaattcattttcctattttgcccctacgaatatttttcttcttcgtctctctctctcagctcttgaagtctttggtctgttggcgaattttcaagcagctttctaattctgaactgaaaatttcgtctttggaactttatattctctcatctgaaactgaaggagaaggaagatgacgactatggagagtttgattgggttagttaataggatacagagagcatgtaccgtactcggtgactatggtggtggaactggaagtaacgctttcaattctctctgggaagctcttccaaccgtcgccgtcgtcggtggtcagagttctgggaaatcttcggttcttgagagtatagttgggagagattttcttcctagaggatctggtatcgttacgagacggcctttagtgttgcagcttcataagactgatgatggaacagaggagtatgcagagttccttcatcttcccaagaagcaattcacagattttgctttggttcgcagggagattcaggatgagactgatagaatcacagggaaaaacaaacagatatctccagttcctattcacctcagtatctactctccaaatgttgtgaatttgacactcattgatttgcccggtttaactaaagtggctgttgagggacagccggaaaccattgctgaggatatcgaatccatggttcgcacatatgttgataagcccaattgtatcatattggctatatctcctgccaaccaagacattgccacatcagatgcaattaagctcgcaaaagatgtcgatccaacaggtgagaggacatttggtgttcttaccaagttagacttgatggacaaaggaactaatgcgttagaagttcttgaaggaagatcttacaggctgcaacatccttgggttgggatagtgaaccgttcacaagcagatattaataagaatgtcgatatgatgcttgcaagacgcaaggaacgagaatattttgataccagtcctgactatggtcacttagccagcaaaatgggttcagaatatctggcaaagctgctctctaagcacttggagtctgttatcaggacccgtattccaagtatactatccttaataaacaaaagcattgaagaacttgaaagagagttagaccgaatgggtcggcctgtcgcagttgatgctggggctcaactatacactatattggagatgtgccgtgcattcgataagatattcaaggaacatcttgatggcgggcgtcctggaggtgaccgtatctatggagtctttgacaaccaacttccagctgcacttaaaaagcttccttttgatcgccatctttctctacaaagcgtgaagaaaatcgtgtccgaggcagatggttatcaacctcacttgattgcaccagaacagggttatcgccgtctaatcgaaggggcactgggttactttagaggtccagctgaagcttctgtggatgctgttcactatgtcttgaaagagcttgtgaggaaatcaatatcagaaactgaggagctaaagcgtttcccttcactgcaagtcgagcttgctgcagcagccaacagctccttggagaaattcagggaagaaagcaagaagtcggttattcgacttgttgacatggaatctgcgtatctaaccgctgagttcttccggaaacttcctcaagaaatagaaagaccagtaaccaacagcaaaaaccaaaccgcttctccttcgtctgcaacattagaccagtatggagacggacatttcagaaggatagcatcaaatgtatctgcgtatgttaatatggtttcggacacacttcgtaacaccattccaaaagcttgtgtgtactgtcaggttagacaagccaagctcgcattgctcaattacttctactctcagatcagcaagagagaggggaaacagttgggacagttactagatgaagatccggcattgatggaccggagactagagtgcgcgaagaggctagagttatacaagaaagcaagagatgagattgatgctgttgcttgggtaagatgataaaacctaaaagtgtgtttctggtgatggttttagagaactataaattcgtctgttgtttaagttcgttgactatgtctttgtatgtatgtatatgatcatcagaccctattgagagagacttgagacgttttgtaataaacttatcattactatttaaaaacgccatagcgtgtactttccgtctcgcttcacttt

SEQ ID NO: 78087 - protein, 624 aa, Arabidopsis thaliana
  peptide (1)..(624): Ceres Seq. ID no. 12605048
MTTMESLIGLVNRIQRACTVLGDYGGGTGSNAFNSLWEALPTVAVVGGQSSGKSSVLESIVGRDFLPRGSGIVTRRPLVLQLHKTDDGTEEYAEFLHLPKKQFTDFALVRREIQDETDRITGKNKQISPVPIHLSIYSPNVVNLTLIDLPGLTKVAVEGQPETIAEDIESMVRTYVDKPNCIILAISPANQDIATSDAIKLAKDVDPTGERTFGVLTKLDLMDKGTNALEVLEGRSYRLQHPWVGIVNRSQADINKNVDMMLARRKEREYFDTSPDYGHLASKMGSEYLAKLLSKHLESVIRTRIPSILSLINKSIEELERELDRMGRPVAVDAGAQLYTILEMCRAFDKIFKEHLDGGRPGGDRIYGVFDNQLPAALKKLPFDRHLSLQSVKKIVSEADGYQPHLIAPEQGYRRLIEGALGYFRGPAEASVDAVHYVLKELVRKSISETEELKRFPSLQVELAAAANSSLEKFREESKKSVIRLVDMESAYLTAEFFRKLPQEIERPVTNSKNQTASPSSATLDQYGDGHFRRIASNVSAYVNMVSDTLRNTIPKACVYCQVRQAKLALLNYFYSQISKREGKQLGQLLDEDPALMDRRLECAKRLELYKKARDEIDAVAWVR

SEQ ID NO: 78088 - protein, 621 aa, Arabidopsis thaliana
  peptide (1)..(621): Ceres Seq. ID no. 12605049
MESLIGLVNRIQRACTVLGDYGGGTGSNAFNSLWEALPTVAVVGGQSSGKSSVLESIVGRDFLPRGSGIVTRRPLVLQLHKTDDGTEEYAEFLHLPKKQFTDFALVRREIQDETDRITGKNKQISPVPIHLSIYSPNVVNLTLIDLPGLTKVAVEGQPETIAEDIESMVRTYVDKPNCIILAISPANQDIATSDAIKLAKDVDPTGERTFGVLTKLDLMDKGTNALEVLEGRSYRLQHPWVGIVNRSQADINKNVDMMLARRKEREYFDTSPDYGHLASKMGSEYLAKLLSKHLESVIRTRIPSILSLINKSIEELERELDRMGRPVAVDAGAQLYTILEMCRAFDKIFKEHLDGGRPGGDRIYGVFDNQLPAALKKLPFDRHLSLQSVKKIVSEADGYQPHLIAPEQGYRRLIEGALGYFRGPAEASVDAVHYVLKELVRKSISETEELKRFPSLQVELAAAANSSLEKFREESKKSVIRLVDMESAYLTAEFFRKLPQEIERPVTNSKNQTASPSSATLDQYGDGHFRRIASNVSAYVNMVSDTLRNTIPKACVYCQVRQAKLALLNYFYSQISKREGKQLGQLLDEDPALMDRRLECAKRLELYKKARDEIDAVAWVR

SEQ ID NO: 78089 - protein, 454 aa, Arabidopsis thaliana
  peptide (1)..(454): Ceres Seq. ID no. 12605050
MVRTYVDKPNCIILAISPANQDIATSDAIKLAKDVDPTGERTFGVLTKLDLMDKGTNALEVLEGRSYRLQHPWVGIVNRSQADINKNVDMMLARRKEREYFDTSPDYGHLASKMGSEYLAKLLSKHLESVIRTRIPSILSLINKSIEELERELDRMGRPVAVDAGAQLYTILEMCRAFDKIFKEHLDGGRPGGDRIYGVFDNQLPAALKKLPFDRHLSLQSVKKIVSEADGYQPHLIAPEQGYRRLIEGALGYFRGPAEASVDAVHYVLKELVRKSISETEELKRFPSLQVELAAAANSSLEKFREESKKSVIRLVDMESAYLTAEFFRKLPQEIERPVTNSKNQTASPSSATLDQYGDGHFRRIASNVSAYVNMVSDTLRNTIPKACVYCQVRQAKLALLNYFYSQISKREGKQLGQLLDEDPALMDRRLECAKRLELYKKARDEIDAVAWVR

SEQ ID NO: 78090 - DNA, 3228 bp, Arabidopsis thaliana
  misc_feature (1)..(3228): Ceres Seq. ID no. 12605287
  misc_feature (1)..(3228): Ortholog of  Ceres SEQ ID NO 13647714 as cited in SEQ ID NO 20403
ctattcgtttagagaacacttaaacaaacgcaggaggcctggaaaaaagaaagataacgggactcgagagattgagattacggagccacccactttcatggagtctacactctcagctttctcaaccgtcaaggcaacagcgatggctcgaagtagtggtggtccttcattacctctcctcactatttctaaagcacttaaccgccactttaccggcgccagacacctccatcctttattgctcgctcgctgttctccctccgtgcgacgtcttggtgggtttcatggcagtcgatttacttcgtcgaattcagctttgagaagcttgggagctgctgttttgccggtaatccgacaccgtttagagtgtttgtcgagctcatcgccgtctttcaggagtatctcaagtggcggcggttctggatttggggggtataatggtggaagcggcggtggtggtggcggaggatcggagagtggtgattccaagtcaaaactgggtgctaatgcaagtgatggtgtctctgttccgtcgtcagatatcattattctcgatgttggagggatgacatgtggagggtgttcagcaagtgtgaagaagatactggaaagccaacctcaagttgcttcagctagtgttaatctcaccaccgagacggcaattgtgtggcctgtaccggaagctaaaagtgtacctgattggcaaaagagtttaggcgagacgcttgcaaaccatctgaccaattgcgggtttcagtctactcctcgagatttggtgacagagaatttcttcaaagttttcgaaacaaagacaaaagacaagcaggctcgcttaaaagagagtggccgcgagcttgctgtttcatgggccctatgtgctgtatgcttggttggccatttaactcactttctaggggttaatgctccctggattcatgcgatccattcaacggggtttcatgtgtctttatgtttgattacgttgcttggtcctggacgcaagctagtacttgatggtatcaagagtcttttaaaaggttccccaaacatgaacacgctagttggtcttggtgctttgtcatcattttctgttagctcactggcagccatgattccaaaattgggctggaagacattttttgaggaaccagttatgttaatagcttttgtattgctgggaaggaatcttgaacagagagctaaaataaaagccaccagtgatatgactggccttctgagtgttttgccttcaaaagctcgccttctgcttgatggtgatctgcagaattcaactgttgaggttccttgtaatagtctctctgttggtgatctagtcgtcatactaccaggagatcgagttccagcagatggtgtggtcaagtcaggtagaagcaccattgatgagtcaagtttcacaggtgaaccattgccagtgacaaaagagtcagggagtcaagtcgcagcaggatctataaacctgaacggaactcttactgtcgaagtgcatagatcagggggtgaaactgcagttggggacattattcgtctggttgaagaggctcagagtagagaagcaccagtacagcagttggttgacaaggtcgcagggcgcttcacgtatggagtgatggcactctctgcagctacatttacattctggaatctatttggtgcacatgttcttccttctgccttgcataatgggagcccaatgtctttggcccttcaactatcttgcagcgttctggttgtggcttgtccttgcgcccttgggttggctactccaacggcaatgctggttggtacatcattaggagcaagaagaggattacttcttcgtggtggtgatattcttgaaaagttttccttggttgatactgttgtcttcgacaaaactgggacactgacgaagggacaccctgttgtgactgaagttattattcctgaaaatccaagacacaatttgaatgatacttggtcagaagtagaggttttgatgttagcagctgctgttgagtcaaacactactcaccctgttgggaaagcgattgtaaaagcagcccgggctcgtaattgtcaaacaatgaaggcagaggatggaacatttactgaagaaccagggtctggtgctgttgctattgtcaacaacaaaagggttacagttgggactctagaatgggtcaagagacatggagccaccgggaactcattgcttgcattagaagagcatgaaattaacaaccagtctgttgtgtatattggggtggataatacacttgctgcagtcatccgttttgaagataaagtcagggaggatgctgctcaagttgttgagaatttgactcgccagggaattgatgtgtacatgctgtctggtgacaagaggaatgctgccaattatgtagcttctgtcgtaggaattaatcatgaacgggttatagcaggagttaaaccagctgagaaaaagaattttatcaatgaacttcaaaaaaataagaagattgttgcaatggtgggggatggaataaacgatgctgctgctctggcatcatctaatgttggagtggccatgggtggtggtgcaggagcggccagtgaggtgtctcctgttgtcttgatgggcaatcggttaacacagttgcttgatgcgatggagctaagtcggcaaaccatgaagaccgtgaagcaaaacctttggtgggcgttcggatacaacattgtaggaatcccaattgcggctggagtgttgctaccattgactggaaccatgttgactccatcaatggcgggggctctcatgggtgtaagctctctcggtgtcatgactaattccttacttctaaggtacagattcttctcgaaccgaaacgacaaaaatgtcaaaccggaaccaaaagagggaacaaaacagccacatgagaacacaagatggaagcaaagctcttagacggggaatttccacttcactgaggcactatatcatgatttttgcagagataaatctctttttagttttttacttttcattcttaacgataatttcggctcttggtcttgagagggtttgttaggacttagggtattgataatttggagaatcatctcaacgtgatttttcaaacaattgctttgagcttgtaacacagccacagtaacacatgtccaaactctgcattggctttggcatttgatactctgaaatttgattttgtgtataattatagtgaa

SEQ ID NO: 78091 - protein, 981 aa, Arabidopsis thaliana
  peptide (1)..(981): Ceres Seq. ID no. 12605288
YSFREHLNKRRRPGKKKDNGTREIEITEPPTFMESTLSAFSTVKATAMARSSGGPSLPLLTISKALNRHFTGARHLHPLLLARCSPSVRRLGGFHGSRFTSSNSALRSLGAAVLPVIRHRLECLSSSSPSFRSISSGGGSGFGGYNGGSGGGGGGGSESGDSKSKLGANASDGVSVPSSDIIILDVGGMTCGGCSASVKKILESQPQVASASVNLTTETAIVWPVPEAKSVPDWQKSLGETLANHLTNCGFQSTPRDLVTENFFKVFETKTKDKQARLKESGRELAVSWALCAVCLVGHLTHFLGVNAPWIHAIHSTGFHVSLCLITLLGPGRKLVLDGIKSLLKGSPNMNTLVGLGALSSFSVSSLAAMIPKLGWKTFFEEPVMLIAFVLLGRNLEQRAKIKATSDMTGLLSVLPSKARLLLDGDLQNSTVEVPCNSLSVGDLVVILPGDRVPADGVVKSGRSTIDESSFTGEPLPVTKESGSQVAAGSINLNGTLTVEVHRSGGETAVGDIIRLVEEAQSREAPVQQLVDKVAGRFTYGVMALSAATFTFWNLFGAHVLPSALHNGSPMSLALQLSCSVLVVACPCALGLATPTAMLVGTSLGARRGLLLRGGDILEKFSLVDTVVFDKTGTLTKGHPVVTEVIIPENPRHNLNDTWSEVEVLMLAAAVESNTTHPVGKAIVKAARARNCQTMKAEDGTFTEEPGSGAVAIVNNKRVTVGTLEWVKRHGATGNSLLALEEHEINNQSVVYIGVDNTLAAVIRFEDKVREDAAQVVENLTRQGIDVYMLSGDKRNAANYVASVVGINHERVIAGVKPAEKKNFINELQKNKKIVAMVGDGINDAAALASSNVGVAMGGGAGAASEVSPVVLMGNRLTQLLDAMELSRQTMKTVKQNLWWAFGYNIVGIPIAAGVLLPLTGTMLTPSMAGALMGVSSLGVMTNSLLLRYRFFSNRNDKNVKPEPKEGTKQPHENTRWKQSS

SEQ ID NO: 78092 - protein, 949 aa, Arabidopsis thaliana
  peptide (1)..(949): Ceres Seq. ID no. 12605289
MESTLSAFSTVKATAMARSSGGPSLPLLTISKALNRHFTGARHLHPLLLARCSPSVRRLGGFHGSRFTSSNSALRSLGAAVLPVIRHRLECLSSSSPSFRSISSGGGSGFGGYNGGSGGGGGGGSESGDSKSKLGANASDGVSVPSSDIIILDVGGMTCGGCSASVKKILESQPQVASASVNLTTETAIVWPVPEAKSVPDWQKSLGETLANHLTNCGFQSTPRDLVTENFFKVFETKTKDKQARLKESGRELAVSWALCAVCLVGHLTHFLGVNAPWIHAIHSTGFHVSLCLITLLGPGRKLVLDGIKSLLKGSPNMNTLVGLGALSSFSVSSLAAMIPKLGWKTFFEEPVMLIAFVLLGRNLEQRAKIKATSDMTGLLSVLPSKARLLLDGDLQNSTVEVPCNSLSVGDLVVILPGDRVPADGVVKSGRSTIDESSFTGEPLPVTKESGSQVAAGSINLNGTLTVEVHRSGGETAVGDIIRLVEEAQSREAPVQQLVDKVAGRFTYGVMALSAATFTFWNLFGAHVLPSALHNGSPMSLALQLSCSVLVVACPCALGLATPTAMLVGTSLGARRGLLLRGGDILEKFSLVDTVVFDKTGTLTKGHPVVTEVIIPENPRHNLNDTWSEVEVLMLAAAVESNTTHPVGKAIVKAARARNCQTMKAEDGTFTEEPGSGAVAIVNNKRVTVGTLEWVKRHGATGNSLLALEEHEINNQSVVYIGVDNTLAAVIRFEDKVREDAAQVVENLTRQGIDVYMLSGDKRNAANYVASVVGINHERVIAGVKPAEKKNFINELQKNKKIVAMVGDGINDAAALASSNVGVAMGGGAGAASEVSPVVLMGNRLTQLLDAMELSRQTMKTVKQNLWWAFGYNIVGIPIAAGVLLPLTGTMLTPSMAGALMGVSSLGVMTNSLLLRYRFFSNRNDKNVKPEPKEGTKQPHENTRWKQSS

SEQ ID NO: 78093 - protein, 934 aa, Arabidopsis thaliana
  peptide (1)..(934): Ceres Seq. ID no. 12605290
MARSSGGPSLPLLTISKALNRHFTGARHLHPLLLARCSPSVRRLGGFHGSRFTSSNSALRSLGAAVLPVIRHRLECLSSSSPSFRSISSGGGSGFGGYNGGSGGGGGGGSESGDSKSKLGANASDGVSVPSSDIIILDVGGMTCGGCSASVKKILESQPQVASASVNLTTETAIVWPVPEAKSVPDWQKSLGETLANHLTNCGFQSTPRDLVTENFFKVFETKTKDKQARLKESGRELAVSWALCAVCLVGHLTHFLGVNAPWIHAIHSTGFHVSLCLITLLGPGRKLVLDGIKSLLKGSPNMNTLVGLGALSSFSVSSLAAMIPKLGWKTFFEEPVMLIAFVLLGRNLEQRAKIKATSDMTGLLSVLPSKARLLLDGDLQNSTVEVPCNSLSVGDLVVILPGDRVPADGVVKSGRSTIDESSFTGEPLPVTKESGSQVAAGSINLNGTLTVEVHRSGGETAVGDIIRLVEEAQSREAPVQQLVDKVAGRFTYGVMALSAATFTFWNLFGAHVLPSALHNGSPMSLALQLSCSVLVVACPCALGLATPTAMLVGTSLGARRGLLLRGGDILEKFSLVDTVVFDKTGTLTKGHPVVTEVIIPENPRHNLNDTWSEVEVLMLAAAVESNTTHPVGKAIVKAARARNCQTMKAEDGTFTEEPGSGAVAIVNNKRVTVGTLEWVKRHGATGNSLLALEEHEINNQSVVYIGVDNTLAAVIRFEDKVREDAAQVVENLTRQGIDVYMLSGDKRNAANYVASVVGINHERVIAGVKPAEKKNFINELQKNKKIVAMVGDGINDAAALASSNVGVAMGGGAGAASEVSPVVLMGNRLTQLLDAMELSRQTMKTVKQNLWWAFGYNIVGIPIAAGVLLPLTGTMLTPSMAGALMGVSSLGVMTNSLLLRYRFFSNRNDKNVKPEPKEGTKQPHENTRWKQSS

SEQ ID NO: 78094 - DNA, 1824 bp, Arabidopsis thaliana
  misc_feature (1)..(1824): Ceres Seq. ID no. 12605489
  misc_feature (1)..(1824): Ortholog of  Ceres SEQ ID NO 14314567 as cited in SEQ ID NO 52335
  misc_feature (1)..(1824): Ortholog of  Ceres SEQ ID NO 14315985 as cited in SEQ ID NO 57720
agttttatttttgttttctctttccatttcttgccaaaaccctaatttcaccttcacttaagaaatttctcccccaacttaaaccacccccttagaaaaaataaacaaaaaaaattagatctttcttgtttgcttataatatgtatgttttaggtcgaattttctgaaattaagattcattcctccatggaagaagctctgtttttattctctttagcttagcttagcttctactgatctgtttttgctacaaaatcccatctttttctttaaaactctttatctctgaatcttgagtttcttgtagaagaagaagcaattttgaatctttcgtaatcataaagattcgtggaggatctctactgatttgtcggaatctctcactacagaatcacttgatcttatgtccggatggaggagagagaaggaaccaacatcaacaacaacatcactagcagtttcggcttgaagcagcaacatgaagctgctgcttctgatggtggttactcaatggacccaccaccaagacccgaaaaccctaacccgtttttagtcccacccactactgtccccgcggccgccaccgtagcagcagctgttactgagaatgcggctactccgtttagcttaacaatgccgacggagaacacttcagctgagcagctgaaaaagaagagaggtaggccgagaaagtataatcccgatgggactcttgtcgtgactttatcgccgatgccaatctcgtcctctgttccgttgacgtcggagtttcctccaaggaaacgaggaagaggacgtggcaagtctaatcgatggctcaagaagtctcaaatgttccaattcgatagaagtcctgttgataccaatttggcaggtgtaggaactgctgattttgttggtgccaactttacacctcatgtactgatcgtcaacgccggagaggatgtgacgatgaagataatgacattctctcaacaaggatctcgtgctatctgcatcctttcagctaatggtcccatctccaatgttacgcttcgtcaatctatgacatccggtggtactctaacttatgagggtcgttttgagattctctctttgacgggttcgtttatgcaaaatgactctggaggaactcgaagtagagctggtggtatgagtgtttgccttgcaggaccagatggtcgtgtctttggtggaggactcgctggtctctttcttgctgctggtcctgtccaggtaatggtagggacttttatagctggtcaagagcagtcacagctggagctagcaaaagaaagacggctaagatttggggctcaaccatcttctatctcctttaacatatccgcagaagaacggaaggcgagattcgagaggcttaacaagtctgttgctattcctgcaccaaccacttcatacacgcatgtaaacacaacaaatgcggttcacagttactatacaaactcggttaaccatgtcaaggatcccttctcgtctatcccagtaggaggaggaggaggtggagaggtaggagaagaagagggtgaagaagatgatgatgaattagaaggtgaagacgaagaattcggaggcgatagccaatctgacaacgagattccgagctgatgatgatcatacggtttcttttcgcggatttgttaggtttgatggatttcagattttggttgattgtttttattaacacagaatgtttagaagctgctatctttaggttcccatcctcttgtgattgttgtagtatccttgttagaaacaaacttactgttgcaaaactctccttcaagaaagttttcactttgcttt

SEQ ID NO: 78095 - protein, 404 aa, Arabidopsis thaliana
  peptide (1)..(404): Ceres Seq. ID no. 12605490
MEEREGTNINNNITSSFGLKQQHEAAASDGGYSMDPPPRPENPNPFLVPPTTVPAAATVAAAVTENAATPFSLTMPTENTSAEQLKKKRGRPRKYNPDGTLVVTLSPMPISSSVPLTSEFPPRKRGRGRGKSNRWLKKSQMFQFDRSPVDTNLAGVGTADFVGANFTPHVLIVNAGEDVTMKIMTFSQQGSRAICILSANGPISNVTLRQSMTSGGTLTYEGRFEILSLTGSFMQNDSGGTRSRAGGMSVCLAGPDGRVFGGGLAGLFLAAGPVQVMVGTFIAGQEQSQLELAKERRLRFGAQPSSISFNISAEERKARFERLNKSVAIPAPTTSYTHVNTTNAVHSYYTNSVNHVKDPFSSIPVGGGGGGEVGEEEGEEDDDELEGEDEEFGGDSQSDNEIPS

SEQ ID NO: 78096 - protein, 371 aa, Arabidopsis thaliana
  peptide (1)..(371): Ceres Seq. ID no. 12605491
MDPPPRPENPNPFLVPPTTVPAAATVAAAVTENAATPFSLTMPTENTSAEQLKKKRGRPRKYNPDGTLVVTLSPMPISSSVPLTSEFPPRKRGRGRGKSNRWLKKSQMFQFDRSPVDTNLAGVGTADFVGANFTPHVLIVNAGEDVTMKIMTFSQQGSRAICILSANGPISNVTLRQSMTSGGTLTYEGRFEILSLTGSFMQNDSGGTRSRAGGMSVCLAGPDGRVFGGGLAGLFLAAGPVQVMVGTFIAGQEQSQLELAKERRLRFGAQPSSISFNISAEERKARFERLNKSVAIPAPTTSYTHVNTTNAVHSYYTNSVNHVKDPFSSIPVGGGGGGEVGEEEGEEDDDELEGEDEEFGGDSQSDNEIPS

SEQ ID NO: 78097 - protein, 330 aa, Arabidopsis thaliana
  peptide (1)..(330): Ceres Seq. ID no. 12605492
MPTENTSAEQLKKKRGRPRKYNPDGTLVVTLSPMPISSSVPLTSEFPPRKRGRGRGKSNRWLKKSQMFQFDRSPVDTNLAGVGTADFVGANFTPHVLIVNAGEDVTMKIMTFSQQGSRAICILSANGPISNVTLRQSMTSGGTLTYEGRFEILSLTGSFMQNDSGGTRSRAGGMSVCLAGPDGRVFGGGLAGLFLAAGPVQVMVGTFIAGQEQSQLELAKERRLRFGAQPSSISFNISAEERKARFERLNKSVAIPAPTTSYTHVNTTNAVHSYYTNSVNHVKDPFSSIPVGGGGGGEVGEEEGEEDDDELEGEDEEFGGDSQSDNEIPS

SEQ ID NO: 78098 - DNA, 1787 bp, Arabidopsis thaliana
  misc_feature (1)..(1787): Ceres Seq. ID no. 12605608
  misc_feature (1)..(1787): Ortholog of  Ceres SEQ ID NO 14303137 as cited in SEQ ID NO 53594
  misc_feature (1)..(1787): Ortholog of  Ceres SEQ ID NO 13585454 as cited in SEQ ID NO 65280
  misc_feature (1)..(1787): Ortholog of  Ceres SEQ ID NO 14307889 as cited in SEQ ID NO 67245
atatatagtttaatttttttctaggttttcgttcgaactcatgtgggttcagtaaataaatgtttaagtccccatctggccgcgtcaaaaatacttagataacaacaattagtggttgacatagaaaagtaatgattgttgccgcgtagaatgaaattaataaaattataaagaacagtgaagcaataaatgtttccttggcgtcttgaagagtagtcttcttaaatattccagcccaaaaaaaaaaagattctatccattatcaagagaagaaaaaaaatctgaattccaattcgaagaagaagaagaagaagaaaggagatgactatggggaatttcttaaagagatttggaagtggaaaaagcagaagcagtagaaatatgactctgggaacgacgtcgtctcaatctcatgaaccatcaccgtcggatccttcactctcccttgccgataataccaacgccaccaagaagaagtacgctctcatccctgaccgcttctcttccctcgaccaggtatcaaaagctctaagagaagctggtcttgaatcatccaatctcattctcggagttgatttcacaaagagcaacgagtggactgggaaaacttctttcgatggaaaatgtctgcacgcgctcggcgaaacttcgaatccatatgaaaaggcgatttttgtaatcggccaaacgttggctccttttgatgaagacaatctcatcccttgtttcggctttggcgattcaacaactcatgacgaggaagtgttcggtttccatagcgacaattctccatgtcatggcttcgaagaggtcttagcatgttacaagagaattgcacccaacttgcgtctatcagggccaacgtcgtatggaccgctcatcgatgctgctgtcgacattgtggagaagaacaacggacaattccatgttctggtgattgttgcagatggacaggtaacgagaggtacggatatggccgagggagaactcagtcaacaagagaaaacaaccatcgacgcgattgtaaatgcaagctcgtatgctttgtcgattgttttagtcggtgttggagacggaccatgggaagacatgaggaagttcgatgataagatccctaagcgtgaattcgacaactttcagtttgtgaatttcacagagattatgacgagaaactcaccagagtctgccaaagaaactgcttttgctctagctgctctaatggagattccctttcagtatcaagcagccatcgaactccgcttactcgggaagcagacgggcttagcgaagacaatagttccgaggccaccaccaattccgtacacacctccaactaatgctgaactaccatcaactgcatcacctgcatcacctgaacaaacccagagttgcccgatttgtctgactaaccgaaaagacgtggctttcagctgtggccacatgacttgtggagattgcggatccaaaatatcaaattgcccgatctgtcgagtaaggatcacgaaccggctaaagctttacacatgatcaatggccacgaactttttttctgaccacggctttacacgtgatcaatgccaacaaactttatctctgcacataacaaatcgcttgcacatagccatctcctttgtagaatctacaatttggtttgccaagtgtttctgacaatgttccacaatcagcgtgtaccatgtaattctgtatgtactgtaaaacattaactttgcaaacaagaatgaagaagcaatgtacaaattacaaaacataagttttacattttattc

SEQ ID NO: 78099 - protein, 401 aa, Arabidopsis thaliana
  peptide (1)..(401): Ceres Seq. ID no. 12605609
MTMGNFLKRFGSGKSRSSRNMTLGTTSSQSHEPSPSDPSLSLADNTNATKKKYALIPDRFSSLDQVSKALREAGLESSNLILGVDFTKSNEWTGKTSFDGKCLHALGETSNPYEKAIFVIGQTLAPFDEDNLIPCFGFGDSTTHDEEVFGFHSDNSPCHGFEEVLACYKRIAPNLRLSGPTSYGPLIDAAVDIVEKNNGQFHVLVIVADGQVTRGTDMAEGELSQQEKTTIDAIVNASSYALSIVLVGVGDGPWEDMRKFDDKIPKREFDNFQFVNFTEIMTRNSPESAKETAFALAALMEIPFQYQAAIELRLLGKQTGLAKTIVPRPPPIPYTPPTNAELPSTASPASPEQTQSCPICLTNRKDVAFSCGHMTCGDCGSKISNCPICRVRITNRLKLYT

SEQ ID NO: 78100 - protein, 399 aa, Arabidopsis thaliana
  peptide (1)..(399): Ceres Seq. ID no. 12605610
MGNFLKRFGSGKSRSSRNMTLGTTSSQSHEPSPSDPSLSLADNTNATKKKYALIPDRFSSLDQVSKALREAGLESSNLILGVDFTKSNEWTGKTSFDGKCLHALGETSNPYEKAIFVIGQTLAPFDEDNLIPCFGFGDSTTHDEEVFGFHSDNSPCHGFEEVLACYKRIAPNLRLSGPTSYGPLIDAAVDIVEKNNGQFHVLVIVADGQVTRGTDMAEGELSQQEKTTIDAIVNASSYALSIVLVGVGDGPWEDMRKFDDKIPKREFDNFQFVNFTEIMTRNSPESAKETAFALAALMEIPFQYQAAIELRLLGKQTGLAKTIVPRPPPIPYTPPTNAELPSTASPASPEQTQSCPICLTNRKDVAFSCGHMTCGDCGSKISNCPICRVRITNRLKLYT

SEQ ID NO: 78101 - protein, 381 aa, Arabidopsis thaliana
  peptide (1)..(381): Ceres Seq. ID no. 12605611
MTLGTTSSQSHEPSPSDPSLSLADNTNATKKKYALIPDRFSSLDQVSKALREAGLESSNLILGVDFTKSNEWTGKTSFDGKCLHALGETSNPYEKAIFVIGQTLAPFDEDNLIPCFGFGDSTTHDEEVFGFHSDNSPCHGFEEVLACYKRIAPNLRLSGPTSYGPLIDAAVDIVEKNNGQFHVLVIVADGQVTRGTDMAEGELSQQEKTTIDAIVNASSYALSIVLVGVGDGPWEDMRKFDDKIPKREFDNFQFVNFTEIMTRNSPESAKETAFALAALMEIPFQYQAAIELRLLGKQTGLAKTIVPRPPPIPYTPPTNAELPSTASPASPEQTQSCPICLTNRKDVAFSCGHMTCGDCGSKISNCPICRVRITNRLKLYT

SEQ ID NO: 78102 - DNA, 1619 bp, Arabidopsis thaliana
  misc_feature (1)..(1619): Ceres Seq. ID no. 12605734
  misc_feature (1)..(1619): Ortholog of  Ceres SEQ ID NO 14302935 as cited in SEQ ID NO 20442
agttccttttccacttttaaccatcaccctataagtggttataactagtaacttgaaatagaaacactctatctctaaaagaggcaaccaaacaaacaaggtctagctttttataaccaaactctgcttctgaacagagttagtcaaagagagagaagccatggaagctatgaaggagactgtggaggagagcttgagagagatgagagagacgtttgcgagtgggaggacgaggagtctgaagtggaggaaggcacagatcggagctatatacgagatggttaaagacaacgaagacaagatctgcaatgctctgtttcaagatttgggcaaacacagtactgaagcttttagagatgagcttggtgttgtcttgcgaacagctactgttgcaatcaactgtcttgataaatgggccgtccccaaacatagcaaacttcctctgttgttctacccagcaaaagggaaagtcatatcggaaccctatgggacggttcttgttctgtctagctggaattttcctatatctttgtctctggatccattgattggggcaatagcagcaggaaataccgtgcttctcaagtcatctgaactaagccctaacgcatctgccttccttgccaagacaattccagcttatctcgatactaaagccatcaaagttatcgaaggaggacctgatgtcgctactatcctcttgcagcatcaatgggacaagatcttcttcaccgggagtcccaagattggaaggatcataatggctgcagcagcacagcatctgactcctgtgacattggagcttggtggaaaatcttgtatctctgtagattacgttcttatcgaaaagagtttcgcgcctactctgattgatatgttgaagcctacgataaagtctttctttggcgaaaatcctaaagaatctggatgtctctcaaggattgcaaacaagcaccacgttcagagactgtctcgtcttcttagcgatcctcgtccaacgatcttgttggaccctcctcttgattctgagatcatgaatgaagagatctttggtccaattctcccgattatcacggtacgtgacatccaagaaagcatagggatcattaatacaaaaccgaagccacttgccatttatgcattcacaaatgacgagaaccttaaaactagaattttgtcagaaacatcctcaggaagtgttaccttcaatgacgtcatgatccagtatatgtgtgatgcgttaccttttggaggagtgggagaaagtggaatagggaggtatcacgggaaatactcatttgattgtttcagtcacgagaaagcaataatggaaggaagcttaggtatggatcttgaagctcgataccctccatggaacaacttcaagctcaccttcatcagactcgcatttcgtgaagcttacttcaagcttatcctccttatgcttggtcttaaaagataaaagggggaaagtgagagacagagacacatacacacaaacagagacaatataagtgattgaattacatcacacttatgtttgcttatcatatcttcacctaataagtctcattccgaatgttttacatttctttcaagcttgagagattctatataaa

SEQ ID NO: 78103 - protein, 433 aa, Arabidopsis thaliana
  peptide (1)..(433): Ceres Seq. ID no. 12605735
MEAMKETVEESLREMRETFASGRTRSLKWRKAQIGAIYEMVKDNEDKICNALFQDLGKHSTEAFRDELGVVLRTATVAINCLDKWAVPKHSKLPLLFYPAKGKVISEPYGTVLVLSSWNFPISLSLDPLIGAIAAGNTVLLKSSELSPNASAFLAKTIPAYLDTKAIKVIEGGPDVATILLQHQWDKIFFTGSPKIGRIIMAAAAQHLTPVTLELGGKSCISVDYVLIEKSFAPTLIDMLKPTIKSFFGENPKESGCLSRIANKHHVQRLSRLLSDPRPTILLDPPLDSEIMNEEIFGPILPIITVRDIQESIGIINTKPKPLAIYAFTNDENLKTRILSETSSGSVTFNDVMIQYMCDALPFGGVGESGIGRYHGKYSFDCFSHEKAIMEGSLGMDLEARYPPWNNFKLTFIRLAFREAYFKLILLMLGLKR

SEQ ID NO: 78104 - protein, 430 aa, Arabidopsis thaliana
  peptide (1)..(430): Ceres Seq. ID no. 12605736
MKETVEESLREMRETFASGRTRSLKWRKAQIGAIYEMVKDNEDKICNALFQDLGKHSTEAFRDELGVVLRTATVAINCLDKWAVPKHSKLPLLFYPAKGKVISEPYGTVLVLSSWNFPISLSLDPLIGAIAAGNTVLLKSSELSPNASAFLAKTIPAYLDTKAIKVIEGGPDVATILLQHQWDKIFFTGSPKIGRIIMAAAAQHLTPVTLELGGKSCISVDYVLIEKSFAPTLIDMLKPTIKSFFGENPKESGCLSRIANKHHVQRLSRLLSDPRPTILLDPPLDSEIMNEEIFGPILPIITVRDIQESIGIINTKPKPLAIYAFTNDENLKTRILSETSSGSVTFNDVMIQYMCDALPFGGVGESGIGRYHGKYSFDCFSHEKAIMEGSLGMDLEARYPPWNNFKLTFIRLAFREAYFKLILLMLGLKR

SEQ ID NO: 78105 - protein, 419 aa, Arabidopsis thaliana
  peptide (1)..(419): Ceres Seq. ID no. 12605737
MRETFASGRTRSLKWRKAQIGAIYEMVKDNEDKICNALFQDLGKHSTEAFRDELGVVLRTATVAINCLDKWAVPKHSKLPLLFYPAKGKVISEPYGTVLVLSSWNFPISLSLDPLIGAIAAGNTVLLKSSELSPNASAFLAKTIPAYLDTKAIKVIEGGPDVATILLQHQWDKIFFTGSPKIGRIIMAAAAQHLTPVTLELGGKSCISVDYVLIEKSFAPTLIDMLKPTIKSFFGENPKESGCLSRIANKHHVQRLSRLLSDPRPTILLDPPLDSEIMNEEIFGPILPIITVRDIQESIGIINTKPKPLAIYAFTNDENLKTRILSETSSGSVTFNDVMIQYMCDALPFGGVGESGIGRYHGKYSFDCFSHEKAIMEGSLGMDLEARYPPWNNFKLTFIRLAFREAYFKLILLMLGLKR

SEQ ID NO: 78106 - DNA, 1327 bp, Arabidopsis thaliana
  misc_feature (1)..(1327): Ceres Seq. ID no. 12606109
  misc_feature (1)..(1327): Ortholog of  Ceres SEQ ID NO 14316382 as cited in SEQ ID NO 57756
aatgaagcattagaagaatcatttccacacgattttccctgtgatttcttcatttccggcgacttaaaacggtgtctagcaaaatgagccgaccacaagatccaccccgaggtttcttcccatttggaaatccctttcggatgttatcatcaaagggatcagatttatcgccatggctactttctctattgaacggctttgagctacgtttggaagagagactgaagaaacttatgcctaagaacaaagatgacatcctcactttatcctggatgaagctagctatggagtcactctgcgagactcataagaacattaacactctcattactgatctccagcttcctgtctctgattgggaagagaaatgggttgatgtttacctcaacataagcgttaggttactagatctctgtaatgcctttagctctgagctcacacgtctcaaccagggagatctcttcctcaagtgtgttctgcacaatttacaatcggattctggggagaagtatctccaggctcgatcttcgcttgatagctggaggcaacatgttaatacaaacaaccctagaattgaaaactgccgtgcggttctagacagtcttgttaaatctctgagtctgcctaaagtcaagaactcgcctaaaggaaaggttctgatgcgagctttttatggtgtgaaggttcaaacagtttatatctgcagtgtatttaccgcagcctggtctgattccaccaaggatcttttcgatttacctgtctctgaaaaaccattatgggcaaaggtctttactgatatgcagagtgttgtaaatgctgagatcagagacatgttgtcttccggtagaaccacgattctcaaagagctggagagcgttgatgctagtgtcgagaagctatacccgatgatccaagatggcgttgatcctgtcgaagttgaattcttcaaagataatgttatggaattggggacacaagctgagaaattgtctcaagggttggatcagttactggaggaagttgatagtttctttaaactgactttgagagggcgcgatgtgttgctctgtaatcttaggtcaagtgactcaatctctggcaatgcagttggagaagatgtagactaaaatagtgaggtaaacaaacaagtttaacccttacaaaaggcagctttaggttctataaatagtgttttctcttttttctttgttttgagtccatctgtcgagcttgtctcttccgtttaggtgtgttggtcttgtatgtgtgactgtatgaaatcaattctgcaataaaatataaatatagaatacatctgtttggcttg

SEQ ID NO: 78107 - protein, 347 aa, Arabidopsis thaliana; identical to SEQ ID NO: 50019
  peptide (1)..(347): Ceres Seq. ID no. 12606110

SEQ ID NO: 78108 - protein, 328 aa, Arabidopsis thaliana; identical to SEQ ID NO: 50020
  peptide (1)..(328): Ceres Seq. ID no. 12606111

SEQ ID NO: 78109 - protein, 297 aa, Arabidopsis thaliana; identical to SEQ ID NO: 50021
  peptide (1)..(297): Ceres Seq. ID no. 12606112

SEQ ID NO: 78110 - DNA, 1411 bp, Arabidopsis thaliana
  misc_feature (1)..(1411): Ceres Seq. ID no. 12606124
  misc_feature (1)..(1411): Ortholog of  Ceres SEQ ID NO 14305026 as cited in SEQ ID NO 52980
  misc_feature (1)..(1411): Ortholog of  Ceres SEQ ID NO 15175670 as cited in SEQ ID NO 55204
  misc_feature (1)..(1411): Ortholog of  Ceres SEQ ID NO 13655712 as cited in SEQ ID NO 63394
gttcatatggaaaacgctcatcaacctcaacaatctctctcctctctctctctgtatatagaagaatctccattgtctttaatttctctccatttctctttctctcttccttcaaagttttctcttttcttgatgggtttaagagagtaaagatcatcaagtactatgcattaaattgagaagttattaaaaatttcgaaagtaattaaagattgttgatgatgaagagattaagtagttcagattcagtgggtggtctcatctctttatgtcctacaacttccacagatgagcagagtccgaggagatacggtgggagagagtttcagtcgatgcttgaaggatacgaggaagaagaagaagctatagtagaagaaagaggacacgtgggcttgtcggagaagaagagaaggttaagcattaaccaagttaaagctttggagaagaattttgagttagagaataagcttgagcctgagaggaaagttaagttagctcaagaacttggtcttcaacctcgtcaagttgctgtttggtttcaaaaccgtcgtgctcggtggaagacaaaacagcttgagaaagattacggtgttcttaaaacccagtacgattctctccgtcataactttgattccctccgccgtgacaatgaatctctccttcaagagattagtaaactgaaaacgaagcttaatggaggaggaggagaagaagaagaagaagagaacaacgcggcggtgacaacggagagtgatatttcggtcaaggaggaagaagtttcgttgccggagaagattacagaggcaccgtcgtctcctccacagtttcttgaacattctgatggtcttaattaccggagtttcacagatctacgtgatcttcttccattaaaggcggcggcttcttcattcgccgccgcagctggatcttcagacagtagcgattcaagcgctctgctgaatgaagaaagcagctctaatgtcactgtggcggctccggtgacggttccaggaggtaatttcttccagtttgtgaaaatggagcagacggaggatcatgaggactttctgagtggagaagaagcttgtgaattcttttccgatgaacaaccgccgtctctacactggtactccaccgttgatcattggaattgaagctgaaaacaccaccggaagagattttggattggattagatgctcttttcttctctgtggaaaaaacagaggagggcaaaatgggaataaagttaaaattgaagggtgaaagggcaattaaggaagggttaagtctgggcgggaataatgatttagggtgaatttgtaattatgctttttctctagtgattttcgtgcacttcttgtaattaaggatcatcagatcaaagagaaattgagaaggggttaacatgtc

SEQ ID NO: 78111 - protein, 311 aa, Arabidopsis thaliana
  peptide (1)..(311): Ceres Seq. ID no. 12606125
MMKRLSSSDSVGGLISLCPTTSTDEQSPRRYGGREFQSMLEGYEEEEEAIVEERGHVGLSEKKRRLSINQVKALEKNFELENKLEPERKVKLAQELGLQPRQVAVWFQNRRARWKTKQLEKDYGVLKTQYDSLRHNFDSLRRDNESLLQEISKLKTKLNGGGGEEEEEENNAAVTTESDISVKEEEVSLPEKITEAPSSPPQFLEHSDGLNYRSFTDLRDLLPLKAAASSFAAAAGSSDSSDSSALLNEESSSNVTVAAPVTVPGGNFFQFVKMEQTEDHEDFLSGEEACEFFSDEQPPSLHWYSTVDHWN

SEQ ID NO: 78112 - protein, 310 aa, Arabidopsis thaliana
  peptide (1)..(310): Ceres Seq. ID no. 12606126
MKRLSSSDSVGGLISLCPTTSTDEQSPRRYGGREFQSMLEGYEEEEEAIVEERGHVGLSEKKRRLSINQVKALEKNFELENKLEPERKVKLAQELGLQPRQVAVWFQNRRARWKTKQLEKDYGVLKTQYDSLRHNFDSLRRDNESLLQEISKLKTKLNGGGGEEEEEENNAAVTTESDISVKEEEVSLPEKITEAPSSPPQFLEHSDGLNYRSFTDLRDLLPLKAAASSFAAAAGSSDSSDSSALLNEESSSNVTVAAPVTVPGGNFFQFVKMEQTEDHEDFLSGEEACEFFSDEQPPSLHWYSTVDHWN

SEQ ID NO: 78113 - protein, 273 aa, Arabidopsis thaliana
  peptide (1)..(273): Ceres Seq. ID no. 12606127
MLEGYEEEEEAIVEERGHVGLSEKKRRLSINQVKALEKNFELENKLEPERKVKLAQELGLQPRQVAVWFQNRRARWKTKQLEKDYGVLKTQYDSLRHNFDSLRRDNESLLQEISKLKTKLNGGGGEEEEEENNAAVTTESDISVKEEEVSLPEKITEAPSSPPQFLEHSDGLNYRSFTDLRDLLPLKAAASSFAAAAGSSDSSDSSALLNEESSSNVTVAAPVTVPGGNFFQFVKMEQTEDHEDFLSGEEACEFFSDEQPPSLHWYSTVDHWN

SEQ ID NO: 78114 - DNA, 675 bp, Arabidopsis thaliana
  misc_feature (1)..(675): Ceres Seq. ID no. 12606178
  misc_feature (1)..(675): Ortholog of  Ceres SEQ ID NO 15179062 as cited in SEQ ID NO 0
ggtcacatttctttaactttaaaaactcttccgtttcgccgaagcttcttcaatggcgatttctctcgccaccgcctatatctctccatgttttacaccggaatcgtctagttccgcttcaccatcacgaactctttcctccgtacgattaccttctcagattcgccgattcggaagtgttcaatcgccgtcttcgtctactcgcttcgctccactcactgtaagagcagcaaagaagcaaactttcaactcttttgatgatttgttgcagaattctgataaacctgtacttgtagacttctatgctacttggtgtggtccatgtcagcttatggtacctatactcaatgaagtgagtgaaacactgaaagatataattgcagttgtgaaaattgatactgagaagtacccaagtcttgctaacaaataccagattgaggctttgcccacattcatcttattcaaagacggcaaactctgggaccgtttcgagggtgccttgccagcgaaccaactcgttgagcgtattgagaattctttgcaagtgaaacagtaggtttgagaaaccaagaaaacttgtcatctatgaacaatctgttgtgacataagccattgttgattgtttgctcggtataatcatctacctattcatatatggcatctgccatttttctc

SEQ ID NO: 78115 - protein, 167 aa, Arabidopsis thaliana; identical to SEQ ID NO: 50565
  peptide (1)..(167): Ceres Seq. ID no. 12606179

SEQ ID NO: 78116 - DNA, 1164 bp, Arabidopsis thaliana
  misc_feature (1)..(1164): Ceres Seq. ID no. 12606224
  misc_feature (1)..(1164): Ortholog of  Ceres SEQ ID NO 15168521 as cited in SEQ ID NO 58180
atcttcattctcacactcaacccctctctctcctttcattctcattctctctcggctttgttttctctttaatctgattcatctattctatttctatcaccacacaaaaagaagaaaaaaaacaaactttactttaagaattttgaagaataaaatcaaaagagaataaccatggttttctcctccatccaagcctatcttgattcatccaactggcaacaggctcctccgagcaattataatcatgacggaacaggcgcctcagcaaatggaggtcatgttcttcgtcctcagctgcagccacagcagcagccacagcagcagccgcatcctaatgggagcgggggcggaggtggaggtggaggcggctcgatccgagcaggatcaatggtggacagagcaagacaagcaaacgtagccttgccagaagcagcactgaaatgtccgagatgcgaatccaccaacaccaagttctgctacttcaacaactacagcctcactcaaccacgccacttctgcaagacctgccggagatactggacacgtggcggagctctccgcaacgtcccagtcggcggtggctgccggagaaacaggcgtaccaaaagcaacagcaacaacaacaataacagcactgctactagcaataacaccagtttctcctccgggaatgcatccaccatcagcacgattctctcctcccactatggaggaaaccaagagagtatcttaagccagattttgtctccggcgaggctaatgaatcctacttacaatcatctcggagatctcacaagtaatacaaaaacagacaacaacatgagcttgttgaactatggaggattgagtcaagacttgaggtcaatccacatgggagcttctggtggctcgcttatgagctgtgttgatgaatggagatcggcgtcttatcatcagcagtcaagtatgggcggtgggaacttggaggattcttctaatcctaatccatccgcaaatgggttttactcttttgagtcgccgaggataacttcagcgtcaatctcttctgctttagcatcgcagttttcttcggttaaagttgaagataatccttacaaatgggttaatgtcaatggtaattgctcttcctggaatgatctttctgctttcggctcttctcgttga

SEQ ID NO: 78117 - protein, 330 aa, Arabidopsis thaliana; identical to SEQ ID NO: 49811
  peptide (1)..(330): Ceres Seq. ID no. 12606225

SEQ ID NO: 78118 - protein, 258 aa, Arabidopsis thaliana; identical to SEQ ID NO: 49812
  peptide (1)..(258): Ceres Seq. ID no. 12606226

SEQ ID NO: 78119 - DNA, 1126 bp, Arabidopsis thaliana
  misc_feature (1)..(1126): Ceres Seq. ID no. 12606275
  misc_feature (1)..(1126): Ortholog of  Ceres SEQ ID NO 15177071 as cited in SEQ ID NO 54383
acagagtttcggctcctccgttgtgtttcaggacgacgcaaaggggaaaaaaaattgaattctttctctccaagcgaaactagggtttcgaaagtctctgtctcatcaaagcttcgaaaagaaagtgattgcattaagagaaacattgggataaaagatgagctttactcaggctaattgttttcgaccatcctactatcctgcaaggataacacgaccaaattgcatctccagtgtacctattaggtcttcagtacgctttgatcacttcccgcgtacctcgtttactcttcgagctactgctgcagtgtctactcagttttcgcctcttcttgatcatcgccgtcgtttacctactgggaaatcgaaacaaagttctgctgtgtgcttatttggtgggaaagataaacctgatggtagtgatgagatatcgccatggaaagcaatagagaaagctatggggaagaaatcggttgaagatatgttgcgagagcagatacagaagaaagacttttatgatactgacagtggcggcaacatgcctccacgtggaggaggcagtggtggcggtggtggaaatggtgaggagcgtcctgaagggtcaggaggagaagatggtggtcttgctgggatcgcagatgaaactttgcaagtggttttggcgaccttaggcttcatctttttgtacacatacattatcactggggaggaattggtcaagcttgcaagggattacattaggtttcttatgggaagacctaagactgttcgattgacccgagccatggatagttggaacggattcttggagaagatgtcgaggcaaagagtgtatgatgagtattggctagaaaaggcgatcatcaacacaccaacctggtatgatagccctgagaagtacagacgtgttatcaaggcttatgttgattcaaattctgatgaagcttatgtggaatcaaattctgatgaggtatcttactaggttaggaacaggaagagatccataataacaattgagttttttttcttagtgtttgaaatttagaatcagtttctttgaattggatttatgttcgtacatttgtatggaattggtttatttatacacgatgaacattctcgaggg

SEQ ID NO: 78120 - protein, 274 aa, Arabidopsis thaliana; identical to SEQ ID NO: 49678
  peptide (1)..(274): Ceres Seq. ID no. 12606276

SEQ ID NO: 78121 - protein, 174 aa, Arabidopsis thaliana; identical to SEQ ID NO: 49679
  peptide (1)..(174): Ceres Seq. ID no. 12606277

SEQ ID NO: 78122 - protein, 166 aa, Arabidopsis thaliana; identical to SEQ ID NO: 49680
  peptide (1)..(166): Ceres Seq. ID no. 12606278

SEQ ID NO: 78123 - DNA, 2900 bp, Arabidopsis thaliana
  misc_feature (1)..(2900): Ceres Seq. ID no. 12606550
  misc_feature (1)..(2900): Ortholog of  Ceres SEQ ID NO 13659971 as cited in SEQ ID NO 67565
  misc_feature (1)..(2900): Ortholog of  Ceres SEQ ID NO 13500385 as cited in SEQ ID NO 67583
gccacacgatggagtatggcggaagaagcatcgaccgagtaattgagacgctctgtttccaattactactctctcgagctcctccgctctgcattgtcgccgagagttcctttcttgtccgacaaactacttcttctccttcgataagccaattctgcgccatagatttttgaaatctactgccggaaaggctgcatgcgatttcaactcccttttcccgggacaattcgcagcttgtgaagaagatcaagaggtgaactctgagtgatgagtgagccaaaggtcaggcgttgggttggcaaatatgaggttggaagattgatcggtgaatgtaattttgggaaactgcggagtgctgttgacacagagacaggagaccctgtggctttgatgatccttgataaagacaaggttctgaagcataagatggctgaacaaataaagagagaaatttctattatgaagctgatcaaccatccaaatgtagtgcagctttatgaggttttggcgagcaaggcgaagatatatattgtcctagagttcatcagtggtggaaagctttttgacaagattaaaaatgatgggcgcatgaatgaagacgaagcacagagatatttccagcagcttatcaatgcagttgattactgccacagcaggggagtgtaccacagagacttaaagccagaaaatttgcttcttgatgcgcaagagaatttgaaagtcgctgaatttggattgattgccttgtcccaacaagccgggggagatggccttcgtcacactgcatgtggaaatccagattatgctgctcctgaggttcttaatgatcaaggctatgatggggcaaaggcagacttgtggtcctgtggagtgatactctttgtactacttgctgggtatttgcctttcgaggattctagtctcacgacgctgtacaaaaagatctcatctgctgattttagttgtcctccttggctctcttctggtgttaagaatttgatcgtccgaatcttggatccaaaccctatgactcgtataacaattccagagattttggaagatgtgtggttcaagaaagattacaagccagctgtatttgaagagaagaaagaagcaaatttggctgatgtggaagctgttttcaaagattctgaagaagggagagtgcaactgaggtcatttccttgtgtgatatgttcaggtggtactacttgtggtgatgttcgttcaaggaccaaactgatgaacggcttgatagaaagagggaggcctcaagaagctcattccattttcaacacacttattgaggaaggccacaagccaagcctcatcacatacaccacgcttgtaactgcattgacccgtcaaaagcacttccactctctcctctccctcatctccaaagtcgagaaaaacggccttaaacctgacaccattctcttcaacgccatcatcaacgcctcttccgagtctggaaatctcgatcaagcaatgaagattttcgaaaaaatgaaggaaagtggatgtaaacccacagcaagtacatttaatactctcatcaaaggatatggcaaaattggtaagctggaggaatcatcaagactcctggatatgatgttacgggatgagatgctccaaccaaatgacagaacatgtaacatacttgtccaggcttggtgtaaccagaggaagattgaagaagcatggaacattgtatataagatgcaatcttatggggtaaaacctgatgtagttacgtttaacacattggcaaaagcgtatgcgcggatcgggtcaacatgtacagctgaggatatgatcataccaaggatgttacacaataaagttaaaccgaatgtacgtacctgcggtaccattgtgaatggctactgtgaagagggcaagatggaagaagctttgaggtttttctatagaatgaaggaacttggagttcatcctaatctgtttgtttttaactctctaatcaaaggcttccttaacatcaacgacatggatggagttggtgaggtggtggatctgatggaagaatttggagtaaaacctgatgtggtaacgtttagcactctaatgaatgcatggagttctgtaggagatatgaaaagatgcgaagagatctatacagatatgttggaaggaggaatagatcctgatattcatgcatttagtatccttgccaaagggtatgctcgagctggggagcccgaaaaagcgaagcaaatcttgaatcagatgagaaaatttggtgttcgcccaaatgtagtgatctacacacagatcataagcggttggtgcagtgctggtgaaatgaagaaagcgatgcaggtatataagaaaatgtgtggaatcgttggtttatcgcctaacttgactacttacgagactcttatatggggatttggggaagcgaagcagccatggaaagcagaagagcttctgaaagacatggaagggaagaatgttgttcccacaaggaaaactatgcaactaatagctgatggatggaaatctattggtgtctctaatagtaatgatgacaatacattgggctcttccttctcaacttcctctaaactcaatatcccaaataatatcgcctcgtcgagaagtccattgttcttaaaaggaatgcctgaaaaaccaaagctatgtatcaagtctcagtttggtttgaggcagactcttttggtggtgttgtgcagagaccagattggggaagccgggagattttgtaagttcatgtagaatttgttttgctgtagagatggagctaaattaaagggtaagaaaagctgatcaaagattgttgtcgatcgatttttaagatttatttttctgtacagatatactttttcagttaaatgaaaaatatggtgtttaac

SEQ ID NO: 78124 - protein, 831 aa, Arabidopsis thaliana
  peptide (1)..(831): Ceres Seq. ID no. 12606551
MSEPKVRRWVGKYEVGRLIGECNFGKLRSAVDTETGDPVALMILDKDKVLKHKMAEQIKREISIMKLINHPNVVQLYEVLASKAKIYIVLEFISGGKLFDKIKNDGRMNEDEAQRYFQQLINAVDYCHSRGVYHRDLKPENLLLDAQENLKVAEFGLIALSQQAGGDGLRHTACGNPDYAAPEVLNDQGYDGAKADLWSCGVILFVLLAGYLPFEDSSLTTLYKKISSADFSCPPWLSSGVKNLIVRILDPNPMTRITIPEILEDVWFKKDYKPAVFEEKKEANLADVEAVFKDSEEGRVQLRSFPCVICSGGTTCGDVRSRTKLMNGLIERGRPQEAHSIFNTLIEEGHKPSLITYTTLVTALTRQKHFHSLLSLISKVEKNGLKPDTILFNAIINASSESGNLDQAMKIFEKMKESGCKPTASTFNTLIKGYGKIGKLEESSRLLDMMLRDEMLQPNDRTCNILVQAWCNQRKIEEAWNIVYKMQSYGVKPDVVTFNTLAKAYARIGSTCTAEDMIIPRMLHNKVKPNVRTCGTIVNGYCEEGKMEEALRFFYRMKELGVHPNLFVFNSLIKGFLNINDMDGVGEVVDLMEEFGVKPDVVTFSTLMNAWSSVGDMKRCEEIYTDMLEGGIDPDIHAFSILAKGYARAGEPEKAKQILNQMRKFGVRPNVVIYTQIISGWCSAGEMKKAMQVYKKMCGIVGLSPNLTTYETLIWGFGEAKQPWKAEELLKDMEGKNVVPTRKTMQLIADGWKSIGVSNSNDDNTLGSSFSTSSKLNIPNNIASSRSPLFLKGMPEKPKLCIKSQFGLRQTLLVVLCRDQIGEAGRFCKFM

SEQ ID NO: 78125 - protein, 790 aa, Arabidopsis thaliana
  peptide (1)..(790): Ceres Seq. ID no. 12606552
MILDKDKVLKHKMAEQIKREISIMKLINHPNVVQLYEVLASKAKIYIVLEFISGGKLFDKIKNDGRMNEDEAQRYFQQLINAVDYCHSRGVYHRDLKPENLLLDAQENLKVAEFGLIALSQQAGGDGLRHTACGNPDYAAPEVLNDQGYDGAKADLWSCGVILFVLLAGYLPFEDSSLTTLYKKISSADFSCPPWLSSGVKNLIVRILDPNPMTRITIPEILEDVWFKKDYKPAVFEEKKEANLADVEAVFKDSEEGRVQLRSFPCVICSGGTTCGDVRSRTKLMNGLIERGRPQEAHSIFNTLIEEGHKPSLITYTTLVTALTRQKHFHSLLSLISKVEKNGLKPDTILFNAIINASSESGNLDQAMKIFEKMKESGCKPTASTFNTLIKGYGKIGKLEESSRLLDMMLRDEMLQPNDRTCNILVQAWCNQRKIEEAWNIVYKMQSYGVKPDVVTFNTLAKAYARIGSTCTAEDMIIPRMLHNKVKPNVRTCGTIVNGYCEEGKMEEALRFFYRMKELGVHPNLFVFNSLIKGFLNINDMDGVGEVVDLMEEFGVKPDVVTFSTLMNAWSSVGDMKRCEEIYTDMLEGGIDPDIHAFSILAKGYARAGEPEKAKQILNQMRKFGVRPNVVIYTQIISGWCSAGEMKKAMQVYKKMCGIVGLSPNLTTYETLIWGFGEAKQPWKAEELLKDMEGKNVVPTRKTMQLIADGWKSIGVSNSNDDNTLGSSFSTSSKLNIPNNIASSRSPLFLKGMPEKPKLCIKSQFGLRQTLLVVLCRDQIGEAGRFCKFM

SEQ ID NO: 78126 - protein, 778 aa, Arabidopsis thaliana
  peptide (1)..(778): Ceres Seq. ID no. 12606553
MAEQIKREISIMKLINHPNVVQLYEVLASKAKIYIVLEFISGGKLFDKIKNDGRMNEDEAQRYFQQLINAVDYCHSRGVYHRDLKPENLLLDAQENLKVAEFGLIALSQQAGGDGLRHTACGNPDYAAPEVLNDQGYDGAKADLWSCGVILFVLLAGYLPFEDSSLTTLYKKISSADFSCPPWLSSGVKNLIVRILDPNPMTRITIPEILEDVWFKKDYKPAVFEEKKEANLADVEAVFKDSEEGRVQLRSFPCVICSGGTTCGDVRSRTKLMNGLIERGRPQEAHSIFNTLIEEGHKPSLITYTTLVTALTRQKHFHSLLSLISKVEKNGLKPDTILFNAIINASSESGNLDQAMKIFEKMKESGCKPTASTFNTLIKGYGKIGKLEESSRLLDMMLRDEMLQPNDRTCNILVQAWCNQRKIEEAWNIVYKMQSYGVKPDVVTFNTLAKAYARIGSTCTAEDMIIPRMLHNKVKPNVRTCGTIVNGYCEEGKMEEALRFFYRMKELGVHPNLFVFNSLIKGFLNINDMDGVGEVVDLMEEFGVKPDVVTFSTLMNAWSSVGDMKRCEEIYTDMLEGGIDPDIHAFSILAKGYARAGEPEKAKQILNQMRKFGVRPNVVIYTQIISGWCSAGEMKKAMQVYKKMCGIVGLSPNLTTYETLIWGFGEAKQPWKAEELLKDMEGKNVVPTRKTMQLIADGWKSIGVSNSNDDNTLGSSFSTSSKLNIPNNIASSRSPLFLKGMPEKPKLCIKSQFGLRQTLLVVLCRDQIGEAGRFCKFM

SEQ ID NO: 78127 - DNA, 1898 bp, Arabidopsis thaliana
  misc_feature (1)..(1898): Ceres Seq. ID no. 12606696
  misc_feature (1)..(1898): Ortholog of  Ceres SEQ ID NO 15168348 as cited in SEQ ID NO 58074
aaagaaggaagaaaatttgagtgggtgagaattttttacgatagaggaagagacagcatcatctacttgtgttgtctgtgtacatatattacagtaagcgttgcaatataacttcttgaggatcttctcacattaatgggtcaaaccttttgctcttccttttgattaatttagtgtttgacaatctcctcctccttctccttcttcttcaaagttttgtcgcagtatctattgttcttacagagagaaaggaaagctttagtcttttaccagtttgatccaattctgggtttcactgaaaaaaagttgggagtttgattcttctaactgtagaagaaacagagtcaacagaagaaaactaaaaaagttgagatttttctctcacgcgctcaagaacttgagtatgtcttcttctgtagcagtgttatgggttgctacttcttctctaaatccagacccaatgaacaattgtgggttggtaagggttctagaatcttctagactgttctctccttgtcagaatcagagactaaacaaaggtaagaagaagcagataccaacttggagttcttcttttgtaaggaaccgaagtagaagaattggtgttgtgtcttcaagcttagtagcaagtccttctggagagatagctctttcatctgaagagaaggtttacaatgttgtgttgaaacaagctgctttggtgaacaaacagctaaggtcttcttcttatgaccttgatgtgaagaaaccacaagatgttgttcttcctgggagtttgagtttgttgggtgaagcttatgatcgatgcggtgaagtttgcgctgaatatgctaagacgttttatcttggaactttgcttatgacacccgaaaggcgaaaggcgatttgggcaatctacgtttggtgtagaagaactgatgaacttgtggatgggccaaatgcttcacatataactcccatggctttagatagatgggaagcaaggttagaagatcttttccgtggtcgtcctttcgatatgcttgatgctgctctcgctgatacagttgctagatacccggtcgatattcagccatttcgagacatgatcgaaggaatgagaatggacttgaagaaatcgagataccagaacttcgatgatctatacctttactgctactacgtcgctggaaccgtcggattgatgagcgttccggttatgggaatcgatcctaagtcgaaagcaacaaccgaaagtgtttacaacgctgccttggcccttggtatagccaatcagcttactaacatactcagagacgtaggcgaagatgcgagaagaggaagggtttatctgcctcaggatgaattggctcaggctggtctttcagatgaagacatattcgccggaaaagtaactgataaatggagaaacttcatgaaaatgcagcttaaacgagcaagaatgttcttcgacgaagctgagaaaggcgtcaccgagctcagtgccgctagcagatggcctgtatgggcttcattgctattgtacaggagaatactggacgagattgaagcgaatgattacaacaattttactaagagagcttatgtggggaaagtcaagaaaattgcagctttgccattggcttatgctaaatcagtactaaagacttcaagttcaagactatcgatatgagagcgagaggaaagtggaacaaaaacaacctaagagcgctttttgtgattaagaaaaaacttaggctcgaatttattatgttaactaatatatacatattaatggggaagcaaattcttataatgttacattatctttctgaatgtaaaaaagtatttttttttttaattttattttagttatagttctcttggcctaatgaggggatatacaatttttggttgat

SEQ ID NO: 78128 - protein, 422 aa, Arabidopsis thaliana; identical to SEQ ID NO: 47842
  peptide (1)..(422): Ceres Seq. ID no. 12606697

SEQ ID NO: 78129 - protein, 403 aa, Arabidopsis thaliana; identical to SEQ ID NO: 47843
  peptide (1)..(403): Ceres Seq. ID no. 12606698

SEQ ID NO: 78130 - protein, 270 aa, Arabidopsis thaliana; identical to SEQ ID NO: 29905
  peptide (1)..(270): Ceres Seq. ID no. 12606699

SEQ ID NO: 78131 - DNA, 624 bp, Arabidopsis thaliana
  misc_feature (1)..(624): Ceres Seq. ID no. 12606714
  misc_feature (1)..(624): Ortholog of  Ceres SEQ ID NO 13581889 as cited in SEQ ID NO 50900
  misc_feature (1)..(624): Ortholog of  Ceres SEQ ID NO 13581902 as cited in SEQ ID NO 52223
  misc_feature (1)..(624): Ortholog of  Ceres SEQ ID NO 12585528 as cited in SEQ ID NO 62991
atcttcttcttcttcatcaaatctcacaaatcttcaacacttaatcacaaatctcaaagcttcggataccaaatggctcgtaccaagcaaaccgcaaggaaatccaccggaggaaaagccccaaggaaacaactcgcaacaaaggcggcgaggaaatcagctccggcgaccggaggagtaaagaagccacacagattccgtcctggaactgttgccctaagagaaatcaggaagtatcagaagagcactgagcttctgatccgcaagcttccgttccagcgtttggttcgtgagatcgctcaggatttcaaaacagatctgcgtttccagagcagcgccgtcgcagcacttcaggaagcggctgaagcatacctcgttggattgtttgaagacaccaatctttgcgcgattcatgctaagagagtcactatcatgcctaaggatattcaattggcgaggagaattagaggcgagagggcttaagaaggagattgaagtactctagactgtgatcgttatgcttatgtatatctttcgttttccctaatttcgtgttttagggttggattaggttttgcgtttatgttgttcgatatctaacggatcaaaatctctccttcctta

SEQ ID NO: 78132 - protein, 160 aa, Arabidopsis thaliana
  peptide (1)..(160): Ceres Seq. ID no. 12606715
IFFFFIKSHKSSTLNHKSQSFGYQMARTKQTARKSTGGKAPRKQLATKAARKSAPATGGVKKPHRFRPGTVALREIRKYQKSTELLIRKLPFQRLVREIAQDFKTDLRFQSSAVAALQEAAEAYLVGLFEDTNLCAIHAKRVTIMPKDIQLARRIRGERA

SEQ ID NO: 78133 - protein, 136 aa, Arabidopsis thaliana; identical to SEQ ID NO: 8709
  peptide (1)..(136): Ceres Seq. ID no. 12606716

SEQ ID NO: 78134 - DNA, 1728 bp, Arabidopsis thaliana
  misc_feature (1)..(1728): Ceres Seq. ID no. 12639333
  misc_feature (1)..(1728): Ortholog of  Ceres SEQ ID NO 12613725 as cited in SEQ ID NO 68196
atggagcataagaatattggtgcagaagtacttcaagatacgtacgatgatcaacagaaatgggttcttgattcttctcttgatagcagaggacgtgttcctcttcgggctcgaactggcgcttggagagctgcactcttcatcatcgcgatcgagttcagcgagagattgagttacttcgggttagctacaaacttggtcgtctacctaacaacaattctaaaccaagatctcaagatggctataagaaatgtgaactactggtcaggtgtcactactttgatgcctcttcttggaggctttatagccgatgcatatctaggccgttatgctactgtcttggttgcaaccaccatttatcttatgggtttggtccttttaacaatgtcctggttcataccaggcttaaaaccttgtcaccaagaagtgtgcgttgaacctagaaaagcacacgaagtagccttcttcattgccatttacttgatctccatagggactggaggtcataagccttcccttgaaagctttggtgctgaccaattcgacgatgaccatgttgaagaaagaaagatgaaaatgtctttctttaactggtggaacgttagtctatgtgctggtattctaacggccgtgactgctgttgcctatatcgaagaccgggttggttggggcgttgctggcatcatactaactgtagtcatggctatatcactcatcatcttcttcattggaaaaccattctatcgttaccggacaccttctggtagccctttgacaccaatcttgcaagtctttgttgccgccattgccaaaagaaatctaccttatccttctgatccttctctgcttcatgaagtgtccaagacagagtttactagtggccggcttctctgtcacacagagcatcttaaatttcttgacaaggcagcaattatcgaagacaaaaatcctctggccctcgagaaacagagtccatggagacttctaacgttgacaaaagtcgaggaaacgaagctgatcatcaacgtgattccaatatggttctccacgttggcctttggcatatgtgcaacacaagcttcgacgtttttcatcaaacaagcaataaccatggacagacacatcggtggcttcacagttcctccagcttccatgtttacacttaccgccctcacattgatcatctcactcactgtctatgagaaactcctcgttcccttgctaagaagcatcacacggaatcaaagaggcatcaacattctccaaagaatcgggaccggtatgattttctccctcatcaccatgatcattgcagctctagttgagaaacaacgattggaccgtaccaacaacaacaaacccatgagtgtgatatggctagctcctcagttcatggtcattggctttgcggacgctttcacactagttggactccaagagtacttttaccaccaagtccctgactccatgagaagcttaggtatagcgttttacctaagcgtgataggtgcggctagcttccttaacaatctcctgatcacagccgttgatactctcgcggagaatttctcggggaagagttggttcggaaaggacctaaacagcagccgcttggaccggttctactggtttcttgctggtgttatcgctgccaatatatgtgtctttgtgattgtggcaaagagatgtccttacaaaagtgtgcagccaagccaagggctctcctga

SEQ ID NO: 78135 - protein, 575 aa, Arabidopsis thaliana
  peptide (1)..(575): Ceres Seq. ID no. 12639334
MEHKNIGAEVLQDTYDDQQKWVLDSSLDSRGRVPLRARTGAWRAALFIIAIEFSERLSYFGLATNLVVYLTTILNQDLKMAIRNVNYWSGVTTLMPLLGGFIADAYLGRYATVLVATTIYLMGLVLLTMSWFIPGLKPCHQEVCVEPRKAHEVAFFIAIYLISIGTGGHKPSLESFGADQFDDDHVEERKMKMSFFNWWNVSLCAGILTAVTAVAYIEDRVGWGVAGIILTVVMAISLIIFFIGKPFYRYRTPSGSPLTPILQVFVAAIAKRNLPYPSDPSLLHEVSKTEFTSGRLLCHTEHLKFLDKAAIIEDKNPLALEKQSPWRLLTLTKVEETKLIINVIPIWFSTLAFGICATQASTFFIKQAITMDRHIGGFTVPPASMFTLTALTLIISLTVYEKLLVPLLRSITRNQRGINILQRIGTGMIFSLITMIIAALVEKQRLDRTNNNKPMSVIWLAPQFMVIGFADAFTLVGLQEYFYHQVPDSMRSLGIAFYLSVIGAASFLNNLLITAVDTLAENFSGKSWFGKDLNSSRLDRFYWFLAGVIAANICVFVIVAKRCPYKSVQPSQGLS

SEQ ID NO: 78136 - protein, 496 aa, Arabidopsis thaliana
  peptide (1)..(496): Ceres Seq. ID no. 12639335
MAIRNVNYWSGVTTLMPLLGGFIADAYLGRYATVLVATTIYLMGLVLLTMSWFIPGLKPCHQEVCVEPRKAHEVAFFIAIYLISIGTGGHKPSLESFGADQFDDDHVEERKMKMSFFNWWNVSLCAGILTAVTAVAYIEDRVGWGVAGIILTVVMAISLIIFFIGKPFYRYRTPSGSPLTPILQVFVAAIAKRNLPYPSDPSLLHEVSKTEFTSGRLLCHTEHLKFLDKAAIIEDKNPLALEKQSPWRLLTLTKVEETKLIINVIPIWFSTLAFGICATQASTFFIKQAITMDRHIGGFTVPPASMFTLTALTLIISLTVYEKLLVPLLRSITRNQRGINILQRIGTGMIFSLITMIIAALVEKQRLDRTNNNKPMSVIWLAPQFMVIGFADAFTLVGLQEYFYHQVPDSMRSLGIAFYLSVIGAASFLNNLLITAVDTLAENFSGKSWFGKDLNSSRLDRFYWFLAGVIAANICVFVIVAKRCPYKSVQPSQGLS

SEQ ID NO: 78137 - protein, 481 aa, Arabidopsis thaliana
  peptide (1)..(481): Ceres Seq. ID no. 12639336
MPLLGGFIADAYLGRYATVLVATTIYLMGLVLLTMSWFIPGLKPCHQEVCVEPRKAHEVAFFIAIYLISIGTGGHKPSLESFGADQFDDDHVEERKMKMSFFNWWNVSLCAGILTAVTAVAYIEDRVGWGVAGIILTVVMAISLIIFFIGKPFYRYRTPSGSPLTPILQVFVAAIAKRNLPYPSDPSLLHEVSKTEFTSGRLLCHTEHLKFLDKAAIIEDKNPLALEKQSPWRLLTLTKVEETKLIINVIPIWFSTLAFGICATQASTFFIKQAITMDRHIGGFTVPPASMFTLTALTLIISLTVYEKLLVPLLRSITRNQRGINILQRIGTGMIFSLITMIIAALVEKQRLDRTNNNKPMSVIWLAPQFMVIGFADAFTLVGLQEYFYHQVPDSMRSLGIAFYLSVIGAASFLNNLLITAVDTLAENFSGKSWFGKDLNSSRLDRFYWFLAGVIAANICVFVIVAKRCPYKSVQPSQGLS

SEQ ID NO: 78138 - DNA, 624 bp, Arabidopsis thaliana
  misc_feature (1)..(624): Ceres Seq. ID no. 12639348
  misc_feature (1)..(624): Ortholog of  Ceres SEQ ID NO 15175072 as cited in SEQ ID NO 59991
atgacgactgacatcgatttagaacaaggaggagcttttggatatcaccggaggtcgttggacggaagtgacgtcagcgtatattattcagacggtgaagatgtgatgtcatgctactcttacttctattcgacgactggaggatcgtatgaatacgaaggagatcagtcgaggaaagtgtcgtcggtgatgagtccctcgtcgtcggagatagatgatgatgatgctacggcgccgccggagaaagattgtcggatatgtcatttgggagtggaaacgagcggtggaggtgcgattgaattagggtgttcttgtaaagacgatttggctgttgctcatagacaatgcgctgagacttggttcaagatcaaaggcgacaaaacctgcgagatttgccaatcggtagcccggaacgtcggcggtgcgaacgaaatggttgggtcaacgatggaagagagggagttgagaaacggtgaggaaacagcggcgggagaaggcggaggagcaacggtggtggagaacagatggcaaccacagagagtggtgaatttggtgttagcttgtatggtttttgggttctttatatcatggatctttcatttccatgtttcctcttcttcttga

SEQ ID NO: 78139 - protein, 207 aa, Arabidopsis thaliana
  peptide (1)..(207): Ceres Seq. ID no. 12639349
MTTDIDLEQGGAFGYHRRSLDGSDVSVYYSDGEDVMSCYSYFYSTTGGSYEYEGDQSRKVSSVMSPSSSEIDDDDATAPPEKDCRICHLGVETSGGGAIELGCSCKDDLAVAHRQCAETWFKIKGDKTCEICQSVARNVGGANEMVGSTMEERELRNGEETAAGEGGGATVVENRWQPQRVVNLVLACMVFGFFISWIFHFHVSSSS

SEQ ID NO: 78140 - protein, 172 aa, Arabidopsis thaliana
  peptide (1)..(172): Ceres Seq. ID no. 12639350
MSCYSYFYSTTGGSYEYEGDQSRKVSSVMSPSSSEIDDDDATAPPEKDCRICHLGVETSGGGAIELGCSCKDDLAVAHRQCAETWFKIKGDKTCEICQSVARNVGGANEMVGSTMEERELRNGEETAAGEGGGATVVENRWQPQRVVNLVLACMVFGFFISWIFHFHVSSSS

SEQ ID NO: 78141 - protein, 144 aa, Arabidopsis thaliana
  peptide (1)..(144): Ceres Seq. ID no. 12639351
MSPSSSEIDDDDATAPPEKDCRICHLGVETSGGGAIELGCSCKDDLAVAHRQCAETWFKIKGDKTCEICQSVARNVGGANEMVGSTMEERELRNGEETAAGEGGGATVVENRWQPQRVVNLVLACMVFGFFISWIFHFHVSSSS

SEQ ID NO: 78142 - DNA, 1524 bp, Arabidopsis thaliana
  misc_feature (1)..(1524): Ceres Seq. ID no. 12639352
  misc_feature (1)..(1524): Ortholog of  Ceres SEQ ID NO 14311028 as cited in SEQ ID NO 54464
atggagagttgtcagaatttggtaagtgtaaaacacgtggagactataaaaattgtcatgtcatgcaagttaagaagaaaagtcagttttccaaaaataatacttttgttcctctgccgacctaacgtggagacttgtcaacattttgctagggcgaaatttcactcctccttcttaaatttccacaaaattctagggaataaaaaaaaaaagattgttgtagacataaagagtttaatctcagaagataatggtttgaagcttcttagagaatcagctggttcagagttatgttgcatcgtgagaatcccacagagcctcgctcgaatcaacctcaaagcttatgaaccgaagattgtctccattggtccttaccatcacggcaaagagcatctcaaaatgactcagcagcataaacgccgattcttgaagtttttcgtggctaaaatggaagaaaaaggatttgttcctcaagaattggtcaaagctgtatcgagtttggaaggagttatacgaggttcttactccgaggatctaggtttagattctgaaaacttggttcagatgatggttcttgatggttgctttatcctcacgttgttctttgttgtttccgggaaagttgaatacactaatcttgatgatccgatttttcgaatgccgtggattttgccgtcgattcgagcagatcttctccttttggaaaaccaggttccttatgttcttcttcaaactctatttgaaacatcgaagttagttacttgtagtggtttaaacgaaatcgcctttgaattctttaactactcattacaaaaaccagagaccttttgggaaaaacattatggtcttgaagcaaaacatcttcttgatttgatacgtaagacttttgttcctgttccgtctcaaagaagaatcaaagatcatagcagtaaatcgtcattcaatgatcatgaatatctcggatttgttctctctgccaagaagcttcatcttcggggaatcaaattcaaaccgaggaaaaacacagactcaatcttagacattagttatagtaatggtgtgcttcacattcctccggtagtcatggatgattttaccgcctcgatctttttaaactgtgtcgcatttgagcaattatatgctgattcatcgaaccacataacgagctacgtagctttcatggcttgtcttataaacgaagagagtgatgcatcgttccttagcgaaaggaggatcctagagaactattttggaacagaggatgaagtgtcccggttctataaacgcattggtaaagacattgccctcgacttagagaagagttacctagcaaaggtgtttgaaggagttaacgagtatacttctcaaggattccatgttcattgtgcagagtttattcatacgcatttcgatagtccatggacatttgcatcatcatttgcagcgttgttgcttcttctgtttgcggctttgcaagtcttctttgcagcttatagttatttccgtcctccaaaagaaaagtga

SEQ ID NO: 78143 - protein, 507 aa, Arabidopsis thaliana
  peptide (1)..(507): Ceres Seq. ID no. 12639353
MESCQNLVSVKHVETIKIVMSCKLRRKVSFPKIILLFLCRPNVETCQHFARAKFHSSFLNFHKILGNKKKKIVVDIKSLISEDNGLKLLRESAGSELCCIVRIPQSLARINLKAYEPKIVSIGPYHHGKEHLKMTQQHKRRFLKFFVAKMEEKGFVPQELVKAVSSLEGVIRGSYSEDLGLDSENLVQMMVLDGCFILTLFFVVSGKVEYTNLDDPIFRMPWILPSIRADLLLLENQVPYVLLQTLFETSKLVTCSGLNEIAFEFFNYSLQKPETFWEKHYGLEAKHLLDLIRKTFVPVPSQRRIKDHSSKSSFNDHEYLGFVLSAKKLHLRGIKFKPRKNTDSILDISYSNGVLHIPPVVMDDFTASIFLNCVAFEQLYADSSNHITSYVAFMACLINEESDASFLSERRILENYFGTEDEVSRFYKRIGKDIALDLEKSYLAKVFEGVNEYTSQGFHVHCAEFIHTHFDSPWTFASSFAALLLLLFAALQVFFAAYSYFRPPKEK

SEQ ID NO: 78144 - protein, 488 aa, Arabidopsis thaliana
  peptide (1)..(488): Ceres Seq. ID no. 12639354
MSCKLRRKVSFPKIILLFLCRPNVETCQHFARAKFHSSFLNFHKILGNKKKKIVVDIKSLISEDNGLKLLRESAGSELCCIVRIPQSLARINLKAYEPKIVSIGPYHHGKEHLKMTQQHKRRFLKFFVAKMEEKGFVPQELVKAVSSLEGVIRGSYSEDLGLDSENLVQMMVLDGCFILTLFFVVSGKVEYTNLDDPIFRMPWILPSIRADLLLLENQVPYVLLQTLFETSKLVTCSGLNEIAFEFFNYSLQKPETFWEKHYGLEAKHLLDLIRKTFVPVPSQRRIKDHSSKSSFNDHEYLGFVLSAKKLHLRGIKFKPRKNTDSILDISYSNGVLHIPPVVMDDFTASIFLNCVAFEQLYADSSNHITSYVAFMACLINEESDASFLSERRILENYFGTEDEVSRFYKRIGKDIALDLEKSYLAKVFEGVNEYTSQGFHVHCAEFIHTHFDSPWTFASSFAALLLLLFAALQVFFAAYSYFRPPKEK

SEQ ID NO: 78145 - protein, 374 aa, Arabidopsis thaliana; identical to SEQ ID NO: 70030
  peptide (1)..(374): Ceres Seq. ID no. 12639355

SEQ ID NO: 78146 - DNA, 1193 bp, Arabidopsis thaliana
  misc_feature (1)..(1193): Ceres Seq. ID no. 12639376
  misc_feature (1)..(1193): Ortholog of  Ceres SEQ ID NO 12333459 as cited in SEQ ID NO 20477
  misc_feature (1)..(1193): Ortholog of  Ceres SEQ ID NO 15176155 as cited in SEQ ID NO 0
actgcaatttctctctttcgcttctaaaaaaaaacctaacaacctctcttctctcttcctcgttcaacaacaatggagttctggggagttgcggtgacaccaaaaaacgctactaaggtgactcctgaagaagacagccttgtccacatttctcaggcttcacttgactgcacagtgaaatctggagaatctgtggttttgagtgtgactgttggtggggctaaacttgttattggaacactttcacaagacaagttccctcagattagctttgatttggtttttgataaagagtttgagctttcacacagcggtaccaaagcaaatgttcatttcattggctacaaatcccccaacatcgagcaggatgacttcactagttcggatgatgaggatgttcctgaagctgttcctgctcctgcccctactgctgttactgccaacggaaatgctggagcagctgttgtcaaggctgacacaaagccaaaggccaaacctgccgaagtgaagcctgcagaagagaagcctgaatcagacgaggaagatgagtctgatgatgaagatgagtctgaagaggatgatgactctgagaaaggaatggatgttgatgaagatgactcagatgatgacgaggaggaggattctgaggatgaagaagaggaggagactcctaagaagcctgagccaatcaacaagaagaggccaaatgaatctgtatccaaaacacccgtctctggaaagaaggcaaaaccagcagcagcaccagcttctactcctcagaagacagaagagaagaagaaaggaggacacaccgccacaccacacccagctaagaagggtggaaagtctcctgtgaatgctaaccagagccccaagtctggaggtcaatcatccggtggtaacaacaacaagaagccattcaactcaggcaaacaatttggtggttccaacaacaagggttctaacaagggcaagggaaagggtagagcttaaggacgtggatcaaggagaggttttgggttttcgagtagatgatgaaaacacttggaagtgtggttttggatttttatcttattttattagtataacttgttatcggatgagctattttgagtatttgcaatttctactttcctatgtaattcagtatatgaatatttgctgaaatgagaaagaagactcgaattgcaaac

SEQ ID NO: 78147 - protein, 306 aa, Arabidopsis thaliana; identical to SEQ ID NO: 28416
  peptide (1)..(306): Ceres Seq. ID no. 12639377

SEQ ID NO: 78148 - DNA, 1410 bp, Arabidopsis thaliana
  misc_feature (1)..(1410): Ceres Seq. ID no. 12639412
  misc_feature (1)..(1410): Ortholog of  Ceres SEQ ID NO 13662164 as cited in SEQ ID NO 67158
atgtcgcttgacataaagaaaccgaacatcaccaagacgaagaagaagaagacaggtttcgtcgtaaaaatgcagcttaataacaacagaggaggaaataaaagaaacatctttatcttcttcttcttcagaaactattacacatggatcctctggttttgcctctctctgtatttcttcacatcttacttctccgtcgaagaccaatcctcaccgtcgtcaatacgtctcttgtctaaccacaaaacgtcgtcgtctctcccatctcgtgctctcatcgaatcttccgccattaaaaccacctccattggtttgttcaccggaatgaagatatacgtttacgatttaccggcgagttataacgacgattgggttacagcatcagaccgttgcgctagccacctcttcgcggcggaggtagctatccaccgtgcacttctctcctccgacgtccgtacgttagacccagatgaagctgattacttcttcgtccctgtctacgtttcttgcaatttctccacatccaacggcttcccttctctaagccacgctcgctctctccttagctccgccgtcgattttctctccgatcattacccattttggaacaggagtcaaggctctgaccacgtcttcgtcgcttcccatgactttggcgcatgcttccacgcaatggaggatatggctatagaggaagggattccaaaatttatgaagagatcaataattttacaaacgtttggagttaagtacaagcatccatgtcaagaagtggaacatgttgtgattcctccttatattccaccggagagtgttcaaaaagctattgaaaaagctccggtgaacggacggcgagacatttgggcgtttttccggggaaaaatggaagtcaaccctaagaatattagcggacgcttttacagcaagggagtgagaacggcgattctaaagaaattcggaggaagaaggcggttttatctaaaccggcaccggtttgctggataccgatcagaaatcgtgagatcagtgttttgtctctgtcctttagggtgggcaccatggagtcctagactagtggaatccgccgtgttaggttgtgttcccgttgttatcgccgatgggattcaattaccgttctcggagacggtacaatggccggaaatctcactaacggtggcggagaaagacgtgaggaatctacgaaaggttttggaacacgtggcggctactaatttgtctgcaatacaaagaaacttacatgaaccggtgtttaagcgggccctcttgtacaatgtgccgatgaaagaaggagacgccacgtggcatattctcgagtcgttgtggaggaagctcgatgatcggtcgtacagaaggtcaagggttttaagccaacgagaagtcgacatgtag

SEQ ID NO: 78149 - protein, 469 aa, Arabidopsis thaliana
  peptide (1)..(469): Ceres Seq. ID no. 12639413
MSLDIKKPNITKTKKKKTGFVVKMQLNNNRGGNKRNIFIFFFFRNYYTWILWFCLSLYFFTSYFSVEDQSSPSSIRLLSNHKTSSSLPSRALIESSAIKTTSIGLFTGMKIYVYDLPASYNDDWVTASDRCASHLFAAEVAIHRALLSSDVRTLDPDEADYFFVPVYVSCNFSTSNGFPSLSHARSLLSSAVDFLSDHYPFWNRSQGSDHVFVASHDFGACFHAMEDMAIEEGIPKFMKRSIILQTFGVKYKHPCQEVEHVVIPPYIPPESVQKAIEKAPVNGRRDIWAFFRGKMEVNPKNISGRFYSKGVRTAILKKFGGRRRFYLNRHRFAGYRSEIVRSVFCLCPLGWAPWSPRLVESAVLGCVPVVIADGIQLPFSETVQWPEISLTVAEKDVRNLRKVLEHVAATNLSAIQRNLHEPVFKRALLYNVPMKEGDATWHILESLWRKLDDRSYRRSRVLSQREVDM

SEQ ID NO: 78150 - protein, 446 aa, Arabidopsis thaliana
  peptide (1)..(446): Ceres Seq. ID no. 12639414
MQLNNNRGGNKRNIFIFFFFRNYYTWILWFCLSLYFFTSYFSVEDQSSPSSIRLLSNHKTSSSLPSRALIESSAIKTTSIGLFTGMKIYVYDLPASYNDDWVTASDRCASHLFAAEVAIHRALLSSDVRTLDPDEADYFFVPVYVSCNFSTSNGFPSLSHARSLLSSAVDFLSDHYPFWNRSQGSDHVFVASHDFGACFHAMEDMAIEEGIPKFMKRSIILQTFGVKYKHPCQEVEHVVIPPYIPPESVQKAIEKAPVNGRRDIWAFFRGKMEVNPKNISGRFYSKGVRTAILKKFGGRRRFYLNRHRFAGYRSEIVRSVFCLCPLGWAPWSPRLVESAVLGCVPVVIADGIQLPFSETVQWPEISLTVAEKDVRNLRKVLEHVAATNLSAIQRNLHEPVFKRALLYNVPMKEGDATWHILESLWRKLDDRSYRRSRVLSQREVDM

SEQ ID NO: 78151 - protein, 361 aa, Arabidopsis thaliana
  peptide (1)..(361): Ceres Seq. ID no. 12639415
MKIYVYDLPASYNDDWVTASDRCASHLFAAEVAIHRALLSSDVRTLDPDEADYFFVPVYVSCNFSTSNGFPSLSHARSLLSSAVDFLSDHYPFWNRSQGSDHVFVASHDFGACFHAMEDMAIEEGIPKFMKRSIILQTFGVKYKHPCQEVEHVVIPPYIPPESVQKAIEKAPVNGRRDIWAFFRGKMEVNPKNISGRFYSKGVRTAILKKFGGRRRFYLNRHRFAGYRSEIVRSVFCLCPLGWAPWSPRLVESAVLGCVPVVIADGIQLPFSETVQWPEISLTVAEKDVRNLRKVLEHVAATNLSAIQRNLHEPVFKRALLYNVPMKEGDATWHILESLWRKLDDRSYRRSRVLSQREVDM

SEQ ID NO: 78152 - DNA, 723 bp, Arabidopsis thaliana
  misc_feature (1)..(723): Ceres Seq. ID no. 12639439
  misc_feature (1)..(723): Ortholog of  Ceres SEQ ID NO 13597333 as cited in SEQ ID NO 63974
  misc_feature (1)..(723): Ortholog of  Ceres SEQ ID NO 12407937 as cited in SEQ ID NO 0
  misc_feature (1)..(723): Ortholog of  Ceres SEQ ID NO 13599307 as cited in SEQ ID NO 0
atgaggggtctcgtttccggcgccaagatgctatcatcaaccccatcgtcgatggcgacaagcatcgccactggtagaagaagctacagtctgattccgatggttattgagcactcatcgcgaggagagagagcttacgacatcttctctcgtttgctcaaggagcgtattatctgcatcaacggtcccattaatgacgacacatctcacgtcgtcgtcgctcagcttctttacctcgagtctgagaatccttcgaagccgatccatatgtatctcaattcccctggcggccatgtcaccgccggtcttgcaatttatgatactatgcagtacattcgttctcctattagcacaatttgtttgggtcaggctgcatcaatggcttctcttctgttggcagcgggtgccaaggggcaaaggcggtcacttccaaatgcaactgttatgattcatcagccttcaggaggatatagtggacaggctaaagatataacgattcatacaaaacagattgttcgtgtgtgggatgcgttaaatgaattgtatgtcaaacacacgggtcaacctcttgacgtggttgcgaataacatggatagggatcatttcatgactcctgaagaggctaaggcgtttggaataatcgatgaagtgattgatgaaagaccgttggagttggtgaaagatgcagttggaaatgaaagcaaagataagagttcaagttag

SEQ ID NO: 78153 - protein, 240 aa, Arabidopsis thaliana; identical to SEQ ID NO: 43913
  peptide (1)..(240): Ceres Seq. ID no. 12639440

SEQ ID NO: 78154 - protein, 231 aa, Arabidopsis thaliana; identical to SEQ ID NO: 43914
  peptide (1)..(231): Ceres Seq. ID no. 12639441

SEQ ID NO: 78155 - protein, 223 aa, Arabidopsis thaliana
  peptide (1)..(223): Ceres Seq. ID no. 12639442
MATSIATGRRSYSLIPMVIEHSSRGERAYDIFSRLLKERIICINGPINDDTSHVVVAQLLYLESENPSKPIHMYLNSPGGHVTAGLAIYDTMQYIRSPISTICLGQAASMASLLLAAGAKGQRRSLPNATVMIHQPSGGYSGQAKDITIHTKQIVRVWDALNELYVKHTGQPLDVVANNMDRDHFMTPEEAKAFGIIDEVIDERPLELVKDAVGNESKDKSSS

SEQ ID NO: 78156 - DNA, 1229 bp, Arabidopsis thaliana
  misc_feature (1)..(1229): Ceres Seq. ID no. 12639447
  misc_feature (1)..(1229): Ortholog of  Ceres SEQ ID NO 13661082 as cited in SEQ ID NO 60959
atggcgactcttttcaacaaatttcagcaggctgttggagttcttgccaagagtaccacatttgctaagaacccaaggcaactgcagtttgaagcagacgttaacaaactctttatgtatacaagctataaccggttgggacgagaagctgaggagactgatgcagaggagatcattgagatggctggtaaagccactttatctgagcagcagaagcaagttcaagagaacattcactaccaagttgaaaaattctgctctttgatggatggaatccttcttcctgatgttaggaggaacgagtcggggtcacaatcaacaagccctcgtcctcctcgtagaagtggtcttactttcgccattggtagtaataatgcttttccacatgcagatcagccccttgttcccgagacaaagcctttgaaactcaatgacgtctcacagagattaatggatcaaatgggttacaccctcgagaccaaaccgtctgtaatacctcacaaagacgctggtcaaggttgttttatcaaaggcgaggcagatgttggaaccgtcttagccttttaccctggagttatttactctcctgctttctacaagtacatacccgggtacccgaaggttgattcacagaactcatatctcatcaccaggtatgatgggactgtaataaatgctcaaccttggggtcttgggggagaatcaagggaagcatggaacgggtcctacacacctgcggtcaaagcaaacaccaaaaccgcagaaaacgggtcagacaggttatggaaagcgttgagcaagcctctcgaaggttcgggtaaaggaaaagaggttcttgagaggagaaatccgttggcttttggtcacttagctaaccacccagcgaaagagatgactccaaacgttatgatatgtccttatgacttccctttgatggcgaaagatctgcggccttacattccgaatatatcttttggggattctggagaaataaagatgaaaagatttggaagtttctggtttaagacagggagtaaaaacgggttagaagctccggttctgaagacactggtcttggtggcaacgaggtcgttgtgtaatgaggaacttttgctgaattacaggctgagcaactctaagagacgaccagattggtatactccggttaacgaggaggaagataggagaagatggagctaaatttctcttttatgttttaatgaaacttg

SEQ ID NO: 78157 - protein, 399 aa, Arabidopsis thaliana; identical to SEQ ID NO: 42747
  peptide (1)..(399): Ceres Seq. ID no. 12639448

SEQ ID NO: 78158 - protein, 361 aa, Arabidopsis thaliana; identical to SEQ ID NO: 42748
  peptide (1)..(361): Ceres Seq. ID no. 12639449

SEQ ID NO: 78159 - protein, 339 aa, Arabidopsis thaliana; identical to SEQ ID NO: 42749
  peptide (1)..(339): Ceres Seq. ID no. 12639450

SEQ ID NO: 78160 - DNA, 2625 bp, Arabidopsis thaliana
  misc_feature (1)..(2625): Ceres Seq. ID no. 12639490
  misc_feature (1)..(2625): Ortholog of  Ceres SEQ ID NO 14315338 as cited in SEQ ID NO 60283
atgaccaccaagcgagcctataagcttcaggaatttgtggcacattctgctgctgtcaattgtcttaagatcggaaggaagtcttctagggttctggtaacaggtggtgaagatcacaaggtcaatctttgggctattggtaagcccaatgccattctgagcttgtatgggcactcaagtggaattgattcagtgacgtttgatgcttcggaggtcttagttgcagcaggagctgctagtggtactatcaaactttgggatttagaggaggcaaagattgtcaggactctcactggtcacaggtccaattgcatctcagtggatttccacccttttggtgagttttttgcgtcaggctcactagacacaaatcttaagatatgggatatacgaaaaaagggctgcatccatacttacaagggtcacacgcgaggagtcaatgtactcagattcaccccagatggtcgctgggttgtatctggaggagaggacaacattgttaagttctgggtttgggatttaacagctggaaaactgctgaccgagtttaagagtcatgaagggcaaattcaaagcctagattttcatcctcatgaattcctactggcaacaggttcagctgatagaactgtaaaattctgggatctggaaacattcgagctgattggttctggtggacctgagactgccggggtccgttgcctgagtttcaatccagatggaaagactgtgctttgtggattgcaagaaagtctcaagattttctcatgggagccaattagatgtcatgatggagtggatgttggatggtcaagattgtcagatatgaatgttcacgagggaaagcttcttggttgctcatacaatcagagttgtgtaggcgtgtgggttgtagatctctcgcgtactgagccatgtatggctggagacactgcgcaatcaaatggtcatccagagaaacgatcttgctcaggaagagatccagtagttctcaatgataataactcaaagacagttctcgggaagctgtccgtttcccaaaatgtagatcctttattgaaggaaacaaagtctctaggaagattatctgtttctcagaactctgatccttcgacaaaagaaacaaagtccattggaaggtcatcaacatcacaaaattcagagtcctcgatgaaggaatcaaagcctctcgggaggttgtcagtttctcaaaattcagacgtttctaaagagtcaaggacgttttcatccacaggaagtttaccaggcactcctcatagggtcagttcgaccaatgtatcaaaagccacttcgggtgtttcaacagccgtctctaatgctgcaacgtcaaggaggaattttacaaaagctaacccaaaggcgaatcctgtcaataaggcagcagattttgctccggtgattgtccccagagcagaccctagaatagagcaggctactgaatccagagcagaacttgacataattgcaagaaccatgccgtattcattgcaggcggctgattcccgaaggtcacctagcagcagaaataaccctgatctgccagacgcttcggttcttgaaatgtctgagtctcagccagttgaaccaaataatataccagatgggggtacacttcctggtggaaaggttggcatgcggggtgcaactgagcgaagcattaatgattttagatacaagagatatggcaggagtaattcaaggtcacggatggggtcacctccacgaaaccacgatgaaaactatgacttggtaagccacagatcaaatagagacccaagccccactgaaagtcagaaaggaggtgattcttcagcccagctttcatcttttcttttgcaaatgaagcgaatctcattcatgtgtcttatcatatcaggaagattccagtcactcgtcataaatagggagaggagaggaagattttcaaacttcgagggtcctgtttcaaatttttcaagtggaaatatgcctgctccaaacatccgcccttcaaatatgttcaagcagagagggaaccatatgccagttgaacaagggatcgattctccttctgaagaaaatattgttgaagacataatgggaaagcacaatcaatttgtcagctctatgcagtctcgtttggctaagttacaggtggttgagatgtcagaagcttcgcaaagagtagttcgtagatattgggaaaggaatgatgtaaaaaattcgataggctcgatagagaagatggctgataatgctgttactgcggacgtactgggtataataaccgagagaaatgagattttgacactggataattgtacctcccttcttccccttctaacagctcttttagggagcggcatggatcagcatttgagcgtttccctggatttgctgctgaagcttgtcagactgtatgggtcaccaatttactcatcactgtcagctccagcatctgttggtgtagatatcgaggctgagcaaaggatcgagcgctacagccgttgctttgtagagctagagaaagtcaaagcatgccttccctctctagcaagaagaggaggtttggtggccaagtctgtgctcgaactcaacctagcatttcaggaagtttcatcataa

SEQ ID NO: 78161 - protein, 874 aa, Arabidopsis thaliana
  peptide (1)..(874): Ceres Seq. ID no. 12639491
MTTKRAYKLQEFVAHSAAVNCLKIGRKSSRVLVTGGEDHKVNLWAIGKPNAILSLYGHSSGIDSVTFDASEVLVAAGAASGTIKLWDLEEAKIVRTLTGHRSNCISVDFHPFGEFFASGSLDTNLKIWDIRKKGCIHTYKGHTRGVNVLRFTPDGRWVVSGGEDNIVKFWVWDLTAGKLLTEFKSHEGQIQSLDFHPHEFLLATGSADRTVKFWDLETFELIGSGGPETAGVRCLSFNPDGKTVLCGLQESLKIFSWEPIRCHDGVDVGWSRLSDMNVHEGKLLGCSYNQSCVGVWVVDLSRTEPCMAGDTAQSNGHPEKRSCSGRDPVVLNDNNSKTVLGKLSVSQNVDPLLKETKSLGRLSVSQNSDPSTKETKSIGRSSTSQNSESSMKESKPLGRLSVSQNSDVSKESRTFSSTGSLPGTPHRVSSTNVSKATSGVSTAVSNAATSRRNFTKANPKANPVNKAADFAPVIVPRADPRIEQATESRAELDIIARTMPYSLQAADSRRSPSSRNNPDLPDASVLEMSESQPVEPNNIPDGGTLPGGKVGMRGATERSINDFRYKRYGRSNSRSRMGSPPRNHDENYDLVSHRSNRDPSPTESQKGGDSSAQLSSFLLQMKRISFMCLIISGRFQSLVINRERRGRFSNFEGPVSNFSSGNMPAPNIRPSNMFKQRGNHMPVEQGIDSPSEENIVEDIMGKHNQFVSSMQSRLAKLQVVEMSEASQRVVRRYWERNDVKNSIGSIEKMADNAVTADVLGIITERNEILTLDNCTSLLPLLTALLGSGMDQHLSVSLDLLLKLVRLYGSPIYSSLSAPASVGVDIEAEQRIERYSRCFVELEKVKACLPSLARRGGLVAKSVLELNLAFQEVSS

SEQ ID NO: 78162 - protein, 599 aa, Arabidopsis thaliana
  peptide (1)..(599): Ceres Seq. ID no. 12639492
MNVHEGKLLGCSYNQSCVGVWVVDLSRTEPCMAGDTAQSNGHPEKRSCSGRDPVVLNDNNSKTVLGKLSVSQNVDPLLKETKSLGRLSVSQNSDPSTKETKSIGRSSTSQNSESSMKESKPLGRLSVSQNSDVSKESRTFSSTGSLPGTPHRVSSTNVSKATSGVSTAVSNAATSRRNFTKANPKANPVNKAADFAPVIVPRADPRIEQATESRAELDIIARTMPYSLQAADSRRSPSSRNNPDLPDASVLEMSESQPVEPNNIPDGGTLPGGKVGMRGATERSINDFRYKRYGRSNSRSRMGSPPRNHDENYDLVSHRSNRDPSPTESQKGGDSSAQLSSFLLQMKRISFMCLIISGRFQSLVINRERRGRFSNFEGPVSNFSSGNMPAPNIRPSNMFKQRGNHMPVEQGIDSPSEENIVEDIMGKHNQFVSSMQSRLAKLQVVEMSEASQRVVRRYWERNDVKNSIGSIEKMADNAVTADVLGIITERNEILTLDNCTSLLPLLTALLGSGMDQHLSVSLDLLLKLVRLYGSPIYSSLSAPASVGVDIEAEQRIERYSRCFVELEKVKACLPSLARRGGLVAKSVLELNLAFQEVSS

SEQ ID NO: 78163 - protein, 568 aa, Arabidopsis thaliana
  peptide (1)..(568): Ceres Seq. ID no. 12639493
MAGDTAQSNGHPEKRSCSGRDPVVLNDNNSKTVLGKLSVSQNVDPLLKETKSLGRLSVSQNSDPSTKETKSIGRSSTSQNSESSMKESKPLGRLSVSQNSDVSKESRTFSSTGSLPGTPHRVSSTNVSKATSGVSTAVSNAATSRRNFTKANPKANPVNKAADFAPVIVPRADPRIEQATESRAELDIIARTMPYSLQAADSRRSPSSRNNPDLPDASVLEMSESQPVEPNNIPDGGTLPGGKVGMRGATERSINDFRYKRYGRSNSRSRMGSPPRNHDENYDLVSHRSNRDPSPTESQKGGDSSAQLSSFLLQMKRISFMCLIISGRFQSLVINRERRGRFSNFEGPVSNFSSGNMPAPNIRPSNMFKQRGNHMPVEQGIDSPSEENIVEDIMGKHNQFVSSMQSRLAKLQVVEMSEASQRVVRRYWERNDVKNSIGSIEKMADNAVTADVLGIITERNEILTLDNCTSLLPLLTALLGSGMDQHLSVSLDLLLKLVRLYGSPIYSSLSAPASVGVDIEAEQRIERYSRCFVELEKVKACLPSLARRGGLVAKSVLELNLAFQEVSS

SEQ ID NO: 78164 - DNA, 970 bp, Arabidopsis thaliana
  misc_feature (1)..(970): Ceres Seq. ID no. 12639528
  misc_feature (1)..(970): Ortholog of  Ceres SEQ ID NO 14303437 as cited in SEQ ID NO 54411
  misc_feature (1)..(970): Ortholog of  Ceres SEQ ID NO 12611816 as cited in SEQ ID NO 56754
  misc_feature (1)..(970): Ortholog of  Ceres SEQ ID NO 15170943 as cited in SEQ ID NO 59454
aacgagaaacagaacatcactaccaaacatctccagctcagtttcttcaaataaaaacagttaatctctctaaaacaattttttgttttctctctctcttaaataaccagagagttcagaatcattttgattctctttgtaatctttagttgttgtacctaacatcatggctgaagaggaaccgaagaaggtgacagagaccgtgtcggaaccaactccaacaccggaagttccggtggagaaacctgctgctgctgcagatgttgctcctcaggagaagcctgtggctccacctcccgttcttccatctccggcaccggcagaggagaagcaagaagactctaaggctattgttcccgtcgtccctaaagaagtagaggaagagaagaaagaaggatcagttaatcgagatgctgttctggctagagttgagacagagaagaggatgtcacttatcaaagcttgggaagaggctgagaaatgcaaagtggagaacaaagctgagaagaagctttcttcaattggatcatgggagaacaacaagaaagcagctgtggaagctgagctcaagaaaatggaggagcaattggagaagaagaaggcagagtatgtggagcagatgaagaacaaaatagctcaaattcacaaggaagcagaagagaagagagcgatgattgaagctaagcgtggagaagaaattctcaaagcagaggaattagcagccaagtaccgtgccactggaaccgctcccaaaaagcttttcggatgcatgtgatctctaatcatctcgatggggaaacaaatgaaatatggtatttgatgtaatgacgttctttagtttgcttaatgtgggtttaatatggcaacatagaaagttataaggtcaacatcttatattgattgggctgcgtttgttaatttgatttgtatttgtacatcttttcattgaaaggctttctcttagctttat

SEQ ID NO: 78165 - protein, 202 aa, Arabidopsis thaliana; identical to SEQ ID NO: 21120
  peptide (1)..(202): Ceres Seq. ID no. 12639529

SEQ ID NO: 78166 - protein, 109 aa, Arabidopsis thaliana; identical to SEQ ID NO: 21121
  peptide (1)..(109): Ceres Seq. ID no. 12639530

SEQ ID NO: 78167 - DNA, 542 bp, Arabidopsis thaliana
  misc_feature (1)..(542): Ceres Seq. ID no. 12639531
  misc_feature (1)..(542): Ortholog of  Ceres SEQ ID NO 14302208 as cited in SEQ ID NO 63753
cccactaaattataatttttgctttataaaaaaaaatatcaaactctatattttctcgatctcttctcttcctcttatttctccaagatcccagacgaaatggctcagaaagtggtgctgaaggttttaaccatgactgatgataagacgaagcagaaagccatagaagctgcagctgatatcttcggagttgattccatagcagcggatatgaaggatcaaaaattgacggtgatcggtttgatggatgcggttgcggtggtgaagaagttgaagaaggttggtaaagtcgatttgatatcggttggaccggcaaaagaagagaagaaagaagagaagaaggaagagaagaaagaggaaaagaaagaggagaagaaggaagagcagaaagaagaagaacctaagaaataagtgactcgaattgctattaaaaccctaaatttttgtcatattgatttcacaattagaacgctgaatcattgaataatttaagatgtaaaattaattgttcaatacagattgtaataaaagcgaagtatttg

SEQ ID NO: 78168 - protein, 103 aa, Arabidopsis thaliana
  peptide (1)..(103): Ceres Seq. ID no. 12639532
MAQKVVLKVLTMTDDKTKQKAIEAAADIFGVDSIAADMKDQKLTVIGLMDAVAVVKKLKKVGKVDLISVGPAKEEKKEEKKEEKKEEKKEEKKEEQKEEEPKK

SEQ ID NO: 78169 - protein, 92 aa, Arabidopsis thaliana
  peptide (1)..(92): Ceres Seq. ID no. 12639533
MTDDKTKQKAIEAAADIFGVDSIAADMKDQKLTVIGLMDAVAVVKKLKKVGKVDLISVGPAKEEKKEEKKEEKKEEKKEEKKEEQKEEEPKK

SEQ ID NO: 78170 - protein, 66 aa, Arabidopsis thaliana
  peptide (1)..(66): Ceres Seq. ID no. 12639534
MKDQKLTVIGLMDAVAVVKKLKKVGKVDLISVGPAKEEKKEEKKEEKKEEKKEEKKEEQKEEEPKK

SEQ ID NO: 78171 - DNA, 981 bp, Arabidopsis thaliana
  misc_feature (1)..(981): Ceres Seq. ID no. 12639573
  misc_feature (1)..(981): Ortholog of  Ceres SEQ ID NO 14303116 as cited in SEQ ID NO 57665
atggcgtctctgagattgttctcaacgaatcatcaatctcttctccttccatcatctctctcacaaaagactctaatatcttcaccaagattcgtcaataaccctagcagacggagtccaatacgatccgttcttcaatttaatcgcaaaccggaactcgccggagaaacgccgcgtatcgtcgttatcacctccggaaaaggcggtgttggaaagacgacaaccaccgcaaatgtcggtctctctctcgctcgttacggtttctcagttgtcgccattgacgccgaccttggtctccgtaacctcgatctcctcctagggttagagaatcgagtcaattacacttgcgtcgaggttataaacggagattgtcgtctcgatcaagctctggtacgtgataagcgttggtcgaatttcgaattgctatgtatatctaaacctagatcgaaacttccgatgggatttggtggtaaagcattggaatggcttgtggatgcgttgaaaactagaccggaaggttcaccggatttcatcatcatcgattgtcctgcaggaatcgatgccggattcataaccgccattactccggcgaatgaagcagttctggtaacaactccggatataacagcgttaagggatgctgatagggttacgggtttgttagaatgcgatggaatcagagatataaagatgattgtgaacagagtgagaactgatatgattaaaggagaggatatgatgtcagtgttagatgtgcaggagatgttgggattgtcattgcttggtgtaattcctgaagattctgaggttattcgaagcacgaatcgagggtttccgcttgttctgaataagcctcctacgcttgcgggattggcgtttgagcaggcggcttggagactcgttgagcaagatagtatgaaggctgttatggtggaggaagaacctaagaaacgtggcttcttctctttctttggcggctaa

SEQ ID NO: 78172 - protein, 326 aa, Arabidopsis thaliana
  peptide (1)..(326): Ceres Seq. ID no. 12639574
MASLRLFSTNHQSLLLPSSLSQKTLISSPRFVNNPSRRSPIRSVLQFNRKPELAGETPRIVVITSGKGGVGKTTTTANVGLSLARYGFSVVAIDADLGLRNLDLLLGLENRVNYTCVEVINGDCRLDQALVRDKRWSNFELLCISKPRSKLPMGFGGKALEWLVDALKTRPEGSPDFIIIDCPAGIDAGFITAITPANEAVLVTTPDITALRDADRVTGLLECDGIRDIKMIVNRVRTDMIKGEDMMSVLDVQEMLGLSLLGVIPEDSEVIRSTNRGFPLVLNKPPTLAGLAFEQAAWRLVEQDSMKAVMVEEEPKKRGFFSFFGG

SEQ ID NO: 78173 - protein, 174 aa, Arabidopsis thaliana; identical to SEQ ID NO: 25910
  peptide (1)..(174): Ceres Seq. ID no. 12639575

SEQ ID NO: 78174 - DNA, 1233 bp, Arabidopsis thaliana
  misc_feature (1)..(1233): Ceres Seq. ID no. 12639634
  misc_feature (1)..(1233): Ortholog of  Ceres SEQ ID NO 13597334 as cited in SEQ ID NO 64244
atggagagcttgacgatgctccttatcatgggacacttcatacaactgggagtttcagttattccagtttctaccatttatagtcctgacggcgatttgattgattgtatctaccggacggatcaacgagccttcgaccacccactcttacgaaaccatattattcaggaatatcctaccaacatgccacaaatagaaaaaagcgtacaagaaaattggcaaatttggcacgacaccggagaaaagtgtccggcagagacgattcctatgcgtcgggaattgaatccagtttctcaccaaaagcagcatgtacatgttccaaaagagtatgaggtcgccaacagagcaacttcagggcacaagtatgcaattgcatacatgattaaccggacaaatgtgtacggaacaagggcaacgtttaatgtctggacaccaaaggtagaatcggcttacgattttagcctcgctcagatttggctggcatctgggtcatacgagactgcggatctcaatactgttgaagccggttggcaggtttctcggtcgaggtataatgacagccaggccagattgtttacatattggacggcggatggatataacaagaccgggtgttatggcctcgaccttcctggatttgtgcagactagcagtaccatcgccatcggagctgccattggtcgcacctcgacatatggaggcacccagtttgacatgacacttcagatctggaaggatctgttttcaggacattggtggctggctctgggcccaaatttagtgcccattggatactggccggccgtaattttcacgaccttatccgattatgcgacggcagttgaatggggaggcgaagtattataccgaaacctgtcgagcgtgaatacggtggctcaaatgggttcaggagaatatgccgacaaaggctatgggaaagcggcatatttctgcaatctgaaggtggcagagaacaaccacacccttctcccggttcaagatttcggcgttcaagccgattatccagaatattataccgttaagaagtcatctaaccggaactgcggaaaccatttttatttcggcggaccaggacctcaacgttcagaagcagttcggggaacaacggttttaatacatgtctatatccatgtacatacgtgcccagttgacatgatcattatcaatactatatgtttagttatttttttcaaaatcgatcaatacgaatag

SEQ ID NO: 78175 - protein, 410 aa, Arabidopsis thaliana
  peptide (1)..(410): Ceres Seq. ID no. 12639635
MESLTMLLIMGHFIQLGVSVIPVSTIYSPDGDLIDCIYRTDQRAFDHPLLRNHIIQEYPTNMPQIEKSVQENWQIWHDTGEKCPAETIPMRRELNPVSHQKQHVHVPKEYEVANRATSGHKYAIAYMINRTNVYGTRATFNVWTPKVESAYDFSLAQIWLASGSYETADLNTVEAGWQVSRSRYNDSQARLFTYWTADGYNKTGCYGLDLPGFVQTSSTIAIGAAIGRTSTYGGTQFDMTLQIWKDLFSGHWWLALGPNLVPIGYWPAVIFTTLSDYATAVEWGGEVLYRNLSSVNTVAQMGSGEYADKGYGKAAYFCNLKVAENNHTLLPVQDFGVQADYPEYYTVKKSSNRNCGNHFYFGGPGPQRSEAVRGTTVLIHVYIHVHTCPVDMIIINTICLVIFFKIDQYE

SEQ ID NO: 78176 - protein, 405 aa, Arabidopsis thaliana
  peptide (1)..(405): Ceres Seq. ID no. 12639636
MLLIMGHFIQLGVSVIPVSTIYSPDGDLIDCIYRTDQRAFDHPLLRNHIIQEYPTNMPQIEKSVQENWQIWHDTGEKCPAETIPMRRELNPVSHQKQHVHVPKEYEVANRATSGHKYAIAYMINRTNVYGTRATFNVWTPKVESAYDFSLAQIWLASGSYETADLNTVEAGWQVSRSRYNDSQARLFTYWTADGYNKTGCYGLDLPGFVQTSSTIAIGAAIGRTSTYGGTQFDMTLQIWKDLFSGHWWLALGPNLVPIGYWPAVIFTTLSDYATAVEWGGEVLYRNLSSVNTVAQMGSGEYADKGYGKAAYFCNLKVAENNHTLLPVQDFGVQADYPEYYTVKKSSNRNCGNHFYFGGPGPQRSEAVRGTTVLIHVYIHVHTCPVDMIIINTICLVIFFKIDQYE

SEQ ID NO: 78177 - protein, 401 aa, Arabidopsis thaliana
  peptide (1)..(401): Ceres Seq. ID no. 12639637
MGHFIQLGVSVIPVSTIYSPDGDLIDCIYRTDQRAFDHPLLRNHIIQEYPTNMPQIEKSVQENWQIWHDTGEKCPAETIPMRRELNPVSHQKQHVHVPKEYEVANRATSGHKYAIAYMINRTNVYGTRATFNVWTPKVESAYDFSLAQIWLASGSYETADLNTVEAGWQVSRSRYNDSQARLFTYWTADGYNKTGCYGLDLPGFVQTSSTIAIGAAIGRTSTYGGTQFDMTLQIWKDLFSGHWWLALGPNLVPIGYWPAVIFTTLSDYATAVEWGGEVLYRNLSSVNTVAQMGSGEYADKGYGKAAYFCNLKVAENNHTLLPVQDFGVQADYPEYYTVKKSSNRNCGNHFYFGGPGPQRSEAVRGTTVLIHVYIHVHTCPVDMIIINTICLVIFFKIDQYE

SEQ ID NO: 78178 - DNA, 1257 bp, Arabidopsis thaliana
  misc_feature (1)..(1257): Ceres Seq. ID no. 12639672
  misc_feature (1)..(1257): Ortholog of  Ceres SEQ ID NO 13663419 as cited in SEQ ID NO 66561
atggggaaagagtgctactacttgtcatggatactcaagtttcatcttctacttgttttgattcagcttgttgattcaggatctaccatcagatttcttcctggtttccaaggccctcttcctttcgagctcgagaccgggtacattggtgtgggtgaggcagagaaagatcaaatgttctactacttcatcaaatctgagagtaatccagagaaagaccctcttcttctctggttaagtggaggtcctttctgttcttcgttcactgctcttatttatgagaatgggccaattgctttcaaggctgaggaatacaatggaagtatcccctctttggtctctaccacatatgcatggactaaggtggcgagcattctctatttggatcagcctgttgggactggcttctcctactccagaaatccacttgctgatataccaagtgacacaggggtagctaagccggtcaacgagtttcttcataagtggctagacaaacatcctgagttcttatccaatccgctctatgtcgccggaaattcttattccggtattgtcattccgaccatcgttcaagaaatctcaaatggaaaccatttagacagcaaacctcaaataaatcttcagggctttgtactcggaaacccggcaacagacactgatattgatcttaactctcgcattccatttgctcatggaaaggcactgatctctgatgaacactatgagtctctaaagagaagttgtcaagggaattatattagcgtgaatcctcgtaacacaaaatgcttgaaactccttgaagactttaaaaagtgtgtttctggaataagtgaagaatatattctaaaacctgactgcatgtggctttattcttgtatggcaaatctgcattcgctatctgaatattgggcaaatgagaaaagcgtgcgcaaagctcttctagtgaacgagggtaccgtaagaaaatggatacgatgtaatacggaaatcgcatacaataaggacattaggagtagtgtgccatatcataagtatattagcattgaagggtatcgatctctcgtcttcagtggtgatcacgacatgttagtacctttccttggaactcaagcatggataagatctctcaactattccattgttgacgattggagaccatggatggttcagaatcaagttgctggatacacaaggacttatgcgaataagatgacatttgccactgtcaaagcaaggaggcgggcacacgagtga

SEQ ID NO: 78179 - protein, 418 aa, Arabidopsis thaliana
  peptide (1)..(418): Ceres Seq. ID no. 12639673
MGKECYYLSWILKFHLLLVLIQLVDSGSTIRFLPGFQGPLPFELETGYIGVGEAEKDQMFYYFIKSESNPEKDPLLLWLSGGPFCSSFTALIYENGPIAFKAEEYNGSIPSLVSTTYAWTKVASILYLDQPVGTGFSYSRNPLADIPSDTGVAKPVNEFLHKWLDKHPEFLSNPLYVAGNSYSGIVIPTIVQEISNGNHLDSKPQINLQGFVLGNPATDTDIDLNSRIPFAHGKALISDEHYESLKRSCQGNYISVNPRNTKCLKLLEDFKKCVSGISEEYILKPDCMWLYSCMANLHSLSEYWANEKSVRKALLVNEGTVRKWIRCNTEIAYNKDIRSSVPYHKYISIEGYRSLVFSGDHDMLVPFLGTQAWIRSLNYSIVDDWRPWMVQNQVAGYTRTYANKMTFATVKARRRAHE

SEQ ID NO: 78180 - protein, 360 aa, Arabidopsis thaliana
  peptide (1)..(360): Ceres Seq. ID no. 12639674
MFYYFIKSESNPEKDPLLLWLSGGPFCSSFTALIYENGPIAFKAEEYNGSIPSLVSTTYAWTKVASILYLDQPVGTGFSYSRNPLADIPSDTGVAKPVNEFLHKWLDKHPEFLSNPLYVAGNSYSGIVIPTIVQEISNGNHLDSKPQINLQGFVLGNPATDTDIDLNSRIPFAHGKALISDEHYESLKRSCQGNYISVNPRNTKCLKLLEDFKKCVSGISEEYILKPDCMWLYSCMANLHSLSEYWANEKSVRKALLVNEGTVRKWIRCNTEIAYNKDIRSSVPYHKYISIEGYRSLVFSGDHDMLVPFLGTQAWIRSLNYSIVDDWRPWMVQNQVAGYTRTYANKMTFATVKARRRAHE

SEQ ID NO: 78181 - DNA, 1437 bp, Arabidopsis thaliana
  misc_feature (1)..(1437): Ceres Seq. ID no. 12639686
  misc_feature (1)..(1437): Ortholog of  Ceres SEQ ID NO 15170501 as cited in SEQ ID NO 52774
  misc_feature (1)..(1437): Ortholog of  Ceres SEQ ID NO 14314168 as cited in SEQ ID NO 59439
atgctcgatttctactcttcttttaagctcatcaactatattcgctcacaggaggattcacttttgtactcgtttgcagatgatgaggaagatgaagaagtcacgtttgacagagaggaagtgatggaggaattgcagaagcttggggatttaagcattgatgtcgaggctttaggggaaagctcaatgtcgaacagtgataaatgcaatataaatggaagtaaggatgtaacttcgctctcaaactgcaatggcctaaagcaaagttctgcggatgatttgatagtcaatgggaaagatgcagaaccaaaggtttgtgatggaaggctagttaataggaacatcagaaaggtgaatgagaactattttggatcttatagttcgtttggcattcacagggagatgctaagtgataaggttagaacagaagcataccgagatgcacttttgaagaatcctactctcttgaatggctctgttgtaatggatgttggttgtggaactgggatattgagtctttttgctgctaaagctggggcttcaagggtagttgcagttgaagctagtgagaagatggccaaagttgcaactaagattgcgaaggataacaaagtattcaatgataacgagcataatggggtacttgaagttgcacactcaatggtagaagagctagataaatcgatacagattcagcctcatagtgttgatgtgttagtcagcgaatggatgggatactgccttttatatgagtcaatgctcagttctgtgctctatgcaagagatcggtggttgaaacctggaggtgcaatcctccctgacacggccactatgtttgttgcgggatttggaaaaggtgcaacaagtcttcctttctgggaagatgtctatggctttgacatgtcttcaattgggaaggagatacatgacgacactactcgacttcccattgttgacgttatagcggagcgtgatttagtgacacagcctacccttcttcagacatttgacctggctaccatgaaaccggatgaagtagatttcacagcaacggcaacgctggagcccactgagtcagaagcaaaaactaggttgtgccatggtgttgtgttgtggtttgacacaggtttcaccagtaggttctgtaaggaaaacccaaccgtactatccacatcaccctacactcccccaacacactgggctcagacaatcttaacttttcaagaaccaatctcagtggcaccggcctcggttctgtctggtaatgacagaagagaagccatcggaaccgaagagtgtcccgcctcaagcattcatctgcgtgtgagtgttgcacgagcacatgagcatcgcagcatagacatctcgttagaggctactgggctgagctcaaagggtcagaagcgtcactggccggttcagatatttaatctatga

SEQ ID NO: 78182 - protein, 478 aa, Arabidopsis thaliana
  peptide (1)..(478): Ceres Seq. ID no. 12639687
MLDFYSSFKLINYIRSQEDSLLYSFADDEEDEEVTFDREEVMEELQKLGDLSIDVEALGESSMSNSDKCNINGSKDVTSLSNCNGLKQSSADDLIVNGKDAEPKVCDGRLVNRNIRKVNENYFGSYSSFGIHREMLSDKVRTEAYRDALLKNPTLLNGSVVMDVGCGTGILSLFAAKAGASRVVAVEASEKMAKVATKIAKDNKVFNDNEHNGVLEVAHSMVEELDKSIQIQPHSVDVLVSEWMGYCLLYESMLSSVLYARDRWLKPGGAILPDTATMFVAGFGKGATSLPFWEDVYGFDMSSIGKEIHDDTTRLPIVDVIAERDLVTQPTLLQTFDLATMKPDEVDFTATATLEPTESEAKTRLCHGVVLWFDTGFTSRFCKENPTVLSTSPYTPPTHWAQTILTFQEPISVAPASVLSGNDRREAIGTEECPASSIHLRVSVARAHEHRSIDISLEATGLSSKGQKRHWPVQIFNL

SEQ ID NO: 78183 - protein, 437 aa, Arabidopsis thaliana
  peptide (1)..(437): Ceres Seq. ID no. 12639688
MEELQKLGDLSIDVEALGESSMSNSDKCNINGSKDVTSLSNCNGLKQSSADDLIVNGKDAEPKVCDGRLVNRNIRKVNENYFGSYSSFGIHREMLSDKVRTEAYRDALLKNPTLLNGSVVMDVGCGTGILSLFAAKAGASRVVAVEASEKMAKVATKIAKDNKVFNDNEHNGVLEVAHSMVEELDKSIQIQPHSVDVLVSEWMGYCLLYESMLSSVLYARDRWLKPGGAILPDTATMFVAGFGKGATSLPFWEDVYGFDMSSIGKEIHDDTTRLPIVDVIAERDLVTQPTLLQTFDLATMKPDEVDFTATATLEPTESEAKTRLCHGVVLWFDTGFTSRFCKENPTVLSTSPYTPPTHWAQTILTFQEPISVAPASVLSGNDRREAIGTEECPASSIHLRVSVARAHEHRSIDISLEATGLSSKGQKRHWPVQIFNL

SEQ ID NO: 78184 - protein, 416 aa, Arabidopsis thaliana
  peptide (1)..(416): Ceres Seq. ID no. 12639689
MSNSDKCNINGSKDVTSLSNCNGLKQSSADDLIVNGKDAEPKVCDGRLVNRNIRKVNENYFGSYSSFGIHREMLSDKVRTEAYRDALLKNPTLLNGSVVMDVGCGTGILSLFAAKAGASRVVAVEASEKMAKVATKIAKDNKVFNDNEHNGVLEVAHSMVEELDKSIQIQPHSVDVLVSEWMGYCLLYESMLSSVLYARDRWLKPGGAILPDTATMFVAGFGKGATSLPFWEDVYGFDMSSIGKEIHDDTTRLPIVDVIAERDLVTQPTLLQTFDLATMKPDEVDFTATATLEPTESEAKTRLCHGVVLWFDTGFTSRFCKENPTVLSTSPYTPPTHWAQTILTFQEPISVAPASVLSGNDRREAIGTEECPASSIHLRVSVARAHEHRSIDISLEATGLSSKGQKRHWPVQIFNL

SEQ ID NO: 78185 - DNA, 2040 bp, Arabidopsis thaliana
  misc_feature (1)..(2040): Ceres Seq. ID no. 12639706
  misc_feature (1)..(2040): Ortholog of  Ceres SEQ ID NO 15178728 as cited in SEQ ID NO 67280
aaattacatctcaaatacacaatccagcaacacctttctctctctaacagcttcgagcttctacactcatggctgcttcatcctatgtagacggagaaagagatatggagaaaggaggaatgatattactacagtcaagtgagaatcaaaatcctatgatagatccttcaccaacaccttcaccatctgcaactgctactgccccagctttggttttgtctaattcaggcaagagaatggatcaagctggcaagaaaaagtatgttaagcaagtcacgggtcgccacaacgacaccgagcttcacttagcggcccaacgaggtgatttggctgctgtgcagcagattctcaaggatattaactctcagatggaagggattctgagtggggaagagtttgatgctgaagttgcggagattcgagcatcgattgtgaatgaggtgaatgagttaggggagacggcgctcttcactgctgcggataaaggacatcttgatgttgtcaaagagctgttgaagtattcgagtagagagagtattgctaagaagaatcgttctggatatgatccacttcatattgctgccatacagggtcatcatgctattgttgaggtcttgctagatcatgatgcgacgcttagccagacatttggcccatcgaatgcaactccgcttgtgtctgcagctatgagaggccatacagaagttgtgaaccagctcttatccaaagctgggaatttgctagaaatttctcggtctaacaataaaaatgccttgcatctagctgcaaggcaaggacatgtggaggtcataaaagctcttctctccaaggatcctcagctagcgagacggattgacaagaaaggacaaactgcacttcacatggctgttaaaggccagagttctgaagtagtgaaattgcttcttgatgcagatcctgctattgttatgcaaccggacaagtcttgtaacacagcgttacatgttgccaccaggaaaaaacgagcagagattgtagaactattgttgtcactgcctgataccaacgccaatactttaacccgcgatcacaagacagcgcttgacatagcagaaggacttcccctctcagaagaatcttcatacataaaagagtgtcttgctcgtagcggggctcttagggcgaatgagctgaaccagccaagggacgagctgagaagcactgtcacccaaatcaagaacgatgtacacatccagctggaacagacgaaaaggacgaacaaaaacgtgcacaacatttcaaaagaactcaggaaactccacagagaagggatcaacaatgcaaccaattctgtaactgttgtggctgtattgtttgcaactgtagcttttgctgctatattcacagtgccgggaggagacaacaatgacgggtctgcagtggtggtgggccgagcatcattcaagatcttcttcatcttcaacgcactcgcgttgtttacgtctctggcggttgtggttgtccagatcacattggtgagaggagagacaaaagctgagaagagggtagtggaagtgatcaacaaactcatgtggttggcatcgatgtgtacatctgtggcatttttggcatcttcatacatagtggttgggcgtaagaacgagtgggcggctgagctggtgaccgtggttgggggtgtgataatggctggtgttcttggaaccatgacttattacgtggtaaaatcgaagaggacaaggtcgatgaggaagaaggtgaagagtgctcgcaggagtggttccaactcgtggcatcattcagatttctctaactcggaagttgatcctattttcgcaatctaagatgcgtaaaagaatcgtgtatatatattgttgtatttggtgaagagagctagactatttagtgtataaagccccctgaccatcaaaaggcaaacactattgtcaaccattaaaggtttacactgctcaactcatctgtaaaacagttaacaattgtcttcttcggaaagcaaagaaaagcaaaggttcctttgttagg

SEQ ID NO: 78186 - protein, 590 aa, Arabidopsis thaliana
  peptide (1)..(590): Ceres Seq. ID no. 12639707
MAASSYVDGERDMEKGGMILLQSSENQNPMIDPSPTPSPSATATAPALVLSNSGKRMDQAGKKKYVKQVTGRHNDTELHLAAQRGDLAAVQQILKDINSQMEGILSGEEFDAEVAEIRASIVNEVNELGETALFTAADKGHLDVVKELLKYSSRESIAKKNRSGYDPLHIAAIQGHHAIVEVLLDHDATLSQTFGPSNATPLVSAAMRGHTEVVNQLLSKAGNLLEISRSNNKNALHLAARQGHVEVIKALLSKDPQLARRIDKKGQTALHMAVKGQSSEVVKLLLDADPAIVMQPDKSCNTALHVATRKKRAEIVELLLSLPDTNANTLTRDHKTALDIAEGLPLSEESSYIKECLARSGALRANELNQPRDELRSTVTQIKNDVHIQLEQTKRTNKNVHNISKELRKLHREGINNATNSVTVVAVLFATVAFAAIFTVPGGDNNDGSAVVVGRASFKIFFIFNALALFTSLAVVVVQITLVRGETKAEKRVVEVINKLMWLASMCTSVAFLASSYIVVGRKNEWAAELVTVVGGVIMAGVLGTMTYYVVKSKRTRSMRKKVKSARRSGSNSWHHSDFSNSEVDPIFAI

SEQ ID NO: 78187 - protein, 578 aa, Arabidopsis thaliana
  peptide (1)..(578): Ceres Seq. ID no. 12639708
MEKGGMILLQSSENQNPMIDPSPTPSPSATATAPALVLSNSGKRMDQAGKKKYVKQVTGRHNDTELHLAAQRGDLAAVQQILKDINSQMEGILSGEEFDAEVAEIRASIVNEVNELGETALFTAADKGHLDVVKELLKYSSRESIAKKNRSGYDPLHIAAIQGHHAIVEVLLDHDATLSQTFGPSNATPLVSAAMRGHTEVVNQLLSKAGNLLEISRSNNKNALHLAARQGHVEVIKALLSKDPQLARRIDKKGQTALHMAVKGQSSEVVKLLLDADPAIVMQPDKSCNTALHVATRKKRAEIVELLLSLPDTNANTLTRDHKTALDIAEGLPLSEESSYIKECLARSGALRANELNQPRDELRSTVTQIKNDVHIQLEQTKRTNKNVHNISKELRKLHREGINNATNSVTVVAVLFATVAFAAIFTVPGGDNNDGSAVVVGRASFKIFFIFNALALFTSLAVVVVQITLVRGETKAEKRVVEVINKLMWLASMCTSVAFLASSYIVVGRKNEWAAELVTVVGGVIMAGVLGTMTYYVVKSKRTRSMRKKVKSARRSGSNSWHHSDFSNSEVDPIFAI

SEQ ID NO: 78188 - protein, 573 aa, Arabidopsis thaliana
  peptide (1)..(573): Ceres Seq. ID no. 12639709
MILLQSSENQNPMIDPSPTPSPSATATAPALVLSNSGKRMDQAGKKKYVKQVTGRHNDTELHLAAQRGDLAAVQQILKDINSQMEGILSGEEFDAEVAEIRASIVNEVNELGETALFTAADKGHLDVVKELLKYSSRESIAKKNRSGYDPLHIAAIQGHHAIVEVLLDHDATLSQTFGPSNATPLVSAAMRGHTEVVNQLLSKAGNLLEISRSNNKNALHLAARQGHVEVIKALLSKDPQLARRIDKKGQTALHMAVKGQSSEVVKLLLDADPAIVMQPDKSCNTALHVATRKKRAEIVELLLSLPDTNANTLTRDHKTALDIAEGLPLSEESSYIKECLARSGALRANELNQPRDELRSTVTQIKNDVHIQLEQTKRTNKNVHNISKELRKLHREGINNATNSVTVVAVLFATVAFAAIFTVPGGDNNDGSAVVVGRASFKIFFIFNALALFTSLAVVVVQITLVRGETKAEKRVVEVINKLMWLASMCTSVAFLASSYIVVGRKNEWAAELVTVVGGVIMAGVLGTMTYYVVKSKRTRSMRKKVKSARRSGSNSWHHSDFSNSEVDPIFAI

SEQ ID NO: 78189 - DNA, 1644 bp, Arabidopsis thaliana
  misc_feature (1)..(1644): Ceres Seq. ID no. 12639766
  misc_feature (1)..(1644): Ortholog of  Ceres SEQ ID NO 14303770 as cited in SEQ ID NO 53890
tttctcatctcctcatctttttatcttctttgattgatccacatggcttccgctgccgcaagttccgccttttcactccttaagtccaccggcgctgttgcttcctccgccggaactcgcgcacgtgcctcccttctgccaattccctctacctctgtttccgcgcgtcctctaggcttctccgccactctagattcccgtcgtttctctctccacgttgcttccaaagttgaatcggtgcgtgggaagggaagcagaggagtggtttctatggcgaagaagagcgtcggagatctgacctcagctgatttgaaggggaagaaggttttcgtgagagctgatctcaatgtacctctcgatgataatcagactatcactgacgataccagaatccgtgccgccattccaacgatcaagtatttgattgaaaatggtgctaaagttatcctctccactcatctgggaaggccaaagggagtcaccccaaagtttagtttggctcctcttgtccctaggctctccgagcttcttggtattgaggtcacgaaagctgatgattgtattggcccagaagtggaaagcttggtggcttctctacctgaaggtggagttttgcttcttgagaacgtcaggttttacaaggaggaagagaagaacgatcctgagtttgctaagaagcttgcttctctagctgacctttatgtcaatgatgctttcggaactgctcacagagctcatgcttctaccgaaggagtcactaagttcttgaagccttcagttgctggtttccttttgcaaaaggaactggactacctagttggtgctgtttcaaacccaaagagaccatttgcagccatagtgggtggttccaaagtctcatccaagattggagttattgaatcgcttctggagaagtgtgatattcttcttcttggtggtggaatgatcttcacattctacaaggcacagggtctttcagttggttcgtcccttgttgaagaagacaagcttgaattggctacagaactccttgccaaagctaaggccaaaggagtctctcttttgttgccaacagatgttgtagttgctgacaagtttgctcctgatgccaacagcaagattgtgcctgcatcaggcattgaggacggatggatgggactggacattggtccagactctatcaaaactttcaacgaagctctggacacaacacaaacagtcatttggaatggacctatgggagttttcgagatggaaaagtttgcggctggaacagaggcgatagcgaataaactagcagagctaagtgaaaaaggagtgacaacgataataggaggaggagactcagtggctgcagtggagaaagtaggagtagcaggagtcatgagtcacatctccactggtggtggagccagcttggagctgttggaaggaaaagtacttcccggtgtgatcgcccttgatgaagcaatcccagtcactgtttagaaactcttaccatctataaggcaaacgctgtatacttaaaagagtttctttcgctttaaatctacctatgcaaaactttactatgtatcagagtctcattccccggaaaagaaaactcacatattaaaattctgaaaaaaaatatcaagagataag

SEQ ID NO: 78190 - protein, 481 aa, Arabidopsis thaliana; identical to SEQ ID NO: 35239
  peptide (1)..(481): Ceres Seq. ID no. 12639767

SEQ ID NO: 78191 - protein, 405 aa, Arabidopsis thaliana; identical to SEQ ID NO: 35240
  peptide (1)..(405): Ceres Seq. ID no. 12639768

SEQ ID NO: 78192 - DNA, 1091 bp, Arabidopsis thaliana
  misc_feature (1)..(1091): Ceres Seq. ID no. 12639769
  misc_feature (1)..(1091): Ortholog of  Ceres SEQ ID NO 13598507 as cited in SEQ ID NO 63402
attttattttgtcttaaagcttttggcgagtttgcttgtgtgtgagtgtgtggttatggactctccgttcaaacctgatgtcgtcagaggtcaagtggctctcatcaccggtggtggatccggtatcggttttgagatctcttctcagtttggcaaacatggagcttctatcgctatcatgggacgacgaaaacaagtcctcgatgacgccgtctctgctcttcgatctcttggaatccaggctattggattggaaggtgatgttcgtaagcaagaagatgcgagaagagttgtggaagcaacttttcagcattttggtaaacttgatattcttgttaacgccgctgctggcaattttctggctgctgctgaggatttgtctcctaatggcttcagaacagtcttagacattgatgcggtaggaacattcaacatgtgtcacgcagctctcaagtatcttaagaaaggagcgcctggaagagactcatcaagcggtggaggttcgattattaacattagcgcgactttgcactacacggcttcttggtaccaaatacatgtctctgcagccaaggctgcagttgatgctaccacaagaaacttggcattggagtggggaactgactatgatattagagtgaacgggattgctccaggtcctattggaggtacacctggaatgagtaaacttgtacctgaggagattgaaaacaaaaccagagagtacatgcctctttataaagttggagagaagtgggatatcgctatggctgcactctacctcagctgtgattctgggaaatatgtgagcggactaacaatggtggtagatggaggactgtggcttagcaaacctcgccacttgcctaaagaagcggtgaagcaactctctcgtgcggtggagaagaggtctagggccaagcctgttggtctcccaaccagcaagctgtagatcatttgaatttcagatatcaaataagtgcacattgaaaaaatgttttggtttattgaattacattggagactgagaaaatggtattaagattatgtagatcaaactatcttatgcacaataaagtagctttctttgc

SEQ ID NO: 78193 - protein, 316 aa, Arabidopsis thaliana; identical to SEQ ID NO: 25763
  peptide (1)..(316): Ceres Seq. ID no. 12639770

SEQ ID NO: 78194 - protein, 298 aa, Arabidopsis thaliana; identical to SEQ ID NO: 25764
  peptide (1)..(298): Ceres Seq. ID no. 12639771

SEQ ID NO: 78195 - protein, 257 aa, Arabidopsis thaliana; identical to SEQ ID NO: 25765
  peptide (1)..(257): Ceres Seq. ID no. 12639772

SEQ ID NO: 78196 - DNA, 720 bp, Arabidopsis thaliana
  misc_feature (1)..(720): Ceres Seq. ID no. 12639773
  misc_feature (1)..(720): Ortholog of  Ceres SEQ ID NO 12611159 as cited in SEQ ID NO 59821
atggggaatagaagagcaccatgctgtgacaaaagccaagtgaagagagggccatggagtgatgaagaaagtgaaagactcagatcttttatcctcaaaaatggtcatcaaaattggcgatctcttcccaaactcgctggattgatgagatgcggaaagagttgtcgtctaagatggataaactatctgagaccaggtctcaaacgaggcaacttcaccaaggaggaggaagataccattatccaccttcaccaagcttatggaaacaagtggtctaagatcgcatccaacttcccgggaaggacagacaacgagatcaagaatgtatggaacactcatctcaagaagcggttggtgaagaggagcatttcatcatcatcatccgatgttaccaatcattcagtgtcttctacctcttcttcctcttcctcaatctcgtcagtcttgcaggacgttattattaagagtgagaggcctaaccaggaagaggagtttggggaaatcttggtggagcaaatggcatgtggatttgaggtggatgcaccacaatcactagaatgtctctttgacgatagccaggttcctcctcctatatctaaaccagactcactacaaacccatgggaagtcatcagatcacgaattttggagccgactgattgaaccagggttcgatgattacaatgagtggctcattttcttggataaccaaacttgctag

SEQ ID NO: 78197 - protein, 239 aa, Arabidopsis thaliana
  peptide (1)..(239): Ceres Seq. ID no. 12639774
MGNRRAPCCDKSQVKRGPWSDEESERLRSFILKNGHQNWRSLPKLAGLMRCGKSCRLRWINYLRPGLKRGNFTKEEEDTIIHLHQAYGNKWSKIASNFPGRTDNEIKNVWNTHLKKRLVKRSISSSSSDVTNHSVSSTSSSSSSISSVLQDVIIKSERPNQEEEFGEILVEQMACGFEVDAPQSLECLFDDSQVPPPISKPDSLQTHGKSSDHEFWSRLIEPGFDDYNEWLIFLDNQTC

SEQ ID NO: 78198 - protein, 191 aa, Arabidopsis thaliana
  peptide (1)..(191): Ceres Seq. ID no. 12639775
MRCGKSCRLRWINYLRPGLKRGNFTKEEEDTIIHLHQAYGNKWSKIASNFPGRTDNEIKNVWNTHLKKRLVKRSISSSSSDVTNHSVSSTSSSSSSISSVLQDVIIKSERPNQEEEFGEILVEQMACGFEVDAPQSLECLFDDSQVPPPISKPDSLQTHGKSSDHEFWSRLIEPGFDDYNEWLIFLDNQTC

SEQ ID NO: 78199 - DNA, 1824 bp, Arabidopsis thaliana
  misc_feature (1)..(1824): Ceres Seq. ID no. 12639807
  misc_feature (1)..(1824): Ortholog of  Ceres SEQ ID NO 13584744 as cited in SEQ ID NO 69137
atgggaccaaatctgcagcggatcgtacttgtcttcattgcatgtttcggaatcttcacctccgttgttcttgcaaaaaccgatagccaagacggttaccagcttggaaacttgaaatcgctcacttaccttgatgtaagcaagaacaatcttaacggaaacttaccctaccagcttcctgacaagcttacttatctagatggctctgagaatgacttcaacggtaatgtgccatattcggtgtctctcatgaacgacctcagttaccttgatctttcttccaatcaactcacgggaaaactaccgcagagttttgccaatctaacaggtcttaaaacactgcatttgcaagaaaaccaattcaaaggctctataaatgctctcagggacctccctcagattgatgatgtaaacgtagcaaacaatcaatttactggttggatcccaaacgagttgaagaatattggaaaccttgaaactggaggaaacaagtggtcaagcggtagagctccttcaccacctccgggaacccgtcacatagacagaaactcatcaggaggcggtggaggaagcagcaaggctctgacactaggagttataatagcggtgtcttctataggtggactcattttatttgcagggttgattgcattgatttctcgaagaaagaactctaatgattcttctcactttttcgacgacgagaaaggaaccaaccgaagcaagccactcttcacaccacaatcctctcagatgcttcaattcgataatatggaagaattcaaaaaccagaagacagttgattctaatacttcacttgaaacaaagccttctgttaaaagaacttcttctgtcagtttcaagaactctcctacttttcatctcataccttctacccaagtggctgctacccctgaccgttcctccacctcccaagactctcctgatacacgcggtgtgaaagcgttttcactagcggatttgcagaataccgcgtcttgtttctcgccgaatcgccttcttggtgaaggaaccattggacgtgtttataaagctaaatttcaggatggaaggaaatttgcagtcaaagagattgattcttctctgttaggaaaaggcaatccggaagagttttcacacatagtgtcgagtatctcgagtattcaccacaagaatatggcagaactcgtgggttattgttcagaacaaggaagaaatatgcttgtttatgagtatttcacaagtggatcacttcacagatttcttcacctgtctgatgatttcagcaaaccattgacgtggaacaccagaatccgaatcgctctcggaactgctaaagctatagagtaccttcatgaaacatgttcgcctccgctagttcacaagaacatcaagtcatcaaacattttacttgataatgagctaaatccccgcctctcagactatggcttggcaaactttcaccaccgcacaagtcagaatcttggagttggatacaatgccccagaatgcacagatccctccgcttacacacaaaagagcgacgtgtacagctttggtgtggtgatgcttgagctgctaactggtcgaaagccttatgacagtgggaggccaaaagcagaacagtctttagttcgttgggcaaagccgcagcttaaagacatggatactctggatgaaatggtggatcccgcgttgtgcggactctacgctccagaatctgtatcatcattcgcggatatagtttccatctgcgtaatgacggagcctggacttaggcctccagtgtcaaatgtggtggaggcattgaagaggctagtgtag

SEQ ID NO: 78200 - protein, 607 aa, Arabidopsis thaliana
  peptide (1)..(607): Ceres Seq. ID no. 12639808
MGPNLQRIVLVFIACFGIFTSVVLAKTDSQDGYQLGNLKSLTYLDVSKNNLNGNLPYQLPDKLTYLDGSENDFNGNVPYSVSLMNDLSYLDLSSNQLTGKLPQSFANLTGLKTLHLQENQFKGSINALRDLPQIDDVNVANNQFTGWIPNELKNIGNLETGGNKWSSGRAPSPPPGTRHIDRNSSGGGGGSSKALTLGVIIAVSSIGGLILFAGLIALISRRKNSNDSSHFFDDEKGTNRSKPLFTPQSSQMLQFDNMEEFKNQKTVDSNTSLETKPSVKRTSSVSFKNSPTFHLIPSTQVAATPDRSSTSQDSPDTRGVKAFSLADLQNTASCFSPNRLLGEGTIGRVYKAKFQDGRKFAVKEIDSSLLGKGNPEEFSHIVSSISSIHHKNMAELVGYCSEQGRNMLVYEYFTSGSLHRFLHLSDDFSKPLTWNTRIRIALGTAKAIEYLHETCSPPLVHKNIKSSNILLDNELNPRLSDYGLANFHHRTSQNLGVGYNAPECTDPSAYTQKSDVYSFGVVMLELLTGRKPYDSGRPKAEQSLVRWAKPQLKDMDTLDEMVDPALCGLYAPESVSSFADIVSICVMTEPGLRPPVSNVVEALKRLV

SEQ ID NO: 78201 - protein, 524 aa, Arabidopsis thaliana
  peptide (1)..(524): Ceres Seq. ID no. 12639809
MNDLSYLDLSSNQLTGKLPQSFANLTGLKTLHLQENQFKGSINALRDLPQIDDVNVANNQFTGWIPNELKNIGNLETGGNKWSSGRAPSPPPGTRHIDRNSSGGGGGSSKALTLGVIIAVSSIGGLILFAGLIALISRRKNSNDSSHFFDDEKGTNRSKPLFTPQSSQMLQFDNMEEFKNQKTVDSNTSLETKPSVKRTSSVSFKNSPTFHLIPSTQVAATPDRSSTSQDSPDTRGVKAFSLADLQNTASCFSPNRLLGEGTIGRVYKAKFQDGRKFAVKEIDSSLLGKGNPEEFSHIVSSISSIHHKNMAELVGYCSEQGRNMLVYEYFTSGSLHRFLHLSDDFSKPLTWNTRIRIALGTAKAIEYLHETCSPPLVHKNIKSSNILLDNELNPRLSDYGLANFHHRTSQNLGVGYNAPECTDPSAYTQKSDVYSFGVVMLELLTGRKPYDSGRPKAEQSLVRWAKPQLKDMDTLDEMVDPALCGLYAPESVSSFADIVSICVMTEPGLRPPVSNVVEALKRLV

SEQ ID NO: 78202 - protein, 356 aa, Arabidopsis thaliana
  peptide (1)..(356): Ceres Seq. ID no. 12639810
MLQFDNMEEFKNQKTVDSNTSLETKPSVKRTSSVSFKNSPTFHLIPSTQVAATPDRSSTSQDSPDTRGVKAFSLADLQNTASCFSPNRLLGEGTIGRVYKAKFQDGRKFAVKEIDSSLLGKGNPEEFSHIVSSISSIHHKNMAELVGYCSEQGRNMLVYEYFTSGSLHRFLHLSDDFSKPLTWNTRIRIALGTAKAIEYLHETCSPPLVHKNIKSSNILLDNELNPRLSDYGLANFHHRTSQNLGVGYNAPECTDPSAYTQKSDVYSFGVVMLELLTGRKPYDSGRPKAEQSLVRWAKPQLKDMDTLDEMVDPALCGLYAPESVSSFADIVSICVMTEPGLRPPVSNVVEALKRLV

SEQ ID NO: 78203 - DNA, 969 bp, Arabidopsis thaliana
  misc_feature (1)..(969): Ceres Seq. ID no. 12639815
  misc_feature (1)..(969): Ortholog of  Ceres SEQ ID NO 15169682 as cited in SEQ ID NO 54434
atggattacactgtcgatatgagctgtgtgatgaaagtgaacagaggttgccagctttgtcggcaaaaagtgtcagaagtcatgcattgtgtctacggagtttactctgtggatttcaccggagacgacaactcaatgaaactcaaggccagagttaaccctaatgtattgttggctgttgctgaacggtacggtgaacatggaaagatcactaatctccgtttcgacggagaagttatgactcctcgcggcggcggtggttattacggtcaatcaggctattacattcctaccacctcccgtggtaactatgcatatccttcgttgtatcaatatcctcctccgccacatgtttatggcggaaactatgctcatccgccgtcaaatcccccgcggcactcggaggcaccacgaagaaacctcatccttcgaacgttaagaggaagaagaataagagaaatcgattcgtggttttgggaaaattcaatggcggtttctactgtatcgtcgtttctattgccatctttcggcattccaagctcttcgccttcttctaccagactcaaagtctctctgctgccttcatcttctacccatggcggccttagttcctgcgtccttacgaaaccatccgtctcgcttacgaaggtcttcgctgttcccgataccctagatccaactccagaaattctcgatgaacccgcctctgaggttccgagctcttcatccatcagtgtagacgcggataagatggcgccaaagcaaaagattaggatcaagcttagatcatactgggtgcctcttattgaggactcatgcaaatacttgatgctgcgagaaacaccaatgcaaagacgatgggtcctgttccattgccaaccaagaagcgtatctactgtgttctcaagtctcctcacgttcacaaggatgctaggttccattttgaaatccggacacaccagcgcatga

SEQ ID NO: 78204 - protein, 322 aa, Arabidopsis thaliana
  peptide (1)..(322): Ceres Seq. ID no. 12639816
MDYTVDMSCVMKVNRGCQLCRQKVSEVMHCVYGVYSVDFTGDDNSMKLKARVNPNVLLAVAERYGEHGKITNLRFDGEVMTPRGGGGYYGQSGYYIPTTSRGNYAYPSLYQYPPPPHVYGGNYAHPPSNPPRHSEAPRRNLILRTLRGRRIREIDSWFWENSMAVSTVSSFLLPSFGIPSSSPSSTRLKVSLLPSSSTHGGLSSCVLTKPSVSLTKVFAVPDTLDPTPEILDEPASEVPSSSSISVDADKMAPKQKIRIKLRSYWVPLIEDSCKYLMLRETPMQRRWVLFHCQPRSVSTVFSSLLTFTRMLGSILKSGHTSA

SEQ ID NO: 78205 - protein, 316 aa, Arabidopsis thaliana
  peptide (1)..(316): Ceres Seq. ID no. 12639817
MSCVMKVNRGCQLCRQKVSEVMHCVYGVYSVDFTGDDNSMKLKARVNPNVLLAVAERYGEHGKITNLRFDGEVMTPRGGGGYYGQSGYYIPTTSRGNYAYPSLYQYPPPPHVYGGNYAHPPSNPPRHSEAPRRNLILRTLRGRRIREIDSWFWENSMAVSTVSSFLLPSFGIPSSSPSSTRLKVSLLPSSSTHGGLSSCVLTKPSVSLTKVFAVPDTLDPTPEILDEPASEVPSSSSISVDADKMAPKQKIRIKLRSYWVPLIEDSCKYLMLRETPMQRRWVLFHCQPRSVSTVFSSLLTFTRMLGSILKSGHTSA

SEQ ID NO: 78206 - protein, 312 aa, Arabidopsis thaliana
  peptide (1)..(312): Ceres Seq. ID no. 12639818
MKVNRGCQLCRQKVSEVMHCVYGVYSVDFTGDDNSMKLKARVNPNVLLAVAERYGEHGKITNLRFDGEVMTPRGGGGYYGQSGYYIPTTSRGNYAYPSLYQYPPPPHVYGGNYAHPPSNPPRHSEAPRRNLILRTLRGRRIREIDSWFWENSMAVSTVSSFLLPSFGIPSSSPSSTRLKVSLLPSSSTHGGLSSCVLTKPSVSLTKVFAVPDTLDPTPEILDEPASEVPSSSSISVDADKMAPKQKIRIKLRSYWVPLIEDSCKYLMLRETPMQRRWVLFHCQPRSVSTVFSSLLTFTRMLGSILKSGHTSA

SEQ ID NO: 78207 - DNA, 2316 bp, Arabidopsis thaliana
  misc_feature (1)..(2316): Ceres Seq. ID no. 12639831
  misc_feature (1)..(2316): Ortholog of  Ceres SEQ ID NO 13659131 as cited in SEQ ID NO 66756
atgcagatggctgatcaacagcagacaggggagaattcttctgctcttgattctagagctgaagtagaaactggttataccacagtgagtaactcaacaacattggatggactaaacaagcagacagttccctcagttcaagcatctggcagtgtgtctttggagcaccaggctcccacagatgttacgtcgcagtggaagatgattctgcatgaggagagcaatcagtattattactggaatacagaaactggagaaacttcgtgggaattgcctacagttttgactcaaactacctttgcatatgggactgggtacaatgagtctgggcccatggttacagatgcttccaccttgatttcaagtgttgaaccaagctatttcgtacccgtgcaaaatagtttcacaggaactgactattctacttttccaactgttgagctggatgggagaaacaaaagtgaagatctatatgtcaaaagtttaggaactgatggtcatcaagttgaatgtcggatagactctgttgttagttgtcaggaggacctttcaaggccaggaaattcagatcatgtgcatacttattttgatgcaggagctgctactgacctcccatctcgcttgttgagtcaaatcgaaagcttactggagaagctgaggtctctgaagaggtcgcatgggaactttcacagcaatgagcagataacaaagtacattctggaggttgaagtcagacattctgatgtaaaggcgctcatattggacacctcacctttactttctttttggcttcacactgagaaacaacttaagcggctggaagatagtgttaacgatgagatttaccagcttgcaaaatctgcagtaatggatgaaccagaaactaacaaaagccctcccaaagaaaagttggtggcagatgctaatacagagagtgagtccgaggacagtgagagagatggagagttagctcaatctggaaaatctcttcattcagatgaatcagctgatgggagcggcgatggatctcctaaacactccccaaatcatccagctgggcagtctgatattattccttcaactgagatgcttcagaaggccggctccccagatgtggaagatgttgacatggatgtggatatggaagttgaagaatcagttccagtgtcttctgttcaagtgatagacgcttctgatggtaagatgttcagtcaaacagagccatccaaccttcatacagatgttccaccacctccgggtgaggaatggattccaccaccgccgtctgagagtgaagatgttcctccaccgccaccagacagttatagcgaaccaattcctccaccacctgacaatggccatgtcgcttcatctttgtccagtgactctctcggagttccctataccgtacctcaatcatatatgcatcaatctgctgattatgcgacacaatacaacttatcctatccagagtccaattatcaatataccaatgctgttactctagctcctaatactcagttctatggccatgtggatggatctcaagtttctcttccccaatccacattttattatgaaactgttcctggtacaactgaagttgttcctgcagcagccagtgctggtgaagcttattacgatttcaatggtgcagctccactgtttcctgtcattagctcgggtgagtcatctctacatcacagtggagttggttctgctaatcaccacatcccaaacaactcttctacagctgcagtgcctagttcgagatccaatgactctactgaggttggatcttcagcaactgcttctaaatccacagatgttacaagtggatcgtctctattagcaaaaggtcaaactaaagtgaaacggacaaaaaagaaaacagtagctgctacatctacattgaggtcaaataaaaaggtttccagtttggttgacaagtggaaagctgcgaaagaggagctaaacgatagcgaagaagaagaagatgattccgaaatcctagatagaaaaagaaaacgagaaatcgaagaatggaaatctcgacaaatcgcaagtggagaggctaaagacaacgcaaatttccaacccctgggtggtgactggcgtgagaaagtgaaacggaagagagaacgagctgagaagtctcagaagaaagaccccgaaaagcagcaaaaacctgatctaacaaaactctcagcaaatctcccgtcggaatggcaggcatattgggacgaatctaccaaaaaagtttactatgggaatacgagtacatctcaaaccagttggacacgacccactacctga

SEQ ID NO: 78208 - protein, 771 aa, Arabidopsis thaliana; identical to SEQ ID NO: 75208
  peptide (1)..(771): Ceres Seq. ID no. 12639832

SEQ ID NO: 78209 - protein, 769 aa, Arabidopsis thaliana; identical to SEQ ID NO: 77183
  peptide (1)..(769): Ceres Seq. ID no. 12639833

SEQ ID NO: 78210 - protein, 704 aa, Arabidopsis thaliana; identical to SEQ ID NO: 77184
  peptide (1)..(704): Ceres Seq. ID no. 12639834

SEQ ID NO: 78211 - DNA, 501 bp, Arabidopsis thaliana
  misc_feature (1)..(501): Ceres Seq. ID no. 12639893
  misc_feature (1)..(501): Ortholog of  Ceres SEQ ID NO 12584790 as cited in SEQ ID NO 62648
atgtacgccggatattcaggaacggcgtcgtcttgggtagcgaagacttcagtttctgcgtcagggaagaggatacagagggagatggctgagcttaacattgatccacctcctgattgctcagctggtccaaaaggagataatctctaccattggatcgccaccatcattggtccttcgggaactccctatgaaggagggatctttttcctggatataattttcccatctgattatccattcaagccacctaagttggtgttcaagactcggatttaccattgcaatgttgatactgcgggagatttaagtgtgaacattctaagagatagttggagtccagcccttacaatcactaaagtcttacaagccatcagatctatcttcttaaaacctgaaccctatagtccagctttaccggtgattgcacggctctacttgacagatagagaaaagcatgacgaggtagccaaagaatggacattgcgatttgccaagtga

SEQ ID NO: 78212 - protein, 166 aa, Arabidopsis thaliana
  peptide (1)..(166): Ceres Seq. ID no. 12639894
MYAGYSGTASSWVAKTSVSASGKRIQREMAELNIDPPPDCSAGPKGDNLYHWIATIIGPSGTPYEGGIFFLDIIFPSDYPFKPPKLVFKTRIYHCNVDTAGDLSVNILRDSWSPALTITKVLQAIRSIFLKPEPYSPALPVIARLYLTDREKHDEVAKEWTLRFAK

SEQ ID NO: 78213 - protein, 138 aa, Arabidopsis thaliana
  peptide (1)..(138): Ceres Seq. ID no. 12639895
MAELNIDPPPDCSAGPKGDNLYHWIATIIGPSGTPYEGGIFFLDIIFPSDYPFKPPKLVFKTRIYHCNVDTAGDLSVNILRDSWSPALTITKVLQAIRSIFLKPEPYSPALPVIARLYLTDREKHDEVAKEWTLRFAK

SEQ ID NO: 78214 - DNA, 1262 bp, Arabidopsis thaliana
  misc_feature (1)..(1262): Ceres Seq. ID no. 12639927
  misc_feature (1)..(1262): Ortholog of  Ceres SEQ ID NO 14316128 as cited in SEQ ID NO 52380
acaatcacttgtctgattctctcatataatagagttttctttctattctcctctgcttaatttcccagaaattactctttctgtgcttatcggattcaatagattcttagtaaatcgtaatggagacaccatcatcgacaagaagagtcacgagatctcagacccgctgtgctatcaataatctcttatcctcaaagaaagcggatgattggtcagataaatgtcaatcgaagtcggtacaaagaaacggtgcaaaagacaggtctgcgttgtttgacataaccaacgactcaccgatcgtaggtctggcgatgcagacaccgtcctcaggagttgttgggaagaggaacatgagcagaatcaataacactcctggatctggtgaggctctcttgagaggccaagtcaagactctcttgcagaaggttgaggaagaagcagatctcaccaagatttcgttggaatctcgtcctttcatccatctcgttacttctcccatgggtcttctcgccccaactccggccaacaccccccaagttcttggtttctcagacgaagtgcaggttgtgatcacttctccggtagttgcaggacaattcagagcaccgtctcaggtggtggaaagcaacatgtttgatgagaaagaagaaagcttggagttagagaagagcccgagcattactcggtcattgcttctggactttagtgataaatcagaattatgggagagctcagactgctcatctgtggtgactcaaaacccagaggatgataactcgtcggtgtggtcgatgcaggccaatgcaagtgccaaagacgaagagtatgatgatgaagaggaagaagcctattcttacggtgaggaatatgatgaggaatactacgacgaggaagaggaggaagaagagggagggattgtggatgggttgtgtgagggaattaggaagatgagcgtagagactgactttgcagggaaacacactagatttgtgtatgacagtgaagatgaagagattgtggaggccaaagatcaatctccaggagtgttgcgtttgaaaggctttcctacaccgacaggaaaacatgtcagatttgccggtgatgaatgagttcagtttgaatctttcttcttggagttgtgacaaaaagcctcatatgtctcgactttttttttttttttttcttgttgttgcttgaagattcacaaatctgattcttgttattaccttgttgttatttttcaataactaaaagtgtaatcg

SEQ ID NO: 78215 - protein, 329 aa, Arabidopsis thaliana; identical to SEQ ID NO: 39350
  peptide (1)..(329): Ceres Seq. ID no. 12639928

SEQ ID NO: 78216 - protein, 265 aa, Arabidopsis thaliana; identical to SEQ ID NO: 39351
  peptide (1)..(265): Ceres Seq. ID no. 12639929

SEQ ID NO: 78217 - protein, 252 aa, Arabidopsis thaliana; identical to SEQ ID NO: 39352
  peptide (1)..(252): Ceres Seq. ID no. 12639930

SEQ ID NO: 78218 - DNA, 876 bp, Arabidopsis thaliana
  misc_feature (1)..(876): Ceres Seq. ID no. 12639935
  misc_feature (1)..(876): Ortholog of  Ceres SEQ ID NO 13582619 as cited in SEQ ID NO 56520
  misc_feature (1)..(876): Ortholog of  Ceres SEQ ID NO 13660872 as cited in SEQ ID NO 60830
  misc_feature (1)..(876): Ortholog of  Ceres SEQ ID NO 12616221 as cited in SEQ ID NO 63291
atgaaggttgatcaagattattcgtgtagtataccgcctggatttaggtttcatccgacagatgaagaacttgtcggatattatctcaagaagaaaatcgcctcccagaggattgatctcgacgttatcagagaaattgatctttacaagatcgaaccatgggatctacaagagagatgtaggatagggtacgaggagcaaacggagtggtatttcttcagccatagagacaagaagtatccgactgggactaggacaaaccgagccaccgtggccggtttctggaaagcaacgggccgggacaaggcggtttacctcaactccaaacttatcggtatgagaaaaacgcttgtcttttaccgaggtcgagcgcctaatggccaaaagtccgattggatcattcacgaatactacagcctcgagtcacaccagaactctcctccacaggaagaaggatgggtagtgtgtagagcatttaagaaacgaacgaccatcccaacaaaaaggaggcaactttgggatccgaactgcttattctacgacgacgccactctcttggaacctctcgacaagcgagccagacataatcctgattttaccgccacaccgttcaagcaagaactactctccgaggccagtcacgtccaggatggagatttcggatctatgtaccttcaatgcatcgatgatgatcaattctcccagcttcctcagctcgagagcccctctcttccgtcggaaataactccccatagtactactttttctgagaacagtagccggaaagatgacatgagctccgagaagaggatcactgactggagatatctagataagttcgtggcgtctcaatttttgatgagtggagaagactaa

SEQ ID NO: 78219 - protein, 291 aa, Arabidopsis thaliana; identical to SEQ ID NO: 73020
  peptide (1)..(291): Ceres Seq. ID no. 12639936

SEQ ID NO: 78220 - protein, 179 aa, Arabidopsis thaliana; identical to SEQ ID NO: 73021
  peptide (1)..(179): Ceres Seq. ID no. 12639937

SEQ ID NO: 78221 - DNA, 876 bp, Arabidopsis thaliana
  misc_feature (1)..(876): Ceres Seq. ID no. 12639956
  misc_feature (1)..(876): Ortholog of  Ceres SEQ ID NO 13598387 as cited in SEQ ID NO 62757
  misc_feature (1)..(876): Ortholog of  Ceres SEQ ID NO 13662984 as cited in SEQ ID NO 64419
atggcgattgtttccgtctctaactcttttctcactttcaattctcccaatcagctccgatttagccgaagaagattctctgccatggcttcttcaactactggagtgagagtcgctgaaggagaaggcaatttgccaaaacttgtccttacttctcctcagaacagcgaggctgagatatatctcttcggaggctgcattacttcttggaaagttgcgagcggtaaagatcttctttttgtcagaccagatgctgtcttcaataagattaagcccattagcggagggattccacattgttttccacagtttggacctgggctaattcaacagcatgggtttggaaggaacatggactggtctgttgtcgattcccagaatgcagatgacaatgctgctgttactcttgagcttaaggatggtccctatagtcgagccatgtgggactttgctttccaggctctatacaaggtcattgttggcgcggactccctttccactgagctaaagattacaaacacagacgataaaccattttctttcagcactgcgttgcatacttacttccgtgcttcttctgcgggggcctccgtgagaggtctaaagggttgtaaaactctcaataaggatccagaccctaagaacccaatagagggtaaagaagacagggatgcagtcacttttcctggatttgtggataccgtctatcttgatgctcccaatgaattgcagtttgataatggcttgggtgataaaataatcatcaaaaacacaaattggtcggatgcggtcttgtggaacccgcatactcagatggaggcttgttacagagactttgtgtgcgtggaaaatgcaaagcttggggatgtcaactag

SEQ ID NO: 78222 - protein, 291 aa, Arabidopsis thaliana
  peptide (1)..(291): Ceres Seq. ID no. 12639957
MAIVSVSNSFLTFNSPNQLRFSRRRFSAMASSTTGVRVAEGEGNLPKLVLTSPQNSEAEIYLFGGCITSWKVASGKDLLFVRPDAVFNKIKPISGGIPHCFPQFGPGLIQQHGFGRNMDWSVVDSQNADDNAAVTLELKDGPYSRAMWDFAFQALYKVIVGADSLSTELKITNTDDKPFSFSTALHTYFRASSAGASVRGLKGCKTLNKDPDPKNPIEGKEDRDAVTFPGFVDTVYLDAPNELQFDNGLGDKIIIKNTNWSDAVLWNPHTQMEACYRDFVCVENAKLGDVN

SEQ ID NO: 78223 - protein, 263 aa, Arabidopsis thaliana
  peptide (1)..(263): Ceres Seq. ID no. 12639958
MASSTTGVRVAEGEGNLPKLVLTSPQNSEAEIYLFGGCITSWKVASGKDLLFVRPDAVFNKIKPISGGIPHCFPQFGPGLIQQHGFGRNMDWSVVDSQNADDNAAVTLELKDGPYSRAMWDFAFQALYKVIVGADSLSTELKITNTDDKPFSFSTALHTYFRASSAGASVRGLKGCKTLNKDPDPKNPIEGKEDRDAVTFPGFVDTVYLDAPNELQFDNGLGDKIIIKNTNWSDAVLWNPHTQMEACYRDFVCVENAKLGDVN

SEQ ID NO: 78224 - protein, 174 aa, Arabidopsis thaliana
  peptide (1)..(174): Ceres Seq. ID no. 12639959
MDWSVVDSQNADDNAAVTLELKDGPYSRAMWDFAFQALYKVIVGADSLSTELKITNTDDKPFSFSTALHTYFRASSAGASVRGLKGCKTLNKDPDPKNPIEGKEDRDAVTFPGFVDTVYLDAPNELQFDNGLGDKIIIKNTNWSDAVLWNPHTQMEACYRDFVCVENAKLGDVN

SEQ ID NO: 78225 - DNA, 1830 bp, Arabidopsis thaliana
  misc_feature (1)..(1830): Ceres Seq. ID no. 12639968
  misc_feature (1)..(1830): Ortholog of  Ceres SEQ ID NO 12607856 as cited in SEQ ID NO 55419
atgggatttggagtaggtggtggaggtggtagaatgttggatttgaggattgtccaaaatcacaagcgttcaaagagtgccagctttccagaaaagaaaagagttgaaggagataaaacctcaaatagttctcatgaagcctctcaacgaatgaagctggacatgggacgttcaaatgaatcaaagcataatcaatatcattcaaacacggagacttcattgaagcaagagattactcacctcgagacaagattacaagatcagtttaaggttcgttgtgcattagagaaagccttaggttatcgaacagcatcttcttacgtactgactgaaacaaacgacattgccatgcctaagccagctactgatttaatcaaagacgttgcggtgctcgaaatggaagttatacatttggaacagtatcttctttcattatacagaaaagcctttgagcagcaaatctcttctgtatctccaaatttagagaacaagaagccaaaatctcctcctgttacaacccctagaaggcgtctagacttttctgaagatgatgataccccctcgaaaacagatcaacacacagttcctctgcttgatgataatcaaaatcaatcaaagaaaacagagattgctgcggttgaccgagaccagatggaccccagttttcgccgtagtcactctcaacgttcggcatttgggagtagaaaagcttctcccgaagattcttggggtaaagccagccgctcttgtcactcacagccactgtatgtgcagaatggagataacctaatcagtctagctgaacatcttggcacccgaatctcggatcatgttccagaaacacccaacaagttatctgaaggaatggtcaagtgcatgtcagaaatatactgcaagcttgcagagccaccttctgtgctacatcgtgggctttcatctccaaactcgtctttatcatcaagtgcattttcgccctctgaccaatacgatacatcgagccctggattcggaaacagctcctcttttgatgttcggctagataactctttccatgtagaaggagaaaaggacttcagtggaccttacagcagcattgttgaagtgctttgcatttacagagacgccaaaaaggccagtgaggtggaagatcttctgcaaaacttcaaattggaggaagtcgatccaaggaagttgaaacatgaagagaagctagcgttttggataaatgtgcacaatgcacttgtgatgcatgcgtttttagcttatgggattccacagaacaatgtgaagagagtcttacttctactcaaggctgcatataacattggtggacacacaattagcgccgaagcgatacaaagttcgattcttgggtgcaaaatgtctcatcctggacagtggcttagactactatttgcttcgaggaaattcaaagcaggggatgaaagattagcttatgcaatcgatcatcctgagcctctcctgcattttgcacttacttcaggcagccactccgatcccgcggttcgtgtatatacaccgaaaagaatccagcaagagcttgaaacgtcgaaagaagagtacataagaatgaacttaagcatacgcaagcagagaatcctattgccaaagcttgtggagacgtttgcaaaagactccggtttatgtccggcgggtttgacagagatggttaaccggagtataccggagtcttcaaggaaatgtgtaaagagatgtcaatctagtactagtaaaccacgaaagacaattgattggatccctcacagctttacatttagatatcttattcttagagaagctgccaaatga

SEQ ID NO: 78226 - protein, 609 aa, Arabidopsis thaliana
  peptide (1)..(609): Ceres Seq. ID no. 12639969
MGFGVGGGGGRMLDLRIVQNHKRSKSASFPEKKRVEGDKTSNSSHEASQRMKLDMGRSNESKHNQYHSNTETSLKQEITHLETRLQDQFKVRCALEKALGYRTASSYVLTETNDIAMPKPATDLIKDVAVLEMEVIHLEQYLLSLYRKAFEQQISSVSPNLENKKPKSPPVTTPRRRLDFSEDDDTPSKTDQHTVPLLDDNQNQSKKTEIAAVDRDQMDPSFRRSHSQRSAFGSRKASPEDSWGKASRSCHSQPLYVQNGDNLISLAEHLGTRISDHVPETPNKLSEGMVKCMSEIYCKLAEPPSVLHRGLSSPNSSLSSSAFSPSDQYDTSSPGFGNSSSFDVRLDNSFHVEGEKDFSGPYSSIVEVLCIYRDAKKASEVEDLLQNFKLEEVDPRKLKHEEKLAFWINVHNALVMHAFLAYGIPQNNVKRVLLLLKAAYNIGGHTISAEAIQSSILGCKMSHPGQWLRLLFASRKFKAGDERLAYAIDHPEPLLHFALTSGSHSDPAVRVYTPKRIQQELETSKEEYIRMNLSIRKQRILLPKLVETFAKDSGLCPAGLTEMVNRSIPESSRKCVKRCQSSTSKPRKTIDWIPHSFTFRYLILREAAK

SEQ ID NO: 78227 - protein, 598 aa, Arabidopsis thaliana
  peptide (1)..(598): Ceres Seq. ID no. 12639970
MLDLRIVQNHKRSKSASFPEKKRVEGDKTSNSSHEASQRMKLDMGRSNESKHNQYHSNTETSLKQEITHLETRLQDQFKVRCALEKALGYRTASSYVLTETNDIAMPKPATDLIKDVAVLEMEVIHLEQYLLSLYRKAFEQQISSVSPNLENKKPKSPPVTTPRRRLDFSEDDDTPSKTDQHTVPLLDDNQNQSKKTEIAAVDRDQMDPSFRRSHSQRSAFGSRKASPEDSWGKASRSCHSQPLYVQNGDNLISLAEHLGTRISDHVPETPNKLSEGMVKCMSEIYCKLAEPPSVLHRGLSSPNSSLSSSAFSPSDQYDTSSPGFGNSSSFDVRLDNSFHVEGEKDFSGPYSSIVEVLCIYRDAKKASEVEDLLQNFKLEEVDPRKLKHEEKLAFWINVHNALVMHAFLAYGIPQNNVKRVLLLLKAAYNIGGHTISAEAIQSSILGCKMSHPGQWLRLLFASRKFKAGDERLAYAIDHPEPLLHFALTSGSHSDPAVRVYTPKRIQQELETSKEEYIRMNLSIRKQRILLPKLVETFAKDSGLCPAGLTEMVNRSIPESSRKCVKRCQSSTSKPRKTIDWIPHSFTFRYLILREAAK

SEQ ID NO: 78228 - protein, 559 aa, Arabidopsis thaliana
  peptide (1)..(559): Ceres Seq. ID no. 12639971
MKLDMGRSNESKHNQYHSNTETSLKQEITHLETRLQDQFKVRCALEKALGYRTASSYVLTETNDIAMPKPATDLIKDVAVLEMEVIHLEQYLLSLYRKAFEQQISSVSPNLENKKPKSPPVTTPRRRLDFSEDDDTPSKTDQHTVPLLDDNQNQSKKTEIAAVDRDQMDPSFRRSHSQRSAFGSRKASPEDSWGKASRSCHSQPLYVQNGDNLISLAEHLGTRISDHVPETPNKLSEGMVKCMSEIYCKLAEPPSVLHRGLSSPNSSLSSSAFSPSDQYDTSSPGFGNSSSFDVRLDNSFHVEGEKDFSGPYSSIVEVLCIYRDAKKASEVEDLLQNFKLEEVDPRKLKHEEKLAFWINVHNALVMHAFLAYGIPQNNVKRVLLLLKAAYNIGGHTISAEAIQSSILGCKMSHPGQWLRLLFASRKFKAGDERLAYAIDHPEPLLHFALTSGSHSDPAVRVYTPKRIQQELETSKEEYIRMNLSIRKQRILLPKLVETFAKDSGLCPAGLTEMVNRSIPESSRKCVKRCQSSTSKPRKTIDWIPHSFTFRYLILREAAK

SEQ ID NO: 78229 - DNA, 1200 bp, Arabidopsis thaliana
  misc_feature (1)..(1200): Ceres Seq. ID no. 12639996
  misc_feature (1)..(1200): Ortholog of  Ceres SEQ ID NO 14315915 as cited in SEQ ID NO 57583
atgtataaccttagtaggatcatttatcgtttctcctcggtttcacttaaccctagcacgagagcatctgggtttctacttgagaacgcttcatcaaaaatcttacaatctgctacgaatcgagcattttctgcaaaatcaggatctgatggagttggaggcgatgataacggctggaatatttcaacaggaggatcatttggtggtacaggatctgctgatcttgattgggacaataaatctatgtggtctactggtttaactaaggagcatttcgatggtgtctccgttggtcgtcagaagaacgcggcgaatccttcttctgataacaccccttctgattcgggtgatgtaatgagcaaattgggtccaaaggaggtagctttggttaatgaaatgaatgagtatgatgatttgcttaaagagattgagcaagataataggcaaggcagggcttttgttgatgggattaaacagagaatgatggagatcagtgtgttgttgaagcaagttaaagagccaggtgctagagggtcttatcttaaggactctgagaagactgagatgtatagattgcacaaagagaatcctgaggtgtatactattgagaggcttgctaaggattataggattatgaggcagcgtgttcacgccattctttttcttaaagaagatgaagaagaagaggagaggaagcttggtcgtcctttggatgattctgttgaccgtttgcttgatgagtaccctgagttcttcatttcgcatgaccgggaatttcatgtggcctcacttaattacaaacccgacttcaaggtcatgccagaaggatgggatggtacaatcaaagatatggatgaagtccattatgagatctcaaagaaagaggatgacatgctttacgaagaatttgtccgaaggtttgagttcaacaaaatgaaatggagaggagaagtgatgtgccacaagtacagcaggagacgttcatcagagggatggaaaatcacggttgagaaattgggtgctaagggcaaacgtggagccggaggtggctggaagtttatgagtcttccagatggatcaagccgaccactcaacgaaatggagaaggtctatgttaagcgtgaaaccccactacgtcgccgatgggaatgttatgtctcctgtgggttcttgtttgattctgattttgcttctgtttga

SEQ ID NO: 78230 - protein, 399 aa, Arabidopsis thaliana
  peptide (1)..(399): Ceres Seq. ID no. 12639997
MYNLSRIIYRFSSVSLNPSTRASGFLLENASSKILQSATNRAFSAKSGSDGVGGDDNGWNISTGGSFGGTGSADLDWDNKSMWSTGLTKEHFDGVSVGRQKNAANPSSDNTPSDSGDVMSKLGPKEVALVNEMNEYDDLLKEIEQDNRQGRAFVDGIKQRMMEISVLLKQVKEPGARGSYLKDSEKTEMYRLHKENPEVYTIERLAKDYRIMRQRVHAILFLKEDEEEEERKLGRPLDDSVDRLLDEYPEFFISHDREFHVASLNYKPDFKVMPEGWDGTIKDMDEVHYEISKKEDDMLYEEFVRRFEFNKMKWRGEVMCHKYSRRRSSEGWKITVEKLGAKGKRGAGGGWKFMSLPDGSSRPLNEMEKVYVKRETPLRRRWECYVSCGFLFDSDFASV

SEQ ID NO: 78231 - protein, 318 aa, Arabidopsis thaliana
  peptide (1)..(318): Ceres Seq. ID no. 12639998
MWSTGLTKEHFDGVSVGRQKNAANPSSDNTPSDSGDVMSKLGPKEVALVNEMNEYDDLLKEIEQDNRQGRAFVDGIKQRMMEISVLLKQVKEPGARGSYLKDSEKTEMYRLHKENPEVYTIERLAKDYRIMRQRVHAILFLKEDEEEEERKLGRPLDDSVDRLLDEYPEFFISHDREFHVASLNYKPDFKVMPEGWDGTIKDMDEVHYEISKKEDDMLYEEFVRRFEFNKMKWRGEVMCHKYSRRRSSEGWKITVEKLGAKGKRGAGGGWKFMSLPDGSSRPLNEMEKVYVKRETPLRRRWECYVSCGFLFDSDFASV

SEQ ID NO: 78232 - protein, 281 aa, Arabidopsis thaliana
  peptide (1)..(281): Ceres Seq. ID no. 12639999
MSKLGPKEVALVNEMNEYDDLLKEIEQDNRQGRAFVDGIKQRMMEISVLLKQVKEPGARGSYLKDSEKTEMYRLHKENPEVYTIERLAKDYRIMRQRVHAILFLKEDEEEEERKLGRPLDDSVDRLLDEYPEFFISHDREFHVASLNYKPDFKVMPEGWDGTIKDMDEVHYEISKKEDDMLYEEFVRRFEFNKMKWRGEVMCHKYSRRRSSEGWKITVEKLGAKGKRGAGGGWKFMSLPDGSSRPLNEMEKVYVKRETPLRRRWECYVSCGFLFDSDFASV

SEQ ID NO: 78233 - DNA, 609 bp, Arabidopsis thaliana
  misc_feature (1)..(609): Ceres Seq. ID no. 12640004
  misc_feature (1)..(609): Ortholog of  Ceres SEQ ID NO 12474478 as cited in SEQ ID NO 96
  misc_feature (1)..(609): Ortholog of  Ceres SEQ ID NO 14309053 as cited in SEQ ID NO 0
atggcaaaacaatatctctttgtactcctctcaatctcctatctcttatcactggagctcacggcggccaccgcagcctcacagaccggagcttccaaaaaagccataaacttcatccaatcttcttgcaaaaccaccacataccctgccttatgtgtccactcactctccgtctacgcaaacgacatccaaacaagccctaaacgtttagctgagaccgctatagccgtgacactaagccgagcccaatccacgaagctcttcgtctcgcgtctaacacgtatgaagggtcttaagaagcgcgaggtcgaagccatcaaagattgcgtcgaggagatgaacgataccgttgaccgtttgaccaaatctgttcaagaactgaagttgtgtgggagtgccaaagatcaagaccagtttgcgtaccacatgagtaatgctcagacttggactagtgcggctttgactgacgagaacacttgctccgatgggttctcgggtcgggttatggatgggaggatcaagaactcggttcgggctagaatcatgaacgtgggacatgaaaccagcaacgctttgtccttgattaatgcctttgctaaaacttactaa

SEQ ID NO: 78234 - protein, 202 aa, Arabidopsis thaliana; identical to SEQ ID NO: 21361
  peptide (1)..(202): Ceres Seq. ID no. 12640005

SEQ ID NO: 78235 - protein, 108 aa, Arabidopsis thaliana
  peptide (1)..(108): Ceres Seq. ID no. 12640006
MKGLKKREVEAIKDCVEEMNDTVDRLTKSVQELKLCGSAKDQDQFAYHMSNAQTWTSAALTDENTCSDGFSGRVMDGRIKNSVRARIMNVGHETSNALSLINAFAKTY

SEQ ID NO: 78236 - DNA, 1464 bp, Arabidopsis thaliana
  misc_feature (1)..(1464): Ceres Seq. ID no. 12640026
  misc_feature (1)..(1464): Ortholog of  Ceres SEQ ID NO 14307670 as cited in SEQ ID NO 59594
atggagaaatcaatggagaaaagcgtgagctctgctgcttctggtaattcaataaactcgaagctgaggtatcctctcagatcggctcttagatccaaggaagggaagcctcctgttcctgatttctctgcttcttctatgcccagaagggcacgagttgtatctgctgttagtcagagtacaacagttcttgatttgtctgggaagaagagtgttgatcgaaccaagctaccaccaagaagactttcgattccaaacaagcccacaagcaattcttctgttaaatcagtgagcagcagcgtcacttctctttctgaagtcaagccaaagagatcacgcattgttcctagaagcttcaatgaaacaacaacacctgtctctagtaatctcagatcatcagtgactcgaaagaaagttgaagacttgtcttcctctacttattggctgactcatatcaagctagctgaatccgtggcgaaacattcgatctctctcggtttctttaaacttgctcttcatgcagggtgtgagccacttgacaagatgaaagaagagttgaaattgtatgctcgtcgcaataacatggatgggcttgctgatgctatgaaggaactttcggaactgtacaatatctctgaagaatccaatcaggtgcaggtctcggagactagttctgttgtagctgaagaaacagctatgtctctgaacaacgataatgatgtccagagttcattctccactcctggaaattcgaacatcacatcagagatcacgaaagacgatgctttgcaagattcaaccgtcacaaaaacaactaaggaaaaagatgctttgcaagattcatctgtcacagaaacaactaaggaaaaagatgctttgcaagattcatctgtcacagaaacatctaaggaagaaggtgctttgcaagattcatctgtcacagaaacaactaaggaagaagatgctttgcaagattcatctgtcacagaaacaactaaggaagagcaggcgttggaaactgtaacacaaggaagaactagaaagtctctggaggtaatcaatgtgaaccaagagaatgattcagaggttgttcaggaatccgaagaagggctccgtccatcagcagatggtgttcagatcgtgactgttgttaaaccttcagacaagaaacgtgccagaaaggagactgttcctaagaacaacctgccggtgaggacaaagaaatcactagcaaccaactctgctaattcaaaaacagttcaagtaaacaaggatgataagtctcagaagaagtctgagaggatcactaaacccaggactaagagagttcaagaagagtcaaagaagtcaattaagaaatctactgctaaagaaggtgaagttaaatctctgaagcaaacagagaaaatggagaacaaagaaaacacggttgttgttggtgcaggagaagacatccaggtttaa

SEQ ID NO: 78237 - protein, 487 aa, Arabidopsis thaliana
  peptide (1)..(487): Ceres Seq. ID no. 12640027
MEKSMEKSVSSAASGNSINSKLRYPLRSALRSKEGKPPVPDFSASSMPRRARVVSAVSQSTTVLDLSGKKSVDRTKLPPRRLSIPNKPTSNSSVKSVSSSVTSLSEVKPKRSRIVPRSFNETTTPVSSNLRSSVTRKKVEDLSSSTYWLTHIKLAESVAKHSISLGFFKLALHAGCEPLDKMKEELKLYARRNNMDGLADAMKELSELYNISEESNQVQVSETSSVVAEETAMSLNNDNDVQSSFSTPGNSNITSEITKDDALQDSTVTKTTKEKDALQDSSVTETTKEKDALQDSSVTETSKEEGALQDSSVTETTKEEDALQDSSVTETTKEEQALETVTQGRTRKSLEVINVNQENDSEVVQESEEGLRPSADGVQIVTVVKPSDKKRARKETVPKNNLPVRTKKSLATNSANSKTVQVNKDDKSQKKSERITKPRTKRVQEESKKSIKKSTAKEGEVKSLKQTEKMENKENTVVVGAGEDIQV

SEQ ID NO: 78238 - protein, 483 aa, Arabidopsis thaliana
  peptide (1)..(483): Ceres Seq. ID no. 12640028
MEKSVSSAASGNSINSKLRYPLRSALRSKEGKPPVPDFSASSMPRRARVVSAVSQSTTVLDLSGKKSVDRTKLPPRRLSIPNKPTSNSSVKSVSSSVTSLSEVKPKRSRIVPRSFNETTTPVSSNLRSSVTRKKVEDLSSSTYWLTHIKLAESVAKHSISLGFFKLALHAGCEPLDKMKEELKLYARRNNMDGLADAMKELSELYNISEESNQVQVSETSSVVAEETAMSLNNDNDVQSSFSTPGNSNITSEITKDDALQDSTVTKTTKEKDALQDSSVTETTKEKDALQDSSVTETSKEEGALQDSSVTETTKEEDALQDSSVTETTKEEQALETVTQGRTRKSLEVINVNQENDSEVVQESEEGLRPSADGVQIVTVVKPSDKKRARKETVPKNNLPVRTKKSLATNSANSKTVQVNKDDKSQKKSERITKPRTKRVQEESKKSIKKSTAKEGEVKSLKQTEKMENKENTVVVGAGEDIQV

SEQ ID NO: 78239 - protein, 441 aa, Arabidopsis thaliana
  peptide (1)..(441): Ceres Seq. ID no. 12640029
MPRRARVVSAVSQSTTVLDLSGKKSVDRTKLPPRRLSIPNKPTSNSSVKSVSSSVTSLSEVKPKRSRIVPRSFNETTTPVSSNLRSSVTRKKVEDLSSSTYWLTHIKLAESVAKHSISLGFFKLALHAGCEPLDKMKEELKLYARRNNMDGLADAMKELSELYNISEESNQVQVSETSSVVAEETAMSLNNDNDVQSSFSTPGNSNITSEITKDDALQDSTVTKTTKEKDALQDSSVTETTKEKDALQDSSVTETSKEEGALQDSSVTETTKEEDALQDSSVTETTKEEQALETVTQGRTRKSLEVINVNQENDSEVVQESEEGLRPSADGVQIVTVVKPSDKKRARKETVPKNNLPVRTKKSLATNSANSKTVQVNKDDKSQKKSERITKPRTKRVQEESKKSIKKSTAKEGEVKSLKQTEKMENKENTVVVGAGEDIQV

SEQ ID NO: 78240 - DNA, 1677 bp, Arabidopsis thaliana
  misc_feature (1)..(1677): Ceres Seq. ID no. 12640052
  misc_feature (1)..(1677): Ortholog of  Ceres SEQ ID NO 12613725 as cited in SEQ ID NO 68196
atggatgaagcaaacaggttaagcgcgtggaatggttacgtagactggcgaagtagacctgcgttgcgtggccgccatggcggtatgcttgctgcctcgttcgtcttggttgtggaagtgttggagaaccttgcgtttttagcaaacgcgagcaacctagtgctgtatttgtcaacaaagatgggattttcgccgtccggagccgcaaatgccgtaaccgcttttatgggaacggcatttttcttggcccttctcggagggtttttggcagacgccttcttcactactttccatatctatttagtcagcgccgccatagaattcttgggcttgatggtactgacggtccaagcccacgagcactctaccgagccatggtctcgtgtatttctatttgtgggtctatatttagtagctcttggtgtcggaggaataaaaggctcgttgccaccgcacggagcggaacagttcgacgaagaaacatcgagtgggaggagacaaagatctttcttctttaactacttcatatttagcctctcgtgcggtgccttgatagccgtcacggtcgtggtctggctcgaagacaacaaaggctggtcttatggcttcggtgtctccacagccgcgatcctgatctcggtcccggttttcttggccggttctcgcgtttatcgcctcaaggttcctagtggaagtccaatcacgactctgttcaaagtgttaaccgctgctttatacgctaaatataagaaaagaagaacttcaagaattgttgtaacgtgtcacacaagaaatgattgtgatgacagcgtaaccaaacaaaactgtgacggagatgatggatttctcggatctttcctaggtgaagttgtgagagagcgtgaatcactaccacgtccactccgttgtacggaagagcaagtcaaagatgtgaagatagtcatcaagatcctacctattttcatgtctaccattatgcttaactgttgtctagctcagctctcgacgttttccgttcaacaagcttccacaatgaacacaaagctcgggtcctttactgtcccacccgcggcattaccagtttttccagtggtcttcatgatgatcttagctccgacctataaccacctcctcctccctctagcgagaaaatcaacaaaaaccgaaaccggcataacccaccttcaacgcatcggaacagggctagtcctttccatagtcgcaatggcggtggcagccttagtggaaacaaaacgcaagcacgtcgttgttagttgctgctcaaacaacaactcatcttcttattcttcttcgccgcttcctataacgtttctttgggtggctattcaatatgtgtttctcggatcagccgatctattcactctagccggtatgatggagtttttcttcaccgaagctccttctaccatgcgttcccttgcaacctcgctctcatgggcgtctcttgcgatgggatattactttagctctgttctcgtctcggctgttaatttcgtaacaggcttaaaccatcacaatccatggcttttgggggagaatctaaatcagtaccatctcgagagattctactggctcatgtgtgtgcttagtgggattaatttcttgcattatctcttttgggctagtcgttatgtgtaccggtcgaaccaagggtaa

SEQ ID NO: 78241 - protein, 558 aa, Arabidopsis thaliana
  peptide (1)..(558): Ceres Seq. ID no. 12640053
MDEANRLSAWNGYVDWRSRPALRGRHGGMLAASFVLVVEVLENLAFLANASNLVLYLSTKMGFSPSGAANAVTAFMGTAFFLALLGGFLADAFFTTFHIYLVSAAIEFLGLMVLTVQAHEHSTEPWSRVFLFVGLYLVALGVGGIKGSLPPHGAEQFDEETSSGRRQRSFFFNYFIFSLSCGALIAVTVVVWLEDNKGWSYGFGVSTAAILISVPVFLAGSRVYRLKVPSGSPITTLFKVLTAALYAKYKKRRTSRIVVTCHTRNDCDDSVTKQNCDGDDGFLGSFLGEVVRERESLPRPLRCTEEQVKDVKIVIKILPIFMSTIMLNCCLAQLSTFSVQQASTMNTKLGSFTVPPAALPVFPVVFMMILAPTYNHLLLPLARKSTKTETGITHLQRIGTGLVLSIVAMAVAALVETKRKHVVVSCCSNNNSSSYSSSPLPITFLWVAIQYVFLGSADLFTLAGMMEFFFTEAPSTMRSLATSLSWASLAMGYYFSSVLVSAVNFVTGLNHHNPWLLGENLNQYHLERFYWLMCVLSGINFLHYLFWASRYVYRSNQG

SEQ ID NO: 78242 - protein, 530 aa, Arabidopsis thaliana
  peptide (1)..(530): Ceres Seq. ID no. 12640054
MLAASFVLVVEVLENLAFLANASNLVLYLSTKMGFSPSGAANAVTAFMGTAFFLALLGGFLADAFFTTFHIYLVSAAIEFLGLMVLTVQAHEHSTEPWSRVFLFVGLYLVALGVGGIKGSLPPHGAEQFDEETSSGRRQRSFFFNYFIFSLSCGALIAVTVVVWLEDNKGWSYGFGVSTAAILISVPVFLAGSRVYRLKVPSGSPITTLFKVLTAALYAKYKKRRTSRIVVTCHTRNDCDDSVTKQNCDGDDGFLGSFLGEVVRERESLPRPLRCTEEQVKDVKIVIKILPIFMSTIMLNCCLAQLSTFSVQQASTMNTKLGSFTVPPAALPVFPVVFMMILAPTYNHLLLPLARKSTKTETGITHLQRIGTGLVLSIVAMAVAALVETKRKHVVVSCCSNNNSSSYSSSPLPITFLWVAIQYVFLGSADLFTLAGMMEFFFTEAPSTMRSLATSLSWASLAMGYYFSSVLVSAVNFVTGLNHHNPWLLGENLNQYHLERFYWLMCVLSGINFLHYLFWASRYVYRSNQG

SEQ ID NO: 78243 - protein, 498 aa, Arabidopsis thaliana
  peptide (1)..(498): Ceres Seq. ID no. 12640055
MGFSPSGAANAVTAFMGTAFFLALLGGFLADAFFTTFHIYLVSAAIEFLGLMVLTVQAHEHSTEPWSRVFLFVGLYLVALGVGGIKGSLPPHGAEQFDEETSSGRRQRSFFFNYFIFSLSCGALIAVTVVVWLEDNKGWSYGFGVSTAAILISVPVFLAGSRVYRLKVPSGSPITTLFKVLTAALYAKYKKRRTSRIVVTCHTRNDCDDSVTKQNCDGDDGFLGSFLGEVVRERESLPRPLRCTEEQVKDVKIVIKILPIFMSTIMLNCCLAQLSTFSVQQASTMNTKLGSFTVPPAALPVFPVVFMMILAPTYNHLLLPLARKSTKTETGITHLQRIGTGLVLSIVAMAVAALVETKRKHVVVSCCSNNNSSSYSSSPLPITFLWVAIQYVFLGSADLFTLAGMMEFFFTEAPSTMRSLATSLSWASLAMGYYFSSVLVSAVNFVTGLNHHNPWLLGENLNQYHLERFYWLMCVLSGINFLHYLFWASRYVYRSNQG

SEQ ID NO: 78244 - DNA, 1344 bp, Arabidopsis thaliana
  misc_feature (1)..(1344): Ceres Seq. ID no. 12640097
  misc_feature (1)..(1344): Ortholog of  Ceres SEQ ID NO 13596807 as cited in SEQ ID NO 62275
atggcggacaatcgaagaagaagaagcctattcgacttcctacttttctccgtgtttctaggactcgcatgtctctgtttatctccgattccggcaacagctcaacgtcggaaactcaggttcagtgttaacggcgagttcaagatactacaagtggcggatatgcattttgctaacggcgctaagacgcagtgtcaaaatgttcttcctagccagagagctcattgctcagacctcaacaccaccatcttcatgtcgcgagtcatcgccgccgagaagcctgatcttatcgtcttcaccggtgataacatatttgggtttgatgtaaaagacgctttgaaatccataaacgctgcgtttgctccagcgattgcgtctaaaatcccatgggttgctattttgggaaaccatgaccaagaatctacatttacaagacaacaagttatgaatcacattgtgaagcttcccaacactttgtctcaagtgaatcctcctgaagctgctcattacattgatggttttggtaattacaatctccaaatccatggagctgctgattcgaaactacagaacaaatctgttcttaatctttattttctcgatagtggagattattctagtgttccttacatggaaggttatgattggatcaaaacttctcagcagttttggttcgaccgcacttcaaaacgtctcaagagggagtacaacgcaaagcctaatcctcaagaaggtatagctccaggactagcttacttccacattccattaccggagtttttgagttttgactcaaagaacgctacaaaaggagtgagacaagaaggtacatccgcggcttctacaaactcgggtttcttcacaacattgatagctagaggagatgtgaaatctgtgtttgtgggtcacgaccatgtcaacgacttctgcggtgaacttaaaggtttgaatctatgttatggtggtggatttgggtatcatgcttatggtaaagctggatgggaaagaagagcgagagttgtggttgttgatttgaataagaagagaaaaggaaagtggggagctgtgaaatcgattaagacatggaagaggcttgatgataagcatctctctgttattgactctcaagttctttggaacaattctgcaaacaaattagttgttcgttgatattgattccatgtgttgttgttttgatctgtctactaaatgttctgttttagttggttttgggtttcatagaaactgtttaagtgtttatcattgagttagttttaaactccatttgatgtaattttgtttggtttaagactttaaggcaagaaagtgaaaaactaaactttc

SEQ ID NO: 78245 - protein, 389 aa, Arabidopsis thaliana
  peptide (1)..(389): Ceres Seq. ID no. 12640098
MADNRRRRSLFDFLLFSVFLGLACLCLSPIPATAQRRKLRFSVNGEFKILQVADMHFANGAKTQCQNVLPSQRAHCSDLNTTIFMSRVIAAEKPDLIVFTGDNIFGFDVKDALKSINAAFAPAIASKIPWVAILGNHDQESTFTRQQVMNHIVKLPNTLSQVNPPEAAHYIDGFGNYNLQIHGAADSKLQNKSVLNLYFLDSGDYSSVPYMEGYDWIKTSQQFWFDRTSKRLKREYNAKPNPQEGIAPGLAYFHIPLPEFLSFDSKNATKGVRQEGTSAASTNSGFFTTLIARGDVKSVFVGHDHVNDFCGELKGLNLCYGGGFGYHAYGKAGWERRARVVVVDLNKKRKGKWGAVKSIKTWKRLDDKHLSVIDSQVLWNNSANKLVVR

SEQ ID NO: 78246 - protein, 335 aa, Arabidopsis thaliana; identical to SEQ ID NO: 35819
  peptide (1)..(335): Ceres Seq. ID no. 12640099

SEQ ID NO: 78247 - protein, 305 aa, Arabidopsis thaliana; identical to SEQ ID NO: 43290
  peptide (1)..(305): Ceres Seq. ID no. 12640100

SEQ ID NO: 78248 - DNA, 925 bp, Arabidopsis thaliana
  misc_feature (1)..(925): Ceres Seq. ID no. 12640127
  misc_feature (1)..(925): Ortholog of  Ceres SEQ ID NO 15225572 as cited in SEQ ID NO 61651
aagacaaagcgcagaaaatggtgggagcgactgtagttagtaaatggactcccctatgtgtggcttcgccgccggagagaaactcggcaagtctcaatccacactgttctccagccagggttaattttagaacagcgttggccgcatttcgtcctcagttccgtcttttctctcgcaattccgcgtctcgccgccgtcttcgcgcttccagctccgccgaatcgggaatcttccttcctcaccttgtagcttctatggaggacgttgaggagacttacattatggtgaaacctgatggcatacaacgaggccttgtaggagaaatcatttctcgctttgagaaaaaggggtttaaacttattgggctcaagatgtttcagtgcccaaaagaattggctgaggagcattataaggatcttagtgctaaatcattctttcctaacctgattgagtacatcacttcaggtccagttgtgtgtatggcttgggaaggtgttggtgttgttgcttcagccaggaagctaatagggaaaacagatccgcttcaagctgaacctggtactataagaggagatcttgctgtgcaaaccggaaggaacattgtgcatggtagtgacagccctgaaaacggcaagcgtgagattggtctgtggttcaaagagggcgagctatgcaagtgggattcggctctagctacatggctaagggagtgatccttgagaagacagagtcaattataatggtgtccttacttgttttcttgttaccgatgatgagctttggtgttttgttcctgattttgggcggcaatataatataactgccaatctatggcttgattcttctcatatctgtgatcacttgtcatgtaatcaaaactagttacagattcatctgcatttggttctacgttacagacacctcc

SEQ ID NO: 78249 - protein, 236 aa, Arabidopsis thaliana
  peptide (1)..(236): Ceres Seq. ID no. 12640128
DKAQKMVGATVVSKWTPLCVASPPERNSASLNPHCSPARVNFRTALAAFRPQFRLFSRNSASRRRLRASSSAESGIFLPHLVASMEDVEETYIMVKPDGIQRGLVGEIISRFEKKGFKLIGLKMFQCPKELAEEHYKDLSAKSFFPNLIEYITSGPVVCMAWEGVGVVASARKLIGKTDPLQAEPGTIRGDLAVQTGRNIVHGSDSPENGKREIGLWFKEGELCKWDSALATWLRE

SEQ ID NO: 78250 - protein, 231 aa, Arabidopsis thaliana; identical to SEQ ID NO: 25317
  peptide (1)..(231): Ceres Seq. ID no. 12640129

SEQ ID NO: 78251 - protein, 152 aa, Arabidopsis thaliana; identical to SEQ ID NO: 25318
  peptide (1)..(152): Ceres Seq. ID no. 12640130

SEQ ID NO: 78252 - DNA, 579 bp, Arabidopsis thaliana
  misc_feature (1)..(579): Ceres Seq. ID no. 12640157
  misc_feature (1)..(579): Ortholog of  Ceres SEQ ID NO 13663517 as cited in SEQ ID NO 66850
atgttctggacataccagagacaagagatcgaacaggtaaacgatttcaaaaaccatcagctccctctagctcgtatcaaaaaaatcatgaaagctgatgaagatgtgcgtatgatctccgccgaagcaccgattctcttcgcgaaagcttgtgagcttttcattctcgaacttacgattagatcttggcttcacgctgaagagaacaaacgtcgtacgcttcagaaaaacgatatcgctgctgcgattactagaaccgatatcttcgatttccttgttgatattgttcctagggaagagatcaaggaagaggaagatgcagcatcggctcttggtggaggaggtatggttgctcccgccgcgagcggtgttccttattattatccaccgatgggacaaccggcggttcctggagggatgatgattggaagaccggcgatggatcctagcggtgtttatgctcagcctccttctcaggcatggcaaagcgtttggcagaattcagctggtggtggtgatgatgtgtcttatggaagtggaggaagtagcggccatggtaatctcgatagccaagggtaa

SEQ ID NO: 78253 - protein, 192 aa, Arabidopsis thaliana
  peptide (1)..(192): Ceres Seq. ID no. 12640158
MFWTYQRQEIEQVNDFKNHQLPLARIKKIMKADEDVRMISAEAPILFAKACELFILELTIRSWLHAEENKRRTLQKNDIAAAITRTDIFDFLVDIVPREEIKEEEDAASALGGGGMVAPAASGVPYYYPPMGQPAVPGGMMIGRPAMDPSGVYAQPPSQAWQSVWQNSAGGGDDVSYGSGGSSGHGNLDSQG

SEQ ID NO: 78254 - protein, 163 aa, Arabidopsis thaliana
  peptide (1)..(163): Ceres Seq. ID no. 12640159
MKADEDVRMISAEAPILFAKACELFILELTIRSWLHAEENKRRTLQKNDIAAAITRTDIFDFLVDIVPREEIKEEEDAASALGGGGMVAPAASGVPYYYPPMGQPAVPGGMMIGRPAMDPSGVYAQPPSQAWQSVWQNSAGGGDDVSYGSGGSSGHGNLDSQG

SEQ ID NO: 78255 - protein, 155 aa, Arabidopsis thaliana
  peptide (1)..(155): Ceres Seq. ID no. 12640160
MISAEAPILFAKACELFILELTIRSWLHAEENKRRTLQKNDIAAAITRTDIFDFLVDIVPREEIKEEEDAASALGGGGMVAPAASGVPYYYPPMGQPAVPGGMMIGRPAMDPSGVYAQPPSQAWQSVWQNSAGGGDDVSYGSGGSSGHGNLDSQG

SEQ ID NO: 78256 - DNA, 1117 bp, Arabidopsis thaliana
  misc_feature (1)..(1117): Ceres Seq. ID no. 12640179
  misc_feature (1)..(1117): Ortholog of  Ceres SEQ ID NO 12636774 as cited in SEQ ID NO 372
  misc_feature (1)..(1117): Ortholog of  Ceres SEQ ID NO 13582350 as cited in SEQ ID NO 56734
  misc_feature (1)..(1117): Ortholog of  Ceres SEQ ID NO 13597295 as cited in SEQ ID NO 63743
  misc_feature (1)..(1117): Ortholog of  Ceres SEQ ID NO 12617090 as cited in SEQ ID NO 64005
  misc_feature (1)..(1117): Ortholog of  Ceres SEQ ID NO 13597439 as cited in SEQ ID NO 64081
  misc_feature (1)..(1117): Ortholog of  Ceres SEQ ID NO 13597233 as cited in SEQ ID NO 64370
  misc_feature (1)..(1117): Ortholog of  Ceres SEQ ID NO 13599438 as cited in SEQ ID NO 0
aggaacgagtgaaactgaaaaccatggagatggagaaaaaccaacacatttcttcgctggacatccccgttattgatctaagtaatcccgatgaagagcttgtggcaagtgcggtggtcaaagcgagccaagagtggggaatatttcaggtggttaaccacggaatcccgaccgagctgatactgcggttgctacaagtgggaatggagtttttcgagctaccggagacagagaaggaagccgtagcgaagccagaagactccttggacatagaaggatacagaaccaagtaccagaaagatctagaaggtagaaacgcatgggtggatcatctctttcaccgcatctggccaccgtctagagtcaatcacaaattctggcctaagaatcctccagaatacattgaagtgaatgaagagtacgcaagtcacataaagaagctatcggagaaaatcatggaatggttatcagaaggactaggtttaaggcatgaggcgttgaaggaaggtctaggcggcgaaacgattgagtatctaatgaaaatcaattactatccgccgtgtccagatccggagttagtcgtgggagctcctgatcacactgatgtcaatggaatcacactcctagtcgctaatgaagctttagggcttcaagcattcaaagataaccaatggatcgacgcggagtataccacttccgggatcatcgtcatcatcggcgatcaattcttgagaatgagcaatgggaagtataagagtgtggagcatagggcgaagatggataaggagaagacgagaatctcgtggccggtttttgtggaatctagccttgatcaagtcttcggacctttgccggagctaattaccggtgatgagaacgttcccaagtttaagccttatgtctacaaagactacaaatttcgtaagcttaagaagcttcttctcgactgagaaaatctcataataacccataaacagaaaagagatcatgaataaaaaaaatatttgtttggtttgcttctgctttaattaataagttttatctatttatcaaattacagcattgtttgtatggtgcatgtacgtattttagtattaatctatttggattgtaacgt

SEQ ID NO: 78257 - protein, 315 aa, Arabidopsis thaliana
  peptide (1)..(315): Ceres Seq. ID no. 12640180
ERVKLKTMEMEKNQHISSLDIPVIDLSNPDEELVASAVVKASQEWGIFQVVNHGIPTELILRLLQVGMEFFELPETEKEAVAKPEDSLDIEGYRTKYQKDLEGRNAWVDHLFHRIWPPSRVNHKFWPKNPPEYIEVNEEYASHIKKLSEKIMEWLSEGLGLRHEALKEGLGGETIEYLMKINYYPPCPDPELVVGAPDHTDVNGITLLVANEALGLQAFKDNQWIDAEYTTSGIIVIIGDQFLRMSNGKYKSVEHRAKMDKEKTRISWPVFVESSLDQVFGPLPELITGDENVPKFKPYVYKDYKFRKLKKLLLD

SEQ ID NO: 78258 - protein, 308 aa, Arabidopsis thaliana
  peptide (1)..(308): Ceres Seq. ID no. 12640181
MEMEKNQHISSLDIPVIDLSNPDEELVASAVVKASQEWGIFQVVNHGIPTELILRLLQVGMEFFELPETEKEAVAKPEDSLDIEGYRTKYQKDLEGRNAWVDHLFHRIWPPSRVNHKFWPKNPPEYIEVNEEYASHIKKLSEKIMEWLSEGLGLRHEALKEGLGGETIEYLMKINYYPPCPDPELVVGAPDHTDVNGITLLVANEALGLQAFKDNQWIDAEYTTSGIIVIIGDQFLRMSNGKYKSVEHRAKMDKEKTRISWPVFVESSLDQVFGPLPELITGDENVPKFKPYVYKDYKFRKLKKLLLD

SEQ ID NO: 78259 - protein, 306 aa, Arabidopsis thaliana
  peptide (1)..(306): Ceres Seq. ID no. 12640182
MEKNQHISSLDIPVIDLSNPDEELVASAVVKASQEWGIFQVVNHGIPTELILRLLQVGMEFFELPETEKEAVAKPEDSLDIEGYRTKYQKDLEGRNAWVDHLFHRIWPPSRVNHKFWPKNPPEYIEVNEEYASHIKKLSEKIMEWLSEGLGLRHEALKEGLGGETIEYLMKINYYPPCPDPELVVGAPDHTDVNGITLLVANEALGLQAFKDNQWIDAEYTTSGIIVIIGDQFLRMSNGKYKSVEHRAKMDKEKTRISWPVFVESSLDQVFGPLPELITGDENVPKFKPYVYKDYKFRKLKKLLLD

SEQ ID NO: 78260 - DNA, 1354 bp, Arabidopsis thaliana
  misc_feature (1)..(1354): Ceres Seq. ID no. 12640191
  misc_feature (1)..(1354): Ortholog of  Ceres SEQ ID NO 14310740 as cited in SEQ ID NO 53755
  misc_feature (1)..(1354): Ortholog of  Ceres SEQ ID NO 13596202 as cited in SEQ ID NO 68492
atggcgactgagaatctcaccgataagaatgttgttttcagaaagctgaaatcaaaatccgagaacaaggtttgctttgattgtagtgcgaagaatccaacatgggcttctgttccttatgggatcttcctatgcatcgattgttctgctgttcatcgaagtctaggtgttcatatcagcttcgtcaggtcaacgaacttagactcgtggagtcctgagcagctaagaacaatgatgtttggagggaacaatcgagctcaggtgttttttaagcaacatggatggaatgatggtggtaagattgaggctaagtatacttcaagagctgctgatatgtatagacagactcttgctaaagaagttgctaaagccatggctgaagaaactgttttaccgtcgttatcctctgttgctacttctcagccagtggaatcatctgaaaatgggtttacttctgaatctccgaaagagagttctttgaagcaagaagcagctgttgtctcttcaccaaaagcttctcagaaagttgttgctagtacgtttaagaaacctcttgtttcgcgaaagtctgggaagactggtggtcttggtgctcgtaagcttactactaagtcaaaggataacctctatgagcagaagcctgaagaacctgtacctgtgattcctgctgcttctccaaccaatgacacatcagcagctggatcatcatttgcctctcgatttgagtactttgatgatgagcaatctggtgggcaaagtggcacacgggtgcttagccatgttgctccaccaaagtcatcaaatttctttaatgaatttggaatggacagtgctttccccaagaagtcaagctcaagctcatccaaagctcaggttgaagaaacagatgaagcaagaaagaagttttcaaacgccaaatcgatttcctctgcccaatttttcggaaatcagaacagagatgccgatcttgactcaaaagctacccttcagaagttctcgggttcagcagctatttcaagttctgatctttttggccacggaccagatgattccaacatcgatatcactgcaagcgatctcatcaaccgaatttctttccaggcgcagcaagatatgtcatctattgctaacttagctgaggaaacaaagaataagctgggaacatttgcctctagtatattcagtgatcttcaggatagaatgctgtaagaaacatacaaaggatcttgtcttttgatttacagagaacaaattgttggatataaatgtcatttttatttttggtttgactttgtagttgaaagagtgatttttgaggtaaattgttaaatgtggaatttgataatttgatgtg

SEQ ID NO: 78261 - protein, 402 aa, Arabidopsis thaliana
  peptide (1)..(402): Ceres Seq. ID no. 12640192
MATENLTDKNVVFRKLKSKSENKVCFDCSAKNPTWASVPYGIFLCIDCSAVHRSLGVHISFVRSTNLDSWSPEQLRTMMFGGNNRAQVFFKQHGWNDGGKIEAKYTSRAADMYRQTLAKEVAKAMAEETVLPSLSSVATSQPVESSENGFTSESPKESSLKQEAAVVSSPKASQKVVASTFKKPLVSRKSGKTGGLGARKLTTKSKDNLYEQKPEEPVPVIPAASPTNDTSAAGSSFASRFEYFDDEQSGGQSGTRVLSHVAPPKSSNFFNEFGMDSAFPKKSSSSSSKAQVEETDEARKKFSNAKSISSAQFFGNQNRDADLDSKATLQKFSGSAAISSSDLFGHGPDDSNIDITASDLINRISFQAQQDMSSIANLAEETKNKLGTFASSIFSDLQDRML

SEQ ID NO: 78262 - protein, 325 aa, Arabidopsis thaliana
  peptide (1)..(325): Ceres Seq. ID no. 12640193
MMFGGNNRAQVFFKQHGWNDGGKIEAKYTSRAADMYRQTLAKEVAKAMAEETVLPSLSSVATSQPVESSENGFTSESPKESSLKQEAAVVSSPKASQKVVASTFKKPLVSRKSGKTGGLGARKLTTKSKDNLYEQKPEEPVPVIPAASPTNDTSAAGSSFASRFEYFDDEQSGGQSGTRVLSHVAPPKSSNFFNEFGMDSAFPKKSSSSSSKAQVEETDEARKKFSNAKSISSAQFFGNQNRDADLDSKATLQKFSGSAAISSSDLFGHGPDDSNIDITASDLINRISFQAQQDMSSIANLAEETKNKLGTFASSIFSDLQDRML

SEQ ID NO: 78263 - protein, 324 aa, Arabidopsis thaliana
  peptide (1)..(324): Ceres Seq. ID no. 12640194
MFGGNNRAQVFFKQHGWNDGGKIEAKYTSRAADMYRQTLAKEVAKAMAEETVLPSLSSVATSQPVESSENGFTSESPKESSLKQEAAVVSSPKASQKVVASTFKKPLVSRKSGKTGGLGARKLTTKSKDNLYEQKPEEPVPVIPAASPTNDTSAAGSSFASRFEYFDDEQSGGQSGTRVLSHVAPPKSSNFFNEFGMDSAFPKKSSSSSSKAQVEETDEARKKFSNAKSISSAQFFGNQNRDADLDSKATLQKFSGSAAISSSDLFGHGPDDSNIDITASDLINRISFQAQQDMSSIANLAEETKNKLGTFASSIFSDLQDRML

SEQ ID NO: 78264 - DNA, 963 bp, Arabidopsis thaliana
  misc_feature (1)..(963): Ceres Seq. ID no. 12640213
  misc_feature (1)..(963): Ortholog of  Ceres SEQ ID NO 13597334 as cited in SEQ ID NO 64244
atggaaaggcctcaagaacctgagtacgaatgcgttgatatctacaaacaaccttcgctacaacaccctaaactccaaaatcaccaaatccaaatgagaccgagcgacgaagttctagccatgctatcaggagatacatcagcaaacgatgaaatggttgctgagtttgatataccagaagaaggatgtcctcaaggacaagctgcagtaatgaagaaaatcgatgccaccccatggcgtggagcatctgcatggtttagtatttaccaacctaaattgacaaataaagaccaatttagcatgagttttatgtggctcaatactgagtataatggcgaacgcaccaatgcccagtttggttgggctgtgattcctgcattatatggcgatgaccgtacaagacttacggcatactggagtccggataaaatcgaaaacggatgttacaatatacaatgtaaaggcttcgttcaaactgaccatagagtcgctcttggtaccggtttttcgaacacctctgtggtgggaggcaaccaatataaagctttctttgcaatcagtcaggatccaaaaacaaagaatttgtggctgacagtccagaagattaacatagggtattggccagaggaacttctaccttttttcaatgatggagcggagtcagttatatatggtggattcacgaatgctccatctgataacattcaactctttgaaatagttagcccacctatgggtaacgggaacaaaccgctggatgaggaagtggatctaaaacatacttgttatatgcactctcttaagtatgtgacaccagattacaagagtgtcgatgttgattccaacaaggtcgccgaagttgcggacgcaggtatatgttacgacgcgatttattttgataaacttgggcggtatggacaaacgtttaccttcggtggaccaggtggttattgtgatgtttga

SEQ ID NO: 78265 - protein, 320 aa, Arabidopsis thaliana
  peptide (1)..(320): Ceres Seq. ID no. 12640214
MERPQEPEYECVDIYKQPSLQHPKLQNHQIQMRPSDEVLAMLSGDTSANDEMVAEFDIPEEGCPQGQAAVMKKIDATPWRGASAWFSIYQPKLTNKDQFSMSFMWLNTEYNGERTNAQFGWAVIPALYGDDRTRLTAYWSPDKIENGCYNIQCKGFVQTDHRVALGTGFSNTSVVGGNQYKAFFAISQDPKTKNLWLTVQKINIGYWPEELLPFFNDGAESVIYGGFTNAPSDNIQLFEIVSPPMGNGNKPLDEEVDLKHTCYMHSLKYVTPDYKSVDVDSNKVAEVADAGICYDAIYFDKLGRYGQTFTFGGPGGYCDV

SEQ ID NO: 78266 - protein, 289 aa, Arabidopsis thaliana
  peptide (1)..(289): Ceres Seq. ID no. 12640215
MRPSDEVLAMLSGDTSANDEMVAEFDIPEEGCPQGQAAVMKKIDATPWRGASAWFSIYQPKLTNKDQFSMSFMWLNTEYNGERTNAQFGWAVIPALYGDDRTRLTAYWSPDKIENGCYNIQCKGFVQTDHRVALGTGFSNTSVVGGNQYKAFFAISQDPKTKNLWLTVQKINIGYWPEELLPFFNDGAESVIYGGFTNAPSDNIQLFEIVSPPMGNGNKPLDEEVDLKHTCYMHSLKYVTPDYKSVDVDSNKVAEVADAGICYDAIYFDKLGRYGQTFTFGGPGGYCDV

SEQ ID NO: 78267 - protein, 280 aa, Arabidopsis thaliana
  peptide (1)..(280): Ceres Seq. ID no. 12640216
MLSGDTSANDEMVAEFDIPEEGCPQGQAAVMKKIDATPWRGASAWFSIYQPKLTNKDQFSMSFMWLNTEYNGERTNAQFGWAVIPALYGDDRTRLTAYWSPDKIENGCYNIQCKGFVQTDHRVALGTGFSNTSVVGGNQYKAFFAISQDPKTKNLWLTVQKINIGYWPEELLPFFNDGAESVIYGGFTNAPSDNIQLFEIVSPPMGNGNKPLDEEVDLKHTCYMHSLKYVTPDYKSVDVDSNKVAEVADAGICYDAIYFDKLGRYGQTFTFGGPGGYCDV

SEQ ID NO: 78268 - DNA, 1272 bp, Arabidopsis thaliana
  misc_feature (1)..(1272): Ceres Seq. ID no. 12640234
  misc_feature (1)..(1272): Ortholog of  Ceres SEQ ID NO 15177055 as cited in SEQ ID NO 57450
  misc_feature (1)..(1272): Ortholog of  Ceres SEQ ID NO 12615854 as cited in SEQ ID NO 62880
agtttgggattttttcgaaaacgcttttcaatcttcgtctatctgtctccacgatccacgccttgaccttcgttttttttttctcagagattagagaaaactccgataaccaatttctcaatctttttgtagatccaatttttccaggaaaaaaagaggtttcgcgaagaagatgagttttcaagatttagaatcaggaagaggaagatcaacgaggaaattcaatggtggtcgacaagattcgacacaagccgttgcttctggaatattccagatcaataccggagtctccacgtttcagcgactcgttaacacacttggtactcccaaagatacaccggagctccgggagaagctgcacaagacaaggttgcatattggacagcttgtgaaggatacttcagctaaacttaaagaagctagtgaaactgatcatcaaagcggtgtcaatccaagtaagaagattgcagatgctaagcttgcaagggactttcaagctgttttaaaagagtttcagaaagctcaacaaactgctgctgaaagagaaaccacttatactcctttcgtgcctcaatctgctcttccctctagctatacggcgggtgaggtggataaggtaccggaacagcgggcacaacttcaggagtcgaaaagacaagaacttgtattgttagacaacgagattgcattcaacgaggctgtgattgaagaaagagagcaaggaatacaagaaatccatcagcaaattggtgaggttaacgagatattcaaagatcttgcggttctggttaacgatcaaggagtcatgatagatgatattggtactcacattgacaactcccgtgctgcaacttcacaaggaaaatctcagcttgtgcaagccgcgaaaacacaaaaatcaaactcctctctgacatgcttgctcttggtgatatttggcattgttctcctgatcgtgattatagtactcgcagcttgatttcgaacagcaagaacatttcgtttgtgtgtgttcattgatcttaaggcatcaatgactggaactacttggtatatattatatgttgaagagaacacttagaagttggttttgtgtttgtttgggttggttcagttcggtttgaggttctattggttaatgtaatagtgtgtgcgtgtgtggcttttttgttgtgcaaacattttgttggagatgacagaaactctgttttgtttgtgattctcctatgttctcctaaatctttgttgagaggaaacaaaaactatttgctc

SEQ ID NO: 78269 - protein, 268 aa, Arabidopsis thaliana; identical to SEQ ID NO: 29132
  peptide (1)..(268): Ceres Seq. ID no. 12640235

SEQ ID NO: 78270 - DNA, 996 bp, Arabidopsis thaliana
  misc_feature (1)..(996): Ceres Seq. ID no. 12640272
  misc_feature (1)..(996): Ortholog of  Ceres SEQ ID NO 15175857 as cited in SEQ ID NO 59046
atgccttcgatgccagaggaaccaatcctaacaccaacaccagatcgattctgtatgttcccaatccaatacccacagatttgggagatgtacaagaaagccgaagcatccttctggacagccgaagaagtcgatctctctcaagacaatcgcgactgggaaaactcactaaccaacgacgaacgtcacttcattaaacacgtcctcgccttcttcgccgcatcagacggaatcgttctcgagaatctctcaactagattcatgtccgatgttcagatctcagaagctcgtgccttctacggattccaaatcgcgattgagaatattcactccgagatgtatagtctccttctcgacacgtatatcaaagacaacaaagagagagatcatctttttcgtgcaatcgaaaccattccttgtgacgaaaaaaaatgggctatgaaatggatcaacggatctcaaagcttcgctgagagaatcgtagcgtttgcttgcgttgaaggtatattcttctccggtagcttttgttcgatattctggttgaagaaacgaggtttaatgcctggactcactttttcaaacgaattgatttcgagagacgaaggtcttcactgtgatttcgcttgtttgatatatagtcttcttagaactaagtttgatgaagatcgtttgaaagcgattgtttgtgatgctgttgagattgagagagagtttgtttgtgacgcgctttcttgtgccttggttgggatgaatcgtgagttgatgagtcagtacattgagttcgttgctgataggttgttggctgcgcttgggtgtggtaaggtgtatggtgtgactaatccttttgattggatggaattgatttcgcttcagggtaagaccaacttttttgagaagagagttggtgagtatcagaaagcttctgttatgtctagtgttcatggaaacgctgcgtttaatgatgatcatgtcttcaagcttgacgaggatttttag

SEQ ID NO: 78271 - protein, 331 aa, Arabidopsis thaliana
  peptide (1)..(331): Ceres Seq. ID no. 12640273
MPSMPEEPILTPTPDRFCMFPIQYPQIWEMYKKAEASFWTAEEVDLSQDNRDWENSLTNDERHFIKHVLAFFAASDGIVLENLSTRFMSDVQISEARAFYGFQIAIENIHSEMYSLLLDTYIKDNKERDHLFRAIETIPCDEKKWAMKWINGSQSFAERIVAFACVEGIFFSGSFCSIFWLKKRGLMPGLTFSNELISRDEGLHCDFACLIYSLLRTKFDEDRLKAIVCDAVEIEREFVCDALSCALVGMNRELMSQYIEFVADRLLAALGCGKVYGVTNPFDWMELISLQGKTNFFEKRVGEYQKASVMSSVHGNAAFNDDHVFKLDEDF

SEQ ID NO: 78272 - protein, 328 aa, Arabidopsis thaliana
  peptide (1)..(328): Ceres Seq. ID no. 12640274
MPEEPILTPTPDRFCMFPIQYPQIWEMYKKAEASFWTAEEVDLSQDNRDWENSLTNDERHFIKHVLAFFAASDGIVLENLSTRFMSDVQISEARAFYGFQIAIENIHSEMYSLLLDTYIKDNKERDHLFRAIETIPCDEKKWAMKWINGSQSFAERIVAFACVEGIFFSGSFCSIFWLKKRGLMPGLTFSNELISRDEGLHCDFACLIYSLLRTKFDEDRLKAIVCDAVEIEREFVCDALSCALVGMNRELMSQYIEFVADRLLAALGCGKVYGVTNPFDWMELISLQGKTNFFEKRVGEYQKASVMSSVHGNAAFNDDHVFKLDEDF

SEQ ID NO: 78273 - protein, 313 aa, Arabidopsis thaliana
  peptide (1)..(313): Ceres Seq. ID no. 12640275
MFPIQYPQIWEMYKKAEASFWTAEEVDLSQDNRDWENSLTNDERHFIKHVLAFFAASDGIVLENLSTRFMSDVQISEARAFYGFQIAIENIHSEMYSLLLDTYIKDNKERDHLFRAIETIPCDEKKWAMKWINGSQSFAERIVAFACVEGIFFSGSFCSIFWLKKRGLMPGLTFSNELISRDEGLHCDFACLIYSLLRTKFDEDRLKAIVCDAVEIEREFVCDALSCALVGMNRELMSQYIEFVADRLLAALGCGKVYGVTNPFDWMELISLQGKTNFFEKRVGEYQKASVMSSVHGNAAFNDDHVFKLDEDF

SEQ ID NO: 78274 - DNA, 1470 bp, Arabidopsis thaliana
  misc_feature (1)..(1470): Ceres Seq. ID no. 12640300
  misc_feature (1)..(1470): Ortholog of  Ceres SEQ ID NO 13657677 as cited in SEQ ID NO 66119
atggcgatgagattttttcaacttcaccgaaatcgtcttgtgaaaggtaattctggaaaagctctctcctttagccgccttttagatcttagtttctgggttcgagctttttgtaattaccgagagattttgagaaatggtcttcactctcttcagtttaatgaagctctcgatttgttcactcacatggttgagtctcgtcctcttccttcaattatcgatttcactaagttattgaatgttattgccaaaatgaagaagtttgatgttgtgatcaatctctgcgaccatctgcagataatgggagtttcacatgatctctatacttgcaatcttttgatgaattgtttctgccaatcttctcagccttatcttgcctcatcttttcttgggaagatgatgaaacttggttttgagcctgatattgtcacgtttacttctctgatcaatgggttctgtctcgggaatagaatggaggaggctatgtctatggtgaatcagatggtggagatggggattaaacctgatgttgtaatgtatacaacaatcattgatagtctttgcaaaaacgggcatgtgaattacgcgttgagccttttcgatcaaatggaaaactacgggattagaccggatgttgttatgtacacctctctcgtgaacggtctttgtaactctggtagatggagagatgctgattcattgctgaggggtatgacgaagaggaaaatcaaacctgatgtaatcactttcaatgcattgatcgatgcgtttgtgaaagaaggaaagtttttggatgctgaagaattgtacaatgagatgattcgtatgtctatagctcctaatattttcacctatacttcattgatcaatgggttttgcatggaaggttgtgtagatgaggccagacaaatgttttatttgatggaaaccaagggttgttttccagatgtagtggcttatacttctctcataaacgggttttgcaagtgtaagaaggtagatgatgcgatgaaaatcttctacgagatgtcccaaaaaggattgactgggaacactatcacttacactactcttatccaaggttttggtcaagtgggcaaacctaatgtcgcccaagaagtttttagtcatatggtttctcgtggcgtgcctcccaatattaggacctataatgttttgttacattgtctatgttataacgggaagctagagaaagccttgatggtattcgaggatatgcgaaagagagagatggatattggaattattacatataccatcatcattcaagggatgtgcaaggctggtaaagtgaaaaatgctgttaatttattttgtagccttccttcaaaaggagtgaagcctaatgttgtaacatatactacaatgatatcaggattgtttagggaagggttaaagcatgaagctcatgtgttgtttaggaaaatgaaagaagatggggtttcataa

SEQ ID NO: 78275 - protein, 489 aa, Arabidopsis thaliana
  peptide (1)..(489): Ceres Seq. ID no. 12640301
MAMRFFQLHRNRLVKGNSGKALSFSRLLDLSFWVRAFCNYREILRNGLHSLQFNEALDLFTHMVESRPLPSIIDFTKLLNVIAKMKKFDVVINLCDHLQIMGVSHDLYTCNLLMNCFCQSSQPYLASSFLGKMMKLGFEPDIVTFTSLINGFCLGNRMEEAMSMVNQMVEMGIKPDVVMYTTIIDSLCKNGHVNYALSLFDQMENYGIRPDVVMYTSLVNGLCNSGRWRDADSLLRGMTKRKIKPDVITFNALIDAFVKEGKFLDAEELYNEMIRMSIAPNIFTYTSLINGFCMEGCVDEARQMFYLMETKGCFPDVVAYTSLINGFCKCKKVDDAMKIFYEMSQKGLTGNTITYTTLIQGFGQVGKPNVAQEVFSHMVSRGVPPNIRTYNVLLHCLCYNGKLEKALMVFEDMRKREMDIGIITYTIIIQGMCKAGKVKNAVNLFCSLPSKGVKPNVVTYTTMISGLFREGLKHEAHVLFRKMKEDGVS

SEQ ID NO: 78276 - protein, 487 aa, Arabidopsis thaliana
  peptide (1)..(487): Ceres Seq. ID no. 12640302
MRFFQLHRNRLVKGNSGKALSFSRLLDLSFWVRAFCNYREILRNGLHSLQFNEALDLFTHMVESRPLPSIIDFTKLLNVIAKMKKFDVVINLCDHLQIMGVSHDLYTCNLLMNCFCQSSQPYLASSFLGKMMKLGFEPDIVTFTSLINGFCLGNRMEEAMSMVNQMVEMGIKPDVVMYTTIIDSLCKNGHVNYALSLFDQMENYGIRPDVVMYTSLVNGLCNSGRWRDADSLLRGMTKRKIKPDVITFNALIDAFVKEGKFLDAEELYNEMIRMSIAPNIFTYTSLINGFCMEGCVDEARQMFYLMETKGCFPDVVAYTSLINGFCKCKKVDDAMKIFYEMSQKGLTGNTITYTTLIQGFGQVGKPNVAQEVFSHMVSRGVPPNIRTYNVLLHCLCYNGKLEKALMVFEDMRKREMDIGIITYTIIIQGMCKAGKVKNAVNLFCSLPSKGVKPNVVTYTTMISGLFREGLKHEAHVLFRKMKEDGVS

SEQ ID NO: 78277 - protein, 427 aa, Arabidopsis thaliana
  peptide (1)..(427): Ceres Seq. ID no. 12640303
MVESRPLPSIIDFTKLLNVIAKMKKFDVVINLCDHLQIMGVSHDLYTCNLLMNCFCQSSQPYLASSFLGKMMKLGFEPDIVTFTSLINGFCLGNRMEEAMSMVNQMVEMGIKPDVVMYTTIIDSLCKNGHVNYALSLFDQMENYGIRPDVVMYTSLVNGLCNSGRWRDADSLLRGMTKRKIKPDVITFNALIDAFVKEGKFLDAEELYNEMIRMSIAPNIFTYTSLINGFCMEGCVDEARQMFYLMETKGCFPDVVAYTSLINGFCKCKKVDDAMKIFYEMSQKGLTGNTITYTTLIQGFGQVGKPNVAQEVFSHMVSRGVPPNIRTYNVLLHCLCYNGKLEKALMVFEDMRKREMDIGIITYTIIIQGMCKAGKVKNAVNLFCSLPSKGVKPNVVTYTTMISGLFREGLKHEAHVLFRKMKEDGVS

SEQ ID NO: 78278 - DNA, 735 bp, Arabidopsis thaliana
  misc_feature (1)..(735): Ceres Seq. ID no. 12640316
  misc_feature (1)..(735): Ortholog of  Ceres SEQ ID NO 12587358 as cited in SEQ ID NO 62228
  misc_feature (1)..(735): Ortholog of  Ceres SEQ ID NO 12635930 as cited in SEQ ID NO 0
atgaagctcaaagtgtatgcagatcgaatgtcacagccatcacgtgctgttatcatattctgcaaggttaatggaatccaattcgatgaggtcttgatttccttggcgaagcgtcaacaattatctcctgaattcaaagatattaacccattggggaaagttccagctattgttgatggcaggcttaagctctttgagagtcacgcaatcctgatatatctatcctcggcgtttccaagtgttgctgatcattggtatccaaatgatctatccaaaagagccaagattcactcagttttggattggcatcacaccaatttacgtcgtggtgcagctggatatgttctgaatagtgtactaggtccagctctcggtcttcctctgaatccgaaagcagctgctgaagctgagcagttactaacaaagtctctgtccactctagagactttttggcttaagggcaatgctaaattcttgctcggaagcaaccaaccatctatagctgatctcagccttgtatgcgaacttatgcagctgcaggttttggatgacaaagatcgtcttagattgctcagcactcataagaaagttgaacaatggattgagaatacgaaaaaagcaacaatgcctcactttgatgagacccatgagatccttttcaaagtcaaagaaggattccagaagcggcgagagatgggaaccttatctaaaccgggtcttcaatccaagatctaa

SEQ ID NO: 78279 - protein, 244 aa, Arabidopsis thaliana; identical to SEQ ID NO: 50719
  peptide (1)..(244): Ceres Seq. ID no. 12640317

SEQ ID NO: 78280 - protein, 235 aa, Arabidopsis thaliana
  peptide (1)..(235): Ceres Seq. ID no. 12640318
MSQPSRAVIIFCKVNGIQFDEVLISLAKRQQLSPEFKDINPLGKVPAIVDGRLKLFESHAILIYLSSAFPSVADHWYPNDLSKRAKIHSVLDWHHTNLRRGAAGYVLNSVLGPALGLPLNPKAAAEAEQLLTKSLSTLETFWLKGNAKFLLGSNQPSIADLSLVCELMQLQVLDDKDRLRLLSTHKKVEQWIENTKKATMPHFDETHEILFKVKEGFQKRREMGTLSKPGLQSKI

SEQ ID NO: 78281 - DNA, 1962 bp, Arabidopsis thaliana
  misc_feature (1)..(1962): Ceres Seq. ID no. 12640319
  misc_feature (1)..(1962): Ortholog of  Ceres SEQ ID NO 12587358 as cited in SEQ ID NO 62228
  misc_feature (1)..(1962): Ortholog of  Ceres SEQ ID NO 12635930 as cited in SEQ ID NO 0
gccagattatcgccgttcgttcagagaaaactttttccgatacacaaaatcggaggaagaagaagatgaagctcaaagtgtatgcggatcgaatgtcacagccatctcgtgctgtcctcatattctgcaaggttaatgaaatccaattcgatgagatattgatttacttggcgaatcgtcaacaattatcccctgaatttaaagatattaacccaatggggaaagttccagctattgttgatggcaaacttaagctctctgagagtcacgctatcttgatatatctttcctcagcatacccaagtgtagttgatcattggtacccgactgatctttccaaaagggccagaattcactctgttttggattggcatcacaccaatttacgccctggtgcagctggatacgttctgaatagtgtactaggtccagctctcggtcttcctctgaatccgaaagcagctgctgaagctgagcagttactaacaaagtctctgaccactctagacactttttggcttaagggcaatgccatgttcttgctcggaagcaaccaaccatctatagctgatctgagccttgtatgtgaactaacgcagctgcaggttttggatgataaagatcgtcttagattgctcagccctcataaaaatgttgaacaatggattgagaatacgagaaaagcgacgatgcctcactttgatgaggtccatgaggtccttttcagagccaaagatagatgtcagaagcagcgagagatggcaaccgcatctaaaccgggtcctcaatctaagattatccaatttagtactattggtgagaagagtgatgatccaaacctcgttcaaaacacaaccgatcgtagaaaacatagacgcaaatggagtcgagctgaagatgccattcttattagtgcttggttaaatactagcaaggatccaattgtcgataatgaacataaagcatgcgctttttggaagagaattggtgcatattttaacaatagcgcttcacttgcaaatctgccaaagcgagagccgagtcactgcaagcaaagatggagtaaacttaacgacaaagtctgcaaatttgttggatgttatgatcaagctttgaatcaaagaagtagtggtcaatctgaagatgatgttttccaagttgcataccaagtctacacgaacaattacaagagtaattttacacttgagcatgcatggagggagctccgacacagtaaaaaatggtgtagtttgtacccctttgaaaattctaagggtggtggaagctcaaagagaacaaagttgaataatggagatcgtgtatattcttcaagctctaatccggagagtgtgcctatagctctagatgaagaggagcaagtcatggatcttcctcttggtgtgaagtcatcgaagcagaaagagaagaaagttgctactattataacgattgaagaaagggaggccgattctggatcaagacttgagaacttgtgggtactagatgaagaggagcaagttatggatcgtcctcttggtgtgaagtcattagagcaaaaagagaataaagttgctcctaaaccaacgattgaagaaagggaggcggccgattctcgatcaagacttgagaacttgtgggcactaaaggagaaagaagaaagggaggcagattcccgatcaagacttgagaacttgtgggcactgaaggagaaagacatagaagagcaaaagaaactaacaaggatggaagtccttaaaagtcttcttggaagaacaactgatcaactttctgaaaaagaagacattttgaagaacaagctcattgatgagatgctctaatctctatgttcatctctgtattttagctatgtttcattgtatttatctctgtattttctctaggtttatctcactatctatgttcaacatttgtttcactttccaattcacatcatgaaacgtt

SEQ ID NO: 78282 - protein, 611 aa, Arabidopsis thaliana
  peptide (1)..(611): Ceres Seq. ID no. 12640320
QIIAVRSEKTFSDTQNRRKKKMKLKVYADRMSQPSRAVLIFCKVNEIQFDEILIYLANRQQLSPEFKDINPMGKVPAIVDGKLKLSESHAILIYLSSAYPSVVDHWYPTDLSKRARIHSVLDWHHTNLRPGAAGYVLNSVLGPALGLPLNPKAAAEAEQLLTKSLTTLDTFWLKGNAMFLLGSNQPSIADLSLVCELTQLQVLDDKDRLRLLSPHKNVEQWIENTRKATMPHFDEVHEVLFRAKDRCQKQREMATASKPGPQSKIIQFSTIGEKSDDPNLVQNTTDRRKHRRKWSRAEDAILISAWLNTSKDPIVDNEHKACAFWKRIGAYFNNSASLANLPKREPSHCKQRWSKLNDKVCKFVGCYDQALNQRSSGQSEDDVFQVAYQVYTNNYKSNFTLEHAWRELRHSKKWCSLYPFENSKGGGSSKRTKLNNGDRVYSSSSNPESVPIALDEEEQVMDLPLGVKSSKQKEKKVATIITIEEREADSGSRLENLWVLDEEEQVMDRPLGVKSLEQKENKVAPKPTIEEREAADSRSRLENLWALKEKEEREADSRSRLENLWALKEKDIEEQKKLTRMEVLKSLLGRTTDQLSEKEDILKNKLIDEML

SEQ ID NO: 78283 - protein, 590 aa, Arabidopsis thaliana
  peptide (1)..(590): Ceres Seq. ID no. 12640321
MKLKVYADRMSQPSRAVLIFCKVNEIQFDEILIYLANRQQLSPEFKDINPMGKVPAIVDGKLKLSESHAILIYLSSAYPSVVDHWYPTDLSKRARIHSVLDWHHTNLRPGAAGYVLNSVLGPALGLPLNPKAAAEAEQLLTKSLTTLDTFWLKGNAMFLLGSNQPSIADLSLVCELTQLQVLDDKDRLRLLSPHKNVEQWIENTRKATMPHFDEVHEVLFRAKDRCQKQREMATASKPGPQSKIIQFSTIGEKSDDPNLVQNTTDRRKHRRKWSRAEDAILISAWLNTSKDPIVDNEHKACAFWKRIGAYFNNSASLANLPKREPSHCKQRWSKLNDKVCKFVGCYDQALNQRSSGQSEDDVFQVAYQVYTNNYKSNFTLEHAWRELRHSKKWCSLYPFENSKGGGSSKRTKLNNGDRVYSSSSNPESVPIALDEEEQVMDLPLGVKSSKQKEKKVATIITIEEREADSGSRLENLWVLDEEEQVMDRPLGVKSLEQKENKVAPKPTIEEREAADSRSRLENLWALKEKEEREADSRSRLENLWALKEKDIEEQKKLTRMEVLKSLLGRTTDQLSEKEDILKNKLIDEML

SEQ ID NO: 78284 - protein, 581 aa, Arabidopsis thaliana
  peptide (1)..(581): Ceres Seq. ID no. 12640322
MSQPSRAVLIFCKVNEIQFDEILIYLANRQQLSPEFKDINPMGKVPAIVDGKLKLSESHAILIYLSSAYPSVVDHWYPTDLSKRARIHSVLDWHHTNLRPGAAGYVLNSVLGPALGLPLNPKAAAEAEQLLTKSLTTLDTFWLKGNAMFLLGSNQPSIADLSLVCELTQLQVLDDKDRLRLLSPHKNVEQWIENTRKATMPHFDEVHEVLFRAKDRCQKQREMATASKPGPQSKIIQFSTIGEKSDDPNLVQNTTDRRKHRRKWSRAEDAILISAWLNTSKDPIVDNEHKACAFWKRIGAYFNNSASLANLPKREPSHCKQRWSKLNDKVCKFVGCYDQALNQRSSGQSEDDVFQVAYQVYTNNYKSNFTLEHAWRELRHSKKWCSLYPFENSKGGGSSKRTKLNNGDRVYSSSSNPESVPIALDEEEQVMDLPLGVKSSKQKEKKVATIITIEEREADSGSRLENLWVLDEEEQVMDRPLGVKSLEQKENKVAPKPTIEEREAADSRSRLENLWALKEKEEREADSRSRLENLWALKEKDIEEQKKLTRMEVLKSLLGRTTDQLSEKEDILKNKLIDEML

SEQ ID NO: 78285 - DNA, 1054 bp, Arabidopsis thaliana
  misc_feature (1)..(1054): Ceres Seq. ID no. 12640345
  misc_feature (1)..(1054): Ortholog of  Ceres SEQ ID NO 13594430 as cited in SEQ ID NO 60181
  misc_feature (1)..(1054): Ortholog of  Ceres SEQ ID NO 13597809 as cited in SEQ ID NO 64598
  misc_feature (1)..(1054): Ortholog of  Ceres SEQ ID NO 12617960 as cited in SEQ ID NO 69051
  misc_feature (1)..(1054): Ortholog of  Ceres SEQ ID NO 13589401 as cited in SEQ ID NO 0
  misc_feature (1)..(1054): Ortholog of  Ceres SEQ ID NO 15179361 as cited in SEQ ID NO 0
tcttcaatcagtaaagagttttaggtttttttttcttcttctcggaggtttgtagaatcaacaaaaatggtggaagaccacaagcacgaggaatcgatcttggagaagattgttgagaagatccatggccacggtgactcgtcttctctgtccgattccgacgacgataagaaatctacatcgtcttcgtcgtcgtccttcaagtcaaagatttaccgacttttcggaagggagaaacctgttcacaaggttctcggtggtggaaaacctgctgatatattcctttggaggaacaagaaggtatctggtggagtcttgggtgctgtaactgcgtcttgggtcttattcgagttattcgaataccatctcctcgcttttctctgtcactttgcgatttttgctcttgcagcattgttcttgtggtctaatgcttgtacattcatccacaagtcaactcctcacatcccggaagttcacatccctgaagatcctattcttcaacttgtttctggattaaggattgaaatcaatcgtggtttgacccttcttaggaacattgcatcaggaaaagatgtcaagaaatttatcctggtaattgctggcttgtgggttttgtccattattggcagctgctacaacttcttgacattgttctacactgctactgtccttctcttcaccattcctgtactctacgagaagtatgaggacaaagtagatgcctatggggagaaggcgatgagggagatcaaaaagcaatatgcagtacttgatgagaaggtattgcgtaaggtcataagcaagattccaagaggagctctgaacaagaagaaggattaaggaatgtgagttactctctcattggaatcgtagtaatggttcaagacatgttttgttagaagctgttggttgataaaccctttgatctcttgttattattatgttcattataaatttgggggttttaactaaaaatatttagattatgagagaacacggatggatgataattattgttgttagttatttgtcttagttaatttctcatcctttt

SEQ ID NO: 78286 - protein, 257 aa, Arabidopsis thaliana; identical to SEQ ID NO: 28439
  peptide (1)..(257): Ceres Seq. ID no. 12640346

SEQ ID NO: 78287 - DNA, 1110 bp, Arabidopsis thaliana
  misc_feature (1)..(1110): Ceres Seq. ID no. 12640409
  misc_feature (1)..(1110): Ortholog of  Ceres SEQ ID NO 12364737 as cited in SEQ ID NO 51089
  misc_feature (1)..(1110): Ortholog of  Ceres SEQ ID NO 13582301 as cited in SEQ ID NO 56509
  misc_feature (1)..(1110): Ortholog of  Ceres SEQ ID NO 13595567 as cited in SEQ ID NO 56760
  misc_feature (1)..(1110): Ortholog of  Ceres SEQ ID NO 13655302 as cited in SEQ ID NO 63307
  misc_feature (1)..(1110): Ortholog of  Ceres SEQ ID NO 13597380 as cited in SEQ ID NO 64054
  misc_feature (1)..(1110): Ortholog of  Ceres SEQ ID NO 12625474 as cited in SEQ ID NO 64169
  misc_feature (1)..(1110): Ortholog of  Ceres SEQ ID NO 13597502 as cited in SEQ ID NO 64681
  misc_feature (1)..(1110): Ortholog of  Ceres SEQ ID NO 15180805 as cited in SEQ ID NO 0
atgtgcacacaagacgaaacaatttttgtgttacacgaccaacaaagtaataatagtgctgctcaatcgttcacaaacttcatatttggagactcattggtagatgttggaaacaacaactatatcttcacattgtcaaaagctgattcttcgccttatggcatcgattttgcaccttccaacggccaacccacgggaagattcactaatggtcgaaccatttccgatattgtgggtgaagccttaggagcaaaatcaccaccaccaccatatcttgaaccaaacactgaggctaacacaattcgcaatggaatcaactatgcttctggtgctgctggaatcttggacgacactggacttctgttcatcgggcgagttccgctgagagaacaagtgagtaattttgagaagagtagagaatatatggtaagagtgattggtgaaaatggtacaaaagagatgttgaagaatgcaatgttcacaatcacaattggatcaaatgatattttgaattatattcaaccatcaatacctttcttctctcaagacaagctccccactgatgtcctacaagattctatggtcctccatttaaccacacatcttaagcgattgcatcagctaggaggtaggaagttcgtggtggttggagtagggccactcggttgcataccctttgctcgagcgttgaatttaataccagccggaaaatgctccgaacaagtcaaccaagtagtccgaggttataacatgaagcttatacactctcttaagacattgaacaatgagttaagatccgaagattacaacactacatttgtctacgccaactcttacgacctattcttgaaactagttttgaactatcaactatttggcttgaagaacgcagacaagccgtgttgtggcggctactttccaccgtttgcatgctttaagggacctaaccagaactcaagccaagcagcttgtgaggacaggtccaagtttgtcttctgggacgcgtatcacccaaccgaagctgcaaatctcattgttgccaaagcacttcttgatggtgaccaaactgtggctacccctttcaacatccgctatcttaacgatctttaa

SEQ ID NO: 78288 - protein, 369 aa, Arabidopsis thaliana
  peptide (1)..(369): Ceres Seq. ID no. 12640410
MCTQDETIFVLHDQQSNNSAAQSFTNFIFGDSLVDVGNNNYIFTLSKADSSPYGIDFAPSNGQPTGRFTNGRTISDIVGEALGAKSPPPPYLEPNTEANTIRNGINYASGAAGILDDTGLLFIGRVPLREQVSNFEKSREYMVRVIGENGTKEMLKNAMFTITIGSNDILNYIQPSIPFFSQDKLPTDVLQDSMVLHLTTHLKRLHQLGGRKFVVVGVGPLGCIPFARALNLIPAGKCSEQVNQVVRGYNMKLIHSLKTLNNELRSEDYNTTFVYANSYDLFLKLVLNYQLFGLKNADKPCCGGYFPPFACFKGPNQNSSQAACEDRSKFVFWDAYHPTEAANLIVAKALLDGDQTVATPFNIRYLNDL

SEQ ID NO: 78289 - protein, 228 aa, Arabidopsis thaliana
  peptide (1)..(228): Ceres Seq. ID no. 12640411
MVRVIGENGTKEMLKNAMFTITIGSNDILNYIQPSIPFFSQDKLPTDVLQDSMVLHLTTHLKRLHQLGGRKFVVVGVGPLGCIPFARALNLIPAGKCSEQVNQVVRGYNMKLIHSLKTLNNELRSEDYNTTFVYANSYDLFLKLVLNYQLFGLKNADKPCCGGYFPPFACFKGPNQNSSQAACEDRSKFVFWDAYHPTEAANLIVAKALLDGDQTVATPFNIRYLNDL

SEQ ID NO: 78290 - protein, 216 aa, Arabidopsis thaliana
  peptide (1)..(216): Ceres Seq. ID no. 12640412
MLKNAMFTITIGSNDILNYIQPSIPFFSQDKLPTDVLQDSMVLHLTTHLKRLHQLGGRKFVVVGVGPLGCIPFARALNLIPAGKCSEQVNQVVRGYNMKLIHSLKTLNNELRSEDYNTTFVYANSYDLFLKLVLNYQLFGLKNADKPCCGGYFPPFACFKGPNQNSSQAACEDRSKFVFWDAYHPTEAANLIVAKALLDGDQTVATPFNIRYLNDL

SEQ ID NO: 78291 - DNA, 477 bp, Arabidopsis thaliana
  misc_feature (1)..(477): Ceres Seq. ID no. 12640427
  misc_feature (1)..(477): Ortholog of  Ceres SEQ ID NO 15226175 as cited in SEQ ID NO 0
atgagtaaagcacggcataatttccggttagacgaggttggaatcaggcggcaactctcaatggtatcgaaaatcataaaattcaaagacattcacttgtaccgacacttggagaaccttgaagcagaagactgcttctttgtataccgtatggttgtagttctgttcagacgagaactaacctttgagcagacgttgtgtctctgggaagtaatgtgggcggatcaagctgcaatacgaactgggattgcgaaggcgacatgggggagaatccggttacgagcaccaccgacagaagatttgttgctttacgcgatagctgcaagcgtgctgcagaggaggaagacgataatagagaaatacagtgggatggatgagataatgaaggaatgtaacagcatggctggtcatcttgatgtttggaaacttctagacgatgctcatgacttagtcgtcaatcttcacgacaagatctaa

SEQ ID NO: 78292 - protein, 158 aa, Arabidopsis thaliana
  peptide (1)..(158): Ceres Seq. ID no. 12640428
MSKARHNFRLDEVGIRRQLSMVSKIIKFKDIHLYRHLENLEAEDCFFVYRMVVVLFRRELTFEQTLCLWEVMWADQAAIRTGIAKATWGRIRLRAPPTEDLLLYAIAASVLQRRKTIIEKYSGMDEIMKECNSMAGHLDVWKLLDDAHDLVVNLHDKI

SEQ ID NO: 78293 - protein, 138 aa, Arabidopsis thaliana
  peptide (1)..(138): Ceres Seq. ID no. 12640429
MVSKIIKFKDIHLYRHLENLEAEDCFFVYRMVVVLFRRELTFEQTLCLWEVMWADQAAIRTGIAKATWGRIRLRAPPTEDLLLYAIAASVLQRRKTIIEKYSGMDEIMKECNSMAGHLDVWKLLDDAHDLVVNLHDKI

SEQ ID NO: 78294 - protein, 108 aa, Arabidopsis thaliana
  peptide (1)..(108): Ceres Seq. ID no. 12640430
MVVVLFRRELTFEQTLCLWEVMWADQAAIRTGIAKATWGRIRLRAPPTEDLLLYAIAASVLQRRKTIIEKYSGMDEIMKECNSMAGHLDVWKLLDDAHDLVVNLHDKI

SEQ ID NO: 78295 - DNA, 1422 bp, Arabidopsis thaliana
  misc_feature (1)..(1422): Ceres Seq. ID no. 12640504
  misc_feature (1)..(1422): Ortholog of  Ceres SEQ ID NO 15176457 as cited in SEQ ID NO 55547
  misc_feature (1)..(1422): Ortholog of  Ceres SEQ ID NO 13594349 as cited in SEQ ID NO 58161
  misc_feature (1)..(1422): Ortholog of  Ceres SEQ ID NO 13663419 as cited in SEQ ID NO 66561
atggcgagtgtgtcgtggcgggctgtggctgtagctatggtggtggtgttgctgtcattgcagtggtttgcaaaagggtacccggaagaagatttggtggtgaggctgccaggtcaaccaactgttgggttcaaacaatacgcaggttatgtcgatgtcgatgtgaaagctggtcggagtctgttctattactatgtggaggctgtgaaacaacctgactcaaagccattgaccctttggctcaatggaggtccaggttgttcttcaattggtggaggagctttcactgagttgggtccattttaccccactggcgatggccgtggccttcgtgttaactccatgtcttggaacaaagcgtcgcacctgctttttgtggagtcacctgctggagtaggatggtcttactctaataaaagctctgattacaacaccggggataagtctactgcaaacgatatgcttgtgttcttgttgagatggtttgagaagttcccaaagttgaagtctcgggatctctttcttactggcgaaagctatgcaggacattacatacctcaactggctgatgcgattctcagctacaattcacactcaagtggattcaaattcaacatcaaaggcgttgctattgggaatccacttctgaagcttgacagagacagtccagctacctacgagttcttctggtcgcatggcatgatctctgatgaactaaaactcacaatcacgagtcaatgtgactttgatgattacacatttgctagcccccataacgtaagcacggcctgcaatgaagctattagtgaaactgaaaacattatcactgagtatgtcaacaactatgatgttctcctcgatgtatgttatccgtctatcgtccagcaagagctgaggctcaagaaaatggctactaaaatgagcatgggagtggatgtgtgtatgacctatgaaagacggttctactttaatcttccagaggtacaaaaggcgcttcatgcgaaccgtactcatctgccttattcatggtcaatgtgcagcggcgtgttaaactactctgatatcgatgggaacatcgacatgcttccgattctgaagagaattatactgaacaaaactcctatttggatcttcagtggagatcaagattctgtagttccattcgggggttcaagaactctcgtaagagaacttgctcaagatctcaacttcaagacaacagttccctatggagcctggttccacaaaagccaggttggaggctgggccatagagtatggaaaactactgacgtttgcaacggtgagaggagcggctcatatggtaccgtatgcacagccctcacgagctctacatttgttcagtagctttgtaagtggccggagattacccaacaacacacattcttctactgatgaatga

SEQ ID NO: 78296 - protein, 473 aa, Arabidopsis thaliana; identical to SEQ ID NO: 77387
  peptide (1)..(473): Ceres Seq. ID no. 12640505

SEQ ID NO: 78297 - protein, 461 aa, Arabidopsis thaliana; identical to SEQ ID NO: 77388
  peptide (1)..(461): Ceres Seq. ID no. 12640506

SEQ ID NO: 78298 - protein, 359 aa, Arabidopsis thaliana; identical to SEQ ID NO: 77389
  peptide (1)..(359): Ceres Seq. ID no. 12640507

SEQ ID NO: 78299 - DNA, 795 bp, Arabidopsis thaliana
  misc_feature (1)..(795): Ceres Seq. ID no. 12640567
  misc_feature (1)..(795): Ortholog of  Ceres SEQ ID NO 14310390 as cited in SEQ ID NO 59715
atgaagaagaagctccagacacgttttccagcgacaaggattaagaagattatgcaaactgatgaggaagttggcaaaatagcaatggcagtccctcttcttgtttctaaagctttggagctgtttttacaagacttgtgtaatcacacgtatgatgtaactctaagccgaggtgctaaaactgtcaacgcctttcatttgaagcagtgtgtgcaagcgactaatgtctttgattttctaagagacactgtcgctaaagttcctgatttgggtggctcagacactgaagaccaatcagctaccaaaagaaggaaagttgttgatggaagtagttgcaacgatgaagatatgataaagaccactcaaatgcatgaggtcaaacatactagctgtggcagaggaaggcgaggtagaggccgcggacgaagtagtggaagaacaggaagtgggctgtctctaaaatttgaagaagatttagaagacggttctcccgaaagcagcaggaccccgtctcccgaaaacgggagcctttctcacgacgatacatcttggaagaaagttgcatcacacaacaatcatcatagtagtaactcagaggtaaaagtaaggaacttcgatcttaatgttgaattagatgagaatggagacaatgctacatggctggaaacacagctagagagaagtccagattacccgttggagattaacgaaatgaaaatagatcctgatgatcaacaacaggctagtgctagtgacgaggaagattatgatgaagaaagcatagaccaagagtga

SEQ ID NO: 78300 - protein, 264 aa, Arabidopsis thaliana
  peptide (1)..(264): Ceres Seq. ID no. 12640568
MKKKLQTRFPATRIKKIMQTDEEVGKIAMAVPLLVSKALELFLQDLCNHTYDVTLSRGAKTVNAFHLKQCVQATNVFDFLRDTVAKVPDLGGSDTEDQSATKRRKVVDGSSCNDEDMIKTTQMHEVKHTSCGRGRRGRGRGRSSGRTGSGLSLKFEEDLEDGSPESSRTPSPENGSLSHDDTSWKKVASHNNHHSSNSEVKVRNFDLNVELDENGDNATWLETQLERSPDYPLEINEMKIDPDDQQQASASDEEDYDEESIDQE

SEQ ID NO: 78301 - protein, 247 aa, Arabidopsis thaliana
  peptide (1)..(247): Ceres Seq. ID no. 12640569
MQTDEEVGKIAMAVPLLVSKALELFLQDLCNHTYDVTLSRGAKTVNAFHLKQCVQATNVFDFLRDTVAKVPDLGGSDTEDQSATKRRKVVDGSSCNDEDMIKTTQMHEVKHTSCGRGRRGRGRGRSSGRTGSGLSLKFEEDLEDGSPESSRTPSPENGSLSHDDTSWKKVASHNNHHSSNSEVKVRNFDLNVELDENGDNATWLETQLERSPDYPLEINEMKIDPDDQQQASASDEEDYDEESIDQE

SEQ ID NO: 78302 - protein, 236 aa, Arabidopsis thaliana; identical to SEQ ID NO: 73694
  peptide (1)..(236): Ceres Seq. ID no. 12640570

SEQ ID NO: 78303 - DNA, 2589 bp, Arabidopsis thaliana
  misc_feature (1)..(2589): Ceres Seq. ID no. 12640574
  misc_feature (1)..(2589): Ortholog of  Ceres SEQ ID NO 13593911 as cited in SEQ ID NO 52935
cttacggctttcttcagaaaattggttggttttaaagagtactcatttacttagaaaaaatgttctttcttgcagatctcttttctagccttgtaggatttggtttaggttttaaggtttagcttagatttggtgtaaaattttgtcaatagtcattagtcaactaagtccaaagtcggtgtcaagcatgtgttatgtcaaatctcgttgtatctaattgtgtaaagagtttgtgattaatgtaatcactgatgcacttctactctcgtgttcttaggatttggtccaacttctaggctcttttgggagccattggagtcaaacagcaccgcaaacttattggttggaagtgacttagggatggctgagaggagagtcagtaacggagaagaagttgttattaatgtttcagataaagaagattcaaaagatccaagagcatctccttctttcaatccattggcttcaccagactccgatgctgggattgagaaatcgaaaccagtgccgcccataagcattcctactcctgaaatctataagttctctggtagcgttcataagccacctaaaattccaagtcctgaaggtctagttcggaggaagtctctttcgaggtcaatttactccaagcctaagtcaaggtttggggagcaacagtcttttcgatacgatagcactagagaggaaaatggtggaaggtcccttagggaacagtttggtgctggttcatttgcaaggggttcttttgacagggcttctcctaataacaaatccaataggagcgttgcgtcagcagcactgagtaaagttgctgaggaggaaccggatgaaaatgaagaaatctacaaaaaggttaagctacaccgagtgaagcgtagcggaatgaaacctctggcctttcttgagttggtagtgtttatggccattttgggggctttaattgtgagtttaaccattgatgtggtgaacaagcataccatttgggggttggaattttggaaatggtgtgtgcttgtgatggttacactcagcggcatgttggtgacaaattggttcatgcattttgtggtgttcatcatagaaaagaactatcttcttcggaaaaaagttttgtactttgtgcatgggttgaagaagaatgttcaagtcttcatttggtttagtctggttctgattgcttggatatgtctgttcgatggtgatgttaaacgtactcgtaagaccaagagatttctagacttcatcacttggactattgtctctcttctcgtagggtcaatccttttcttggtgaagacgtttgccttgaaagttcttgcttcaaagttcaacgtcagaaacttctttgagaggattcaagagtctgttttccaccaatacgttcttcagactctctcgggacctccgcttatcgaagaggcagagaacgttgggcgcgtgccaagcacaggtcacctaagtttcacaagaaccaaagatggaaaggtgaaagacaagaaagtgatcgatatgggaaaggttcacaggatgaaacaagagaaggtctctgcttggacaatgcgtgttttgatcgaagccgtgggaacttcaggtatatcaaccatatccagcactctagacgaggtcaacaataagaaagagagaacagataaagagataacaaatgagatggaggctgttgctgctgcttatgacgtcttcaacaatgtcgctaagccaaaccacaattacatagaagaagatgacttattgaggttcatgataaaggaagaagtagaccttgtactcccattaatagaagatgccgacaccggaaaaatcacacgcaagacttttacagaatgggtggttaatgtatacacaagtcggaaaactatagggcattcactgaacgacacaaaaacagcggttaagcagttggacaaacttataactggaatcttgaccgttatcacattcattgtttggatggtacttctggatatagcatcgaccaagcttttattggtcttctcctcacaatttttgggtcttgctttcatgatcggaagtacttgtaagaatatcttcgaatcctttatgttcgtctttgtgatgcatccttatgacgtcggagatcgttgcgttgtcgacggtgttatgttgttggttgaagaaatagatcttttaacaaccgtgttcctcaagattgacaacgagaaagtgttctacccaaattcggttttaatatcgaaaccgataagcaacttctacagaagtccagatatgggagattatgtcgacttcggcatcgcattctcaacaccggccgagaaaatcggctgtctcaagggaaaaatcggagaatacttggtggcaaactcacaacattggtatccagaagcacaggtgatggtgagggcaattgagaatatgaacaagctggtattgaatatactggtccaacacacgataaatttccaagtatatgtagagaagagtttaagaagaaccgcgctgatcatcgcaatcaagcgaattctcgaggatcttgagatcgattacactctccttcctcaagatgtcaatctcactggtcacaaatga

SEQ ID NO: 78304 - protein, 742 aa, Arabidopsis thaliana
  peptide (1)..(742): Ceres Seq. ID no. 12640575
MAERRVSNGEEVVINVSDKEDSKDPRASPSFNPLASPDSDAGIEKSKPVPPISIPTPEIYKFSGSVHKPPKIPSPEGLVRRKSLSRSIYSKPKSRFGEQQSFRYDSTREENGGRSLREQFGAGSFARGSFDRASPNNKSNRSVASAALSKVAEEEPDENEEIYKKVKLHRVKRSGMKPLAFLELVVFMAILGALIVSLTIDVVNKHTIWGLEFWKWCVLVMVTLSGMLVTNWFMHFVVFIIEKNYLLRKKVLYFVHGLKKNVQVFIWFSLVLIAWICLFDGDVKRTRKTKRFLDFITWTIVSLLVGSILFLVKTFALKVLASKFNVRNFFERIQESVFHQYVLQTLSGPPLIEEAENVGRVPSTGHLSFTRTKDGKVKDKKVIDMGKVHRMKQEKVSAWTMRVLIEAVGTSGISTISSTLDEVNNKKERTDKEITNEMEAVAAAYDVFNNVAKPNHNYIEEDDLLRFMIKEEVDLVLPLIEDADTGKITRKTFTEWVVNVYTSRKTIGHSLNDTKTAVKQLDKLITGILTVITFIVWMVLLDIASTKLLLVFSSQFLGLAFMIGSTCKNIFESFMFVFVMHPYDVGDRCVVDGVMLLVEEIDLLTTVFLKIDNEKVFYPNSVLISKPISNFYRSPDMGDYVDFGIAFSTPAEKIGCLKGKIGEYLVANSQHWYPEAQVMVRAIENMNKLVLNILVQHTINFQVYVEKSLRRTALIIAIKRILEDLEIDYTLLPQDVNLTGHK

SEQ ID NO: 78305 - protein, 567 aa, Arabidopsis thaliana
  peptide (1)..(567): Ceres Seq. ID no. 12640576
MKPLAFLELVVFMAILGALIVSLTIDVVNKHTIWGLEFWKWCVLVMVTLSGMLVTNWFMHFVVFIIEKNYLLRKKVLYFVHGLKKNVQVFIWFSLVLIAWICLFDGDVKRTRKTKRFLDFITWTIVSLLVGSILFLVKTFALKVLASKFNVRNFFERIQESVFHQYVLQTLSGPPLIEEAENVGRVPSTGHLSFTRTKDGKVKDKKVIDMGKVHRMKQEKVSAWTMRVLIEAVGTSGISTISSTLDEVNNKKERTDKEITNEMEAVAAAYDVFNNVAKPNHNYIEEDDLLRFMIKEEVDLVLPLIEDADTGKITRKTFTEWVVNVYTSRKTIGHSLNDTKTAVKQLDKLITGILTVITFIVWMVLLDIASTKLLLVFSSQFLGLAFMIGSTCKNIFESFMFVFVMHPYDVGDRCVVDGVMLLVEEIDLLTTVFLKIDNEKVFYPNSVLISKPISNFYRSPDMGDYVDFGIAFSTPAEKIGCLKGKIGEYLVANSQHWYPEAQVMVRAIENMNKLVLNILVQHTINFQVYVEKSLRRTALIIAIKRILEDLEIDYTLLPQDVNLTGHK

SEQ ID NO: 78306 - protein, 555 aa, Arabidopsis thaliana
  peptide (1)..(555): Ceres Seq. ID no. 12640577
MAILGALIVSLTIDVVNKHTIWGLEFWKWCVLVMVTLSGMLVTNWFMHFVVFIIEKNYLLRKKVLYFVHGLKKNVQVFIWFSLVLIAWICLFDGDVKRTRKTKRFLDFITWTIVSLLVGSILFLVKTFALKVLASKFNVRNFFERIQESVFHQYVLQTLSGPPLIEEAENVGRVPSTGHLSFTRTKDGKVKDKKVIDMGKVHRMKQEKVSAWTMRVLIEAVGTSGISTISSTLDEVNNKKERTDKEITNEMEAVAAAYDVFNNVAKPNHNYIEEDDLLRFMIKEEVDLVLPLIEDADTGKITRKTFTEWVVNVYTSRKTIGHSLNDTKTAVKQLDKLITGILTVITFIVWMVLLDIASTKLLLVFSSQFLGLAFMIGSTCKNIFESFMFVFVMHPYDVGDRCVVDGVMLLVEEIDLLTTVFLKIDNEKVFYPNSVLISKPISNFYRSPDMGDYVDFGIAFSTPAEKIGCLKGKIGEYLVANSQHWYPEAQVMVRAIENMNKLVLNILVQHTINFQVYVEKSLRRTALIIAIKRILEDLEIDYTLLPQDVNLTGHK

SEQ ID NO: 78307 - DNA, 1308 bp, Arabidopsis thaliana
  misc_feature (1)..(1308): Ceres Seq. ID no. 12640578
  misc_feature (1)..(1308): Ortholog of  Ceres SEQ ID NO 15176230 as cited in SEQ ID NO 58796
  misc_feature (1)..(1308): Ortholog of  Ceres SEQ ID NO 14308156 as cited in SEQ ID NO 59006
gtcccatcaccaaacattaagtagcactctttttcctctctatatctctcactcacactttttctctatatcttctcctcaacttggatatgggtgaagccgtagaggtcatgttcggaaatgggttcccggagattcacaaagccacatcacccactcaaaccctccactctaaccagcaagactgccattggtatgaagaaaccatcgatgatgatctcaagtggtcttttgccctcaacagtgttctccatcaaggaactagtgagtaccaagatattgctctgttggacaccaaacgttttggaaaggtgcttgtgattgatgggaaaatgcaaagtgctgagagagatgagtttatctaccatgaatgtttgatccatcccgctctccttttccatcccaaccccaagactgtgtttataatgggaggaggtgaaggctctgctgcaagagaaatactaaaacacacgacgatcgagaaagttgttatgtgtgatattgatcaggaagttgttgatttttgcagaagatttctgaccgttaacagcgatgctttctgtaacaaaaagcttgaacttgtgatcaaagatgcaaaggctgaattagagaaaagggaagagaagtttgatatcatagtgggagatttagctgatccagtggaaggtggaccttgttatcagctctacaccaaatccttctaccaaaacattctcaaacccaagcttagccctaatggcatttttgtcacccaggctggaccagcaggaatattcactcataaggaagtcttcacatcaatctacaacaccatgaagcaagtcttcaagtacgtgaaggcttacacagcacatgtgccatcatttgcggacacatggggatgggtgatggcatcggaccacgagtttgacgttgaagttgatgaaatggatcgaagaatcgaagagagagttaacggagaattgatgtatctaaacgctccttctttcgtctctgctgctactctcaacaaaaccatctctctcgcgctagagaaggagactgaagtttatagtgaagagaatgcgagattcattcatggtcatggtgtggcgtaccggcatatttaaagacgaaccggtttcagtttcagtgttattaccaaacccatgtcacaaaaacaaaaggccggtttcttttctccgcacagaaccgggtgttgtcttgaatcttgattactttggttcggttttattttctacattgctttttgttttcttgttcttccctcaagttattccggtttaacaagactatattgcttactaa

SEQ ID NO: 78308 - protein, 339 aa, Arabidopsis thaliana; identical to SEQ ID NO: 26797
  peptide (1)..(339): Ceres Seq. ID no. 12640579

SEQ ID NO: 78309 - protein, 332 aa, Arabidopsis thaliana; identical to SEQ ID NO: 26798
  peptide (1)..(332): Ceres Seq. ID no. 12640580

SEQ ID NO: 78310 - protein, 258 aa, Arabidopsis thaliana; identical to SEQ ID NO: 26799
  peptide (1)..(258): Ceres Seq. ID no. 12640581

SEQ ID NO: 78311 - DNA, 2127 bp, Arabidopsis thaliana
  misc_feature (1)..(2127): Ceres Seq. ID no. 12640586
  misc_feature (1)..(2127): Ortholog of  Ceres SEQ ID NO 15174947 as cited in SEQ ID NO 236
aggcatcacaacaatcaatataagcctgggatccaattttcttatttccccaaccaaaacaggggaagaaaaaaaaagaaaacaaaaaaatcaaaaaaaattagaaaatgaaagcctcaacaagagtcatatggacaatatctgtccttatgctcgctgctgtgtccgaggccatcttccctctaccgtttctaccgttcctccctgggttcaacaacggctttagggacaatgaggctgtcaaggttgcgaaaccacagcctgcaggagcagttggtggaaaagccgcaagaaggcagcgtggcggcggtttagacgctcagacaacctggggtggtaagtgggagctcttcttggaaaactcgggtgtgtcagggatgcatgcgatccttatgccagttatcaacaaggtccagtactatgacgccaccatttggagaatttcaaagattaagttgcctccaggcgtaccatgccatgtcgtggacgctaagactaacaaggtcgattgttgggctcattcgattctcatggatgtcaacaccggcgcccttaagcctctagggctttccaccgatacatggtgctcatccggaggtctgaccgtaaatggtacattggtgagcactggaggatacggaggaggagccaacaccgcgaggtacctatccagctgtgaaaactgcaagtgggaagaataccctcaggcattggccgcgaagagatggtactcaacgcaagcaactctccctgacggaaagttcttcgtgattggtggaagagacgccttgaactacgaatacattcctgaggagggacaaaacaacaggaagctctttgactcattgctcctcaggcaaacagacgacccggaagaaaacaacctttaccctttcgtctggcttaacaccgacggtaacctcttcattttcgctaacaaccgatccatccttctaagccccaaaacaaaccaagtcatcaaggagttccctcagctcccaggtggtgcccgtaactacccgggatcaggttcttccgcactcctccccatccaactttacgtgaaaaaccccaaggtcatcccagccgaggttctcgtctgtggtggttccaaacaagacgcgtattacaaggctggtaaaaaaatatacgaaccagcactacaagactgcgccaggataaggatcaacagcgcaaagccacgatggaagacggagatgatgccaaccccacgaatcatgagtgatactgtcatcctccctaacggagacatccttctagtcaacggagctaaacgtggttgttcaggctggggatatggtaaagaccctgcctttgctcccctcttgtacaagccccatgctgcacgtggcaagcgtttcagacagctcaagcccaccaccatcccacgtatgtaccactccagcgccatcattcttccagacggtaaggttcttgtcggtggcagcaacaccaacgacggttacaagtacaacgttgagttcccaacggagcttcgcgttgagaaattctccccaccttacctcgacccggctctagccaacataaggccaaagatcgtcaccaccggcaccccaaaacaggtcaaatacggacaattcttcaacgtgaaggtcgaccttaaagaaaagggagcaaccaagggaaatctcaaggttaccatgttagcccctgccttcacaacacacagtatctcaatgaacatgaggatgctcatcttgggtgtcaataatgtcaaacctgctggtgccggttacgatatccaggccgttgcaccaccaaatggaaacatcgctccaccgggttactatcttatctttgccatctacaaaggtgttcccagcactggagaatggattcaggtcgtctaatgacgataatttttacccattttgtcttatgaccgtaacatcttaatataaaacaatcacataatatcagtttttttttccttctatatatattgtttatgccaccattaatggatccaaattacttgtgttttctttcacttctataaacttttccgttcatgtaaaccttttcggtgagtttttatgactaaattttgtattggagaaattcttttattattacttttggctc

SEQ ID NO: 78312 - protein, 594 aa, Arabidopsis thaliana
  peptide (1)..(594): Ceres Seq. ID no. 12640587
MKASTRVIWTISVLMLAAVSEAIFPLPFLPFLPGFNNGFRDNEAVKVAKPQPAGAVGGKAARRQRGGGLDAQTTWGGKWELFLENSGVSGMHAILMPVINKVQYYDATIWRISKIKLPPGVPCHVVDAKTNKVDCWAHSILMDVNTGALKPLGLSTDTWCSSGGLTVNGTLVSTGGYGGGANTARYLSSCENCKWEEYPQALAAKRWYSTQATLPDGKFFVIGGRDALNYEYIPEEGQNNRKLFDSLLLRQTDDPEENNLYPFVWLNTDGNLFIFANNRSILLSPKTNQVIKEFPQLPGGARNYPGSGSSALLPIQLYVKNPKVIPAEVLVCGGSKQDAYYKAGKKIYEPALQDCARIRINSAKPRWKTEMMPTPRIMSDTVILPNGDILLVNGAKRGCSGWGYGKDPAFAPLLYKPHAARGKRFRQLKPTTIPRMYHSSAIILPDGKVLVGGSNTNDGYKYNVEFPTELRVEKFSPPYLDPALANIRPKIVTTGTPKQVKYGQFFNVKVDLKEKGATKGNLKVTMLAPAFTTHSISMNMRMLILGVNNVKPAGAGYDIQAVAPPNGNIAPPGYYLIFAIYKGVPSTGEWIQVV

SEQ ID NO: 78313 - protein, 580 aa, Arabidopsis thaliana
  peptide (1)..(580): Ceres Seq. ID no. 12640588
MLAAVSEAIFPLPFLPFLPGFNNGFRDNEAVKVAKPQPAGAVGGKAARRQRGGGLDAQTTWGGKWELFLENSGVSGMHAILMPVINKVQYYDATIWRISKIKLPPGVPCHVVDAKTNKVDCWAHSILMDVNTGALKPLGLSTDTWCSSGGLTVNGTLVSTGGYGGGANTARYLSSCENCKWEEYPQALAAKRWYSTQATLPDGKFFVIGGRDALNYEYIPEEGQNNRKLFDSLLLRQTDDPEENNLYPFVWLNTDGNLFIFANNRSILLSPKTNQVIKEFPQLPGGARNYPGSGSSALLPIQLYVKNPKVIPAEVLVCGGSKQDAYYKAGKKIYEPALQDCARIRINSAKPRWKTEMMPTPRIMSDTVILPNGDILLVNGAKRGCSGWGYGKDPAFAPLLYKPHAARGKRFRQLKPTTIPRMYHSSAIILPDGKVLVGGSNTNDGYKYNVEFPTELRVEKFSPPYLDPALANIRPKIVTTGTPKQVKYGQFFNVKVDLKEKGATKGNLKVTMLAPAFTTHSISMNMRMLILGVNNVKPAGAGYDIQAVAPPNGNIAPPGYYLIFAIYKGVPSTGEWIQVV

SEQ ID NO: 78314 - protein, 504 aa, Arabidopsis thaliana
  peptide (1)..(504): Ceres Seq. ID no. 12640589
MHAILMPVINKVQYYDATIWRISKIKLPPGVPCHVVDAKTNKVDCWAHSILMDVNTGALKPLGLSTDTWCSSGGLTVNGTLVSTGGYGGGANTARYLSSCENCKWEEYPQALAAKRWYSTQATLPDGKFFVIGGRDALNYEYIPEEGQNNRKLFDSLLLRQTDDPEENNLYPFVWLNTDGNLFIFANNRSILLSPKTNQVIKEFPQLPGGARNYPGSGSSALLPIQLYVKNPKVIPAEVLVCGGSKQDAYYKAGKKIYEPALQDCARIRINSAKPRWKTEMMPTPRIMSDTVILPNGDILLVNGAKRGCSGWGYGKDPAFAPLLYKPHAARGKRFRQLKPTTIPRMYHSSAIILPDGKVLVGGSNTNDGYKYNVEFPTELRVEKFSPPYLDPALANIRPKIVTTGTPKQVKYGQFFNVKVDLKEKGATKGNLKVTMLAPAFTTHSISMNMRMLILGVNNVKPAGAGYDIQAVAPPNGNIAPPGYYLIFAIYKGVPSTGEWIQVV

SEQ ID NO: 78315 - DNA, 1353 bp, Arabidopsis thaliana
  misc_feature (1)..(1353): Ceres Seq. ID no. 12640602
  misc_feature (1)..(1353): Ortholog of  Ceres SEQ ID NO 14307863 as cited in SEQ ID NO 20504
atgcgagaaatcataagcattcacatcggacaagctgggatccaggtcggaaattcgtgttgggagctttactgtctcgaacatggaatccagccggacggaatgatgccgagtgatactacagttggtgttgcacacgatgcgttcaatactttctttagcgagactggtgctgggaagcatgtccctagggctgtcttcgttgatctcgagcctaccgttatcgacgaagttcgtactggtacttaccgtcaacttttccatccagagcagctcatttctgggaaagaagatgctgctaacaacttcgctagaggacattacactgttgggaaggaaattgtggatctatgtcttgaccgtgtgaggaaacttgccgacaactgtactggcttacaagggtttttggtgttcaatgctgttggtggtggaactggttctggattgggttctctgttgctagagcgtttgtctgtagattatggaaagaagtctaagcttggttttaccatatacccttctcctcaggtttctactgctgttgtagaaccttacaacagtgttctctcaacgcattcccttcttgaacatacggatgtagctgtcctcttggataacgaagccatctatgacatttgccgcagatccctagatatcgagaggccaacctacacaaacttgaacaggttgatatcacagatcatttcatccttgacaacatctttgaggtttgatggtgccatcaacgtggatatcactgagttccagaccaatcttgtcccatatccccgtatccatttcatgctgtcatcttatgcaccagtcatctcagccgccaaggcttaccacgagcagctatcagtccctgagatcaccaatgccgtttttgagccagctagcatgatggcaaagtgtgacccgagacacggaaagtacatggcctgttgtttgatgtaccgaggagatgttgttcccaaagatgttaatgctgctgttggcaccatcaagacaaagaggactgttcagtttgttgactggtgcccaactgggttcaaatgtggaatcaactaccaacctccaacagttgttccaggtggtgacctcgctaaggttcagagagctgtatgtatgatcagtaacaacacagcagttgcagaggtgttctcacggatcgaccacaagtttgatctcatgtatgcgaagagggcatttgtccactggtacgttggtgaaggaatggaggaaggtgaattctctgaggcacgtgaagacttggccgcactggagaaagattacgaagaagttggtgctgaaggtggagacgatgaagaagatgaaggtgaagactattga

SEQ ID NO: 78316 - protein, 450 aa, Arabidopsis thaliana; identical to SEQ ID NO: 38746
  peptide (1)..(450): Ceres Seq. ID no. 12640603

SEQ ID NO: 78317 - protein, 416 aa, Arabidopsis thaliana; identical to SEQ ID NO: 38747
  peptide (1)..(416): Ceres Seq. ID no. 12640604

SEQ ID NO: 78318 - protein, 415 aa, Arabidopsis thaliana; identical to SEQ ID NO: 38748
  peptide (1)..(415): Ceres Seq. ID no. 12640605

SEQ ID NO: 78319 - DNA, 1248 bp, Arabidopsis thaliana
  misc_feature (1)..(1248): Ceres Seq. ID no. 12640618
  misc_feature (1)..(1248): Ortholog of  Ceres SEQ ID NO 13596474 as cited in SEQ ID NO 62169
  misc_feature (1)..(1248): Ortholog of  Ceres SEQ ID NO 13598714 as cited in SEQ ID NO 62656
  misc_feature (1)..(1248): Ortholog of  Ceres SEQ ID NO 13596969 as cited in SEQ ID NO 63375
  misc_feature (1)..(1248): Ortholog of  Ceres SEQ ID NO 13597519 as cited in SEQ ID NO 64759
  misc_feature (1)..(1248): Ortholog of  Ceres SEQ ID NO 13597870 as cited in SEQ ID NO 64982
  misc_feature (1)..(1248): Ortholog of  Ceres SEQ ID NO 13587054 as cited in SEQ ID NO 0
atcaactcctctaataagcttcttctttctatccctcacttttacaaacaaagggagaccaaaaatgggtctaagcaaaactattcccttagtgttactcccgattttgatgtttggggttttgagtaacgctcagcttacctctgatttttactccacgacatgccctaacgtcacagccattgctcggggactgatcgagcgagcaagccgtaacgacgtcagactcactgctaaagtcatgcgtcttcactttcatgactgtttcgtgaacgggtgcgatggttcggtactattggacgctgctccagcggatggggtagagggtgaaaaggaggctttccaaaacgcgggttctcttgatggattcgaagtgatcgatgatatcaaaaccgccctcgagaatgtttgtcccggagttgtctcttgtgctgatatcctcgctatcgcagctgaaatctctgttgcactggcgggagggccgtcattggacgtattgctaggaaggagagatggccggacagcgatccgtgcggacgcagtggctgcacttccactaggacctgattctctcgagattcttacttccaaattctccgtacataatcttgacactaccgatctcgtcgctttatctggtgctcataccttcgggagggttcagtgtggagtgataaacaatcgtctacacaactttagtggtaacagcggacagtccgacccaagtatcgaaccggagttcttgcaaacgttacgacgacaatgcccgcaaggcggagatctcaccgcaagggcgaatcttgatcctacgagccccgactcatttgataacgactatttcaagaaccttcaaaacaaccgcggagtgattgaatcagatcaaatcttgttctcttcgacaggagcgcctactgtgtctttggtgaatcgttttgctgagaaccaaaatgagttctttacaaattttgcgagatcaatgatcaagatgggaaatgtgaggattctcacaggacgtgagggagagatacgtagagactgcagacgcgtcaattaataagttttgcatggttaaatgatcaaacgtaacttattgttattcatgaaataagtgttctttagtttgtgcttctccacaattaattgtttttcttcttttgattttatttactgttaagcatgccattgttacttgtaattgtaaatcttatataatatttttctttttgaaaaaatccactatcatgtctg

SEQ ID NO: 78320 - protein, 350 aa, Arabidopsis thaliana
  peptide (1)..(350): Ceres Seq. ID no. 12640619
STPLISFFFLSLTFTNKGRPKMGLSKTIPLVLLPILMFGVLSNAQLTSDFYSTTCPNVTAIARGLIERASRNDVRLTAKVMRLHFHDCFVNGCDGSVLLDAAPADGVEGEKEAFQNAGSLDGFEVIDDIKTALENVCPGVVSCADILAIAAEISVALAGGPSLDVLLGRRDGRTAIRADAVAALPLGPDSLEILTSKFSVHNLDTTDLVALSGAHTFGRVQCGVINNRLHNFSGNSGQSDPSIEPEFLQTLRRQCPQGGDLTARANLDPTSPDSFDNDYFKNLQNNRGVIESDQILFSSTGAPTVSLVNRFAENQNEFFTNFARSMIKMGNVRILTGREGEIRRDCRRVN

SEQ ID NO: 78321 - protein, 329 aa, Arabidopsis thaliana
  peptide (1)..(329): Ceres Seq. ID no. 12640620
MGLSKTIPLVLLPILMFGVLSNAQLTSDFYSTTCPNVTAIARGLIERASRNDVRLTAKVMRLHFHDCFVNGCDGSVLLDAAPADGVEGEKEAFQNAGSLDGFEVIDDIKTALENVCPGVVSCADILAIAAEISVALAGGPSLDVLLGRRDGRTAIRADAVAALPLGPDSLEILTSKFSVHNLDTTDLVALSGAHTFGRVQCGVINNRLHNFSGNSGQSDPSIEPEFLQTLRRQCPQGGDLTARANLDPTSPDSFDNDYFKNLQNNRGVIESDQILFSSTGAPTVSLVNRFAENQNEFFTNFARSMIKMGNVRILTGREGEIRRDCRRVN

SEQ ID NO: 78322 - protein, 314 aa, Arabidopsis thaliana
  peptide (1)..(314): Ceres Seq. ID no. 12640621
MFGVLSNAQLTSDFYSTTCPNVTAIARGLIERASRNDVRLTAKVMRLHFHDCFVNGCDGSVLLDAAPADGVEGEKEAFQNAGSLDGFEVIDDIKTALENVCPGVVSCADILAIAAEISVALAGGPSLDVLLGRRDGRTAIRADAVAALPLGPDSLEILTSKFSVHNLDTTDLVALSGAHTFGRVQCGVINNRLHNFSGNSGQSDPSIEPEFLQTLRRQCPQGGDLTARANLDPTSPDSFDNDYFKNLQNNRGVIESDQILFSSTGAPTVSLVNRFAENQNEFFTNFARSMIKMGNVRILTGREGEIRRDCRRVN

SEQ ID NO: 78323 - DNA, 1194 bp, Arabidopsis thaliana
  misc_feature (1)..(1194): Ceres Seq. ID no. 12640622
  misc_feature (1)..(1194): Ortholog of  Ceres SEQ ID NO 13594727 as cited in SEQ ID NO 52169
  misc_feature (1)..(1194): Ortholog of  Ceres SEQ ID NO 14314050 as cited in SEQ ID NO 59952
  misc_feature (1)..(1194): Ortholog of  Ceres SEQ ID NO 13596474 as cited in SEQ ID NO 62169
  misc_feature (1)..(1194): Ortholog of  Ceres SEQ ID NO 13598714 as cited in SEQ ID NO 62656
  misc_feature (1)..(1194): Ortholog of  Ceres SEQ ID NO 13597519 as cited in SEQ ID NO 64759
  misc_feature (1)..(1194): Ortholog of  Ceres SEQ ID NO 14302388 as cited in SEQ ID NO 65655
  misc_feature (1)..(1194): Ortholog of  Ceres SEQ ID NO 13595926 as cited in SEQ ID NO 67778
  misc_feature (1)..(1194): Ortholog of  Ceres SEQ ID NO 13587054 as cited in SEQ ID NO 0
aataaactatctctttagtaagtcttttaaacaagctatctagataatgaaaacacaaaccaaagtgatgggaggacatgtcttgcttactgttttcactctttgtatgctttgttcaggggttagggcacagctaagccctgacatttatgctaaatcgtgccccaatctagttcaaattgtccgtaaacaagttgccatcgccctgaaggccgagatacggatggctgcttctctcattcgtcttcatttccacgactgctttgttaatgggtgtgatgcgtcgttattgttggatggagctgacagcgagaaactcgcgatcccaaacattaactctgctagaggatttgaagtaattgatacaatcaaagccgctgtggaaaacgcatgtcctggtgttgtttcttgtgctgatatcctcactttggccgctcgtgactccgttgtattgagtggagggcctgggtggagagtggcattaggaagaaaagatggattggtggcaaatcagaacagtgcaaacaatctaccatctccttttgaacctttagacgccattatcgccaaatttgtagccgtaaaccttaacatcaccgacgtcgtagctttatcaggagctcacacctttggacaagcgaagtgtgctgtcttcagcaaccgtctgttcaactttaccggcttgggaaatcccgacgcaacacttgagacatcactcttgtctaatctgcaaacagtttgtccgctcggaggaaatagtaacataacagcacctcttgacaggagcactacggacaccttcgacaacaattatttcaagaacctgcttgaaggaaaaggtcttttgagttctgatcagattctgttctcgagtgacttagccgtgaacaccacaaagaaactagtggaggcttatagtcggagccagagcttgtttttcagggacttcacatgtgcgatgatcagaatgggaaacatttcgaatggagctagtggggaggttaggacaaactgcagggttatcaataattagcatgtgtgtgtgttttcgagtttatgtaatgtttgggagttgatcggtctcgtgtgtatcagaatgatcacgtgtgtaataataagaattaatggggtttgttggtttgcctaattaaaagtgatttggtaaacctggaaattttcattgattttaaaatt

SEQ ID NO: 78324 - protein, 328 aa, Arabidopsis thaliana
  peptide (1)..(328): Ceres Seq. ID no. 12640623
MKTQTKVMGGHVLLTVFTLCMLCSGVRAQLSPDIYAKSCPNLVQIVRKQVAIALKAEIRMAASLIRLHFHDCFVNGCDASLLLDGADSEKLAIPNINSARGFEVIDTIKAAVENACPGVVSCADILTLAARDSVVLSGGPGWRVALGRKDGLVANQNSANNLPSPFEPLDAIIAKFVAVNLNITDVVALSGAHTFGQAKCAVFSNRLFNFTGLGNPDATLETSLLSNLQTVCPLGGNSNITAPLDRSTTDTFDNNYFKNLLEGKGLLSSDQILFSSDLAVNTTKKLVEAYSRSQSLFFRDFTCAMIRMGNISNGASGEVRTNCRVINN

SEQ ID NO: 78325 - protein, 321 aa, Arabidopsis thaliana
  peptide (1)..(321): Ceres Seq. ID no. 12640624
MGGHVLLTVFTLCMLCSGVRAQLSPDIYAKSCPNLVQIVRKQVAIALKAEIRMAASLIRLHFHDCFVNGCDASLLLDGADSEKLAIPNINSARGFEVIDTIKAAVENACPGVVSCADILTLAARDSVVLSGGPGWRVALGRKDGLVANQNSANNLPSPFEPLDAIIAKFVAVNLNITDVVALSGAHTFGQAKCAVFSNRLFNFTGLGNPDATLETSLLSNLQTVCPLGGNSNITAPLDRSTTDTFDNNYFKNLLEGKGLLSSDQILFSSDLAVNTTKKLVEAYSRSQSLFFRDFTCAMIRMGNISNGASGEVRTNCRVINN

SEQ ID NO: 78326 - protein, 308 aa, Arabidopsis thaliana
  peptide (1)..(308): Ceres Seq. ID no. 12640625
MLCSGVRAQLSPDIYAKSCPNLVQIVRKQVAIALKAEIRMAASLIRLHFHDCFVNGCDASLLLDGADSEKLAIPNINSARGFEVIDTIKAAVENACPGVVSCADILTLAARDSVVLSGGPGWRVALGRKDGLVANQNSANNLPSPFEPLDAIIAKFVAVNLNITDVVALSGAHTFGQAKCAVFSNRLFNFTGLGNPDATLETSLLSNLQTVCPLGGNSNITAPLDRSTTDTFDNNYFKNLLEGKGLLSSDQILFSSDLAVNTTKKLVEAYSRSQSLFFRDFTCAMIRMGNISNGASGEVRTNCRVINN

SEQ ID NO: 78327 - DNA, 1198 bp, Arabidopsis thaliana
  misc_feature (1)..(1198): Ceres Seq. ID no. 12640626
  misc_feature (1)..(1198): Ortholog of  Ceres SEQ ID NO 13598539 as cited in SEQ ID NO 65041
gaactgaatcttcgtcgtcaacagattctccgccactggaagaaatggaaacgtcgccgcaattcagacttatcttcgccgtaatcatttcttctctcatcgctttccgatcgtacaagcggaagtcgctcgatctctccggtggaattgctggattcctcgttatgaccattcacttcaccgccggtttcaggtacggagctctgctgcttgtattctttcttacttcctcgaaacttaccaaagttggcgaagataaaaaaagacgcgttgatgttgagttcaaagaaggtggacaaaggaactgggtacaagtgctatgcaatagtggaattgcttcagttctagttgtaattgcttgtactttaacgggttggaaggacaagtgtttggactcgaagcagtcagaaattgtaacagctcttattggtgggatcattggtcattacgcctgctgtaatggagacacttggtcctcagagcttggggttcttagtgatgcccagcctcgactaatcacaacgtttaagccggtgaagaagggcacaaatggtggagttacaaaggcaggactcttagctgccttggcagcaggcaccactgttggattaacattccttatcttcggactctttaccgcgagttgtgcaagtgatgtagctctaaagcaactcttagtcataccactctctgcactagctggactatgtgggagtcttattgattctatactaggagcaaccattcaattcagtggtttctgctctgtccggaacaaggttgtagggaaaccgggtccaaccgtaaagaagatttcaggtgtggacattcttgacaacaatggtgtgaactttgtctccatactcttgacatcttttctgacttccattgcttctgtgtacattttctgaatgatgaagctaccaacctgttttcttgactagactgttttagattttcaccttttgcatgccaaatttggtatacaaacatactttgattttatttcttaaattgttcattttgttgtatgctgaaatgagagttttaagttcatagaaaactttgatcaaaaaaaaaaaaaaaaaaaagttcatagaacacagtctcttttatgttcagtacaataatcacagctaccaatgtaactgaacatgtatttgttgttttgtttaagagatgtatcactgtgcttccg

SEQ ID NO: 78328 - protein, 302 aa, Arabidopsis thaliana
  peptide (1)..(302): Ceres Seq. ID no. 12640627
TESSSSTDSPPLEEMETSPQFRLIFAVIISSLIAFRSYKRKSLDLSGGIAGFLVMTIHFTAGFRYGALLLVFFLTSSKLTKVGEDKKRRVDVEFKEGGQRNWVQVLCNSGIASVLVVIACTLTGWKDKCLDSKQSEIVTALIGGIIGHYACCNGDTWSSELGVLSDAQPRLITTFKPVKKGTNGGVTKAGLLAALAAGTTVGLTFLIFGLFTASCASDVALKQLLVIPLSALAGLCGSLIDSILGATIQFSGFCSVRNKVVGKPGPTVKKISGVDILDNNGVNFVSILLTSFLTSIASVYIF

SEQ ID NO: 78329 - protein, 288 aa, Arabidopsis thaliana
  peptide (1)..(288): Ceres Seq. ID no. 12640628
METSPQFRLIFAVIISSLIAFRSYKRKSLDLSGGIAGFLVMTIHFTAGFRYGALLLVFFLTSSKLTKVGEDKKRRVDVEFKEGGQRNWVQVLCNSGIASVLVVIACTLTGWKDKCLDSKQSEIVTALIGGIIGHYACCNGDTWSSELGVLSDAQPRLITTFKPVKKGTNGGVTKAGLLAALAAGTTVGLTFLIFGLFTASCASDVALKQLLVIPLSALAGLCGSLIDSILGATIQFSGFCSVRNKVVGKPGPTVKKISGVDILDNNGVNFVSILLTSFLTSIASVYIF

SEQ ID NO: 78330 - protein, 248 aa, Arabidopsis thaliana
  peptide (1)..(248): Ceres Seq. ID no. 12640629
MTIHFTAGFRYGALLLVFFLTSSKLTKVGEDKKRRVDVEFKEGGQRNWVQVLCNSGIASVLVVIACTLTGWKDKCLDSKQSEIVTALIGGIIGHYACCNGDTWSSELGVLSDAQPRLITTFKPVKKGTNGGVTKAGLLAALAAGTTVGLTFLIFGLFTASCASDVALKQLLVIPLSALAGLCGSLIDSILGATIQFSGFCSVRNKVVGKPGPTVKKISGVDILDNNGVNFVSILLTSFLTSIASVYIF

SEQ ID NO: 78331 - DNA, 1319 bp, Arabidopsis thaliana
  misc_feature (1)..(1319): Ceres Seq. ID no. 12640686
  misc_feature (1)..(1319): Ortholog of  Ceres SEQ ID NO 15171279 as cited in SEQ ID NO 51378
  misc_feature (1)..(1319): Ortholog of  Ceres SEQ ID NO 13596816 as cited in SEQ ID NO 62287
aaaaaaacaaatttggttcctttttcttcttcagacgagtaatatcttttgtcttcatcatgctctattcacctaagaagctgttcttgttcttcctctcgtgcattgtgctgtatgtcaactccaacaacagtggcttcgtaaccgcagcaaatagcatcggcttgaactacggactcctcggtgacaacctcccgtctccttccaatgttatcaacctttacaagtccataggcattagtagaatccgaatcttcgacccgaacactgaggtactcaatgccttacgtggtcaccgcgatattgaagtcactgttggcgttaaggaccaagacttggctgctcttgctgcaagcgaagaagctgttaagggctggttcgcggccaacatcgagtcttacttagctgacgtcaacatcacatttattaccgttggtaacgaagtcatccccggaccaatcggtcctcaagtgcttcccgtcatgcagtctctaaccaacctagtcaagtcgaggaatcttccgatctcgataagcaccgtggtggctatgtcgaacctggagcagtcgtatccaccttccgcgggaatgttcacctcccaggcgcgggaacaacttgtccccgtgttgaaactattgtctcaaacaagcacaccaatccttgtcaacatatacccttacttcgcttatgcgtccgacccagccaacatccgtctcgactatgccagctttaacactaagtccatcgtggtccaagatggatcattgggctattcaaacatgtttgatgcaatctttgatgcgttcgtgtgggcaatggagaaggaaggcgttaaaaatttaccaatggtggtgtccgagaccggatggccatccgcggggaacgggaactttaccacgccggctattgcgtccacctacaacagaaattttgtgaagcatatagcaagcggaaaagggacgcctaaaaggcctaacaagagcatgaacgggtttttgtttgcaacgttcaatgaaaatcagaagccggccgggactgaacaaaactttggtttatacaatccaagtgatatgaagcctatctacaagctattctaagtgtgaaagttacttagactttcccgattcactaataataatgctctactagttgttagtgaattaaagtaagattaacaatgatgcacatgctataagcaactggtgactatgagatgatggctctcgtagcgaacttagttgactttttgtaataaaatctgaatgtagtatttaaaaccaatttcctggttttataaacgaatgtactgcctcttcaat

SEQ ID NO: 78332 - protein, 364 aa, Arabidopsis thaliana
  peptide (1)..(364): Ceres Seq. ID no. 12640687
KNKFGSFFFFRRVISFVFIMLYSPKKLFLFFLSCIVLYVNSNNSGFVTAANSIGLNYGLLGDNLPSPSNVINLYKSIGISRIRIFDPNTEVLNALRGHRDIEVTVGVKDQDLAALAASEEAVKGWFAANIESYLADVNITFITVGNEVIPGPIGPQVLPVMQSLTNLVKSRNLPISISTVVAMSNLEQSYPPSAGMFTSQAREQLVPVLKLLSQTSTPILVNIYPYFAYASDPANIRLDYASFNTKSIVVQDGSLGYSNMFDAIFDAFVWAMEKEGVKNLPMVVSETGWPSAGNGNFTTPAIASTYNRNFVKHIASGKGTPKRPNKSMNGFLFATFNENQKPAGTEQNFGLYNPSDMKPIYKLF

SEQ ID NO: 78333 - protein, 345 aa, Arabidopsis thaliana
  peptide (1)..(345): Ceres Seq. ID no. 12640688
MLYSPKKLFLFFLSCIVLYVNSNNSGFVTAANSIGLNYGLLGDNLPSPSNVINLYKSIGISRIRIFDPNTEVLNALRGHRDIEVTVGVKDQDLAALAASEEAVKGWFAANIESYLADVNITFITVGNEVIPGPIGPQVLPVMQSLTNLVKSRNLPISISTVVAMSNLEQSYPPSAGMFTSQAREQLVPVLKLLSQTSTPILVNIYPYFAYASDPANIRLDYASFNTKSIVVQDGSLGYSNMFDAIFDAFVWAMEKEGVKNLPMVVSETGWPSAGNGNFTTPAIASTYNRNFVKHIASGKGTPKRPNKSMNGFLFATFNENQKPAGTEQNFGLYNPSDMKPIYKLF

SEQ ID NO: 78334 - protein, 204 aa, Arabidopsis thaliana; identical to SEQ ID NO: 29450
  peptide (1)..(204): Ceres Seq. ID no. 12640689

SEQ ID NO: 78335 - DNA, 945 bp, Arabidopsis thaliana
  misc_feature (1)..(945): Ceres Seq. ID no. 12640741
  misc_feature (1)..(945): Ortholog of  Ceres SEQ ID NO 13594549 as cited in SEQ ID NO 51707
  misc_feature (1)..(945): Ortholog of  Ceres SEQ ID NO 13595294 as cited in SEQ ID NO 55998
  misc_feature (1)..(945): Ortholog of  Ceres SEQ ID NO 14302012 as cited in SEQ ID NO 56618
  misc_feature (1)..(945): Ortholog of  Ceres SEQ ID NO 12598102 as cited in SEQ ID NO 61029
  misc_feature (1)..(945): Ortholog of  Ceres SEQ ID NO 12625361 as cited in SEQ ID NO 62928
  misc_feature (1)..(945): Ortholog of  Ceres SEQ ID NO 13599424 as cited in SEQ ID NO 0
tctctctactgcaatttttagggttttatcctccgaaagtctcaacctttttcttatcctcaacaagaaatggcggcgactcaacttacagcgtcaccagtgactatgtcagcaaggagcttagcctcgctggatggtctcagagcttcgagtgtcaagttttcatctttgaaaccagggacccttagacagagccagttccgtcgtttggttgtcaaagctgcttctgttgttgcccctaagtatacttcaattaagccattgggagatcgagttttggtgaagatcaaggaggcagaggagaagactttaggtggtatcttacttccatccactgctcaatcaaaacctcaaggaggtgaagtcgttgccgtgggtgaaggaagaactattgggaagaacaaaattgatatcactgtccctactggagcacaaattatctactccaaatacgcaggaactgaggtggagttcaatgatgtgaagcatcttatcctcaaggaagatgatattgttggcattcttgagacagaggacatcaaagatctcaaacctttgaatgaccgagtctttattaaggttgctgaggcggaggagaaaacagctggagggttgttgttaaccgagactaccaaagagaagccttctattggcacggtgatagcagttggaccgggttccctagacgaggaaggtaaaattacgcctctaccagtatcaaccggaagcacagtactttactccaagtatgctggtaacgacttcaagggcaaagatggttccaactacattgccctcagagcttcagatgtgatggctatactttcttagttatgttatatctttgtaatctgcaacttgtatcccaattgtggaaattttttccgtaaacggcctgagcataatctggaataaagacttgagtttgaaaatgtgattttattg

SEQ ID NO: 78336 - protein, 253 aa, Arabidopsis thaliana; identical to SEQ ID NO: 24239
  peptide (1)..(253): Ceres Seq. ID no. 12640742

SEQ ID NO: 78337 - protein, 241 aa, Arabidopsis thaliana; identical to SEQ ID NO: 24240
  peptide (1)..(241): Ceres Seq. ID no. 12640743

SEQ ID NO: 78338 - DNA, 799 bp, Arabidopsis thaliana
  misc_feature (1)..(799): Ceres Seq. ID no. 12640775
  misc_feature (1)..(799): Ortholog of  Ceres SEQ ID NO 14307484 as cited in SEQ ID NO 59427
actttctctattcaatctcacacgcgctaaaccataacccgatattactaatgacgaactacggtgcgattccgacgtcgtctcatgcatctccgttggtggatgtcgagtctctctcacgcgctaaacaccgtatcaaagccgggctagccacgcgccgtgcttggagagtgatgttcgatttccactccatgggactgcctcacggtgtctccgatgcgttcacaagaatcaagaccaatcttgcttacttccgtatgaactacgcaatcgttgtcttgatcgttatcttcttcagcttgatctggcatccgacatcgctcatcgtcttcaccgtcttggtcgttgtttggatctttctgtattttctccgtgatgagcctatcaagctgttccggtttcagatcgatgatcggacggtcttgattgttttatcggtgttaaccgtcgttttactcctgttgaccaacgcgacgtttaatattgttggagcgcttgtgaccggagctgtgttggttttgatccattcggtggttaggaagacggaggatcttttcttggatgaagaagcggcgacgactgagacttctgggctgacgtcatacccgtcgacttaaatcgtttcatctcgaaatttgtgtatcttttctatttttgtatattatcttgtttttttaattatgcgtaatcaatttttattggtgtgagtttggtttgagactttctctctctcttttgttttctgagttttgagctctgtctgaagtttgaacaattctaatttgttataatttttatt

SEQ ID NO: 78339 - protein, 204 aa, Arabidopsis thaliana; identical to SEQ ID NO: 28093
  peptide (1)..(204): Ceres Seq. ID no. 12640776

SEQ ID NO: 78340 - protein, 188 aa, Arabidopsis thaliana; identical to SEQ ID NO: 28094
  peptide (1)..(188): Ceres Seq. ID no. 12640777

SEQ ID NO: 78341 - protein, 147 aa, Arabidopsis thaliana; identical to SEQ ID NO: 28095
  peptide (1)..(147): Ceres Seq. ID no. 12640778

SEQ ID NO: 78342 - DNA, 1740 bp, Arabidopsis thaliana
  misc_feature (1)..(1740): Ceres Seq. ID no. 12640782
  misc_feature (1)..(1740): Ortholog of  Ceres SEQ ID NO 12586556 as cited in SEQ ID NO 64667
  misc_feature (1)..(1740): Ortholog of  Ceres SEQ ID NO 13660894 as cited in SEQ ID NO 67475
atggggttccatggttacgatgctttgttgaatgcgtgtttggacaaaagggctcttagagatggtcaaagagttcatgcccacatgatcaaaacccgttatttacccgccacttacctccgaactcgtctgcttatcttctatggtaaatgtgattgtttagaggatgcacggaaagtgctcgacgaaatgcctgagaagaatgtcgtttcctggactgctatgatctcgcgttattctcaaactgggcattcttctgaggctctcactgtttttgcagagatgatgagatcagatgggaaaccgaatgagttcactttcgctactgttcttacttcttgtatacgtgcttctgggttaggtcttggtaagcaaatccatggactcatagttaagtggaattacgattctcatatttttgttggaagctctcttcttgacatgtatgctaaagctggtcaaattaaagaagctcgtgagattttcgagtgtttgcctgagagagatgttgtctcatgtactgctattattgctggttatgcccaactaggtcttgatgaagaggcgttagagatgtttcatagactgcatagtgaaggaatgagtcccaattatgttacctatgctagtcttttgacagcattatctggacttgctttgctagatcatggcaagcaagctcattgccatgtcttgagacgtgaacttccgttttacgcggtccttcagaattctcttattgatatgtactcaaaatgtgggaatctttcttacgctagaaggctttttgataacatgcctgagaggacagcgatttcatggaatgcgatgcttgtgggatatagtaaacatgggttaggaagagaagttcttgaactttttagattgatgagagatgagaagagagtaaagcctgatgcagttacccttttggctgttttgtctggttgcagccatgggagaatggaagacacagggttgaatatatttgatggcatggtagcgggagaatacgggactaagcctggcactgagcattatggttgcatcgttgatatgcttggccgtgcgggtaggattgatgaggcatttgaattcatcaaaagaatgccatctaaaccaactgctggtgtcttgggttcccttttaggagcatgtagggttcacttatctgtggatattggcgaatctgtaggtcgcagactcattgagattgaaccagagaatgcagggaactatgtcatcctctctaatttgtatgcttcggctggaagatgggcagatgtaaacaatgtaagagctatgatgatgcagaaagctgttacaaaagaaccaggaagaagctggattcaacacgagcaaaccttacattacttccacgccaatgatcgtacccatccaagaagggaagaagtgttagctaaaatgaaagaaatatcgataaaaatgaagcaagctggttatgttcctgatcttagctgtgtgctatatgatgtggatgaagagcagaaggagaaaatgctacttggccacagtgagaaactagccttgacttttggtttgattgctactggtgaagggattccaattagagttttcaagaatctacgtatatgcgttgattgtcataacttcgccaagatcttctcaaaggtttttgaaagagaagtgtcattaagggataaaaacaggtttcatcaaattgtcgatggaatatgttcatgcggagattactggtga

SEQ ID NO: 78343 - protein, 579 aa, Arabidopsis thaliana
  peptide (1)..(579): Ceres Seq. ID no. 12640783
MGFHGYDALLNACLDKRALRDGQRVHAHMIKTRYLPATYLRTRLLIFYGKCDCLEDARKVLDEMPEKNVVSWTAMISRYSQTGHSSEALTVFAEMMRSDGKPNEFTFATVLTSCIRASGLGLGKQIHGLIVKWNYDSHIFVGSSLLDMYAKAGQIKEAREIFECLPERDVVSCTAIIAGYAQLGLDEEALEMFHRLHSEGMSPNYVTYASLLTALSGLALLDHGKQAHCHVLRRELPFYAVLQNSLIDMYSKCGNLSYARRLFDNMPERTAISWNAMLVGYSKHGLGREVLELFRLMRDEKRVKPDAVTLLAVLSGCSHGRMEDTGLNIFDGMVAGEYGTKPGTEHYGCIVDMLGRAGRIDEAFEFIKRMPSKPTAGVLGSLLGACRVHLSVDIGESVGRRLIEIEPENAGNYVILSNLYASAGRWADVNNVRAMMMQKAVTKEPGRSWIQHEQTLHYFHANDRTHPRREEVLAKMKEISIKMKQAGYVPDLSCVLYDVDEEQKEKMLLGHSEKLALTFGLIATGEGIPIRVFKNLRICVDCHNFAKIFSKVFEREVSLRDKNRFHQIVDGICSCGDYW

SEQ ID NO: 78344 - protein, 551 aa, Arabidopsis thaliana
  peptide (1)..(551): Ceres Seq. ID no. 12640784
MIKTRYLPATYLRTRLLIFYGKCDCLEDARKVLDEMPEKNVVSWTAMISRYSQTGHSSEALTVFAEMMRSDGKPNEFTFATVLTSCIRASGLGLGKQIHGLIVKWNYDSHIFVGSSLLDMYAKAGQIKEAREIFECLPERDVVSCTAIIAGYAQLGLDEEALEMFHRLHSEGMSPNYVTYASLLTALSGLALLDHGKQAHCHVLRRELPFYAVLQNSLIDMYSKCGNLSYARRLFDNMPERTAISWNAMLVGYSKHGLGREVLELFRLMRDEKRVKPDAVTLLAVLSGCSHGRMEDTGLNIFDGMVAGEYGTKPGTEHYGCIVDMLGRAGRIDEAFEFIKRMPSKPTAGVLGSLLGACRVHLSVDIGESVGRRLIEIEPENAGNYVILSNLYASAGRWADVNNVRAMMMQKAVTKEPGRSWIQHEQTLHYFHANDRTHPRREEVLAKMKEISIKMKQAGYVPDLSCVLYDVDEEQKEKMLLGHSEKLALTFGLIATGEGIPIRVFKNLRICVDCHNFAKIFSKVFEREVSLRDKNRFHQIVDGICSCGDYW

SEQ ID NO: 78345 - protein, 516 aa, Arabidopsis thaliana
  peptide (1)..(516): Ceres Seq. ID no. 12640785
MPEKNVVSWTAMISRYSQTGHSSEALTVFAEMMRSDGKPNEFTFATVLTSCIRASGLGLGKQIHGLIVKWNYDSHIFVGSSLLDMYAKAGQIKEAREIFECLPERDVVSCTAIIAGYAQLGLDEEALEMFHRLHSEGMSPNYVTYASLLTALSGLALLDHGKQAHCHVLRRELPFYAVLQNSLIDMYSKCGNLSYARRLFDNMPERTAISWNAMLVGYSKHGLGREVLELFRLMRDEKRVKPDAVTLLAVLSGCSHGRMEDTGLNIFDGMVAGEYGTKPGTEHYGCIVDMLGRAGRIDEAFEFIKRMPSKPTAGVLGSLLGACRVHLSVDIGESVGRRLIEIEPENAGNYVILSNLYASAGRWADVNNVRAMMMQKAVTKEPGRSWIQHEQTLHYFHANDRTHPRREEVLAKMKEISIKMKQAGYVPDLSCVLYDVDEEQKEKMLLGHSEKLALTFGLIATGEGIPIRVFKNLRICVDCHNFAKIFSKVFEREVSLRDKNRFHQIVDGICSCGDYW

SEQ ID NO: 78346 - DNA, 2358 bp, Arabidopsis thaliana
  misc_feature (1)..(2358): Ceres Seq. ID no. 12640800
  misc_feature (1)..(2358): Ortholog of  Ceres SEQ ID NO 15225530 as cited in SEQ ID NO 55089
atggggtcaaagatgtgcatgaacgcttcatgtggtacgacttctactgttgaatggaagaaaggttggcctcttcgatctggtcttctcgctgatctctgttatcgttgcggatctgcgtatgagagttctctattctgtgaacaatttcataaggaccaatctggttggagggaatgctatttgtgtagcaagagactacattgtggatgcattgcttctaaggtaacgattgagttaatggactatggtggtgttggttgtagtacatgtgcttgctgccatcaactcaatttgaacacaaggggtgagaatccaggtgtttttagcagattgccaatgaaaacgttagctgataggcaacatgtaaatggcgaaagcggaggaagaaacgaaggcgatctcttttctcagccactagtcatgggcggagataaaagggaagagttcatgcctcaccgtgggtttggtaagctaatgagtccagaaagtacaaccaccgggcataggctggatgctgctggggaaatgcatgaatcatcacctttacagccatctttaaatatgggtttggctgtgaatccgtttagcccatcttttgcaaccgaggctgtcgagggaatgaaacacatcagtccttctcagtccaacatggtccattgctctgcttctaatatactgcaaaagccatcaagacctgctatttcaactcctcctgtggctagtaaatccgctcaggcgcggattggaaggcctcctgtcgaagggcgagggagaggccacttgcttccgcggtattggccaaaatatacggataaagaggttcagcagatctctggaaatttgaatttgaacattgtacctctctttgagaaaactcttagtgccagtgatgctggtcgcattggtcgtctagttcttccaaaagcctgtgcagaggcatattttcctccgattagtcaatccgaaggcattcctttgaaaatccaagatgtgaggggtagggagtggacgttccagttcagatattggcccaataacaatagtagaatgtatgttttagaaggtgtcactccatgcatacagtccatgatgctacaggctggtgatacagtaactttcagtcgggttgatcctggcggaaaactaatcatgggttccaggaaggcagctaatgctggagacatgcagggttgtgggctcaccaacggaacatcaactgaggacacatcatcgtctggtgtaacagaaaacccaccctccataaatggttcctcgtgtatttcactaataccgaaagagttgaatggtatgcctgagaatttgaacagtgagactaacgggggcaggataggtgatgatcctacacgagttaaagagaagaagagaactcgaaccattggtgcaaaaaataagagacttcttttgcatagtgaagaatctatggagctgagactcacttgggaagaagctcaggacttgcttcgtccctctcctagtgtaaagcctaccatcgttgtcattgaggagcaagaaattgaagaatatgacgaacctcctgtctttggaaagaggactatagtcactacaaaaccttcaggtgaacaggaacgatgggcaacttgcgacgactgctctaaatggagaaggttacctgtagatgctcttctttcctttaaatggacatgtatagacaatgtttgggatgtgagtaggtgttcatgttctgcaccggaggagagtctgaaggaacttgagaatgttcttaaagtaggaagagagcacaagaagagaagaactggggaaagccaggcagcaaaaagtcagcaagaaccgtgtggtttggacgcactggcgagtgcagcagtcttaggagacacaataggcgagccagaggtagcgaccacgaccagacatccaaggcacagggctggatgctcttgcatcgtgtgcattcagccaccaagtgggaaaggtaggcacaagcctacatgtggctgcactgtgtgtagcaccgtgaagagaaggttcaagacgcttatgatgaggaggaagaagaagcagttggagcgcgatgtaacagcagcagaagataagaagaagaaggacatggaactggctgagtctgataagagtaaggaggagaaggaagtgaacacagcgagaatagacctgaacagtgatccatacaataaagaagatgttgaagctgttgcggtggagaaagaagagagtcgaaaaagagcaataggacagtgttcgggcgtggtggctcaagacgccagtgatgttttaggagttacagagttagaaggagagggtaagaatgttcgtgaagagccgagagtttcaagctga

SEQ ID NO: 78347 - protein, 785 aa, Arabidopsis thaliana; identical to SEQ ID NO: 36721
  peptide (1)..(785): Ceres Seq. ID no. 12640801

SEQ ID NO: 78348 - protein, 781 aa, Arabidopsis thaliana; identical to SEQ ID NO: 36722
  peptide (1)..(781): Ceres Seq. ID no. 12640802

SEQ ID NO: 78349 - protein, 779 aa, Arabidopsis thaliana
  peptide (1)..(779): Ceres Seq. ID no. 12640803
MNASCGTTSTVEWKKGWPLRSGLLADLCYRCGSAYESSLFCEQFHKDQSGWRECYLCSKRLHCGCIASKVTIELMDYGGVGCSTCACCHQLNLNTRGENPGVFSRLPMKTLADRQHVNGESGGRNEGDLFSQPLVMGGDKREEFMPHRGFGKLMSPESTTTGHRLDAAGEMHESSPLQPSLNMGLAVNPFSPSFATEAVEGMKHISPSQSNMVHCSASNILQKPSRPAISTPPVASKSAQARIGRPPVEGRGRGHLLPRYWPKYTDKEVQQISGNLNLNIVPLFEKTLSASDAGRIGRLVLPKACAEAYFPPISQSEGIPLKIQDVRGREWTFQFRYWPNNNSRMYVLEGVTPCIQSMMLQAGDTVTFSRVDPGGKLIMGSRKAANAGDMQGCGLTNGTSTEDTSSSGVTENPPSINGSSCISLIPKELNGMPENLNSETNGGRIGDDPTRVKEKKRTRTIGAKNKRLLLHSEESMELRLTWEEAQDLLRPSPSVKPTIVVIEEQEIEEYDEPPVFGKRTIVTTKPSGEQERWATCDDCSKWRRLPVDALLSFKWTCIDNVWDVSRCSCSAPEESLKELENVLKVGREHKKRRTGESQAAKSQQEPCGLDALASAAVLGDTIGEPEVATTTRHPRHRAGCSCIVCIQPPSGKGRHKPTCGCTVCSTVKRRFKTLMMRRKKKQLERDVTAAEDKKKKDMELAESDKSKEEKEVNTARIDLNSDPYNKEDVEAVAVEKEESRKRAIGQCSGVVAQDASDVLGVTELEGEGKNVREEPRVSS

SEQ ID NO: 78350 - DNA, 1137 bp, Arabidopsis thaliana
  misc_feature (1)..(1137): Ceres Seq. ID no. 12640822
  misc_feature (1)..(1137): Ortholog of  Ceres SEQ ID NO 13655881 as cited in SEQ ID NO 64426
atggcatctcaatctcaggttttggtggaagagaaatcaagtgttagaattttgacattaaaccgacccaagcagcttaatgctctgtgcttcaacatgatctctcggttgctgcaactattccgtgcatatgaggaagaccctagtgttaaacttgtcatcctaaagggtcaaggaagagccttttgtgccggtggcgacgttccacctgttgttcaaaacatggtacaaggtaaatggagacttggtgccgatttcttcagagatcaatacacgctcaattatgttatggccacgtatagcaaacctcaggtttcaattttgaatggtattgtcatgggagccggtgctggtgtctccatccatggtcgatttcgcattgcaactgagaacacggtttttgccatgccggagacatctctggggctctttccagatgtaggcgcctcctatttcctgtcacggctccctggattttttggagctaggttagatggcgctgaattgcttgcgtgtggtcttgcaactcattttgttccttcaacgaggttgacagctctagaaacagatctttgcaaagttgggtcaagtgatccaagctttgtctcaacaattcttgatgcatacactcagcatccgcaccttaaacagaagagtgcttaccacaggcaagtgcatatgattttgccaaatatcttttgtcatgccaacatcgcaagctttttagggatcatgttagatgttatcgataggtgcttctcgaagagaacaatggaagaaattatatctgcacttgagagagagaccactcaagaactagatgattggagcttaactacgattcgagctttgaagaagtcttcaccctcaagccttaaaatatctcttagatcgataagagaaggaagattgcaaggggtaggacactgtcttacccgcgagtatagaatggggtgcagagccatattgatagacaaagataggaatccaaagtgggagccaaggcgattggaggacatgaaggatagcatggtagatcagttctttgagagagtggaagaagaggagcgatgggaggatcttaagctttcaccaaggaacaacttgcatgctttaagaattgcagcaaaaaaataa

SEQ ID NO: 78351 - protein, 378 aa, Arabidopsis thaliana
  peptide (1)..(378): Ceres Seq. ID no. 12640823
MASQSQVLVEEKSSVRILTLNRPKQLNALCFNMISRLLQLFRAYEEDPSVKLVILKGQGRAFCAGGDVPPVVQNMVQGKWRLGADFFRDQYTLNYVMATYSKPQVSILNGIVMGAGAGVSIHGRFRIATENTVFAMPETSLGLFPDVGASYFLSRLPGFFGARLDGAELLACGLATHFVPSTRLTALETDLCKVGSSDPSFVSTILDAYTQHPHLKQKSAYHRQVHMILPNIFCHANIASFLGIMLDVIDRCFSKRTMEEIISALERETTQELDDWSLTTIRALKKSSPSSLKISLRSIREGRLQGVGHCLTREYRMGCRAILIDKDRNPKWEPRRLEDMKDSMVDQFFERVEEEERWEDLKLSPRNNLHALRIAAKK

SEQ ID NO: 78352 - protein, 346 aa, Arabidopsis thaliana
  peptide (1)..(346): Ceres Seq. ID no. 12640824
MISRLLQLFRAYEEDPSVKLVILKGQGRAFCAGGDVPPVVQNMVQGKWRLGADFFRDQYTLNYVMATYSKPQVSILNGIVMGAGAGVSIHGRFRIATENTVFAMPETSLGLFPDVGASYFLSRLPGFFGARLDGAELLACGLATHFVPSTRLTALETDLCKVGSSDPSFVSTILDAYTQHPHLKQKSAYHRQVHMILPNIFCHANIASFLGIMLDVIDRCFSKRTMEEIISALERETTQELDDWSLTTIRALKKSSPSSLKISLRSIREGRLQGVGHCLTREYRMGCRAILIDKDRNPKWEPRRLEDMKDSMVDQFFERVEEEERWEDLKLSPRNNLHALRIAAKK

SEQ ID NO: 78353 - protein, 304 aa, Arabidopsis thaliana
  peptide (1)..(304): Ceres Seq. ID no. 12640825
MVQGKWRLGADFFRDQYTLNYVMATYSKPQVSILNGIVMGAGAGVSIHGRFRIATENTVFAMPETSLGLFPDVGASYFLSRLPGFFGARLDGAELLACGLATHFVPSTRLTALETDLCKVGSSDPSFVSTILDAYTQHPHLKQKSAYHRQVHMILPNIFCHANIASFLGIMLDVIDRCFSKRTMEEIISALERETTQELDDWSLTTIRALKKSSPSSLKISLRSIREGRLQGVGHCLTREYRMGCRAILIDKDRNPKWEPRRLEDMKDSMVDQFFERVEEEERWEDLKLSPRNNLHALRIAAKK

SEQ ID NO: 78354 - DNA, 1230 bp, Arabidopsis thaliana
  misc_feature (1)..(1230): Ceres Seq. ID no. 12640832
  misc_feature (1)..(1230): Ortholog of  Ceres SEQ ID NO 12578315 as cited in SEQ ID NO 62451
  misc_feature (1)..(1230): Ortholog of  Ceres SEQ ID NO 12615466 as cited in SEQ ID NO 62761
  misc_feature (1)..(1230): Ortholog of  Ceres SEQ ID NO 13597295 as cited in SEQ ID NO 63743
  misc_feature (1)..(1230): Ortholog of  Ceres SEQ ID NO 12617090 as cited in SEQ ID NO 64005
  misc_feature (1)..(1230): Ortholog of  Ceres SEQ ID NO 13597439 as cited in SEQ ID NO 64081
  misc_feature (1)..(1230): Ortholog of  Ceres SEQ ID NO 13597233 as cited in SEQ ID NO 64370
  misc_feature (1)..(1230): Ortholog of  Ceres SEQ ID NO 13584577 as cited in SEQ ID NO 65298
atgagcgtcatgttcatcctcatcgatctgaagttggacggtggaggacggccacaagataagaaaatggtcagaaaattagagttgaaatatttgagcttatactctttctttcaacattttctaccttcttgtcaaagaaagagagacacaatggcgggcaactatgatcgtgctggtgaggtaaaagcattcgaccagatgaagatcggcgtgaagggtcttgtcgacgccggaatcacaaaagttcctcgcattttccatcaccaagatgtggccgttacaaaccctaaaccttcctcaacgttagaaattccaacaatcgatgttggaggtggcgtgttcgagtccacggtcacgcgaaagagcgtgatcgcgaaagtgagagctgcggttgagaagttcgggttctttcaggtgattaaccatgggattccactcgaggtgatggagagtatgaaagatgggattcgtgggtttcatgagcaggactcagaagttaagaaaacgttctatagtcgtgacatcactaaaaaggttaagtataacactaatttcgatctctatagctctcaagctgcgaattggagagatactttaactatggttatggctcctgatgttccacaagcaggggacttacccgtgatttgtcgagaaatcatgttggagtactccaagcgaatgatgaagttaggggagctaatctttgagcttttatcagaagctcttggtttaaaacctaaccaccttaaagagctaaattgcgcaaagagtttgtcgttgctctcccattactacccgccttgtccagagcctgaccgaacctttggtatcagttcacatacagatatctcttttatcactattcttcttcaagaccacattggaggacttcaagttctccatgatggttactggatcgatgttcctcctaatcccgaagctctaatcgttaaccttggagatcttttacagcttataacaaacgataagtttgtaagtgtggagcacagggttttggcaaatagaggcgaagaacctcgcatttcaagcgcatctttcttcatgcacaccataccaaatgagcaagtatatggacctatgaaagagcttctatctaaacaaaaccctcccaagtacagaaacacaaccacgaccgagatggcgaggcattacttggctagaggactcgatgggacctcaccgttgctccatttcaggatctga

SEQ ID NO: 78355 - protein, 409 aa, Arabidopsis thaliana
  peptide (1)..(409): Ceres Seq. ID no. 12640833
MSVMFILIDLKLDGGGRPQDKKMVRKLELKYLSLYSFFQHFLPSCQRKRDTMAGNYDRAGEVKAFDQMKIGVKGLVDAGITKVPRIFHHQDVAVTNPKPSSTLEIPTIDVGGGVFESTVTRKSVIAKVRAAVEKFGFFQVINHGIPLEVMESMKDGIRGFHEQDSEVKKTFYSRDITKKVKYNTNFDLYSSQAANWRDTLTMVMAPDVPQAGDLPVICREIMLEYSKRMMKLGELIFELLSEALGLKPNHLKELNCAKSLSLLSHYYPPCPEPDRTFGISSHTDISFITILLQDHIGGLQVLHDGYWIDVPPNPEALIVNLGDLLQLITNDKFVSVEHRVLANRGEEPRISSASFFMHTIPNEQVYGPMKELLSKQNPPKYRNTTTTEMARHYLARGLDGTSPLLHFRI

SEQ ID NO: 78356 - protein, 406 aa, Arabidopsis thaliana
  peptide (1)..(406): Ceres Seq. ID no. 12640834
MFILIDLKLDGGGRPQDKKMVRKLELKYLSLYSFFQHFLPSCQRKRDTMAGNYDRAGEVKAFDQMKIGVKGLVDAGITKVPRIFHHQDVAVTNPKPSSTLEIPTIDVGGGVFESTVTRKSVIAKVRAAVEKFGFFQVINHGIPLEVMESMKDGIRGFHEQDSEVKKTFYSRDITKKVKYNTNFDLYSSQAANWRDTLTMVMAPDVPQAGDLPVICREIMLEYSKRMMKLGELIFELLSEALGLKPNHLKELNCAKSLSLLSHYYPPCPEPDRTFGISSHTDISFITILLQDHIGGLQVLHDGYWIDVPPNPEALIVNLGDLLQLITNDKFVSVEHRVLANRGEEPRISSASFFMHTIPNEQVYGPMKELLSKQNPPKYRNTTTTEMARHYLARGLDGTSPLLHFRI

SEQ ID NO: 78357 - protein, 387 aa, Arabidopsis thaliana
  peptide (1)..(387): Ceres Seq. ID no. 12640835
MVRKLELKYLSLYSFFQHFLPSCQRKRDTMAGNYDRAGEVKAFDQMKIGVKGLVDAGITKVPRIFHHQDVAVTNPKPSSTLEIPTIDVGGGVFESTVTRKSVIAKVRAAVEKFGFFQVINHGIPLEVMESMKDGIRGFHEQDSEVKKTFYSRDITKKVKYNTNFDLYSSQAANWRDTLTMVMAPDVPQAGDLPVICREIMLEYSKRMMKLGELIFELLSEALGLKPNHLKELNCAKSLSLLSHYYPPCPEPDRTFGISSHTDISFITILLQDHIGGLQVLHDGYWIDVPPNPEALIVNLGDLLQLITNDKFVSVEHRVLANRGEEPRISSASFFMHTIPNEQVYGPMKELLSKQNPPKYRNTTTTEMARHYLARGLDGTSPLLHFRI

SEQ ID NO: 78358 - DNA, 1119 bp, Arabidopsis thaliana
  misc_feature (1)..(1119): Ceres Seq. ID no. 12640836
  misc_feature (1)..(1119): Ortholog of  Ceres SEQ ID NO 12578315 as cited in SEQ ID NO 62451
  misc_feature (1)..(1119): Ortholog of  Ceres SEQ ID NO 12617090 as cited in SEQ ID NO 64005
  misc_feature (1)..(1119): Ortholog of  Ceres SEQ ID NO 13597233 as cited in SEQ ID NO 64370
  misc_feature (1)..(1119): Ortholog of  Ceres SEQ ID NO 13584577 as cited in SEQ ID NO 65298
atggaagcaacatacgatcgtgctagtgaggtaaaagcttttgacgagttgaagatcggcgtaaaaggtctcctagacgccggagttactcagatcccacgtatcttccatcatccacatcttaatttaaccgactcaaatctacttctttcctctacaacgatggttataccaacaatcgatcttaaaggaggcgtgttcgacgagtacacagtcacgcgagagagcgtcatcgcgatgatcagagacgcggttgagagattcgggtttttccaggtgattaaccatgggattagtaatgatgttatggagaagatgaaagatgggattcgtgggtttcatgagcaagactcagacgttaggaaaaagttttatactcgtgacgtcaccaaaacagttaagtataacagtaattttgatctttatagctctccttcagcgaactggagagataccttgagttgctttatggctcctgatgttccagaaacagaggacttaccagatatttgtggggaaatcatgttggaatatgcgaaacgagtgatgaaactaggggaactaatctttgagcttttatcagaagctttagggctgaatcctaaccacttgaaagaaatggattgcacaaaaggtttattgatgctttctcattactacccgccttgtcctgagcctggtttaacttttggcacaagtccgcattcagacagatcttttctcactattcttcttcaagatcacattggtgggcttcaagttcgtcagaatggttattgggttgatgttcctcctgttccgggagctcttctcgttaacctcggagatcttttacaggcaagttgttattgtgacatgatacaaactcttatgaccaatgatcagtttgtgagcgtagagcatagagttctggctaataaaggtgaaaagccgcggatctcagtagcatctttctttgtgcatcctttaccgagtttacgagtttatggaccgataaaagaacttttgtctgagcaaaaccttcccaagtatagagacactaccgtcactgagtacacgagtcattacatggcaagaggactttatggaaattctgtgttgcttgatttcaagatctga

SEQ ID NO: 78359 - protein, 372 aa, Arabidopsis thaliana
  peptide (1)..(372): Ceres Seq. ID no. 12640837
MEATYDRASEVKAFDELKIGVKGLLDAGVTQIPRIFHHPHLNLTDSNLLLSSTTMVIPTIDLKGGVFDEYTVTRESVIAMIRDAVERFGFFQVINHGISNDVMEKMKDGIRGFHEQDSDVRKKFYTRDVTKTVKYNSNFDLYSSPSANWRDTLSCFMAPDVPETEDLPDICGEIMLEYAKRVMKLGELIFELLSEALGLNPNHLKEMDCTKGLLMLSHYYPPCPEPGLTFGTSPHSDRSFLTILLQDHIGGLQVRQNGYWVDVPPVPGALLVNLGDLLQASCYCDMIQTLMTNDQFVSVEHRVLANKGEKPRISVASFFVHPLPSLRVYGPIKELLSEQNLPKYRDTTVTEYTSHYMARGLYGNSVLLDFKI

SEQ ID NO: 78360 - protein, 318 aa, Arabidopsis thaliana
  peptide (1)..(318): Ceres Seq. ID no. 12640838
MVIPTIDLKGGVFDEYTVTRESVIAMIRDAVERFGFFQVINHGISNDVMEKMKDGIRGFHEQDSDVRKKFYTRDVTKTVKYNSNFDLYSSPSANWRDTLSCFMAPDVPETEDLPDICGEIMLEYAKRVMKLGELIFELLSEALGLNPNHLKEMDCTKGLLMLSHYYPPCPEPGLTFGTSPHSDRSFLTILLQDHIGGLQVRQNGYWVDVPPVPGALLVNLGDLLQASCYCDMIQTLMTNDQFVSVEHRVLANKGEKPRISVASFFVHPLPSLRVYGPIKELLSEQNLPKYRDTTVTEYTSHYMARGLYGNSVLLDFKI

SEQ ID NO: 78361 - protein, 293 aa, Arabidopsis thaliana
  peptide (1)..(293): Ceres Seq. ID no. 12640839
MIRDAVERFGFFQVINHGISNDVMEKMKDGIRGFHEQDSDVRKKFYTRDVTKTVKYNSNFDLYSSPSANWRDTLSCFMAPDVPETEDLPDICGEIMLEYAKRVMKLGELIFELLSEALGLNPNHLKEMDCTKGLLMLSHYYPPCPEPGLTFGTSPHSDRSFLTILLQDHIGGLQVRQNGYWVDVPPVPGALLVNLGDLLQASCYCDMIQTLMTNDQFVSVEHRVLANKGEKPRISVASFFVHPLPSLRVYGPIKELLSEQNLPKYRDTTVTEYTSHYMARGLYGNSVLLDFKI

SEQ ID NO: 78362 - DNA, 2328 bp, Arabidopsis thaliana
  misc_feature (1)..(2328): Ceres Seq. ID no. 12640858
  misc_feature (1)..(2328): Ortholog of  Ceres SEQ ID NO 13593889 as cited in SEQ ID NO 53305
  misc_feature (1)..(2328): Ortholog of  Ceres SEQ ID NO 13581959 as cited in SEQ ID NO 56156
atggaagagagacgagatgatgaatcaagccctacacaccagggatcagaacttgcggaaagggtgaagttgctttcttttgaatctcaaggtgaagctttgagtaaggactcccctagaagtgttgaacaggattgctctccaggtcaaagagcatcacagcatctttgggatactggaatactctctgaacctattcctaatggtttctactcagttgttccggataagagagtaaaggagctatataatagactacctactccgagtgagcttcatgctttgggagaggaaggtgtcagaattgaagttattcttgttgattttcaaaaagataagaagctcgcaatgcttaaacagttgatcactacacttgtcagcggcagcggcacaaatcctgctttggtgattaagaaaatagcaggaacggtctctgacttttacaaacgtccaacactagaaagcccttcaaaacttgctctagaggaaaatgcgttcttgtttgaaaaccatggtgctcagttgcttggccagattaagcgtggttgctgtcgagctcgggcaattttgttcaaagttctagctgatactgtaggacttgaaagtcggctggtggtgggtttgcctagtgatgggactgtgaattgcatggactctaacaaacacatgtctgttatagttgtgctgaattccgttgaactactagtcgatcttattcggtttcctggtcagttggtaccgcgatcagccaaggcaattttcatgtcacacatctcgcctgctggagagagtgattctgcagaaaacgactcttgtgactcacctttggagccaaatagtcctttatatgagagaagagatcctgagagtacagaaaaagatgaaaatcttcaattttatcggaagttagaaggatatccaaatgcatctggttcatcactgcgtagtttgatgctcagaccttctacagctattgaaaggaaattgagcaacacctcgcatagtgaaccaaatgttgctactgtattctggaggcgtagccgcagaaaagtaattgctgaacagagaacagctagctcaagcccagaacacccatctatgcgacgtggacgatcaatgttgagcactggtaggaattcttttagggattacactggtgaagcatcatctccttcaagttcatccacatcagaaattcgtaaaactagacggcgaagttttaggatcacaccagaaattggcgatgacattgcaagcgctgtacgagaaatgtatgagaaatcaaagcaaaaccgtctcttgcagggtcgagaggatgaaaacagctcagttatcgataacaacgtgtctggtctccatcttgatgatgagttaaattctaagaagacaatgtcattgccctcatctccccatgcttacaggtgtcaaacatttggacgaagagggccttcagaatttgccgtgaaggatacatggaataaagtggttgagtcttccacattgcagaatcagcctttattaccctatcaagaatgggacattgacttctcagagctgactgttggaactcgggtggggattggtttttttggtgaagtttttcgtggagtatggaatgggacagatgttgcaatcaaattgtttctggagcaagatcttactgccgaaaacatggaagatttctgcaatgagatatcaattctcagccgtgttcgccacccaaatgttgtactatttttgggtgcatgcacaaaacctccacgcttatccatgatcacggagtacatggagctgggatcgttgtattatttgatccacatgagtggtcagaagaagaaacttagctggcacagaaggctcaggatgcttagagacatctgcaggggtttgatgtgcatacaccggatgaagatagtccaccgcgacctaaagagtgccaactgtctagtggacaaacattggacagtcaagatctgtgattttgggctgtcaagaataatgactgatgaaaacatgaaggacacttcatctgctgggacaccagagtggatggctccagagctcattcgcaacaggccttttacagagaaatgtgatatctttagtcttggggtcataatgtgggaactttcaactttacgtaaaccatgggaaggagttccacctgagaaggttgtctttgctgttgcacatgaagggtcacgtttggagattcctgatggtccactcagcaaactaattgcagattgttgggcagagcctgaagaacgcccaaattgtgaagagatacttagaggcttactcgattgtgagtacacactgtgctaa

SEQ ID NO: 78363 - protein, 775 aa, Arabidopsis thaliana
  peptide (1)..(775): Ceres Seq. ID no. 12640859
MEERRDDESSPTHQGSELAERVKLLSFESQGEALSKDSPRSVEQDCSPGQRASQHLWDTGILSEPIPNGFYSVVPDKRVKELYNRLPTPSELHALGEEGVRIEVILVDFQKDKKLAMLKQLITTLVSGSGTNPALVIKKIAGTVSDFYKRPTLESPSKLALEENAFLFENHGAQLLGQIKRGCCRARAILFKVLADTVGLESRLVVGLPSDGTVNCMDSNKHMSVIVVLNSVELLVDLIRFPGQLVPRSAKAIFMSHISPAGESDSAENDSCDSPLEPNSPLYERRDPESTEKDENLQFYRKLEGYPNASGSSLRSLMLRPSTAIERKLSNTSHSEPNVATVFWRRSRRKVIAEQRTASSSPEHPSMRRGRSMLSTGRNSFRDYTGEASSPSSSSTSEIRKTRRRSFRITPEIGDDIASAVREMYEKSKQNRLLQGREDENSSVIDNNVSGLHLDDELNSKKTMSLPSSPHAYRCQTFGRRGPSEFAVKDTWNKVVESSTLQNQPLLPYQEWDIDFSELTVGTRVGIGFFGEVFRGVWNGTDVAIKLFLEQDLTAENMEDFCNEISILSRVRHPNVVLFLGACTKPPRLSMITEYMELGSLYYLIHMSGQKKKLSWHRRLRMLRDICRGLMCIHRMKIVHRDLKSANCLVDKHWTVKICDFGLSRIMTDENMKDTSSAGTPEWMAPELIRNRPFTEKCDIFSLGVIMWELSTLRKPWEGVPPEKVVFAVAHEGSRLEIPDGPLSKLIADCWAEPEERPNCEEILRGLLDCEYTLC

SEQ ID NO: 78364 - protein, 659 aa, Arabidopsis thaliana
  peptide (1)..(659): Ceres Seq. ID no. 12640860
MLKQLITTLVSGSGTNPALVIKKIAGTVSDFYKRPTLESPSKLALEENAFLFENHGAQLLGQIKRGCCRARAILFKVLADTVGLESRLVVGLPSDGTVNCMDSNKHMSVIVVLNSVELLVDLIRFPGQLVPRSAKAIFMSHISPAGESDSAENDSCDSPLEPNSPLYERRDPESTEKDENLQFYRKLEGYPNASGSSLRSLMLRPSTAIERKLSNTSHSEPNVATVFWRRSRRKVIAEQRTASSSPEHPSMRRGRSMLSTGRNSFRDYTGEASSPSSSSTSEIRKTRRRSFRITPEIGDDIASAVREMYEKSKQNRLLQGREDENSSVIDNNVSGLHLDDELNSKKTMSLPSSPHAYRCQTFGRRGPSEFAVKDTWNKVVESSTLQNQPLLPYQEWDIDFSELTVGTRVGIGFFGEVFRGVWNGTDVAIKLFLEQDLTAENMEDFCNEISILSRVRHPNVVLFLGACTKPPRLSMITEYMELGSLYYLIHMSGQKKKLSWHRRLRMLRDICRGLMCIHRMKIVHRDLKSANCLVDKHWTVKICDFGLSRIMTDENMKDTSSAGTPEWMAPELIRNRPFTEKCDIFSLGVIMWELSTLRKPWEGVPPEKVVFAVAHEGSRLEIPDGPLSKLIADCWAEPEERPNCEEILRGLLDCEYTLC

SEQ ID NO: 78365 - protein, 559 aa, Arabidopsis thaliana
  peptide (1)..(559): Ceres Seq. ID no. 12640861
MDSNKHMSVIVVLNSVELLVDLIRFPGQLVPRSAKAIFMSHISPAGESDSAENDSCDSPLEPNSPLYERRDPESTEKDENLQFYRKLEGYPNASGSSLRSLMLRPSTAIERKLSNTSHSEPNVATVFWRRSRRKVIAEQRTASSSPEHPSMRRGRSMLSTGRNSFRDYTGEASSPSSSSTSEIRKTRRRSFRITPEIGDDIASAVREMYEKSKQNRLLQGREDENSSVIDNNVSGLHLDDELNSKKTMSLPSSPHAYRCQTFGRRGPSEFAVKDTWNKVVESSTLQNQPLLPYQEWDIDFSELTVGTRVGIGFFGEVFRGVWNGTDVAIKLFLEQDLTAENMEDFCNEISILSRVRHPNVVLFLGACTKPPRLSMITEYMELGSLYYLIHMSGQKKKLSWHRRLRMLRDICRGLMCIHRMKIVHRDLKSANCLVDKHWTVKICDFGLSRIMTDENMKDTSSAGTPEWMAPELIRNRPFTEKCDIFSLGVIMWELSTLRKPWEGVPPEKVVFAVAHEGSRLEIPDGPLSKLIADCWAEPEERPNCEEILRGLLDCEYTLC

SEQ ID NO: 78366 - DNA, 2337 bp, Arabidopsis thaliana
  misc_feature (1)..(2337): Ceres Seq. ID no. 12640870
  misc_feature (1)..(2337): Ortholog of  Ceres SEQ ID NO 15170666 as cited in SEQ ID NO 63386
atgcatcctttctgttgtgtctccgatcactccccttccacgccgtcgttctccatgtacgccgccacacccgaaactcctttcggttccgcgagatcacaaccggttattacccgatctgtctcacaacgatataaccatccaggtcaaagtaatcaccatcatctcctccacagtctctcatttaaccaccagaacgtactagccttaccggcagcagcaagggagccgcctgtggatgtcaagattaacgatatcgctgggaattcgattgccgggatattgtacaaatgggtgaactatgggaaaggatggagaccaagatggtttgttttgcaagatggagtgctttcatattataaaatcaagggacctgataagatcgttgttatccatgagactgagaaaggatcaagagtgatcggagaggagtccacacgtatgatctctaggaataagcgtcacgccgccactaacaacaccaaccaccagctccgccgcaagccattcggcgaagttcatctcaaggtttcatcgattcgggagagtagatcagatgataagagattttcaatattcaccggcaccaagaggcttcacctacgtgcagagacaagagaggacagagaagcttggatagaggctttacaagctgtcaaagatatgtttccaagaatgtcaaactgcgagttgatggcaccgaccaacaacttagacatctcgatagagaagcttaggctgcgattggttgaggaaggagtgagtgagtcagccattcaagactgcgaacaaatcacgaggtctgagttctcggcaattcagagccagcttttgcttcttaaacaaaagcaatggcttctcattgatacactcagacaattagagacagagaaagtagatttggaaaacacggttgtagatgagactcaacgacaagctggcaacggagactcagaagaaacaattagtgaatctgatgatgataatgaacaatttgatgaggctgaggaggaaatggatacatgtgactctctttcttcaagttcattcaaaagtattggatccgtttttcgcacatcatcattctcttcagatgatgatggacttactaatggttttgagtcagagaatgatgatgttgatccttctatcaagactattggatttaactatccacatgtcaaaagacgaaagaagttacctgatccggttgaaaaagagaaaagtgttagcctttggtcaatgatcaaagacaacattggcaaggatctcacaaaagtttgtcttcctgtctacttcaatgagcctttatcttctctacaaaaatgctttgaagatttggagtattcatatcttcttgatcaagcttctgaatggggaaagaggggcaataacctcatgaggattctgaatgtagctgcatttgccgtatctggttatgcatcaactgaaggaagaatttgcaaaccttttaatccaatgttaggtgaaacatatgaggctgactatcccgataaaggccttcgatttttctcggaaaaggtgagtcatcatcctatgattgtggcatgtcattgtgatggcaccggatggaaattttggggagatagcaacttaaaaagcaaattttggggtcgatcaattcaacttgatcctattggtttgttgactttgcaatttgatgatggtgaaattgtgcaatggagtaaggtgactacatcaatatacaatctcatacttggtaaattgtattgtgatcactacgggacaatgaagattgaaggcaacggtgaatattcatgtaaacttaaattcaaggaacagtcgatgatcgatagaaatccgcatcaagttcaaggtatagtagaagacaagaatggaaaaacagtggctaggttgtttggaaaatgggatgagagtatacactatgtgatggttgatcaaggaaaggtgaatgaatcccatcttctgtggaaacgaaacaaacagcccgaaaacccgacaaagtataatctaacacggtttgggatcacattaaacgagctcacgcctggtttaaaggagaagttgccaccaacagattcaagacttagaccggaccagaggtatttagagaagggagagtatgaaatgggaaacgcagagaagttgaggttggaacaaagacaaagacaggcgagagagatgcaagagagaggttggaaaccaaagtggtttagaaaagagaaaggaagtgagacttatagatacattggaggttattgggaagctcgagattctggtagttgggatgattgtcctgacatctttggtcaagttcaccaatccatcaagtaa

SEQ ID NO: 78367 - protein, 778 aa, Arabidopsis thaliana
  peptide (1)..(778): Ceres Seq. ID no. 12640871
MHPFCCVSDHSPSTPSFSMYAATPETPFGSARSQPVITRSVSQRYNHPGQSNHHHLLHSLSFNHQNVLALPAAAREPPVDVKINDIAGNSIAGILYKWVNYGKGWRPRWFVLQDGVLSYYKIKGPDKIVVIHETEKGSRVIGEESTRMISRNKRHAATNNTNHQLRRKPFGEVHLKVSSIRESRSDDKRFSIFTGTKRLHLRAETREDREAWIEALQAVKDMFPRMSNCELMAPTNNLDISIEKLRLRLVEEGVSESAIQDCEQITRSEFSAIQSQLLLLKQKQWLLIDTLRQLETEKVDLENTVVDETQRQAGNGDSEETISESDDDNEQFDEAEEEMDTCDSLSSSSFKSIGSVFRTSSFSSDDDGLTNGFESENDDVDPSIKTIGFNYPHVKRRKKLPDPVEKEKSVSLWSMIKDNIGKDLTKVCLPVYFNEPLSSLQKCFEDLEYSYLLDQASEWGKRGNNLMRILNVAAFAVSGYASTEGRICKPFNPMLGETYEADYPDKGLRFFSEKVSHHPMIVACHCDGTGWKFWGDSNLKSKFWGRSIQLDPIGLLTLQFDDGEIVQWSKVTTSIYNLILGKLYCDHYGTMKIEGNGEYSCKLKFKEQSMIDRNPHQVQGIVEDKNGKTVARLFGKWDESIHYVMVDQGKVNESHLLWKRNKQPENPTKYNLTRFGITLNELTPGLKEKLPPTDSRLRPDQRYLEKGEYEMGNAEKLRLEQRQRQAREMQERGWKPKWFRKEKGSETYRYIGGYWEARDSGSWDDCPDIFGQVHQSIK

SEQ ID NO: 78368 - protein, 760 aa, Arabidopsis thaliana; identical to SEQ ID NO: 70533
  peptide (1)..(760): Ceres Seq. ID no. 12640872

SEQ ID NO: 78369 - protein, 631 aa, Arabidopsis thaliana; identical to SEQ ID NO: 70534
  peptide (1)..(631): Ceres Seq. ID no. 12640873

SEQ ID NO: 78370 - DNA, 1167 bp, Arabidopsis thaliana
  misc_feature (1)..(1167): Ceres Seq. ID no. 12640889
  misc_feature (1)..(1167): Ortholog of  Ceres SEQ ID NO 13598368 as cited in SEQ ID NO 62140
atggtaggagacatcgccacgagatggaaagaattgagcggtagtagcaagtggaaagacctgcttgatcctcttgacttggatctacgccgttatatcctacactatggtgatatggctgaggtagggtaccttgcctttaatagtgaccgccggtctaaatatgtaggagatagctgctacaccaaagaagagctctttgctcgaaccggttacctcaaagccaaccctttcaggtacgaggtgaccaagtacatatatggaacttcgtctataaggttaccagaatacgaaggcaagaagttgttagggaggaggggcattgttgttgcatggcgagggaccattcagctgtacgagtgggctaacgatttcgatttcccacttgaatcagctgttatggttttccctggagctaacccgaatgacgagcctcgcgtagcaaatggttggctatccctttatacatccactgatccacgatcacgttttgacaagaccagtgcacaagaacaggttcaagaagagctcaaaaggttactagaattgtacaaaaacgaagacgttaccatcaccttaacaggccatagcttgggcgcagttatgtcgattctatccgccgcagactttctccataacgaatggcctaagatcacaccaagtctacaacacagcctatgtgtcacagtatttgctttcgggagtccccaaatcggtgaccgaagcttcaaaagactcgtagagtctctcgaacacctccacatcctaagagtaacaaacgtcccggacctcattccccgttaccccgtattcaggttcacagatataggcgaggagcttcaaatcaacacattaaaatcagagtacctaaaacgatctctaaacctgggacatttccataacctggaggcttacttacacggcgtggcagggacacaacacaaccaaggagaattcaaactagagattaaccgagatatagcactggtaaacaaaggtttagatgctcttgaagataagtacttagtaccaggacattggtgggttcttgagaacaaaggaatggttcaaagtgatgatgggacatggaaactaaatggtgacaggtcaaagaagaaacaagaagaagaagacgaaaaagaagaaaacaattgcaaattcccatga

SEQ ID NO: 78371 - protein, 388 aa, Arabidopsis thaliana
  peptide (1)..(388): Ceres Seq. ID no. 12640890
MVGDIATRWKELSGSSKWKDLLDPLDLDLRRYILHYGDMAEVGYLAFNSDRRSKYVGDSCYTKEELFARTGYLKANPFRYEVTKYIYGTSSIRLPEYEGKKLLGRRGIVVAWRGTIQLYEWANDFDFPLESAVMVFPGANPNDEPRVANGWLSLYTSTDPRSRFDKTSAQEQVQEELKRLLELYKNEDVTITLTGHSLGAVMSILSAADFLHNEWPKITPSLQHSLCVTVFAFGSPQIGDRSFKRLVESLEHLHILRVTNVPDLIPRYPVFRFTDIGEELQINTLKSEYLKRSLNLGHFHNLEAYLHGVAGTQHNQGEFKLEINRDIALVNKGLDALEDKYLVPGHWWVLENKGMVQSDDGTWKLNGDRSKKKQEEEDEKEENNCKFP

SEQ ID NO: 78372 - protein, 350 aa, Arabidopsis thaliana
  peptide (1)..(350): Ceres Seq. ID no. 12640891
MAEVGYLAFNSDRRSKYVGDSCYTKEELFARTGYLKANPFRYEVTKYIYGTSSIRLPEYEGKKLLGRRGIVVAWRGTIQLYEWANDFDFPLESAVMVFPGANPNDEPRVANGWLSLYTSTDPRSRFDKTSAQEQVQEELKRLLELYKNEDVTITLTGHSLGAVMSILSAADFLHNEWPKITPSLQHSLCVTVFAFGSPQIGDRSFKRLVESLEHLHILRVTNVPDLIPRYPVFRFTDIGEELQINTLKSEYLKRSLNLGHFHNLEAYLHGVAGTQHNQGEFKLEINRDIALVNKGLDALEDKYLVPGHWWVLENKGMVQSDDGTWKLNGDRSKKKQEEEDEKEENNCKFP

SEQ ID NO: 78373 - protein, 255 aa, Arabidopsis thaliana; identical to SEQ ID NO: 70567
  peptide (1)..(255): Ceres Seq. ID no. 12640892

SEQ ID NO: 78374 - DNA, 1104 bp, Arabidopsis thaliana
  misc_feature (1)..(1104): Ceres Seq. ID no. 12640904
  misc_feature (1)..(1104): Ortholog of  Ceres SEQ ID NO 14302419 as cited in SEQ ID NO 66752
atgggtgttgcgaatcggagtcttgctgatgcttatgttgcggttttgaattttaatgaggctttgccttatgcgttgaaggcgttggagattcataagaaggagttggggaataattcagctgaggttgcgcaggatcggaggctactcggtgtgatttatagtggtttggagcaacatgacaaggcgttggagcagaaccgattgtctcagagagtgttaaagaattgggggatgaagttggagctgattcgtgcggagattgatgctgctaacatgaaggttgctttgggtaaatacgaggaagcgattgatatattgaagagcgttgttcaacaaactgacaaggacagtgagatgagagctatggtgtttatatcaatgtcgaaagctttggtaaaccaacagaagtttgctgaatcaaagagatgtttggagtttgcttgtgaaatcctcgagaaaaaagaaacagctttgccagttgaagtcgctgaagcatactctgaggtagcaatgcagtacgagtcaatgaacgaatttgaaaccgccatctctttattgcagaaaactttaggtatactagagaagcttcctcaagaacagcactcagaaggaagtgtttctgctaggataggttggttgcttctattctcaggccgagtctcacaagcggttccttacttggaaagtgcagccgagaggttaaaagaaagctttggtgctaaacattttggagttggatatgtatataacaatctcggtgctgcttatttagaactcggaagacctcaatccgctgctcaaatgtttgcagttgctaaagacattatggatgtttcacttggtccaaaccatgtggattccatcgatgcttgccagaatctttctaaagcttacgctggaatgggaaattatagcctcgcagtggaatttcaacagcgagtaatcaatgcttgggataatcatggagatagcgcgaaagacgaaatgaaagaagcgaaaagacttcttgaggatttgcgattgaaggctcgaggaggtgtatcaacgaataagcttctgaataaggctttacctttgcccaagccaagccattcatcttag

SEQ ID NO: 78375 - protein, 367 aa, Arabidopsis thaliana
  peptide (1)..(367): Ceres Seq. ID no. 12640905
MGVANRSLADAYVAVLNFNEALPYALKALEIHKKELGNNSAEVAQDRRLLGVIYSGLEQHDKALEQNRLSQRVLKNWGMKLELIRAEIDAANMKVALGKYEEAIDILKSVVQQTDKDSEMRAMVFISMSKALVNQQKFAESKRCLEFACEILEKKETALPVEVAEAYSEVAMQYESMNEFETAISLLQKTLGILEKLPQEQHSEGSVSARIGWLLLFSGRVSQAVPYLESAAERLKESFGAKHFGVGYVYNNLGAAYLELGRPQSAAQMFAVAKDIMDVSLGPNHVDSIDACQNLSKAYAGMGNYSLAVEFQQRVINAWDNHGDSAKDEMKEAKRLLEDLRLKARGGVSTNKLLNKALPLPKPSHSS

SEQ ID NO: 78376 - protein, 289 aa, Arabidopsis thaliana
  peptide (1)..(289): Ceres Seq. ID no. 12640906
MKLELIRAEIDAANMKVALGKYEEAIDILKSVVQQTDKDSEMRAMVFISMSKALVNQQKFAESKRCLEFACEILEKKETALPVEVAEAYSEVAMQYESMNEFETAISLLQKTLGILEKLPQEQHSEGSVSARIGWLLLFSGRVSQAVPYLESAAERLKESFGAKHFGVGYVYNNLGAAYLELGRPQSAAQMFAVAKDIMDVSLGPNHVDSIDACQNLSKAYAGMGNYSLAVEFQQRVINAWDNHGDSAKDEMKEAKRLLEDLRLKARGGVSTNKLLNKALPLPKPSHSS

SEQ ID NO: 78377 - protein, 275 aa, Arabidopsis thaliana
  peptide (1)..(275): Ceres Seq. ID no. 12640907
MKVALGKYEEAIDILKSVVQQTDKDSEMRAMVFISMSKALVNQQKFAESKRCLEFACEILEKKETALPVEVAEAYSEVAMQYESMNEFETAISLLQKTLGILEKLPQEQHSEGSVSARIGWLLLFSGRVSQAVPYLESAAERLKESFGAKHFGVGYVYNNLGAAYLELGRPQSAAQMFAVAKDIMDVSLGPNHVDSIDACQNLSKAYAGMGNYSLAVEFQQRVINAWDNHGDSAKDEMKEAKRLLEDLRLKARGGVSTNKLLNKALPLPKPSHSS

SEQ ID NO: 78378 - DNA, 2896 bp, Arabidopsis thaliana
  misc_feature (1)..(2896): Ceres Seq. ID no. 12640920
  misc_feature (1)..(2896): Ortholog of  Ceres SEQ ID NO 13657677 as cited in SEQ ID NO 66119
atggcgtcaacgccgcctcactgggtcaccaccaccaacaaccaccgtccatggcttcctcagcgtcctcgtcccggtcgctccgttacctcagctcctccctcttcttcagcctctgtttcttcagctcatctttcacagactactccaaatttctctcctttgcaaacccccaaatcagatttctccggtcgtcaatctacccgattcgtctcccccgccaccaataaccaccgtcagaccaggcaaaacccaaactacaaccaccgtccgtatggtgcctcttcttctcctcgtggctcagctcctccgccttcatctgtagctactgtagctccagctcaactatcacaacctcctaacttttcgcctctccaaaccccaaaatccgatctttcatcggatttttcaggtagacgatcgactagattcgtctccaagatgcatttcgggcggcagaagacgacaatggctacgagacatagctctgctgctgaagatgcacttcaaaacgctattgatttctctggagacgatgagatgtttcatagtctaatgttgagctttgagtcaaagctgtgtggctctgacgactgtacctatataatccgtgagttagggaatcgtaatgagtgcgataaagctgttggcttttatgagtttgcggttaaacgagagaggagaaagaacgagcaggggaagttagctagtgctatgataagtactcttggtagatatggtaaagtaactattgctaagaggattttcgaaactgcttttgctggtggatatggaaacacggtttacgccttctcggctttgatcagcgcttatgggagaagtgggctacatgaggaagccattagtgtcttcaactccatgaaagagtatggcttgaggccgaatttggttacctacaatgctgtgattgacgcttgcggtaaaggcgggatggagtttaagcaagtagccaagtttttcgatgagatgcagaggaacggtgtgcagccagatagaataactttcaactcgttgcttgctgtttgcagtagaggagggttgtgggaagcagcaaggaatctgtttgatgagatgacgaatagaaggattgagcaagatgttttttcttataatacgcttttggatgcaatttgcaaaggtgggcagatggaccttgctttcgaaatccttgctcagatgccagttaagagaatcatgcctaatgttgtaagttatagcaccgttattgatgggtttgcaaaagccggaagatttgatgaagctcttaacttgtttggtgaaatgagatatcttggtattgcattagatagagtttcttacaatacattgctttcaatctacactaaagttggtagatctgaagaagctttggatattctgagagaaatggcatctgttgggattaaaaaggatgttgtgacttataatgctcttcttggaggatatgggaaacaagggaaatatgatgaagtgaagaaagttttcactgagatgaagcgagagcatgtgttgcctaacttactgacttattcaactttgatcgatgggtactcgaaggggggtttgtataaagaggcaatggagatatttagggagtttaagagcgccggattaagagctgatgttgttttgtacagtgcattgattgatgcattgtgcaagaatgggttggtgggttctgctgtttctttgatcgatgagatgacaaaggaaggaattagtcctaatgttgtaacttataattccataatcgatgcctttggtcgttctgcaactatggacagatcagccgattatagcaatggtggatctttgcctttctcttcttctgctctgagtgcattgactgaaacagagggtaatcgggtaatacagttatttgggcagttaacaactgagagtaacaaccgaacgacgaaagattgtgaggagggtatgcaggagctctcctgtatattggaagttttccgcaaaatgcatcagctggaaattaaaccaaatgttgtaaccttttcagcgattctgaatgcttgcagtcggtgtaactcatttgaagatgcatcaatgctactagaggagctcaggctgtttgataataaggtatatggtgttgttcatggacttctcatgggccagagagagaatgtatggctccaagctcagagcttatttgacaaagtaaatgaaatggatggttcgactgcttctgccttctacaatgccctaactgacatgctttggcactttggccagaaacgaggtgcagaactggtggcacttgagggaagatctaggcaagtttgggaaaacgtgtggtctgattcttgcttggacttacacctcatgtcttctggagctgcacgtgcaatggtccatgcgtggctactaaacatacgctccattgtctatgaaggtcatgagttacctaaagtcttgagtatattgactggctgggggaaacacagcaaagtggttggagacggagcactaagacgagcggttgaagttcttttgaggggaatggatgcaccattccacctgtcaaaatgcaacatgggacggttcacatcaagcggttcggtggtagcaacttggctgcgtgaatcagccacactgaaactcttaatcctccatgaccacataacaaccgccacagctactactacaacaatgaaatcaacagaccaacaacaacggaaacagacgtcgtttgctttacagcctcttcttttgtagcttagtgtatgatgtaaaagtaaaacaatttgtgttgatcattaaagtgtataggaccaatggtcctaacaatgtttggctctgtgctaatatttgtaacaaagcaactcgattgattatgtgaaaatcgttttgtctt

SEQ ID NO: 78379 - protein, 918 aa, Arabidopsis thaliana
  peptide (1)..(918): Ceres Seq. ID no. 12640921
MASTPPHWVTTTNNHRPWLPQRPRPGRSVTSAPPSSSASVSSAHLSQTTPNFSPLQTPKSDFSGRQSTRFVSPATNNHRQTRQNPNYNHRPYGASSSPRGSAPPPSSVATVAPAQLSQPPNFSPLQTPKSDLSSDFSGRRSTRFVSKMHFGRQKTTMATRHSSAAEDALQNAIDFSGDDEMFHSLMLSFESKLCGSDDCTYIIRELGNRNECDKAVGFYEFAVKRERRKNEQGKLASAMISTLGRYGKVTIAKRIFETAFAGGYGNTVYAFSALISAYGRSGLHEEAISVFNSMKEYGLRPNLVTYNAVIDACGKGGMEFKQVAKFFDEMQRNGVQPDRITFNSLLAVCSRGGLWEAARNLFDEMTNRRIEQDVFSYNTLLDAICKGGQMDLAFEILAQMPVKRIMPNVVSYSTVIDGFAKAGRFDEALNLFGEMRYLGIALDRVSYNTLLSIYTKVGRSEEALDILREMASVGIKKDVVTYNALLGGYGKQGKYDEVKKVFTEMKREHVLPNLLTYSTLIDGYSKGGLYKEAMEIFREFKSAGLRADVVLYSALIDALCKNGLVGSAVSLIDEMTKEGISPNVVTYNSIIDAFGRSATMDRSADYSNGGSLPFSSSALSALTETEGNRVIQLFGQLTTESNNRTTKDCEEGMQELSCILEVFRKMHQLEIKPNVVTFSAILNACSRCNSFEDASMLLEELRLFDNKVYGVVHGLLMGQRENVWLQAQSLFDKVNEMDGSTASAFYNALTDMLWHFGQKRGAELVALEGRSRQVWENVWSDSCLDLHLMSSGAARAMVHAWLLNIRSIVYEGHELPKVLSILTGWGKHSKVVGDGALRRAVEVLLRGMDAPFHLSKCNMGRFTSSGSVVATWLRESATLKLLILHDHITTATATTTTMKSTDQQQRKQTSFALQPLLL

SEQ ID NO: 78380 - protein, 771 aa, Arabidopsis thaliana
  peptide (1)..(771): Ceres Seq. ID no. 12640922
MHFGRQKTTMATRHSSAAEDALQNAIDFSGDDEMFHSLMLSFESKLCGSDDCTYIIRELGNRNECDKAVGFYEFAVKRERRKNEQGKLASAMISTLGRYGKVTIAKRIFETAFAGGYGNTVYAFSALISAYGRSGLHEEAISVFNSMKEYGLRPNLVTYNAVIDACGKGGMEFKQVAKFFDEMQRNGVQPDRITFNSLLAVCSRGGLWEAARNLFDEMTNRRIEQDVFSYNTLLDAICKGGQMDLAFEILAQMPVKRIMPNVVSYSTVIDGFAKAGRFDEALNLFGEMRYLGIALDRVSYNTLLSIYTKVGRSEEALDILREMASVGIKKDVVTYNALLGGYGKQGKYDEVKKVFTEMKREHVLPNLLTYSTLIDGYSKGGLYKEAMEIFREFKSAGLRADVVLYSALIDALCKNGLVGSAVSLIDEMTKEGISPNVVTYNSIIDAFGRSATMDRSADYSNGGSLPFSSSALSALTETEGNRVIQLFGQLTTESNNRTTKDCEEGMQELSCILEVFRKMHQLEIKPNVVTFSAILNACSRCNSFEDASMLLEELRLFDNKVYGVVHGLLMGQRENVWLQAQSLFDKVNEMDGSTASAFYNALTDMLWHFGQKRGAELVALEGRSRQVWENVWSDSCLDLHLMSSGAARAMVHAWLLNIRSIVYEGHELPKVLSILTGWGKHSKVVGDGALRRAVEVLLRGMDAPFHLSKCNMGRFTSSGSVVATWLRESATLKLLILHDHITTATATTTTMKSTDQQQRKQTSFALQPLLL

SEQ ID NO: 78381 - protein, 762 aa, Arabidopsis thaliana
  peptide (1)..(762): Ceres Seq. ID no. 12640923
MATRHSSAAEDALQNAIDFSGDDEMFHSLMLSFESKLCGSDDCTYIIRELGNRNECDKAVGFYEFAVKRERRKNEQGKLASAMISTLGRYGKVTIAKRIFETAFAGGYGNTVYAFSALISAYGRSGLHEEAISVFNSMKEYGLRPNLVTYNAVIDACGKGGMEFKQVAKFFDEMQRNGVQPDRITFNSLLAVCSRGGLWEAARNLFDEMTNRRIEQDVFSYNTLLDAICKGGQMDLAFEILAQMPVKRIMPNVVSYSTVIDGFAKAGRFDEALNLFGEMRYLGIALDRVSYNTLLSIYTKVGRSEEALDILREMASVGIKKDVVTYNALLGGYGKQGKYDEVKKVFTEMKREHVLPNLLTYSTLIDGYSKGGLYKEAMEIFREFKSAGLRADVVLYSALIDALCKNGLVGSAVSLIDEMTKEGISPNVVTYNSIIDAFGRSATMDRSADYSNGGSLPFSSSALSALTETEGNRVIQLFGQLTTESNNRTTKDCEEGMQELSCILEVFRKMHQLEIKPNVVTFSAILNACSRCNSFEDASMLLEELRLFDNKVYGVVHGLLMGQRENVWLQAQSLFDKVNEMDGSTASAFYNALTDMLWHFGQKRGAELVALEGRSRQVWENVWSDSCLDLHLMSSGAARAMVHAWLLNIRSIVYEGHELPKVLSILTGWGKHSKVVGDGALRRAVEVLLRGMDAPFHLSKCNMGRFTSSGSVVATWLRESATLKLLILHDHITTATATTTTMKSTDQQQRKQTSFALQPLLL

SEQ ID NO: 78382 - DNA, 1011 bp, Arabidopsis thaliana
  misc_feature (1)..(1011): Ceres Seq. ID no. 12640955
  misc_feature (1)..(1011): Ortholog of  Ceres SEQ ID NO 13593955 as cited in SEQ ID NO 54278
  misc_feature (1)..(1011): Ortholog of  Ceres SEQ ID NO 13597380 as cited in SEQ ID NO 64054
  misc_feature (1)..(1011): Ortholog of  Ceres SEQ ID NO 12625474 as cited in SEQ ID NO 64169
atgtcgacttctaaagccataaccttaactctcttcatcacaacaacattactagcgtcctgcgacgcagccgcaaatgcaacaacgaaaccgctcttcccagcgattctaatcttcggcgattcaaccgtcgacacaggcaacaacaactaccctttaccaacaatcttcagagctgaacactttccttacggcatggatcttccagacggaaaagctaacggaagattctcaaacggaaaacttatctccgacataatcgcaaccaaactcaacatcaaagactggtgcggttacgacgacctaaccagtctctcgacacaagccattcgtgtctcggaacaaccaaacatgttcaagagttacattgctcgtctcaaaggtatcgtgggagacaagaaagcgatggagatcataaacaatgctttcgtggttgtgagtgcagggcctaatgatttcattttgaactattacgatattccctcaaggcgtctcgagtatcctttcatttctggttaccaagattttattcttaagaggcttgaaaatttcgtgcgggagctttacagtttaggtgtccggaatgttttggttggaggtttaccgccaatggggtgtttaccgatccatatgactgctaaattccgcaacatttttagattctgcttggaacaccataacaaagactctgttttgtacaatgagaaacttcagaagctcttgccccaaatcgaagcatctcttccaggaagcaaattcctttacgccgatgtctataatcctatgatggagatgatccaaaaccctagcaaatacgggttcaaagagacgaagagaggatgttgtggaacagggttcttggagacgagcttcatgtgtaatgtcttttctcctgtgtgtcaaaatcggtcggagtttatgttctttgactcgattcatccatcggaagctacctataatgtcataggcaatcgtctggatcctctgattcgtgggaagtttcaggcttaa

SEQ ID NO: 78383 - protein, 336 aa, Arabidopsis thaliana
  peptide (1)..(336): Ceres Seq. ID no. 12640956
MSTSKAITLTLFITTTLLASCDAAANATTKPLFPAILIFGDSTVDTGNNNYPLPTIFRAEHFPYGMDLPDGKANGRFSNGKLISDIIATKLNIKDWCGYDDLTSLSTQAIRVSEQPNMFKSYIARLKGIVGDKKAMEIINNAFVVVSAGPNDFILNYYDIPSRRLEYPFISGYQDFILKRLENFVRELYSLGVRNVLVGGLPPMGCLPIHMTAKFRNIFRFCLEHHNKDSVLYNEKLQKLLPQIEASLPGSKFLYADVYNPMMEMIQNPSKYGFKETKRGCCGTGFLETSFMCNVFSPVCQNRSEFMFFDSIHPSEATYNVIGNRLDPLIRGKFQA

SEQ ID NO: 78384 - protein, 271 aa, Arabidopsis thaliana
  peptide (1)..(271): Ceres Seq. ID no. 12640957
MDLPDGKANGRFSNGKLISDIIATKLNIKDWCGYDDLTSLSTQAIRVSEQPNMFKSYIARLKGIVGDKKAMEIINNAFVVVSAGPNDFILNYYDIPSRRLEYPFISGYQDFILKRLENFVRELYSLGVRNVLVGGLPPMGCLPIHMTAKFRNIFRFCLEHHNKDSVLYNEKLQKLLPQIEASLPGSKFLYADVYNPMMEMIQNPSKYGFKETKRGCCGTGFLETSFMCNVFSPVCQNRSEFMFFDSIHPSEATYNVIGNRLDPLIRGKFQA

SEQ ID NO: 78385 - protein, 219 aa, Arabidopsis thaliana
  peptide (1)..(219): Ceres Seq. ID no. 12640958
MFKSYIARLKGIVGDKKAMEIINNAFVVVSAGPNDFILNYYDIPSRRLEYPFISGYQDFILKRLENFVRELYSLGVRNVLVGGLPPMGCLPIHMTAKFRNIFRFCLEHHNKDSVLYNEKLQKLLPQIEASLPGSKFLYADVYNPMMEMIQNPSKYGFKETKRGCCGTGFLETSFMCNVFSPVCQNRSEFMFFDSIHPSEATYNVIGNRLDPLIRGKFQA

SEQ ID NO: 78386 - DNA, 914 bp, Arabidopsis thaliana
  misc_feature (1)..(914): Ceres Seq. ID no. 12640989
  misc_feature (1)..(914): Ortholog of  Ceres SEQ ID NO 12558659 as cited in SEQ ID NO 20727
  misc_feature (1)..(914): Ortholog of  Ceres SEQ ID NO 12619999 as cited in SEQ ID NO 66123
  misc_feature (1)..(914): Ortholog of  Ceres SEQ ID NO 13656436 as cited in SEQ ID NO 69154
atttcctttgccagctccatctctctctctctctctctaaaaccagtctgcaactttctctctctcaaaatcagaaacaaaaaaaacgatgtcgtccgatgacgaaggaggagaagagtatctattcaagatagtgataatcggcgactctgccgtcgggaaatcgaaccttctctctcgctatgctcgtaacgagttcaacgctcattccaaggccacgatcggcgtcgagttccagacgcagaatatggaaatcgaaggtaaagaagttaaagctcagatttgggatactgctggtcaagaacggtttcgtgccgtcacttccgcttattatcgcggcgccgtcggagctctcgtcgtttacgatattagtcgtcgatccacgtttgagagtgttggtcgttggcttgatgagctcaagacacattcggatacaacggttgcgaggatgctggtgggaaacaaatgcgatctagaaagcataagagcggtgagcgtggaagaaggcaaagcactagctgaaaccgaaggactatttttcatggaaacatcagctctcgattcaacaaatgttaaaacagctttcgaaatggtaatccgtgacatctataccaatataagccggaaacaactcaactccgacacttataaaaccgaactaagcatgaaaaacagagtcagtctcgttaaggacgataataaaagctccacacaaggctttggtttctcttgctgttcttcctcgtgacctgaattttgatcccaaattatttttcttttgcttcatttgtggattttttttcttttgaatttttttcaaccatagaaaaaagggcagatcatatagattcaaaaattgtagtgtttatgtgtggatcgtatagtaaacaatttatacgataattatttattgc

SEQ ID NO: 78387 - protein, 219 aa, Arabidopsis thaliana
  peptide (1)..(219): Ceres Seq. ID no. 12640990
MSSDDEGGEEYLFKIVIIGDSAVGKSNLLSRYARNEFNAHSKATIGVEFQTQNMEIEGKEVKAQIWDTAGQERFRAVTSAYYRGAVGALVVYDISRRSTFESVGRWLDELKTHSDTTVARMLVGNKCDLESIRAVSVEEGKALAETEGLFFMETSALDSTNVKTAFEMVIRDIYTNISRKQLNSDTYKTELSMKNRVSLVKDDNKSSTQGFGFSCCSSS

SEQ ID NO: 78388 - protein, 166 aa, Arabidopsis thaliana
  peptide (1)..(166): Ceres Seq. ID no. 12640991
MEIEGKEVKAQIWDTAGQERFRAVTSAYYRGAVGALVVYDISRRSTFESVGRWLDELKTHSDTTVARMLVGNKCDLESIRAVSVEEGKALAETEGLFFMETSALDSTNVKTAFEMVIRDIYTNISRKQLNSDTYKTELSMKNRVSLVKDDNKSSTQGFGFSCCSSS

SEQ ID NO: 78389 - DNA, 1980 bp, Arabidopsis thaliana
  misc_feature (1)..(1980): Ceres Seq. ID no. 12641005
  misc_feature (1)..(1980): Ortholog of  Ceres SEQ ID NO 15178728 as cited in SEQ ID NO 67280
atggaggagaagcagaacaacagtcctgtgggagagaagcaacagagctttaatggtataataataaaccaaacacaagagaatcagacaaaatcaatggagaaacaacagagtttccgatgtgtggtggagaatcaaccgagaaaggcgagagctttagagaaacaagtgagtttccaaggtgtgaatgtagagaactatcagcaaagcagactcggaagatcaatggagaagcaacagagttttcgaggtgtcaacgttgagaatcataaacgtggagttatggagaagctaccgagttttggtagagcaacaatggagaggcagaagagtttccgtggtgggtttttggagaagcagaagagcttccgtgtggtgatggagaggcaattgagttttataggtgagaggaggaagaagaatgaatcaccagggaaaagaggagactcttctcttcatatcgctgcgagaaccgggaacttaagtaaggttaaagaactgattcgaggttgtggtgatgagttgaaagagttgttgtcaaagcaaaatcttgaaggagagactcctctttatactgcagcagagaatgggcattcaattgttgttgaggagatgttgaagcatatggaccttgaaactgcttccatcgctgctagaaacgggtttgatccatttcatgtcgccgccaaacaaggccatctcgaggtgttgaagatactgttggagacattccctaatttggcaatgacaacggatttatcgtgtacaactgcgttacacactgctgcaacacagggacatattgatgtggtgaatcttcttttggagacagactctaatttggctaagattgctaagaacaacggtaaaactgcgcttcactctgcagcaaggatgggtcatgtggaagttgttaaatctctgataggtaaggatccaagcattgggtttagaaccgataaaaaagggcaaactgctcttcacatggctgtaaaaggtcaaaatgatgggattgttgttgagttggtgaaacctgatgttgctgttttgagcgttgaggataataaaggaaatacaccattgcacattgccacaaacaaggggcgtattaagatagtacggtgtttggtatcttttgaaggcataaacctcaacccaataaacaaagctggagatacgccactcgatgtctctgagaagataggaaacgcagagcttgtgtcagttctgaaggaagcaggagctgctacagctaaagatctcggaaagcctcagaacccagctaagcaactgaagcaaacagtcagcgacatcaaacatgaagtacaatctcagcttcagcaatccagacaaacaggtgtaagagtccagaagatagcaaaaagactcaagaagctacacattagtggtctaaacaacgctataaactcagcaactgttgtggcagtgcttattgccacagtggctttcgcagcaatcttcacaatacccggtcagtacgaagaggaccggtcgaaaggagagttgctaggacaagctcatatagcaaacaaagcaccgtttctggtcttcttcatctttgacagcttggcactgtttatatccttagctgttgttgtggtgcagacttcagttgttgtgattgagcagaaggcgaaaaagaagcttgtgtttgtaatcaacaagctcatgtggtgtgcttgtctgttcatatccattgcctttgtttctctctcttatattgttgttggcaaagaggagatgtggttggctgtttgcgcgactgttatcggcggcacgattatgttgactacgattggtgcgatgtgctattgtgtggtcatgcataggatggaagaatctaaattgaggagcataaggaaagaaagaagcaagtctcagtctttctctatgtctcgtatgccgtctgattcagatattctaaatggtgaatacaataagagaatgtatgccctctga

SEQ ID NO: 78390 - protein, 659 aa, Arabidopsis thaliana; identical to SEQ ID NO: 70301
  peptide (1)..(659): Ceres Seq. ID no. 12641006

SEQ ID NO: 78391 - protein, 627 aa, Arabidopsis thaliana; identical to SEQ ID NO: 70302
  peptide (1)..(627): Ceres Seq. ID no. 12641007

SEQ ID NO: 78392 - protein, 584 aa, Arabidopsis thaliana
  peptide (1)..(584): Ceres Seq. ID no. 12641008
MEKQQSFRGVNVENHKRGVMEKLPSFGRATMERQKSFRGGFLEKQKSFRVVMERQLSFIGERRKKNESPGKRGDSSLHIAARTGNLSKVKELIRGCGDELKELLSKQNLEGETPLYTAAENGHSIVVEEMLKHMDLETASIAARNGFDPFHVAAKQGHLEVLKILLETFPNLAMTTDLSCTTALHTAATQGHIDVVNLLLETDSNLAKIAKNNGKTALHSAARMGHVEVVKSLIGKDPSIGFRTDKKGQTALHMAVKGQNDGIVVELVKPDVAVLSVEDNKGNTPLHIATNKGRIKIVRCLVSFEGINLNPINKAGDTPLDVSEKIGNAELVSVLKEAGAATAKDLGKPQNPAKQLKQTVSDIKHEVQSQLQQSRQTGVRVQKIAKRLKKLHISGLNNAINSATVVAVLIATVAFAAIFTIPGQYEEDRSKGELLGQAHIANKAPFLVFFIFDSLALFISLAVVVVQTSVVVIEQKAKKKLVFVINKLMWCACLFISIAFVSLSYIVVGKEEMWLAVCATVIGGTIMLTTIGAMCYCVVMHRMEESKLRSIRKERSKSQSFSMSRMPSDSDILNGEYNKRMYAL

SEQ ID NO: 78393 - DNA, 1221 bp, Arabidopsis thaliana
  misc_feature (1)..(1221): Ceres Seq. ID no. 12641078
  misc_feature (1)..(1221): Ortholog of  Ceres SEQ ID NO 15178181 as cited in SEQ ID NO 58740
  misc_feature (1)..(1221): Ortholog of  Ceres SEQ ID NO 12614739 as cited in SEQ ID NO 68587
atgtctataaattgttttcgaacagcgaaggctccgcttcaatcatttgtagcagtaagaacgaattcgagacctagaaattcatcgaaccgtctcgtttctgtattcggacgcaagtcttcttctccttcatttgttactctcagagttgtttcatcgatggcttacgagaaagagcttgatgctgctaagaaagctgcttcactcgctgctcgtctctgtcagaaagttcaaaaggctttgttgcaatcagatgtgcaatcaaaatctgataaaagtccagtgaccgttgctgattatggttcacaagcagttgttagtttagtcttagaaaaagagctcagttctgaacccttttcattggtggctgaagaggactcaggcgatctacgcaaggatggttctcaggatactctggagcgcatcacaaaactcgtgaacgacactttggctaccgaggaatcgtttaatggctctactttgtctactgatgatctacttagagccattgactgtggaacatctgaaggtggtccaaatggtcgacactgggtcttggatccaattgatggcactaaaggatttctgaggggagatcaatacgcagtagcactaggattgctcgaggaagggaaagtagttttaggtgtgcttgcttgtccaaacttgccgttagcatccatagcaggaaacaacaagaacaaatcttcgtcagacgaaattggatgcctcttctttgctacaattggttcagggacatatatgcagctcctagattcaaaatcttctcctgtaaaagtgcaagtctctagtgttgagaatcctgaagaggcatcgttcttcgagtcattcgaaggagctcactctctacatgacttatccagctccattgccaataaactcggtgtcaaagctccaccagtccgtattgatagccaagcaaagtatggagctttatcaagaggagatggagctatatacttacggtttcctcataaaggataccgcgaaaagatttgggaccatgtcgctggtgctatagttgttacagaggcgggtggaatagtgacagatgcagcaggaaagccactggatttctcgaaagggaagtatcttgatttggacacaggcattatcgttgctaacgagaagctaatgcctctgcttttgaaagcagttcgtgactccatagctgagcaagagaaagcttcagctctctga

SEQ ID NO: 78394 - protein, 406 aa, Arabidopsis thaliana
  peptide (1)..(406): Ceres Seq. ID no. 12641079
MSINCFRTAKAPLQSFVAVRTNSRPRNSSNRLVSVFGRKSSSPSFVTLRVVSSMAYEKELDAAKKAASLAARLCQKVQKALLQSDVQSKSDKSPVTVADYGSQAVVSLVLEKELSSEPFSLVAEEDSGDLRKDGSQDTLERITKLVNDTLATEESFNGSTLSTDDLLRAIDCGTSEGGPNGRHWVLDPIDGTKGFLRGDQYAVALGLLEEGKVVLGVLACPNLPLASIAGNNKNKSSSDEIGCLFFATIGSGTYMQLLDSKSSPVKVQVSSVENPEEASFFESFEGAHSLHDLSSSIANKLGVKAPPVRIDSQAKYGALSRGDGAIYLRFPHKGYREKIWDHVAGAIVVTEAGGIVTDAAGKPLDFSKGKYLDLDTGIIVANEKLMPLLLKAVRDSIAEQEKASAL

SEQ ID NO: 78395 - protein, 353 aa, Arabidopsis thaliana
  peptide (1)..(353): Ceres Seq. ID no. 12641080
MAYEKELDAAKKAASLAARLCQKVQKALLQSDVQSKSDKSPVTVADYGSQAVVSLVLEKELSSEPFSLVAEEDSGDLRKDGSQDTLERITKLVNDTLATEESFNGSTLSTDDLLRAIDCGTSEGGPNGRHWVLDPIDGTKGFLRGDQYAVALGLLEEGKVVLGVLACPNLPLASIAGNNKNKSSSDEIGCLFFATIGSGTYMQLLDSKSSPVKVQVSSVENPEEASFFESFEGAHSLHDLSSSIANKLGVKAPPVRIDSQAKYGALSRGDGAIYLRFPHKGYREKIWDHVAGAIVVTEAGGIVTDAAGKPLDFSKGKYLDLDTGIIVANEKLMPLLLKAVRDSIAEQEKASAL

SEQ ID NO: 78396 - DNA, 1284 bp, Arabidopsis thaliana
  misc_feature (1)..(1284): Ceres Seq. ID no. 12641098
  misc_feature (1)..(1284): Ortholog of  Ceres SEQ ID NO 15175496 as cited in SEQ ID NO 56127
  misc_feature (1)..(1284): Ortholog of  Ceres SEQ ID NO 13598714 as cited in SEQ ID NO 62656
  misc_feature (1)..(1284): Ortholog of  Ceres SEQ ID NO 13596969 as cited in SEQ ID NO 63375
  misc_feature (1)..(1284): Ortholog of  Ceres SEQ ID NO 13597519 as cited in SEQ ID NO 64759
  misc_feature (1)..(1284): Ortholog of  Ceres SEQ ID NO 13597870 as cited in SEQ ID NO 64982
  misc_feature (1)..(1284): Ortholog of  Ceres SEQ ID NO 13656123 as cited in SEQ ID NO 65212
actataacttaaacacacacttcatcttctctaaaaccctaaaatttaaacacaagatgggtttggttagatcattgtgcttattaataaccttccttaattgtctcatcatctcggttcatggccaagccaccgcaaggcctggtcctgtttccggcactaggattgggttttacttaactacgtgtcctagagctgagactattgtccgaaacgccgtgaatgctggtttcagttctgaccccagaatcgcacccggaatactgagaatgcatttccacgactgttttgtccaaggttgtgacggttcgatccttatatccggagctaacaccgagagaaccgccggtccgaacctcaatctccaaggatttgaagtcatagacaacgccaaaacgcagctcgaagccgcgtgtcctggagttgtctcttgtgctgatattttagcattagccgctcgtgacacagtcattctcactcaaggaacaggctggcaagtaccaacgggacgtagagatggtagagtttctttggcttcgaatgctaacaatctccctggtccccgtgactccgttgccgttcaacaacagaaattctccgccttgggactcaatactcgtgatctcgtcgtcctcgtcggaggacacacgatcggaacagcaggatgtggtgtattcaggaacaggctattcaataccaccggacaaaccgcagatccaaccatcgacccaacatttttggcgcagcttcaaacacaatgtccccaaaacggcgacggttcagtgcgcgtggatctcgacaccggaagcggaagcacttgggacacttcttactacaacaacctaagccgtgggcgtggagttctccaatccgatcaagtcctttggaccgatccagccactagacccatagtgcaacaattgatggctcctagaagcaccttcaacgttgagtttgcgaggtcaatggtcagaatgagtaatatcggtgtggttaccggagctaatggggaaatccgtagggtttgctctgcggttaattaattaaccgattagaatctgtcgtgataaactttcatgacgcaaagtacttgtttcgagtgtggttttaatctgaacaataaataaaccaatagaaaacgacatacaaagaaaaaacccaaaagtgggttgatgaaaattgtatctataaggtgttggtattcgatttcttttggttttagttaaaaaaaactgtaatgtcttcacaaaaatattataatgagtttggtcctagtttggattc

SEQ ID NO: 78397 - protein, 346 aa, Arabidopsis thaliana
  peptide (1)..(346): Ceres Seq. ID no. 12641099
YNLNTHFIFSKTLKFKHKMGLVRSLCLLITFLNCLIISVHGQATARPGPVSGTRIGFYLTTCPRAETIVRNAVNAGFSSDPRIAPGILRMHFHDCFVQGCDGSILISGANTERTAGPNLNLQGFEVIDNAKTQLEAACPGVVSCADILALAARDTVILTQGTGWQVPTGRRDGRVSLASNANNLPGPRDSVAVQQQKFSALGLNTRDLVVLVGGHTIGTAGCGVFRNRLFNTTGQTADPTIDPTFLAQLQTQCPQNGDGSVRVDLDTGSGSTWDTSYYNNLSRGRGVLQSDQVLWTDPATRPIVQQLMAPRSTFNVEFARSMVRMSNIGVVTGANGEIRRVCSAVN

SEQ ID NO: 78398 - protein, 328 aa, Arabidopsis thaliana; identical to SEQ ID NO: 35476
  peptide (1)..(328): Ceres Seq. ID no. 12641100

SEQ ID NO: 78399 - protein, 257 aa, Arabidopsis thaliana; identical to SEQ ID NO: 35477
  peptide (1)..(257): Ceres Seq. ID no. 12641101

SEQ ID NO: 78400 - DNA, 1833 bp, Arabidopsis thaliana
  misc_feature (1)..(1833): Ceres Seq. ID no. 12641106
  misc_feature (1)..(1833): Ortholog of  Ceres SEQ ID NO 14307716 as cited in SEQ ID NO 59652
atgggtagtggaacaaaccatctaaagagtaatacttttatcaagagagaggcaaacatgttaggaaaaaatccatggcctgagaaagatagtggtggctcttcggtttctcgtgatacgggaacaggaaaagatgttcaggatatgacattggaggatacaaatacttcagatcatggtttcaatggtggccacgtagatgtggttgaaaatttctccactggggatcccatgttgtgtgacacttccgctgcaacgaatgatggcgtatataattattccctcaacagcattccggatgctgaaaatgatcttagctttttcgacaatggagataaagaaaaaaatgatctcttctatggctggggtgacataggaaattttgaggatgtggacaacatgcttaggagttgtgattcaacattcggcttggatagtcttaataatgaaggtgacttagggtggttctcttctgcccagccaaatgaggagacagcaggcgcgatgacagatgatctcaaaccagacaaaatgttggaaaatcaaagaaccgctatgttgcaggttgaagactttttgaacaacagtgagcccaaccatgctgttgaagatgagtatggatatactattgaggacgattcagctcaaggaaaatcatcacaaaatgtattcgatacaagtttgcaaaagaaggatatattgatgctggatgtagagaattgtttgcgccttccaaggcacatgcaaccattaactacatgggatgttaccttctatgatgacttatttagttgcacgttttcctcagttaaatcctctaactatgatatgacgctttttacaatggtggcaaatcttgagaagaagcagactgatcatcttcatcatctggatgggaaaagtgatgggttctcggagaacagttttactttacagcacagtggtatttcaagggaaataatggataccaaccagtattaccctccctccgcattccaacagcgagatgtgccatactcgcatttcaattgtgagcagccttccgttcaagtatcagcatgtgaaagtaaatctggtattaaatctgagaacaaacccagtccttcctctgcttcaaatgagtcatacacatcaaatcatgcacaatcaatcgagagcttacaaggtccaactgttgatgatcggtttaggaaggtctttgaaacgagagccaacttgctgcctgggcaagatatgcctccttcttttgctgcaaataccaagaagagtagtaagacagactccatggtgtttcctgatgctgctcctatccagaagattgggcttgagaatgaccacagaaaagctgcaactgaattggaaacatcaaatatgcagggaagttcttgtgttagctctgttgtggatgacatttcactggaagcaacaagttttcgccagcttcaacaagttatagaacagttggatgttaggacaaagctttgcataagagacagcttataccgattagcaaaaagtgcggaacagagacatcatggtggaaacagaccggagaaaggcgcaggctcgcatctcgtgactggtgaagcagacaagtatgctggattcatggatatcgaaactgatacaaacccgatagatcgatcgatagctcatttgctgtttcacaggccctcagactcatctctttcatccgataacaatgttctgtcttataaatctcatccaatgattcctcagcccaatagtagtccgagcctgaggatagagaaacaagaggaaactacagaacttagacccgaagcagaagttgtaacaagtgacaacaattaa

SEQ ID NO: 78401 - protein, 610 aa, Arabidopsis thaliana
  peptide (1)..(610): Ceres Seq. ID no. 12641107
MGSGTNHLKSNTFIKREANMLGKNPWPEKDSGGSSVSRDTGTGKDVQDMTLEDTNTSDHGFNGGHVDVVENFSTGDPMLCDTSAATNDGVYNYSLNSIPDAENDLSFFDNGDKEKNDLFYGWGDIGNFEDVDNMLRSCDSTFGLDSLNNEGDLGWFSSAQPNEETAGAMTDDLKPDKMLENQRTAMLQVEDFLNNSEPNHAVEDEYGYTIEDDSAQGKSSQNVFDTSLQKKDILMLDVENCLRLPRHMQPLTTWDVTFYDDLFSCTFSSVKSSNYDMTLFTMVANLEKKQTDHLHHLDGKSDGFSENSFTLQHSGISREIMDTNQYYPPSAFQQRDVPYSHFNCEQPSVQVSACESKSGIKSENKPSPSSASNESYTSNHAQSIESLQGPTVDDRFRKVFETRANLLPGQDMPPSFAANTKKSSKTDSMVFPDAAPIQKIGLENDHRKAATELETSNMQGSSCVSSVVDDISLEATSFRQLQQVIEQLDVRTKLCIRDSLYRLAKSAEQRHHGGNRPEKGAGSHLVTGEADKYAGFMDIETDTNPIDRSIAHLLFHRPSDSSLSSDNNVLSYKSHPMIPQPNSSPSLRIEKQEETTELRPEAEVVTSDNN

SEQ ID NO: 78402 - protein, 591 aa, Arabidopsis thaliana
  peptide (1)..(591): Ceres Seq. ID no. 12641108
MLGKNPWPEKDSGGSSVSRDTGTGKDVQDMTLEDTNTSDHGFNGGHVDVVENFSTGDPMLCDTSAATNDGVYNYSLNSIPDAENDLSFFDNGDKEKNDLFYGWGDIGNFEDVDNMLRSCDSTFGLDSLNNEGDLGWFSSAQPNEETAGAMTDDLKPDKMLENQRTAMLQVEDFLNNSEPNHAVEDEYGYTIEDDSAQGKSSQNVFDTSLQKKDILMLDVENCLRLPRHMQPLTTWDVTFYDDLFSCTFSSVKSSNYDMTLFTMVANLEKKQTDHLHHLDGKSDGFSENSFTLQHSGISREIMDTNQYYPPSAFQQRDVPYSHFNCEQPSVQVSACESKSGIKSENKPSPSSASNESYTSNHAQSIESLQGPTVDDRFRKVFETRANLLPGQDMPPSFAANTKKSSKTDSMVFPDAAPIQKIGLENDHRKAATELETSNMQGSSCVSSVVDDISLEATSFRQLQQVIEQLDVRTKLCIRDSLYRLAKSAEQRHHGGNRPEKGAGSHLVTGEADKYAGFMDIETDTNPIDRSIAHLLFHRPSDSSLSSDNNVLSYKSHPMIPQPNSSPSLRIEKQEETTELRPEAEVVTSDNN

SEQ ID NO: 78403 - protein, 562 aa, Arabidopsis thaliana
  peptide (1)..(562): Ceres Seq. ID no. 12641109
MTLEDTNTSDHGFNGGHVDVVENFSTGDPMLCDTSAATNDGVYNYSLNSIPDAENDLSFFDNGDKEKNDLFYGWGDIGNFEDVDNMLRSCDSTFGLDSLNNEGDLGWFSSAQPNEETAGAMTDDLKPDKMLENQRTAMLQVEDFLNNSEPNHAVEDEYGYTIEDDSAQGKSSQNVFDTSLQKKDILMLDVENCLRLPRHMQPLTTWDVTFYDDLFSCTFSSVKSSNYDMTLFTMVANLEKKQTDHLHHLDGKSDGFSENSFTLQHSGISREIMDTNQYYPPSAFQQRDVPYSHFNCEQPSVQVSACESKSGIKSENKPSPSSASNESYTSNHAQSIESLQGPTVDDRFRKVFETRANLLPGQDMPPSFAANTKKSSKTDSMVFPDAAPIQKIGLENDHRKAATELETSNMQGSSCVSSVVDDISLEATSFRQLQQVIEQLDVRTKLCIRDSLYRLAKSAEQRHHGGNRPEKGAGSHLVTGEADKYAGFMDIETDTNPIDRSIAHLLFHRPSDSSLSSDNNVLSYKSHPMIPQPNSSPSLRIEKQEETTELRPEAEVVTSDNN

SEQ ID NO: 78404 - DNA, 2343 bp, Arabidopsis thaliana
  misc_feature (1)..(2343): Ceres Seq. ID no. 12641118
  misc_feature (1)..(2343): Ortholog of  Ceres SEQ ID NO 13657677 as cited in SEQ ID NO 66119
atggagatcgagatagaagaagtggtccataagaatgtcagctatacaggatatactcatccgacggctgaaggaaaacgttataataaatctaacggccaggatcaactcaaggaaccagagagattctgtctgattaatgtggggtttatggttatgctagcgagatcaaagctagctctagatgtgagcagaagatcacagtctttgcaaagaatctgctactacgcaagtctctcctctagattttccggcggcggcggagatgatggcggcggcagctcaccggaaatcggtggtaccgattcagcaaacgaatgggagaagctccttaaaccattcgatctggattctctaaggaattcatttcacaagataactccctttcagctctataagctacttgagttacctctcaatgtatccacttcaatggagttgttctcatggaccggttctcaaaacggttatcgtcactccttcgatgtgtatcaagttcttataggtaagcttggtgcgaatggtgagtttaaaaccattgatagattgttaattcagatgaaagatgaaggaatcgtttttaaagaatctcttttcatttcgattatgagagattacgacaaagctggttttcctggacagacaacgagattgatgttggagatgaggaatgtctattcctgtgaacccacttttaaatcttacaatgttgtcttggagattttggtttctggtaattgtcataaagttgcagctaatgtgttctacgatatgcttagccgaaagattcctccaacgcttttcacatttggtgttgtgatgaaagctttttgtgctgttaatgagatagattcggctctgtctctgcttagggacatgacgaaacatggatgtgtcccaaactctgttatttaccagactcttatacattcgttatcgaagtgtaatagagtgaacgaagcgcttcagcttttagaggagatgtttctgatgggatgtgttcctgatgctgagactttcaacgatgttatccttggtctctgtaagtttgatcggattaacgaagctgctaaaatggtgaaccggatgctgattagagggtttgctcctgatgatataacttatggttatttgatgaatggtctatgtaagataggccgggttgatgctgcaaaagatcttttttacagaattccgaagccggaaattgtgatcttcaatactcttattcacgggtttgtgactcacggaagacttgatgatgctaaagctgttttatcagatatggtcacgtcttatggcattgttcctgatgtctgcacatataactcactgatctatggatattggaaggagggtcttgtaggtttagctctggaagttcttcatgacatgaggaataagggatgtaagcctaacgtctactcttatactattttagttgatggtttctgtaaattaggaaagatagatgaagcctacaatgttcttaatgaaatgtctgccgatggactgaaacccaacactgttggttttaactgtttgatatcggctttctgcaaggaacacagaatccccgaggccgtagagattttcagagagatgccgagaaaaggctgtaaacccgatgtgtatacatttaattcgctgatatctggactatgtgaggtcgacgaaataaagcatgccttgtggttacttagagatatgatatcagaaggtgttgttgctaatactgttacttacaacacgctgatcaacgcgtttcttagaagaggtgaaatcaaagaagctcgtaaactagtaaacgagatggttttccagggatccccgcttgatgagataacctacaacagtctgataaaagggctgtgcagggccggggaggtagataaggcgagaagcttgtttgaaaagatgttaagagacgggcatgcaccaagcaacatctcctgcaacatacttataaacgggctctgcagaagcgggatggtggaagaagcggttgagtttcagaaagagatggttctgagaggatcgacaccggacattgtgacatttaacagtctgataaacggtctgtgtagggccggtaggatcgaagatggtttgacgatgtttaggaagcttcaggctgaaggaataccgcctgatacggtgacgtttaacactttgatgagttggttgtgcaaaggaggttttgtttatgatgcttgcttacttctggatgaaggtattgaagatggttttgttccaaatcatagaacttggtcaattttgttacagagtattattccccaagaaacacttgatagacgaaggttttataatgcagctttttga

SEQ ID NO: 78405 - protein, 780 aa, Arabidopsis thaliana
  peptide (1)..(780): Ceres Seq. ID no. 12641119
MEIEIEEVVHKNVSYTGYTHPTAEGKRYNKSNGQDQLKEPERFCLINVGFMVMLARSKLALDVSRRSQSLQRICYYASLSSRFSGGGGDDGGGSSPEIGGTDSANEWEKLLKPFDLDSLRNSFHKITPFQLYKLLELPLNVSTSMELFSWTGSQNGYRHSFDVYQVLIGKLGANGEFKTIDRLLIQMKDEGIVFKESLFISIMRDYDKAGFPGQTTRLMLEMRNVYSCEPTFKSYNVVLEILVSGNCHKVAANVFYDMLSRKIPPTLFTFGVVMKAFCAVNEIDSALSLLRDMTKHGCVPNSVIYQTLIHSLSKCNRVNEALQLLEEMFLMGCVPDAETFNDVILGLCKFDRINEAAKMVNRMLIRGFAPDDITYGYLMNGLCKIGRVDAAKDLFYRIPKPEIVIFNTLIHGFVTHGRLDDAKAVLSDMVTSYGIVPDVCTYNSLIYGYWKEGLVGLALEVLHDMRNKGCKPNVYSYTILVDGFCKLGKIDEAYNVLNEMSADGLKPNTVGFNCLISAFCKEHRIPEAVEIFREMPRKGCKPDVYTFNSLISGLCEVDEIKHALWLLRDMISEGVVANTVTYNTLINAFLRRGEIKEARKLVNEMVFQGSPLDEITYNSLIKGLCRAGEVDKARSLFEKMLRDGHAPSNISCNILINGLCRSGMVEEAVEFQKEMVLRGSTPDIVTFNSLINGLCRAGRIEDGLTMFRKLQAEGIPPDTVTFNTLMSWLCKGGFVYDACLLLDEGIEDGFVPNHRTWSILLQSIIPQETLDRRRFYNAAF

SEQ ID NO: 78406 - protein, 730 aa, Arabidopsis thaliana; identical to SEQ ID NO: 74282
  peptide (1)..(730): Ceres Seq. ID no. 12641120

SEQ ID NO: 78407 - protein, 728 aa, Arabidopsis thaliana; identical to SEQ ID NO: 74283
  peptide (1)..(728): Ceres Seq. ID no. 12641121

SEQ ID NO: 78408 - DNA, 1448 bp, Arabidopsis thaliana
  misc_feature (1)..(1448): Ceres Seq. ID no. 12641128
  misc_feature (1)..(1448): Ortholog of  Ceres SEQ ID NO 14306797 as cited in SEQ ID NO 53354
  misc_feature (1)..(1448): Ortholog of  Ceres SEQ ID NO 15176525 as cited in SEQ ID NO 54495
  misc_feature (1)..(1448): Ortholog of  Ceres SEQ ID NO 15169519 as cited in SEQ ID NO 67237
ttttctactcctcgtcatcttctattcgttatccgttttgaagcgtactcggatgggattgagtttcgcagatgctttaaattctagaaaataatgcaatctcttaccttaactcggtacccaactccaatttccccgccaagactcaatctttacccgctaagacaaatcgcagcttctgttctctctgctccgaccgccggtattaaccgtcgcgatatggcgtctcgccatcagtcaacttcctttaagccccttgccgttggtcggaatttgaccggagatgatgatgatggttactgtactcttatagactttgcaggtagtggaggaggagaagggaaaaatgtaggagaggatcttgtggtgttgctttaccacttacaacatgcttgcaaaagaatcgcttctcttgtcgcctctcctttcaattcttcactcggaaagctctctgttaactcctctagtgggtcagaccgagatgcgcctaagccgctcgatattgtctcgaacgatatcgtcttgtcctctcttagaaactcagggaaagtagcagtaatggcttctgaagaaaacgatagtccaacttggatcaaagatgatggtccttacgttgtggttgtagatcctctagatggatcacggaacatcgatgcttcgattcccacgggaactatatttggaatttacaatcgtctcgttgagcttgatcatttacctgttgaagagaaagctgagctcaattctttgcagagaggcagcaggcttgtagcttccggttatgtgctatactcttcagccactatcttctgtgttacacttggatcgggaacacacgccttcacgctagaccattccacaggagaatttgttcttacccatcaaaacatcaagatcccaactcggggacaaatctactcagtgaacgatgcgaggtactttgattggccagaaggtttaaggaagtacattgacacagtgagacaaggcaaaggtcaaaacccgaaaaaatactctgcgcgttatatttgttctctagtagctgatcttcacaggactctcttatacggtggagtggctatgaatccaagagaccatcttcgtttagtctatgaaggtaaccctttggcttttctcgtggagcaagctggtggcaaatcctctgatggaaaaagagggatactttcgatacaacccgtgaagcttcaccaaagattgcctctgtttcttgggagcttagaggatgttgctgagctagagagctatggagatgtgcagcagactgtgaaccctggctatgaagtttaaacaactcctctgtttcatattatctgtaaaaacaataaatgaatcgatgttagatttggttgcttgtaacattatgtattaggaaagttagatccgtgtatatatctgtttatcaagattcaagatcgactggtataatc

SEQ ID NO: 78409 - protein, 404 aa, Arabidopsis thaliana; identical to SEQ ID NO: 26122
  peptide (1)..(404): Ceres Seq. ID no. 12641129

SEQ ID NO: 78410 - protein, 362 aa, Arabidopsis thaliana; identical to SEQ ID NO: 26123
  peptide (1)..(362): Ceres Seq. ID no. 12641130

SEQ ID NO: 78411 - protein, 249 aa, Arabidopsis thaliana; identical to SEQ ID NO: 26124
  peptide (1)..(249): Ceres Seq. ID no. 12641131

SEQ ID NO: 78412 - DNA, 2541 bp, Arabidopsis thaliana
  misc_feature (1)..(2541): Ceres Seq. ID no. 12641142
  misc_feature (1)..(2541): Ortholog of  Ceres SEQ ID NO 13657677 as cited in SEQ ID NO 66119
atgaagctcccttgcacgattcgatcaataacaagctctcattttcgcaatagctttagaaatgtgagctctgtgatcgattctgcacaagaagaatgtagaatcgctgaagataagcaattcgtcgatgctgtcaaaagaatcgtgcgagggaaacggagctgggagatcgcattgagcagtgagctagtctcgagaagattgaagactgttcatgttgaagagattctgattggaaccattgatgatcccaaattgggtttgaggtttttcaatttcctcggtttgcatcgaggattcgaccattccacggcgtcgttttgtattttgatccatgctctggtcaaagctaatctcttctggcctgcttcatcactgttgcagacgcttctgcttcgtgcgctgaagccaagtgacgtttttaatgtgctttttagttgttatgaaaaatgtaagcttagttcaagctcgagttttgatttgttgattcagcattatgtacgaagtaggagagttctagatggagttttggtgtttaagatgatgataacgaaagttagtttactgcctgaagtgagaactttgagtgctcttttacatgggttggttaagtttaggcattttgatgggctttgtaagaagcagaaggtttgggaggctgttgggataaagaaggatttagctggaaaagatctgaaaccagatgttgtgacatattgtacattagtctacgggttatgtaaagtgcaagaatttgagatcggattggagatgatggatgagatgttatgtttgaggttcagtcctagtgaagctgcggtttcaagtttggtagaggggttaaggaagaggggaaagattgaagaggcgcttaacttggttaaaagagtagtagattttggtgtctcacctaatttatttgtgtataacgcattgattgactcattgtgcaaaggtagaaagttccacgaagctgagttgctttttgataggatggggaaaattgggttgcgtcctaatgatgtgacctattcaattttgattgatatgttttgcagaagagggaaactggatacggcacttagtttcctgggggaaatggttgatacgggtttgaaactaagtgtgtatccatacaattctttgattaacgggcactgcaagttcggtgacattagtgcagcagagggtttcatggcagagatgattaataaaaagttggagccaacagtggtaacatacacatcattaatgggtggatattgcagcaaagggaaaataaacaaggcccttaggctctatcatgagatgacagggaagggtattgcgccgagtatctatacattcaccacgcttttatcgggtctattccgtgctgggttgattcgtgatgcagtaaagctgtttaacgagatggcagaatggaatgttaagccaaacagagtgacttataatgtcatgattgaaggttattgcgaggaaggagacatgtctaaagcctttgagttcctgaaagaaatgaccgagaaaggtattgtgcctgatacatacagttatagaccgttgatacacgggctatgtctcacaggtcaagcttcggaagccaaagtgttcgtggatggccttcacaagggaaattgtgagctgaatgagatatgttataccggactcttacacggattttgcagagaaggaaaattagaagaggcgttaagcgtttgtcaggagatggtacaaagaggggtggatttggaccttgtgtgctatggtgttcttatagatggaagtttaaagcacaaagatcgaaagttgttttttggacttttaaaggagatgcatgatagaggactaaagcctgatgatgtgatttatacaagtatgattgatgcaaagagcaaaaccggagatttcaaggaagcatttggaatatgggatttgatgataaacgaagggtgtgtacctaatgaagtcacgtacactgctgttatcaacggattatgcaaagccgggtttgttaatgaagccgaggttctttgttcaaaaatgcagcctgtcagttcggttcctaaccaagtaacgtatggttgttttctcgacattctcaccaaaggagaagtagacatgcagaaagctgtggagctccataatgcaatcttgaaagggcttttagcaaacaccgctacatataatatgttgatccgcggtttttgtagacaagggagaatagaagaagcttctgagctcatcacaaggatgataggcgatggagtttcccctgattgtataacctacacaacaatgatcaatgagctttgtaggagaaacgatgtgaagaaagcgattgagttatggaactcgatgacggaaaagggtataaggccagatagagtagcgtataacaccctaatacacggttgttgtgtggcgggagaaatggggaaggcgaccgagttgaggaatgagatgttgagacaaggcttgatacctaacaacaaaaccagtagaacaactacttcgaatgacactagttctaaatcctaa

SEQ ID NO: 78413 - protein, 846 aa, Arabidopsis thaliana
  peptide (1)..(846): Ceres Seq. ID no. 12641143
MKLPCTIRSITSSHFRNSFRNVSSVIDSAQEECRIAEDKQFVDAVKRIVRGKRSWEIALSSELVSRRLKTVHVEEILIGTIDDPKLGLRFFNFLGLHRGFDHSTASFCILIHALVKANLFWPASSLLQTLLLRALKPSDVFNVLFSCYEKCKLSSSSSFDLLIQHYVRSRRVLDGVLVFKMMITKVSLLPEVRTLSALLHGLVKFRHFDGLCKKQKVWEAVGIKKDLAGKDLKPDVVTYCTLVYGLCKVQEFEIGLEMMDEMLCLRFSPSEAAVSSLVEGLRKRGKIEEALNLVKRVVDFGVSPNLFVYNALIDSLCKGRKFHEAELLFDRMGKIGLRPNDVTYSILIDMFCRRGKLDTALSFLGEMVDTGLKLSVYPYNSLINGHCKFGDISAAEGFMAEMINKKLEPTVVTYTSLMGGYCSKGKINKALRLYHEMTGKGIAPSIYTFTTLLSGLFRAGLIRDAVKLFNEMAEWNVKPNRVTYNVMIEGYCEEGDMSKAFEFLKEMTEKGIVPDTYSYRPLIHGLCLTGQASEAKVFVDGLHKGNCELNEICYTGLLHGFCREGKLEEALSVCQEMVQRGVDLDLVCYGVLIDGSLKHKDRKLFFGLLKEMHDRGLKPDDVIYTSMIDAKSKTGDFKEAFGIWDLMINEGCVPNEVTYTAVINGLCKAGFVNEAEVLCSKMQPVSSVPNQVTYGCFLDILTKGEVDMQKAVELHNAILKGLLANTATYNMLIRGFCRQGRIEEASELITRMIGDGVSPDCITYTTMINELCRRNDVKKAIELWNSMTEKGIRPDRVAYNTLIHGCCVAGEMGKATELRNEMLRQGLIPNNKTSRTTTSNDTSSKS

SEQ ID NO: 78414 - protein, 666 aa, Arabidopsis thaliana
  peptide (1)..(666): Ceres Seq. ID no. 12641144
MMITKVSLLPEVRTLSALLHGLVKFRHFDGLCKKQKVWEAVGIKKDLAGKDLKPDVVTYCTLVYGLCKVQEFEIGLEMMDEMLCLRFSPSEAAVSSLVEGLRKRGKIEEALNLVKRVVDFGVSPNLFVYNALIDSLCKGRKFHEAELLFDRMGKIGLRPNDVTYSILIDMFCRRGKLDTALSFLGEMVDTGLKLSVYPYNSLINGHCKFGDISAAEGFMAEMINKKLEPTVVTYTSLMGGYCSKGKINKALRLYHEMTGKGIAPSIYTFTTLLSGLFRAGLIRDAVKLFNEMAEWNVKPNRVTYNVMIEGYCEEGDMSKAFEFLKEMTEKGIVPDTYSYRPLIHGLCLTGQASEAKVFVDGLHKGNCELNEICYTGLLHGFCREGKLEEALSVCQEMVQRGVDLDLVCYGVLIDGSLKHKDRKLFFGLLKEMHDRGLKPDDVIYTSMIDAKSKTGDFKEAFGIWDLMINEGCVPNEVTYTAVINGLCKAGFVNEAEVLCSKMQPVSSVPNQVTYGCFLDILTKGEVDMQKAVELHNAILKGLLANTATYNMLIRGFCRQGRIEEASELITRMIGDGVSPDCITYTTMINELCRRNDVKKAIELWNSMTEKGIRPDRVAYNTLIHGCCVAGEMGKATELRNEMLRQGLIPNNKTSRTTTSNDTSSKS

SEQ ID NO: 78415 - protein, 665 aa, Arabidopsis thaliana
  peptide (1)..(665): Ceres Seq. ID no. 12641145
MITKVSLLPEVRTLSALLHGLVKFRHFDGLCKKQKVWEAVGIKKDLAGKDLKPDVVTYCTLVYGLCKVQEFEIGLEMMDEMLCLRFSPSEAAVSSLVEGLRKRGKIEEALNLVKRVVDFGVSPNLFVYNALIDSLCKGRKFHEAELLFDRMGKIGLRPNDVTYSILIDMFCRRGKLDTALSFLGEMVDTGLKLSVYPYNSLINGHCKFGDISAAEGFMAEMINKKLEPTVVTYTSLMGGYCSKGKINKALRLYHEMTGKGIAPSIYTFTTLLSGLFRAGLIRDAVKLFNEMAEWNVKPNRVTYNVMIEGYCEEGDMSKAFEFLKEMTEKGIVPDTYSYRPLIHGLCLTGQASEAKVFVDGLHKGNCELNEICYTGLLHGFCREGKLEEALSVCQEMVQRGVDLDLVCYGVLIDGSLKHKDRKLFFGLLKEMHDRGLKPDDVIYTSMIDAKSKTGDFKEAFGIWDLMINEGCVPNEVTYTAVINGLCKAGFVNEAEVLCSKMQPVSSVPNQVTYGCFLDILTKGEVDMQKAVELHNAILKGLLANTATYNMLIRGFCRQGRIEEASELITRMIGDGVSPDCITYTTMINELCRRNDVKKAIELWNSMTEKGIRPDRVAYNTLIHGCCVAGEMGKATELRNEMLRQGLIPNNKTSRTTTSNDTSSKS

SEQ ID NO: 78416 - DNA, 1614 bp, Arabidopsis thaliana
  misc_feature (1)..(1614): Ceres Seq. ID no. 12641168
  misc_feature (1)..(1614): Ortholog of  Ceres SEQ ID NO 15178728 as cited in SEQ ID NO 67280
atggctgcaaaaccaaccgttgttaaaaagacaatggcgaagcaattcaccgggaaacgcgaagattcgcagctcctttcggctgtgagacgcggagatttctctgcggtgaaagagattttgagtaatcatatggaatcagaagatgaactaagagatttgttgcggaaacagaaccaatgcggtgagaccgctctttatgtggcggcagaatatggtgatgcggacgtggttgcagagctcatcaagtactatgatcttgaagacgctgagaccaaagctagaaatgggttcgatcctttccacattgctgctaaacaaggcgaattagatgttttgagagtactaatggaagaacatccggagctatcaatgacggtggacttatcaaacacgacggctctacacacggcggcagctcagggacacgtagaggtcgtagagtatctactagaagcagcagggagtagcctagccgcgatcgcaaaaagcaacgggaaaacagcattgcactcggcggctaggaatggtcacgcggaagtggtaaaagcgattgtggcggtggaaccggacacggcaacgaggactgataaaaagggtcagacgccacttcacatggcggtgaaaggacaaagcattgatgtggtggttgagttaatgaagggacatcggtcttcgttgaatatggctgattctaaagggaacactgcgttacatgttgctactaggaaaggtcgcattaagatagtggaattacttctagataacaacgagacaagcccaagcacaaaagcgataaacagagcaggagaaacgccgcttgacacggctgagaaaaccggccatcctcagatcgccgcggttctcaaaacccgcggcgttccctcggctaaagctatcaacaacactactaggccaaacgcggcgcgtgagctcaaacaaacggtgagcgacatcaaacatgaagttcatcaccagctagaacacgctcgagagacaagaaaacgcgttcaaggaatcgccaaacgcattaacaaaatgcacgtagaaggtcttgacaatgcgattaactcaaccacagtcgtggcggttctaattgcaaccgtcgctttcgccgccattttcactgtcccggggcaatatgcagacgaattgagttcgctcttaccgggacaatctctcggagaagcgaacatcgcggatagacccgcgtttgcgatcttcttcatattcgattcaatcgctctttttatatctttagcggttgtggtggttcagacttcagtggttgcgattgaacacaaggcaaagaagaatatgatggctgtgataaacaagttgatgtggttagcttgcgttttgatatctgtggcatttttggcgttagcgtttgtggtggttggtgaagaagagcggtggctagcggttggcgtgacggtgtttggtgcaacgataatgctcacgacgcttgggaccatgtgttattgggtcattatgcatcgaatcgaggcttcgaatgttagaaagtcgagaaaagagtcgatggcaagatcgagacaatcaggtttattggaattttctgggattttaactaagagaatgtatgctatttag

SEQ ID NO: 78417 - protein, 537 aa, Arabidopsis thaliana
  peptide (1)..(537): Ceres Seq. ID no. 12641169
MAAKPTVVKKTMAKQFTGKREDSQLLSAVRRGDFSAVKEILSNHMESEDELRDLLRKQNQCGETALYVAAEYGDADVVAELIKYYDLEDAETKARNGFDPFHIAAKQGELDVLRVLMEEHPELSMTVDLSNTTALHTAAAQGHVEVVEYLLEAAGSSLAAIAKSNGKTALHSAARNGHAEVVKAIVAVEPDTATRTDKKGQTPLHMAVKGQSIDVVVELMKGHRSSLNMADSKGNTALHVATRKGRIKIVELLLDNNETSPSTKAINRAGETPLDTAEKTGHPQIAAVLKTRGVPSAKAINNTTRPNAARELKQTVSDIKHEVHHQLEHARETRKRVQGIAKRINKMHVEGLDNAINSTTVVAVLIATVAFAAIFTVPGQYADELSSLLPGQSLGEANIADRPAFAIFFIFDSIALFISLAVVVVQTSVVAIEHKAKKNMMAVINKLMWLACVLISVAFLALAFVVVGEEERWLAVGVTVFGATIMLTTLGTMCYWVIMHRIEASNVRKSRKESMARSRQSGLLEFSGILTKRMYAI

SEQ ID NO: 78418 - protein, 526 aa, Arabidopsis thaliana
  peptide (1)..(526): Ceres Seq. ID no. 12641170
MAKQFTGKREDSQLLSAVRRGDFSAVKEILSNHMESEDELRDLLRKQNQCGETALYVAAEYGDADVVAELIKYYDLEDAETKARNGFDPFHIAAKQGELDVLRVLMEEHPELSMTVDLSNTTALHTAAAQGHVEVVEYLLEAAGSSLAAIAKSNGKTALHSAARNGHAEVVKAIVAVEPDTATRTDKKGQTPLHMAVKGQSIDVVVELMKGHRSSLNMADSKGNTALHVATRKGRIKIVELLLDNNETSPSTKAINRAGETPLDTAEKTGHPQIAAVLKTRGVPSAKAINNTTRPNAARELKQTVSDIKHEVHHQLEHARETRKRVQGIAKRINKMHVEGLDNAINSTTVVAVLIATVAFAAIFTVPGQYADELSSLLPGQSLGEANIADRPAFAIFFIFDSIALFISLAVVVVQTSVVAIEHKAKKNMMAVINKLMWLACVLISVAFLALAFVVVGEEERWLAVGVTVFGATIMLTTLGTMCYWVIMHRIEASNVRKSRKESMARSRQSGLLEFSGILTKRMYAI

SEQ ID NO: 78419 - protein, 493 aa, Arabidopsis thaliana
  peptide (1)..(493): Ceres Seq. ID no. 12641171
MESEDELRDLLRKQNQCGETALYVAAEYGDADVVAELIKYYDLEDAETKARNGFDPFHIAAKQGELDVLRVLMEEHPELSMTVDLSNTTALHTAAAQGHVEVVEYLLEAAGSSLAAIAKSNGKTALHSAARNGHAEVVKAIVAVEPDTATRTDKKGQTPLHMAVKGQSIDVVVELMKGHRSSLNMADSKGNTALHVATRKGRIKIVELLLDNNETSPSTKAINRAGETPLDTAEKTGHPQIAAVLKTRGVPSAKAINNTTRPNAARELKQTVSDIKHEVHHQLEHARETRKRVQGIAKRINKMHVEGLDNAINSTTVVAVLIATVAFAAIFTVPGQYADELSSLLPGQSLGEANIADRPAFAIFFIFDSIALFISLAVVVVQTSVVAIEHKAKKNMMAVINKLMWLACVLISVAFLALAFVVVGEEERWLAVGVTVFGATIMLTTLGTMCYWVIMHRIEASNVRKSRKESMARSRQSGLLEFSGILTKRMYAI

SEQ ID NO: 78420 - DNA, 849 bp, Arabidopsis thaliana
  misc_feature (1)..(849): Ceres Seq. ID no. 12641172
  misc_feature (1)..(849): Ortholog of  Ceres SEQ ID NO 15180208 as cited in SEQ ID NO 0
atggatgaatcggtgacgtcgaactcttctgttgttaatgctgaagcttctagctgtatagatggtgaagatgagttgtgctctacacgaacggtcaagtttcaatttgagatactgaaaggaggaggagaagaagaagaagaagatgatgatgaaagaagtgctgtgatgatgactaaggagttttttcctgttgctaaaggcatgaactttatggattcgagcgctcaaagttcaaggagcaccgttgatatttccttccagagggggaaacaaggtggagactttataggtagcgggagcggtggtggcgatgcttcacgggtgatgcagccaccatcacagccggtgaagaaaagcaggagaggtcctaggtctaagagttctcagtatagaggcgtcactttctatcggaggacaggcagatgggaatcgcatatctgggattgcggtaaacaagtttatttagggcgtatgatcgagctgctgtcaaattccggggtctggaagctgacatcaatttcgttattggcgattatgaagaggatctcaagcagatggcgaatctttccaaagaggaagttgtgcaagtacttcggcgacagagctctggtttctcaaggaataattctagatatcaaggagttgctttgcaaaagattggcgggtggggagctcaaatggagcagcttcatggaaacatattcttatggaattaggggttgtgacaaggcagccgtacaatggaagggaagggaagctgcttccttaattgagcctcatgcatcccgaatgattcccgagctaatgttaagctcgacctcaacttgggaatctctctttcactag

SEQ ID NO: 78421 - protein, 282 aa, Arabidopsis thaliana
  peptide (1)..(282): Ceres Seq. ID no. 12641173
MDESVTSNSSVVNAEASSCIDGEDELCSTRTVKFQFEILKGGGEEEEEDDDERSAVMMTKEFFPVAKGMNFMDSSAQSSRSTVDISFQRGKQGGDFIGSGSGGGDASRVMQPPSQPVKKSRRGPRSKSSQYRGVTFYRRTGRWESHIWDCGKQVYLGRMIELLSNSGVWKLTSISLLAIMKRISSRWRIFPKRKLCKYFGDRALVSQGIILDIKELLCKRLAGGELKWSSFMETYSYGIRGCDKAAVQWKGREAASLIEPHASRMIPELMLSSTSTWESLFH

SEQ ID NO: 78422 - protein, 226 aa, Arabidopsis thaliana
  peptide (1)..(226): Ceres Seq. ID no. 12641174
MMTKEFFPVAKGMNFMDSSAQSSRSTVDISFQRGKQGGDFIGSGSGGGDASRVMQPPSQPVKKSRRGPRSKSSQYRGVTFYRRTGRWESHIWDCGKQVYLGRMIELLSNSGVWKLTSISLLAIMKRISSRWRIFPKRKLCKYFGDRALVSQGIILDIKELLCKRLAGGELKWSSFMETYSYGIRGCDKAAVQWKGREAASLIEPHASRMIPELMLSSTSTWESLFH

SEQ ID NO: 78423 - protein, 225 aa, Arabidopsis thaliana
  peptide (1)..(225): Ceres Seq. ID no. 12641175
MTKEFFPVAKGMNFMDSSAQSSRSTVDISFQRGKQGGDFIGSGSGGGDASRVMQPPSQPVKKSRRGPRSKSSQYRGVTFYRRTGRWESHIWDCGKQVYLGRMIELLSNSGVWKLTSISLLAIMKRISSRWRIFPKRKLCKYFGDRALVSQGIILDIKELLCKRLAGGELKWSSFMETYSYGIRGCDKAAVQWKGREAASLIEPHASRMIPELMLSSTSTWESLFH

SEQ ID NO: 78424 - DNA, 1080 bp, Arabidopsis thaliana
  misc_feature (1)..(1080): Ceres Seq. ID no. 12641191
  misc_feature (1)..(1080): Ortholog of  Ceres SEQ ID NO 15177991 as cited in SEQ ID NO 53915
  misc_feature (1)..(1080): Ortholog of  Ceres SEQ ID NO 15174347 as cited in SEQ ID NO 58577
  misc_feature (1)..(1080): Ortholog of  Ceres SEQ ID NO 13596609 as cited in SEQ ID NO 63070
  misc_feature (1)..(1080): Ortholog of  Ceres SEQ ID NO 12616895 as cited in SEQ ID NO 63909
  misc_feature (1)..(1080): Ortholog of  Ceres SEQ ID NO 14302096 as cited in SEQ ID NO 68356
  misc_feature (1)..(1080): Ortholog of  Ceres SEQ ID NO 13598574 as cited in SEQ ID NO 69083
atgtcattcacctttatcaccgctattttcatcaagaacaaaacaaacagaatcacacaagaaacagagcaacaacacatattcaacaaaaacaaaatcgccatgagatcgagaagtaaccttataggtctcataaacttcttcactttcctcctgtcgattcctatcctcggcggtggaatatggcttagcagccgagctaactcaaccgattgcctcagattcctccagtggccactcattatcatcggaatatcaatcatggtcatatctttagccggaatcgccggagcttgttaccaaaacaagttcctcatgtggctttaccttttcaccatgttctttgtaatcgctgctcttataggattcacaatcttcgcttacgtagttactgataaaggctcaggccggtttgtgatgaaccgtcggtatcttgattattatctcaatgattattccggttggttaaaggaccgtgtcacagataatggatattggagagatatcggatcgtgtgttagagattctggagtttgtaagaagattggaagagatttaaatggtgttccagaaactgctcatatgttttacttcagaaatctttctcctgttgagtccggatgttgcaagccgccaacagattgtggctatacgtacgtgaacgagacagtgtggattccgggaggagaaatggtgggaccgaacccggactgtatgttgtggaacaatgaccagagactactctgttaccaatgcagctcttgtaaagccggtgttcttggtagcttgaaaaagagttggagaaaagtctcggtgatcaacatcgtggttgtgatcatacttgttatcttctatgtcatcgcgtgtgcggcttaccagaatgttaagaggatgtataatgacgaaccggtcggtgaggctaggatgaccaatctcatcctagtcattttcaaatttaaggagattttgtttttcttcggaattgtgtttttattactctttaatggtttaatggtctgttgttgtaatgataaatttgcttttagtgttttcttctttggatatgttacatatgcatga

SEQ ID NO: 78425 - protein, 359 aa, Arabidopsis thaliana
  peptide (1)..(359): Ceres Seq. ID no. 12641192
MSFTFITAIFIKNKTNRITQETEQQHIFNKNKIAMRSRSNLIGLINFFTFLLSIPILGGGIWLSSRANSTDCLRFLQWPLIIIGISIMVISLAGIAGACYQNKFLMWLYLFTMFFVIAALIGFTIFAYVVTDKGSGRFVMNRRYLDYYLNDYSGWLKDRVTDNGYWRDIGSCVRDSGVCKKIGRDLNGVPETAHMFYFRNLSPVESGCCKPPTDCGYTYVNETVWIPGGEMVGPNPDCMLWNNDQRLLCYQCSSCKAGVLGSLKKSWRKVSVINIVVVIILVIFYVIACAAYQNVKRMYNDEPVGEARMTNLILVIFKFKEILFFFGIVFLLLFNGLMVCCCNDKFAFSVFFFGYVTYA

SEQ ID NO: 78426 - protein, 325 aa, Arabidopsis thaliana
  peptide (1)..(325): Ceres Seq. ID no. 12641193
MRSRSNLIGLINFFTFLLSIPILGGGIWLSSRANSTDCLRFLQWPLIIIGISIMVISLAGIAGACYQNKFLMWLYLFTMFFVIAALIGFTIFAYVVTDKGSGRFVMNRRYLDYYLNDYSGWLKDRVTDNGYWRDIGSCVRDSGVCKKIGRDLNGVPETAHMFYFRNLSPVESGCCKPPTDCGYTYVNETVWIPGGEMVGPNPDCMLWNNDQRLLCYQCSSCKAGVLGSLKKSWRKVSVINIVVVIILVIFYVIACAAYQNVKRMYNDEPVGEARMTNLILVIFKFKEILFFFGIVFLLLFNGLMVCCCNDKFAFSVFFFGYVTYA

SEQ ID NO: 78427 - protein, 272 aa, Arabidopsis thaliana
  peptide (1)..(272): Ceres Seq. ID no. 12641194
MVISLAGIAGACYQNKFLMWLYLFTMFFVIAALIGFTIFAYVVTDKGSGRFVMNRRYLDYYLNDYSGWLKDRVTDNGYWRDIGSCVRDSGVCKKIGRDLNGVPETAHMFYFRNLSPVESGCCKPPTDCGYTYVNETVWIPGGEMVGPNPDCMLWNNDQRLLCYQCSSCKAGVLGSLKKSWRKVSVINIVVVIILVIFYVIACAAYQNVKRMYNDEPVGEARMTNLILVIFKFKEILFFFGIVFLLLFNGLMVCCCNDKFAFSVFFFGYVTYA

SEQ ID NO: 78428 - DNA, 1053 bp, Arabidopsis thaliana
  misc_feature (1)..(1053): Ceres Seq. ID no. 12641301
  misc_feature (1)..(1053): Ortholog of  Ceres SEQ ID NO 13655375 as cited in SEQ ID NO 63347
  misc_feature (1)..(1053): Ortholog of  Ceres SEQ ID NO 12626166 as cited in SEQ ID NO 64505
  misc_feature (1)..(1053): Ortholog of  Ceres SEQ ID NO 14301978 as cited in SEQ ID NO 0
atggcggcggagaatgagagaaaatctccttcagcagtctccgatatgggagcttgggcaatgaatgtgataagctccgttggaatcatcatggcgaataaacaacttatgtcctcttctggattcgcatttagtttcgctacaactctcaccggtttccacttcgctttaaccgcattggtcggtatggtatcaaacgctaccggattctctgcttcgaagcatgtacctatgtgggagcttatttggttctccattgtcgctaatgtctctattgctgctatgaacttcagtctcatgctcaattccgttggcttctaccaaatctcgaagctgagcatgattcctgtggtatgtgtaatggaatggattctacatagcaagagatactcaagagaagtgaaaatatctgttgtggttgttgttgttggtgttggtatttgtactgtgactgatgttaaagttaatgccaaaggttttatctgtgcttgtgttgcgattttctcgtcatccttgcagcaaattttaataggttctctacagaagaaatattcaattgggtcctttgagttgttgagtaaaacagcgccgattcaagctttttcgcttcttgttgtcggtcctttagttgattatcttcttagtgggaagttcattatgaagtataatatgtcttccggttgctttctattcattcttctctcatgtggtctagctgtgttctgcaacataagccagtacctttgcatcgggcggttttcagcagtatcgttccaagttattggtcacatgaaaaccgtctgtatcctcacgcttggatggctcctatttgattctgcaatgactttcaaaaacgtagcggggatgattgttgcgattgttgggatggtaatctatagttgggcaatggaattggagaaacagtcgattattgcagcaaaggctttaaacagtgtgaaacatagcttaacagaggaagagtttgaacttttgaaggaaggtgtagaaactacacaatcaaaagatgttgaacttggccgcacaaaagattag

SEQ ID NO: 78429 - protein, 350 aa, Arabidopsis thaliana; identical to SEQ ID NO: 22526
  peptide (1)..(350): Ceres Seq. ID no. 12641302

SEQ ID NO: 78430 - protein, 335 aa, Arabidopsis thaliana; identical to SEQ ID NO: 22527
  peptide (1)..(335): Ceres Seq. ID no. 12641303

SEQ ID NO: 78431 - protein, 330 aa, Arabidopsis thaliana; identical to SEQ ID NO: 22528
  peptide (1)..(330): Ceres Seq. ID no. 12641304

SEQ ID NO: 78432 - DNA, 549 bp, Arabidopsis thaliana
  misc_feature (1)..(549): Ceres Seq. ID no. 12641305
  misc_feature (1)..(549): Ortholog of  Ceres SEQ ID NO 13598935 as cited in SEQ ID NO 1239
  misc_feature (1)..(549): Ortholog of  Ceres SEQ ID NO 13598171 as cited in SEQ ID NO 61357
atggctaaacgttttctgcttcttcttcctcttttgtcatctattcttcttcttgccgtgtccgtcacagcttactccacaacaacgccgtatcaaggctacaagccggagaaattcacccacctccacttctacttccatgacgtcatctccggtgacaaacctaccgccgtcaaagttgccgaagcccgcccaacaaccaccctcaacgtcaagtttggcgtgattatgatcgctgatgatccgttgaccgaaggaccagacccgagctcaaaggaagtgggaagagctcaggggatgtacgcatcaacagccatgaaggacatagtcttcacaatggtctttaactatgttttcacggcaggagagtttaatggaagcaccatcgcggtgtatggacggaatgatatattttcgaaggtgagagagttgccgattattggaggaactggtgctttcaggtttgctagaggctatgcactgcccaagacttataagattgttggtctagatgccgtggtcgagtataatgtcttcatttggcattaa

SEQ ID NO: 78433 - protein, 182 aa, Arabidopsis thaliana; identical to SEQ ID NO: 72834
  peptide (1)..(182): Ceres Seq. ID no. 12641306

SEQ ID NO: 78434 - protein, 106 aa, Arabidopsis thaliana; identical to SEQ ID NO: 72835
  peptide (1)..(106): Ceres Seq. ID no. 12641307

SEQ ID NO: 78435 - DNA, 1620 bp, Arabidopsis thaliana
  misc_feature (1)..(1620): Ceres Seq. ID no. 12641354
  misc_feature (1)..(1620): Ortholog of  Ceres SEQ ID NO 12607856 as cited in SEQ ID NO 55419
atgatgatgagtagcagcagtagcagtagtaatggtagtagtagttatacaagatgcgttaaaactccatcatctacaaatactaacattgggaagaaactgaaaggttgtgaaaatggtgttgtaaatcgaaaggcgttaaatcgagagaagataattactctgcaagaagatgttgaaaagttgagaaagaagctgagacttgaagaaaacattcaccgagcaatggaaagagcatttagtaggcctcttggagcacttccccgtcttcctccgtttctacctccatcggttttggagttacttgcggaagtggctgttttggaagaggaattggttcggttagaagaacatattgtgcattgtagacaagaattgtatcaagaagcagtttttacatcttcatcgatagagaatttaaaatgctctcctgcatttcctaagcattggcagaccaaatccaagtcagcttccactagtgctagagaatcagaatcacctctttcacgggcaccttgttctgtttcagtgtgtaggaagggtaaagaaaacaagttgagtgctacttctatcaaaacaccgatgaagaaaacgactattgctcatacacaactgaataagagtttagaagctcaaaaactaaaggatagtcatagatgtcgcaaaacaaatgcagagcggagctctcatggtggcggtgatgaaccaaataaaatttccgaggatttggttaaatgtctgtctaacattttcatgagaatgagctcaataaagagatccatggttacaaaatctcaagaaaacgataaagatacggcattcagggatccttatggaatttgctctagttttagaagaagggatattggtcgatataagaatttcagtgatgttgaagaagcctcacttaaccaaaacagaacgtcaagttcctctttgtttctcatccgccaactgaaacgattgcttggaagactttctttagtcaacatgcagaaacttaatcaacaagagaagttagctttctggataaacatttataacagctgcatgatgaatggtttccttgaacatggaataccggagagccctgatatggtgacattaatgcaaaaggcgactataaatgtaggaggccactttctcaatgcaatcacgatcgaacacttcatcctccgcttaccgcatcactcaaaatatatttctccaaagggttcaaagaaaaatgaaatggcagtgagaagtaaatttggattggaattgtcagagccacttgtaacatttgctctctcatgtggtagctggtcctcacccgcggtacgggtgtacactgcgagtaaagtagaggaggagttggaggtggcgaaaagagagtacctagaagcatcggtggggatatcggtggtgaaaatagggataccaaagctgatggattggtatagtcatgactttgcaaaggacattgaatcattgcttgattggattttccttcagttgcctactgagttgggtaaagatgctctcaactgtgttgaacaagggatgtctcagtccccttcttctactcttgtccatattatcccttatgacttcacttttagatatcttttttccatctga

SEQ ID NO: 78436 - protein, 539 aa, Arabidopsis thaliana
  peptide (1)..(539): Ceres Seq. ID no. 12641355
MMMSSSSSSSNGSSSYTRCVKTPSSTNTNIGKKLKGCENGVVNRKALNREKIITLQEDVEKLRKKLRLEENIHRAMERAFSRPLGALPRLPPFLPPSVLELLAEVAVLEEELVRLEEHIVHCRQELYQEAVFTSSSIENLKCSPAFPKHWQTKSKSASTSARESESPLSRAPCSVSVCRKGKENKLSATSIKTPMKKTTIAHTQLNKSLEAQKLKDSHRCRKTNAERSSHGGGDEPNKISEDLVKCLSNIFMRMSSIKRSMVTKSQENDKDTAFRDPYGICSSFRRRDIGRYKNFSDVEEASLNQNRTSSSSLFLIRQLKRLLGRLSLVNMQKLNQQEKLAFWINIYNSCMMNGFLEHGIPESPDMVTLMQKATINVGGHFLNAITIEHFILRLPHHSKYISPKGSKKNEMAVRSKFGLELSEPLVTFALSCGSWSSPAVRVYTASKVEEELEVAKREYLEASVGISVVKIGIPKLMDWYSHDFAKDIESLLDWIFLQLPTELGKDALNCVEQGMSQSPSSTLVHIIPYDFTFRYLFSI

SEQ ID NO: 78437 - protein, 538 aa, Arabidopsis thaliana
  peptide (1)..(538): Ceres Seq. ID no. 12641356
MMSSSSSSSNGSSSYTRCVKTPSSTNTNIGKKLKGCENGVVNRKALNREKIITLQEDVEKLRKKLRLEENIHRAMERAFSRPLGALPRLPPFLPPSVLELLAEVAVLEEELVRLEEHIVHCRQELYQEAVFTSSSIENLKCSPAFPKHWQTKSKSASTSARESESPLSRAPCSVSVCRKGKENKLSATSIKTPMKKTTIAHTQLNKSLEAQKLKDSHRCRKTNAERSSHGGGDEPNKISEDLVKCLSNIFMRMSSIKRSMVTKSQENDKDTAFRDPYGICSSFRRRDIGRYKNFSDVEEASLNQNRTSSSSLFLIRQLKRLLGRLSLVNMQKLNQQEKLAFWINIYNSCMMNGFLEHGIPESPDMVTLMQKATINVGGHFLNAITIEHFILRLPHHSKYISPKGSKKNEMAVRSKFGLELSEPLVTFALSCGSWSSPAVRVYTASKVEEELEVAKREYLEASVGISVVKIGIPKLMDWYSHDFAKDIESLLDWIFLQLPTELGKDALNCVEQGMSQSPSSTLVHIIPYDFTFRYLFSI

SEQ ID NO: 78438 - protein, 537 aa, Arabidopsis thaliana
  peptide (1)..(537): Ceres Seq. ID no. 12641357
MSSSSSSSNGSSSYTRCVKTPSSTNTNIGKKLKGCENGVVNRKALNREKIITLQEDVEKLRKKLRLEENIHRAMERAFSRPLGALPRLPPFLPPSVLELLAEVAVLEEELVRLEEHIVHCRQELYQEAVFTSSSIENLKCSPAFPKHWQTKSKSASTSARESESPLSRAPCSVSVCRKGKENKLSATSIKTPMKKTTIAHTQLNKSLEAQKLKDSHRCRKTNAERSSHGGGDEPNKISEDLVKCLSNIFMRMSSIKRSMVTKSQENDKDTAFRDPYGICSSFRRRDIGRYKNFSDVEEASLNQNRTSSSSLFLIRQLKRLLGRLSLVNMQKLNQQEKLAFWINIYNSCMMNGFLEHGIPESPDMVTLMQKATINVGGHFLNAITIEHFILRLPHHSKYISPKGSKKNEMAVRSKFGLELSEPLVTFALSCGSWSSPAVRVYTASKVEEELEVAKREYLEASVGISVVKIGIPKLMDWYSHDFAKDIESLLDWIFLQLPTELGKDALNCVEQGMSQSPSSTLVHIIPYDFTFRYLFSI

SEQ ID NO: 78439 - DNA, 684 bp, Arabidopsis thaliana
  misc_feature (1)..(684): Ceres Seq. ID no. 12641358
  misc_feature (1)..(684): Ortholog of  Ceres SEQ ID NO 14307431 as cited in SEQ ID NO 54422
  misc_feature (1)..(684): Ortholog of  Ceres SEQ ID NO 14301614 as cited in SEQ ID NO 61994
atggtggtcgaaaaacaaacaaagtacgaagaatttcgtttgaaaagagtggaagagaacaagaaacgaatggaagctctgaatcttccaaaactctctcaaattctcaattccacttccgtcaagatttctccgatgaagaagagatctattcctcgaacaccagagaagaagatggtgattgttcgtagatctagccgtatctctaattcttcttctgttccggttgatgttaaacgagtgcacatacagagaaggggagtgggcaagaagagagatttattgaatcgagtttatgtttctgaagaaatcagagatgaggccatttcaagagctaacaaatttcaggatgaattggggagtggttatccaagttttgtgaaatctatgcttcaatcacatgtttctggtggcttctggctgggtcttccagtgcaattttgcaaatctcacctcgggttacatgatggtgtcataactttgatagatgaagaaggcgaggagtatgagactatctacttagcgagaaagaatggacttagtggtggatggatgggatttgcggttgctcacaatctagcatatggggatactcttgttttcgagttagttcgtcgtaccgctttcaaggtttacattacaagagttggaagttgtggagaaagctccaaagatatgagctga

SEQ ID NO: 78440 - protein, 227 aa, Arabidopsis thaliana
  peptide (1)..(227): Ceres Seq. ID no. 12641359
MVVEKQTKYEEFRLKRVEENKKRMEALNLPKLSQILNSTSVKISPMKKRSIPRTPEKKMVIVRRSSRISNSSSVPVDVKRVHIQRRGVGKKRDLLNRVYVSEEIRDEAISRANKFQDELGSGYPSFVKSMLQSHVSGGFWLGLPVQFCKSHLGLHDGVITLIDEEGEEYETIYLARKNGLSGGWMGFAVAHNLAYGDTLVFELVRRTAFKVYITRVGSCGESSKDMS

SEQ ID NO: 78441 - protein, 204 aa, Arabidopsis thaliana
  peptide (1)..(204): Ceres Seq. ID no. 12641360
MEALNLPKLSQILNSTSVKISPMKKRSIPRTPEKKMVIVRRSSRISNSSSVPVDVKRVHIQRRGVGKKRDLLNRVYVSEEIRDEAISRANKFQDELGSGYPSFVKSMLQSHVSGGFWLGLPVQFCKSHLGLHDGVITLIDEEGEEYETIYLARKNGLSGGWMGFAVAHNLAYGDTLVFELVRRTAFKVYITRVGSCGESSKDMS

SEQ ID NO: 78442 - protein, 182 aa, Arabidopsis thaliana
  peptide (1)..(182): Ceres Seq. ID no. 12641361
MKKRSIPRTPEKKMVIVRRSSRISNSSSVPVDVKRVHIQRRGVGKKRDLLNRVYVSEEIRDEAISRANKFQDELGSGYPSFVKSMLQSHVSGGFWLGLPVQFCKSHLGLHDGVITLIDEEGEEYETIYLARKNGLSGGWMGFAVAHNLAYGDTLVFELVRRTAFKVYITRVGSCGESSKDMS

SEQ ID NO: 78443 - DNA, 2622 bp, Arabidopsis thaliana
  misc_feature (1)..(2622): Ceres Seq. ID no. 12641430
  misc_feature (1)..(2622): Ortholog of  Ceres SEQ ID NO 14310362 as cited in SEQ ID NO 54251
  misc_feature (1)..(2622): Ortholog of  Ceres SEQ ID NO 12583314 as cited in SEQ ID NO 56435
  misc_feature (1)..(2622): Ortholog of  Ceres SEQ ID NO 13654989 as cited in SEQ ID NO 63117
  misc_feature (1)..(2622): Ortholog of  Ceres SEQ ID NO 13584744 as cited in SEQ ID NO 69137
atgatccgtcacgctttgttaatattctctattctcgtttccacccccatagtaggagaaggagcaacgtcgacgtatgaacccaccgatgtctttctcttcaactgcggcgacacttcaaacaacgtcgacgttagtggccgaaactggacggcggaaaatcagaaaattctatcgtcaaatttagtcaacgcttcgttcactgcacaagcgtcataccaagaatcaggagtttctcagattccgtacatgacagctcgaatattccgatctgagttcacctacagttttccagtcactcccggttcaaattttctccggttatacttttacccgacccgatacggttcccaattcaacgccgtcaaatccttcttctccgtcaaagtcaacggcttcactctcttgaacaacttcagcgctgacttaacggtaaaagcatctaaaccgcaaacggagtttataatcaaagagtttattattccggtttaccaaacgttgaatctcactttcacgccgtctttagattccttagctttcgttaacggaatcgagattgtctccatacctaaccggttttactcaaagggaggatttgacgacgttataactaacgttggtagttccgttgactttcacatagaaaattcaacggcttttgagacagtttaccggttaaacgtagggggaaaaacggttggagattcgggaatgttccgacgatgggtctctgatgatgagatcatactcagtgaaagttcaggaatctctccgatcgtaccagatataaagattaactacacggagaaaactccgtcgtacgttgcgccggatgacgtgtacgccacgtctcgctcaatgggaaacgcggatcaccctgagcaaaacctaaattttaacctgacttggttattcaccgttgatgctgggtttagctaccttgtgaggcttcatttctgtgagactttgtcagaagtgaacaaagagggtcaacgcgtcttctctatctttattgaaaatcaaacggctacgcttgagatggacgtgtttcggatgagtggtggttcttggattccgatgtatctggattatactgtgattgcgggttcgggaagtggtcggagacatgatctaaggcttgatttgcatcctttggtgagcattaatccgaaatattatgatgctattctgaatggtgtggagattctcaagatgaatgatcccgatggtaatcttgcaggacctaatccagatcctctagtatcaccagacttaataccaaaccgtgcaacgccgcggattcgaaaaaataagtcacatattttgccgatcacacttgcagtggttggttctttagttgtgctagcaatgtttgttgttggtgttcttgttatcatgaagaagaagaagaagagcaagccatctacaaactcgtcatggtgtcctcttccgcacgggacagattctacgaatacaaaaccagcgaaatctctgcccgcggatctctgtcgtcgattctccattttcgaaatcaaatccgccacaaatgatttcgaggacaagctaatcatcggagtaggcgggtttggttctgtctacaaaggacaaatagacggtggagccacacttgttgcggttaaacggctggaaattacatcgaaccaaggtgctaaagagttcgaaacagagctcgagatgctctcaaagcttcgacatgtacatctcgtctctctaatcggctactgcgacgaggacaacgagatggtactagtctatgagtatatgccacatggtacacttaaagatcatcttttcaggagggacaaaacctctgatcctccattgtcatggaaacgaaggctagagatttgcattggagcagctcgtggattacagtatcttcatactggagccaagtacacgatcatacatagagacatcaaaaccacaaacatacttctcgatgagaacttcgtcactaaagtatctgactttggtttatcaagagttggtcctactagtgcttctcaaacgcatgtctccaccgtcgttaaaggaacgtttggttacttggaccccgagtactatcgccgtcaagtcttgaccgaaaaatctgacgtgtactcctttggagttgttctgttggaggttttgtgttgtagaccgattagaatgcaaagtgttccaccggaacaagcagatttgatccgatgggtgaagtcaaattacagaagaggaaccgttgatcagatcattgactcagatttatcggctgatatcacttcgacatcgttggaaaagttttgtgagatagccgttagatgcgttcaggaccgtggtatggaacggccaccgatgaacgacgttgtttgggcgcttgagtttgctcttcagcttcacgagactgctaagaagaagaatgacaacgtggagtctctggatctaatgccaagtggtgaggttggtacgaccacggacggagaagatgacttgtttagtaggactacaggacacgtggggaaatcgaccacgaccgatgactctgttctagttgttggtgatgagaggagtggttcgagttggggagtattttcggagatcaatgaacctaaagcacggtag

SEQ ID NO: 78444 - protein, 873 aa, Arabidopsis thaliana
  peptide (1)..(873): Ceres Seq. ID no. 12641431
MIRHALLIFSILVSTPIVGEGATSTYEPTDVFLFNCGDTSNNVDVSGRNWTAENQKILSSNLVNASFTAQASYQESGVSQIPYMTARIFRSEFTYSFPVTPGSNFLRLYFYPTRYGSQFNAVKSFFSVKVNGFTLLNNFSADLTVKASKPQTEFIIKEFIIPVYQTLNLTFTPSLDSLAFVNGIEIVSIPNRFYSKGGFDDVITNVGSSVDFHIENSTAFETVYRLNVGGKTVGDSGMFRRWVSDDEIILSESSGISPIVPDIKINYTEKTPSYVAPDDVYATSRSMGNADHPEQNLNFNLTWLFTVDAGFSYLVRLHFCETLSEVNKEGQRVFSIFIENQTATLEMDVFRMSGGSWIPMYLDYTVIAGSGSGRRHDLRLDLHPLVSINPKYYDAILNGVEILKMNDPDGNLAGPNPDPLVSPDLIPNRATPRIRKNKSHILPITLAVVGSLVVLAMFVVGVLVIMKKKKKSKPSTNSSWCPLPHGTDSTNTKPAKSLPADLCRRFSIFEIKSATNDFEDKLIIGVGGFGSVYKGQIDGGATLVAVKRLEITSNQGAKEFETELEMLSKLRHVHLVSLIGYCDEDNEMVLVYEYMPHGTLKDHLFRRDKTSDPPLSWKRRLEICIGAARGLQYLHTGAKYTIIHRDIKTTNILLDENFVTKVSDFGLSRVGPTSASQTHVSTVVKGTFGYLDPEYYRRQVLTEKSDVYSFGVVLLEVLCCRPIRMQSVPPEQADLIRWVKSNYRRGTVDQIIDSDLSADITSTSLEKFCEIAVRCVQDRGMERPPMNDVVWALEFALQLHETAKKKNDNVESLDLMPSGEVGTTTDGEDDLFSRTTGHVGKSTTTDDSVLVVGDERSGSSWGVFSEINEPKAR

SEQ ID NO: 78445 - protein, 790 aa, Arabidopsis thaliana
  peptide (1)..(790): Ceres Seq. ID no. 12641432
MTARIFRSEFTYSFPVTPGSNFLRLYFYPTRYGSQFNAVKSFFSVKVNGFTLLNNFSADLTVKASKPQTEFIIKEFIIPVYQTLNLTFTPSLDSLAFVNGIEIVSIPNRFYSKGGFDDVITNVGSSVDFHIENSTAFETVYRLNVGGKTVGDSGMFRRWVSDDEIILSESSGISPIVPDIKINYTEKTPSYVAPDDVYATSRSMGNADHPEQNLNFNLTWLFTVDAGFSYLVRLHFCETLSEVNKEGQRVFSIFIENQTATLEMDVFRMSGGSWIPMYLDYTVIAGSGSGRRHDLRLDLHPLVSINPKYYDAILNGVEILKMNDPDGNLAGPNPDPLVSPDLIPNRATPRIRKNKSHILPITLAVVGSLVVLAMFVVGVLVIMKKKKKSKPSTNSSWCPLPHGTDSTNTKPAKSLPADLCRRFSIFEIKSATNDFEDKLIIGVGGFGSVYKGQIDGGATLVAVKRLEITSNQGAKEFETELEMLSKLRHVHLVSLIGYCDEDNEMVLVYEYMPHGTLKDHLFRRDKTSDPPLSWKRRLEICIGAARGLQYLHTGAKYTIIHRDIKTTNILLDENFVTKVSDFGLSRVGPTSASQTHVSTVVKGTFGYLDPEYYRRQVLTEKSDVYSFGVVLLEVLCCRPIRMQSVPPEQADLIRWVKSNYRRGTVDQIIDSDLSADITSTSLEKFCEIAVRCVQDRGMERPPMNDVVWALEFALQLHETAKKKNDNVESLDLMPSGEVGTTTDGEDDLFSRTTGHVGKSTTTDDSVLVVGDERSGSSWGVFSEINEPKAR

SEQ ID NO: 78446 - protein, 636 aa, Arabidopsis thaliana
  peptide (1)..(636): Ceres Seq. ID no. 12641433
MFRRWVSDDEIILSESSGISPIVPDIKINYTEKTPSYVAPDDVYATSRSMGNADHPEQNLNFNLTWLFTVDAGFSYLVRLHFCETLSEVNKEGQRVFSIFIENQTATLEMDVFRMSGGSWIPMYLDYTVIAGSGSGRRHDLRLDLHPLVSINPKYYDAILNGVEILKMNDPDGNLAGPNPDPLVSPDLIPNRATPRIRKNKSHILPITLAVVGSLVVLAMFVVGVLVIMKKKKKSKPSTNSSWCPLPHGTDSTNTKPAKSLPADLCRRFSIFEIKSATNDFEDKLIIGVGGFGSVYKGQIDGGATLVAVKRLEITSNQGAKEFETELEMLSKLRHVHLVSLIGYCDEDNEMVLVYEYMPHGTLKDHLFRRDKTSDPPLSWKRRLEICIGAARGLQYLHTGAKYTIIHRDIKTTNILLDENFVTKVSDFGLSRVGPTSASQTHVSTVVKGTFGYLDPEYYRRQVLTEKSDVYSFGVVLLEVLCCRPIRMQSVPPEQADLIRWVKSNYRRGTVDQIIDSDLSADITSTSLEKFCEIAVRCVQDRGMERPPMNDVVWALEFALQLHETAKKKNDNVESLDLMPSGEVGTTTDGEDDLFSRTTGHVGKSTTTDDSVLVVGDERSGSSWGVFSEINEPKAR

SEQ ID NO: 78447 - DNA, 1368 bp, Arabidopsis thaliana
  misc_feature (1)..(1368): Ceres Seq. ID no. 12641434
  misc_feature (1)..(1368): Ortholog of  Ceres SEQ ID NO 14314054 as cited in SEQ ID NO 56939
  misc_feature (1)..(1368): Ortholog of  Ceres SEQ ID NO 14303592 as cited in SEQ ID NO 68603
atggtgaacgaagaaatggagtcatcacttaaagtcatcgacgtggcacgagtcacaccatcaaactccgactcgtccgagtcactcactctcccactcaccttcttcgacctcctctggtacaaacttcacgccgtcgaacgagtcatcttctacaaactcaccgacgcaagtcgtcctttctttgactcagtcatcgtcccaaacctcaaaacatctctctcctcatccctctctcactacctcccactcgccggaaaactcgtgtgggaaccacttgatcccaaaccgaaaatcgtctacaccccaaacgacgccgtttcattcaccgtcgccgagtcaaacgcagacttctcacgtttaaccggcaaagaaccgttccccaccaccgagttatacccgttagtccccgagttacatgtctccgacgactcagcttccgccgtgtcgtttcaagtcacgttatttccaaaccaagggttttgcatcagcgttaatgcacatcatgccgttttagatggaaaaacgacaaccaactttctcaaatcttgggcacgcacatgtaaaaaccaagattcttttctaccgcaggatctaatcccagtttacgatcgtacggtcataaaagatccaatggatttagatacaaagatcttaaacgcttggcacagagtagccaaagtgttcaccggtggtaaagaaccagaaaaccccaagagtttaaagcttttatggtcgccggagattggtcctgacgttttccgatacactctcaatctcactagagaagatatccaaaagcttcgagagagactcaagaaagagtcttcttcttcctctgtttcctcatcacccaaagagcttcgtttatcaacgtttgtgattgtttactcttatgctttaacgtgtttaatcaaagctcgaggcggtgatccgagtagaccagtcgggtacggattcgctgtggattgtcgaagccttatggttccaccggttccatcgagttattttgagacttttatgagtgaagaagggtttttagctgctgcgagaatggttagtgattctgttgaggcattggatgagaatgttgcattgaagattccagagattttggaagggtttacgactctttcaccaggaacacaggttttgtctgttgccgggtcgacccggttcggagtttacgggttggattttgggtggggtagaccggagaaagtggtggttgtgtcaattgaccaaggtgaagcgatttcttttgcggagagtagagatgggagtggtggtgtagagcttggcttctccctcaagaaacatgaaatggatgttcttgttgatttgcttcacaagggactagaaaattaa

SEQ ID NO: 78448 - protein, 455 aa, Arabidopsis thaliana
  peptide (1)..(455): Ceres Seq. ID no. 12641435
MVNEEMESSLKVIDVARVTPSNSDSSESLTLPLTFFDLLWYKLHAVERVIFYKLTDASRPFFDSVIVPNLKTSLSSSLSHYLPLAGKLVWEPLDPKPKIVYTPNDAVSFTVAESNADFSRLTGKEPFPTTELYPLVPELHVSDDSASAVSFQVTLFPNQGFCISVNAHHAVLDGKTTTNFLKSWARTCKNQDSFLPQDLIPVYDRTVIKDPMDLDTKILNAWHRVAKVFTGGKEPENPKSLKLLWSPEIGPDVFRYTLNLTREDIQKLRERLKKESSSSSVSSSPKELRLSTFVIVYSYALTCLIKARGGDPSRPVGYGFAVDCRSLMVPPVPSSYFETFMSEEGFLAAARMVSDSVEALDENVALKIPEILEGFTTLSPGTQVLSVAGSTRFGVYGLDFGWGRPEKVVVVSIDQGEAISFAESRDGSGGVELGFSLKKHEMDVLVDLLHKGLEN

SEQ ID NO: 78449 - protein, 450 aa, Arabidopsis thaliana
  peptide (1)..(450): Ceres Seq. ID no. 12641436
MESSLKVIDVARVTPSNSDSSESLTLPLTFFDLLWYKLHAVERVIFYKLTDASRPFFDSVIVPNLKTSLSSSLSHYLPLAGKLVWEPLDPKPKIVYTPNDAVSFTVAESNADFSRLTGKEPFPTTELYPLVPELHVSDDSASAVSFQVTLFPNQGFCISVNAHHAVLDGKTTTNFLKSWARTCKNQDSFLPQDLIPVYDRTVIKDPMDLDTKILNAWHRVAKVFTGGKEPENPKSLKLLWSPEIGPDVFRYTLNLTREDIQKLRERLKKESSSSSVSSSPKELRLSTFVIVYSYALTCLIKARGGDPSRPVGYGFAVDCRSLMVPPVPSSYFETFMSEEGFLAAARMVSDSVEALDENVALKIPEILEGFTTLSPGTQVLSVAGSTRFGVYGLDFGWGRPEKVVVVSIDQGEAISFAESRDGSGGVELGFSLKKHEMDVLVDLLHKGLEN

SEQ ID NO: 78450 - protein, 244 aa, Arabidopsis thaliana
  peptide (1)..(244): Ceres Seq. ID no. 12641437
MDLDTKILNAWHRVAKVFTGGKEPENPKSLKLLWSPEIGPDVFRYTLNLTREDIQKLRERLKKESSSSSVSSSPKELRLSTFVIVYSYALTCLIKARGGDPSRPVGYGFAVDCRSLMVPPVPSSYFETFMSEEGFLAAARMVSDSVEALDENVALKIPEILEGFTTLSPGTQVLSVAGSTRFGVYGLDFGWGRPEKVVVVSIDQGEAISFAESRDGSGGVELGFSLKKHEMDVLVDLLHKGLEN

SEQ ID NO: 78451 - DNA, 666 bp, Arabidopsis thaliana
  misc_feature (1)..(666): Ceres Seq. ID no. 12641467
  misc_feature (1)..(666): Ortholog of  Ceres SEQ ID NO 13599568 as cited in SEQ ID NO 509
  misc_feature (1)..(666): Ortholog of  Ceres SEQ ID NO 13638595 as cited in SEQ ID NO 52050
  misc_feature (1)..(666): Ortholog of  Ceres SEQ ID NO 13594748 as cited in SEQ ID NO 52114
  misc_feature (1)..(666): Ortholog of  Ceres SEQ ID NO 15170313 as cited in SEQ ID NO 59293
  misc_feature (1)..(666): Ortholog of  Ceres SEQ ID NO 12583993 as cited in SEQ ID NO 68098
  misc_feature (1)..(666): Ortholog of  Ceres SEQ ID NO 13654535 as cited in SEQ ID NO 68227
  misc_feature (1)..(666): Ortholog of  Ceres SEQ ID NO 13589319 as cited in SEQ ID NO 0
atgaaggtgtccatgtctctcatcctgataaccttatcagctttggtcaccattgccaaagcatatgatccaagtccacttcaagacttctgtgtggccattgatgaccctaaaaatggtgtttttgtgaatggtaagttttgcaaggatccaaagcaagcaaaggcagaagatttcttttcctcaggcctcaaccaagcaggaatcactaataacaaagtccaatccaacgtgacaacagtcaatgtcgatcagattccagggttaaacactttgggaatatccttggtccgcatagactatgcgccatatggtcaaaacccgcctcacacacaccctcgtgccactgagatccttgttcttgttgaaggaacattatatgttggttttgtctcttcgaatcaagacaacaaccgtttattcgccaaagtgctgaacccgggagacgtgttcgtgttccccataggaatgatccattttcaagtgaatatcgggaagacccccgcagtggcctttgctggactaagtagtcaaaatgctggtgtcatcacgatcgcagatatagtgtttggatcaacgcctccgattaatccagatattttggctcaggcgtttcagttagatgtcaatgttgtcaaagaccttgaggccaagtttaaaaactaa

SEQ ID NO: 78452 - protein, 221 aa, Arabidopsis thaliana
  peptide (1)..(221): Ceres Seq. ID no. 12641468
MKVSMSLILITLSALVTIAKAYDPSPLQDFCVAIDDPKNGVFVNGKFCKDPKQAKAEDFFSSGLNQAGITNNKVQSNVTTVNVDQIPGLNTLGISLVRIDYAPYGQNPPHTHPRATEILVLVEGTLYVGFVSSNQDNNRLFAKVLNPGDVFVFPIGMIHFQVNIGKTPAVAFAGLSSQNAGVITIADIVFGSTPPINPDILAQAFQLDVNVVKDLEAKFKN

SEQ ID NO: 78453 - protein, 217 aa, Arabidopsis thaliana
  peptide (1)..(217): Ceres Seq. ID no. 12641469
MSLILITLSALVTIAKAYDPSPLQDFCVAIDDPKNGVFVNGKFCKDPKQAKAEDFFSSGLNQAGITNNKVQSNVTTVNVDQIPGLNTLGISLVRIDYAPYGQNPPHTHPRATEILVLVEGTLYVGFVSSNQDNNRLFAKVLNPGDVFVFPIGMIHFQVNIGKTPAVAFAGLSSQNAGVITIADIVFGSTPPINPDILAQAFQLDVNVVKDLEAKFKN

SEQ ID NO: 78454 - DNA, 792 bp, Arabidopsis thaliana
  misc_feature (1)..(792): Ceres Seq. ID no. 12641492
  misc_feature (1)..(792): Ortholog of  Ceres SEQ ID NO 13596519 as cited in SEQ ID NO 62572
  misc_feature (1)..(792): Ortholog of  Ceres SEQ ID NO 12625108 as cited in SEQ ID NO 68102
atggtgatatgggtcgtgcccatgagttacggtcatggagcgatgattggtaatgcagtcgaagcacctgatgtagcggaagcaccagggattaatgacccaagcaaggcactcgacactaattggtatgacgcacgagccacgttctacggtgacatccatggtggcgacactcaacagggagcttgtggatacggtaatctattcagacaaggctatggtctagccaccgcagcgttaagtacggcactcttcaacgacgggtacacatgtggggcttgttatgaaatcatgtgcacgcgtgatccacaatggtgtttacccggatccgtcaagatcacagcaacaaacttctgtcccgcaaattacagcaaaaccacagacctttggtgcaacccaccacagaaacactttgatctctccttagcaatgtttctcaagattgccaagtacaaagccggggttgtcccagttagatacagacgtattccttgtagcaaaactggtggtgtcaagtttgaaaccaaaggaaacccttatttcttaatggtcttgatatacaacgtaggaggagctggagatattaagtacgtgcaagttaaaggaaacaagaccgggtggataacaatgaaaaagaactgggggcagaattggaccactattacagtattgaccggccaaggtttatcgttcagggttacaacgagtgatgggattacaaaagatttttggaatgtgatgccaaaaaattgggggtttggacagacttttgatggtaggattaacttttag

SEQ ID NO: 78455 - protein, 263 aa, Arabidopsis thaliana
  peptide (1)..(263): Ceres Seq. ID no. 12641493
MVIWVVPMSYGHGAMIGNAVEAPDVAEAPGINDPSKALDTNWYDARATFYGDIHGGDTQQGACGYGNLFRQGYGLATAALSTALFNDGYTCGACYEIMCTRDPQWCLPGSVKITATNFCPANYSKTTDLWCNPPQKHFDLSLAMFLKIAKYKAGVVPVRYRRIPCSKTGGVKFETKGNPYFLMVLIYNVGGAGDIKYVQVKGNKTGWITMKKNWGQNWTTITVLTGQGLSFRVTTSDGITKDFWNVMPKNWGFGQTFDGRINF

SEQ ID NO: 78456 - protein, 256 aa, Arabidopsis thaliana
  peptide (1)..(256): Ceres Seq. ID no. 12641494
MSYGHGAMIGNAVEAPDVAEAPGINDPSKALDTNWYDARATFYGDIHGGDTQQGACGYGNLFRQGYGLATAALSTALFNDGYTCGACYEIMCTRDPQWCLPGSVKITATNFCPANYSKTTDLWCNPPQKHFDLSLAMFLKIAKYKAGVVPVRYRRIPCSKTGGVKFETKGNPYFLMVLIYNVGGAGDIKYVQVKGNKTGWITMKKNWGQNWTTITVLTGQGLSFRVTTSDGITKDFWNVMPKNWGFGQTFDGRINF

SEQ ID NO: 78457 - protein, 249 aa, Arabidopsis thaliana
  peptide (1)..(249): Ceres Seq. ID no. 12641495
MIGNAVEAPDVAEAPGINDPSKALDTNWYDARATFYGDIHGGDTQQGACGYGNLFRQGYGLATAALSTALFNDGYTCGACYEIMCTRDPQWCLPGSVKITATNFCPANYSKTTDLWCNPPQKHFDLSLAMFLKIAKYKAGVVPVRYRRIPCSKTGGVKFETKGNPYFLMVLIYNVGGAGDIKYVQVKGNKTGWITMKKNWGQNWTTITVLTGQGLSFRVTTSDGITKDFWNVMPKNWGFGQTFDGRINF

SEQ ID NO: 78458 - DNA, 792 bp, Arabidopsis thaliana
  misc_feature (1)..(792): Ceres Seq. ID no. 12641496
  misc_feature (1)..(792): Ortholog of  Ceres SEQ ID NO 13596519 as cited in SEQ ID NO 62572
  misc_feature (1)..(792): Ortholog of  Ceres SEQ ID NO 12625108 as cited in SEQ ID NO 68102
atggcgatgtgggtcgtgccaatgagttacggtcatggagcgatgattggtaatgcagtcgaagcacctgatgtagccgaagcacccgggattaatgacccaagcaaggcactcgaccctaattggtatgacgcacgagccacgttctacggtgacatccatggtggagacactcaacagggagcttgtggatacggtaatctattcagacaaggctatggtctagccacagcagcgttaagtacggcactcttcaacgacgggtacacatgtggggcttgttatgaaatcatgtgcacgcgtgatccacaatggtgtttacccggatccgtcaagatcacagcaacaaacttctgtcccgcaaattacagcaaaaccacagacctttggtgcaatccaccacagaaacactttgatctctccttagcaatgtttctcaagattgccaagtacaaagccggggttgtcccagttagatacagacgtattccttgtagcaaaactggtggtgtcaagtttgaaaccaaaggaaacccttatttcttaatggtcttgatatacaacgtaggaggagctggagatattaagtacgtgcaagttaaagaaaacaagaccgggtggataacaatgaaaaagaactgggggcagaattggaccactagtacagtattgaccggccaaggtttgtcgttcagagttacgacgactgatgggattacaaaagatttttggaatgtgatgccaaaaaattggggatttggacagacttttgatggtaagattaacttttaa

SEQ ID NO: 78459 - protein, 263 aa, Arabidopsis thaliana
  peptide (1)..(263): Ceres Seq. ID no. 12641497
MAMWVVPMSYGHGAMIGNAVEAPDVAEAPGINDPSKALDPNWYDARATFYGDIHGGDTQQGACGYGNLFRQGYGLATAALSTALFNDGYTCGACYEIMCTRDPQWCLPGSVKITATNFCPANYSKTTDLWCNPPQKHFDLSLAMFLKIAKYKAGVVPVRYRRIPCSKTGGVKFETKGNPYFLMVLIYNVGGAGDIKYVQVKENKTGWITMKKNWGQNWTTSTVLTGQGLSFRVTTTDGITKDFWNVMPKNWGFGQTFDGKINF

SEQ ID NO: 78460 - protein, 261 aa, Arabidopsis thaliana
  peptide (1)..(261): Ceres Seq. ID no. 12641498
MWVVPMSYGHGAMIGNAVEAPDVAEAPGINDPSKALDPNWYDARATFYGDIHGGDTQQGACGYGNLFRQGYGLATAALSTALFNDGYTCGACYEIMCTRDPQWCLPGSVKITATNFCPANYSKTTDLWCNPPQKHFDLSLAMFLKIAKYKAGVVPVRYRRIPCSKTGGVKFETKGNPYFLMVLIYNVGGAGDIKYVQVKENKTGWITMKKNWGQNWTTSTVLTGQGLSFRVTTTDGITKDFWNVMPKNWGFGQTFDGKINF

SEQ ID NO: 78461 - protein, 256 aa, Arabidopsis thaliana
  peptide (1)..(256): Ceres Seq. ID no. 12641499
MSYGHGAMIGNAVEAPDVAEAPGINDPSKALDPNWYDARATFYGDIHGGDTQQGACGYGNLFRQGYGLATAALSTALFNDGYTCGACYEIMCTRDPQWCLPGSVKITATNFCPANYSKTTDLWCNPPQKHFDLSLAMFLKIAKYKAGVVPVRYRRIPCSKTGGVKFETKGNPYFLMVLIYNVGGAGDIKYVQVKENKTGWITMKKNWGQNWTTSTVLTGQGLSFRVTTTDGITKDFWNVMPKNWGFGQTFDGKINF

SEQ ID NO: 78462 - DNA, 783 bp, Arabidopsis thaliana
  misc_feature (1)..(783): Ceres Seq. ID no. 12641500
  misc_feature (1)..(783): Ortholog of  Ceres SEQ ID NO 13596519 as cited in SEQ ID NO 62572
  misc_feature (1)..(783): Ortholog of  Ceres SEQ ID NO 12625108 as cited in SEQ ID NO 68102
atggctacattgttagtgtccatgagttacggtcatcgagcgatgattaatgatgtagccgaagcacccgtgattgacaatgtaggcagcccaaccaacggactcgacagttcttggtatgatgcacgagcaacattttacggtgatatccatggtggagaaactcaacagggagcctgtggatacggtgatttattcaaacaaggctatggtctagagacagcggcattgagcacagcactcttcaacgaagggtatacatgtggggcttgttaccagatcatgtgtgtgcacgacccacaatggtgtttacccggaaccatcaagattacagcaacaaatttctgtccaccagattactccaaaaccgaaggcgtttggtgcaacccaccacaaaagcactttgacctctccctaccaatgttcctcaagatcgcccaatacaaagctggagttgtcccagttaaatacagacgtatttcttgtgcaagaactggtggtgtcaagtttgaaaccaaaggaaacccttatttcttaatgatcttgccatacaatgtaggaggcgctggagatatcaagttgatgcaagttaaaggagacaagaccgggtggataacaatgcaaaagaactggggacaaaactggaccactggtgttaatttgactggtcagggtatttcattcagggttacgacgagtgatggggttacaaaagattttaataatgtgatgccaaacaattggggatttggacagacttttgatggaaagattaacttttag

SEQ ID NO: 78463 - protein, 260 aa, Arabidopsis thaliana
  peptide (1)..(260): Ceres Seq. ID no. 12641501
MATLLVSMSYGHRAMINDVAEAPVIDNVGSPTNGLDSSWYDARATFYGDIHGGETQQGACGYGDLFKQGYGLETAALSTALFNEGYTCGACYQIMCVHDPQWCLPGTIKITATNFCPPDYSKTEGVWCNPPQKHFDLSLPMFLKIAQYKAGVVPVKYRRISCARTGGVKFETKGNPYFLMILPYNVGGAGDIKLMQVKGDKTGWITMQKNWGQNWTTGVNLTGQGISFRVTTSDGVTKDFNNVMPNNWGFGQTFDGKINF

SEQ ID NO: 78464 - protein, 253 aa, Arabidopsis thaliana
  peptide (1)..(253): Ceres Seq. ID no. 12641502
MSYGHRAMINDVAEAPVIDNVGSPTNGLDSSWYDARATFYGDIHGGETQQGACGYGDLFKQGYGLETAALSTALFNEGYTCGACYQIMCVHDPQWCLPGTIKITATNFCPPDYSKTEGVWCNPPQKHFDLSLPMFLKIAQYKAGVVPVKYRRISCARTGGVKFETKGNPYFLMILPYNVGGAGDIKLMQVKGDKTGWITMQKNWGQNWTTGVNLTGQGISFRVTTSDGVTKDFNNVMPNNWGFGQTFDGKINF

SEQ ID NO: 78465 - protein, 246 aa, Arabidopsis thaliana
  peptide (1)..(246): Ceres Seq. ID no. 12641503
MINDVAEAPVIDNVGSPTNGLDSSWYDARATFYGDIHGGETQQGACGYGDLFKQGYGLETAALSTALFNEGYTCGACYQIMCVHDPQWCLPGTIKITATNFCPPDYSKTEGVWCNPPQKHFDLSLPMFLKIAQYKAGVVPVKYRRISCARTGGVKFETKGNPYFLMILPYNVGGAGDIKLMQVKGDKTGWITMQKNWGQNWTTGVNLTGQGISFRVTTSDGVTKDFNNVMPNNWGFGQTFDGKINF

SEQ ID NO: 78466 - DNA, 1443 bp, Arabidopsis thaliana
  misc_feature (1)..(1443): Ceres Seq. ID no. 12641504
  misc_feature (1)..(1443): Ortholog of  Ceres SEQ ID NO 15226950 as cited in SEQ ID NO 68649
  misc_feature (1)..(1443): Ortholog of  Ceres SEQ ID NO 13502947 as cited in SEQ ID NO 69257
atggtgaagatctgttgtattggagctggatatgtaggaggaccaacaatggcagtgattgcattgaaatgtccagatattgaagtggcagttgttgatatctctgttcctagaatcaacgcttggaacagtgatcagcttccgatttacgagccaggtcttgacgatatcgttaagcaatgcagaggaaagaatcttttcttcagtactgatgtggagaaacatgttagagaagctgatattgtctttgtctctgttaacacaccgactaaaacgactggtcttggagctgggaaagctgctgatctcacttattgggagagtgctgctcgtatgatcgcggatgtatcggtttctgacaagattgttgttgagaaatcgactgttccggtgaagacagctgaagctattgagaagattttgatgcataacagtaaaggaatcaagtttcagattctttcgaatccggagtttcttgctgaaggaactgctatcgctgatctttttaaccctgaccgtgttttgatcggagggcgagaaacacctgaaggattcaaagctgttcagacacttaaagaggtttatgctaattgggttcctgaaggtcagatcatcacaactaatctctggtctgctgagctttctaagttagctgcaaatgctttcttggctcagaggatttcatcagtcaatgccatgtctgcactttgtgaatccactggtgctgatgttactcaagtgtcttacgctgttggtactgattcaagaatcggttccaaattcttgaacgctagtgttggattcggaggttcttgtttccagaaggacattctgaatctcgtctacatctgtcaatgcaacggacttccagaagtggcggaatactggaaacaagtgatcaagatcaacgattaccaaaagaaccggttcgtgaacagaatcgtgtcctctatgttcaacactgtctccaacaagaaggttgcgattcttggattcgcattcaagaaagacactggtgacacaagggaaacacctgccattgatgtgtgtaaaggtctattaggagacaaagcacagatcagtatctatgatcctcaagtcacagaggaacagattcagagagatctctcgatgaaaaagttcgactgggaccatcctcttcacttgcagccaatgagtccaaccacagtgaaacaagtgagtgtgacttgggacgcatatgaagctacaaaagacgcacacgcggtttgcgttttgactgagtgggacgagtttaagtcgttagattaccagaagatcttcgacaacatgcagaaaccggcttttatcttcgacggaagaaacattatgaatgttaacaagttaagagagattggtttcattgtttactccattggtaagccacttgacccatggctcaaggacatgcctgcctttgtctaa

SEQ ID NO: 78467 - protein, 480 aa, Arabidopsis thaliana
  peptide (1)..(480): Ceres Seq. ID no. 12641505
MVKICCIGAGYVGGPTMAVIALKCPDIEVAVVDISVPRINAWNSDQLPIYEPGLDDIVKQCRGKNLFFSTDVEKHVREADIVFVSVNTPTKTTGLGAGKAADLTYWESAARMIADVSVSDKIVVEKSTVPVKTAEAIEKILMHNSKGIKFQILSNPEFLAEGTAIADLFNPDRVLIGGRETPEGFKAVQTLKEVYANWVPEGQIITTNLWSAELSKLAANAFLAQRISSVNAMSALCESTGADVTQVSYAVGTDSRIGSKFLNASVGFGGSCFQKDILNLVYICQCNGLPEVAEYWKQVIKINDYQKNRFVNRIVSSMFNTVSNKKVAILGFAFKKDTGDTRETPAIDVCKGLLGDKAQISIYDPQVTEEQIQRDLSMKKFDWDHPLHLQPMSPTTVKQVSVTWDAYEATKDAHAVCVLTEWDEFKSLDYQKIFDNMQKPAFIFDGRNIMNVNKLREIGFIVYSIGKPLDPWLKDMPAFV

SEQ ID NO: 78468 - protein, 464 aa, Arabidopsis thaliana
  peptide (1)..(464): Ceres Seq. ID no. 12641506
MAVIALKCPDIEVAVVDISVPRINAWNSDQLPIYEPGLDDIVKQCRGKNLFFSTDVEKHVREADIVFVSVNTPTKTTGLGAGKAADLTYWESAARMIADVSVSDKIVVEKSTVPVKTAEAIEKILMHNSKGIKFQILSNPEFLAEGTAIADLFNPDRVLIGGRETPEGFKAVQTLKEVYANWVPEGQIITTNLWSAELSKLAANAFLAQRISSVNAMSALCESTGADVTQVSYAVGTDSRIGSKFLNASVGFGGSCFQKDILNLVYICQCNGLPEVAEYWKQVIKINDYQKNRFVNRIVSSMFNTVSNKKVAILGFAFKKDTGDTRETPAIDVCKGLLGDKAQISIYDPQVTEEQIQRDLSMKKFDWDHPLHLQPMSPTTVKQVSVTWDAYEATKDAHAVCVLTEWDEFKSLDYQKIFDNMQKPAFIFDGRNIMNVNKLREIGFIVYSIGKPLDPWLKDMPAFV

SEQ ID NO: 78469 - protein, 369 aa, Arabidopsis thaliana
  peptide (1)..(369): Ceres Seq. ID no. 12641507
MIADVSVSDKIVVEKSTVPVKTAEAIEKILMHNSKGIKFQILSNPEFLAEGTAIADLFNPDRVLIGGRETPEGFKAVQTLKEVYANWVPEGQIITTNLWSAELSKLAANAFLAQRISSVNAMSALCESTGADVTQVSYAVGTDSRIGSKFLNASVGFGGSCFQKDILNLVYICQCNGLPEVAEYWKQVIKINDYQKNRFVNRIVSSMFNTVSNKKVAILGFAFKKDTGDTRETPAIDVCKGLLGDKAQISIYDPQVTEEQIQRDLSMKKFDWDHPLHLQPMSPTTVKQVSVTWDAYEATKDAHAVCVLTEWDEFKSLDYQKIFDNMQKPAFIFDGRNIMNVNKLREIGFIVYSIGKPLDPWLKDMPAFV

SEQ ID NO: 78470 - DNA, 1980 bp, Arabidopsis thaliana
  misc_feature (1)..(1980): Ceres Seq. ID no. 12641512
  misc_feature (1)..(1980): Ortholog of  Ceres SEQ ID NO 12586556 as cited in SEQ ID NO 64667
  misc_feature (1)..(1980): Ortholog of  Ceres SEQ ID NO 13660894 as cited in SEQ ID NO 67475
atgagtgaagttttgcgcagagccaacaacgcacttagtagcgtcaagcaataccaatctctcttgaatcactttgcagctactcaatcaatttcaaaaaccaaagctttacactgccacgtcatcaccggcggtcgagtttccggccacattctctcgactctctccgtaacttatgcgttatgtggtcacatcacttatgcacggaagctgttcgaggaaatgcctcaaagctctttgctttcttataacattgttattagaatgtacgtgcgtgaaggattgtatcacgatgcgattagcgtgtttattaggatggttagtgagggggttaagtgtgttccggatggttatacatacccttttgttgctaaagctgctggagaattgaaatcgatgaaattggggttggttgttcatgggaggatcttgaggagttggtttggtagggataagtatgtgcagaacgcgttgttagcgatgtatatgaactttgggaaggttgaaatggcgagggatgtgtttgatgtgatgaagaaccgtgatgtgatttcgtggaacacgatgattagtgggtattataggaatggttatatgaatgatgcgttaatgatgtttgattggatggttaatgaaagtgttgatcttgaccatgctacgattgtttctatgttgcctgtttgtggtcacttgaaggatttggagatggggaggaatgttcataagttggtggaagagaagcggttaggggataaaattgaggtgaagaatgcgttggtgaatatgtacttgaaatgtggtcgtatggatgaagcgagatttgtttttgacaggatggaacgaagggatgtgatcacgtggacttgtatgattaacggatatactgaagatggagatgtggaaaacgctttagagttgtgtagattgatgcagtttgaaggcgtaagacctaatgctgtgactatagcttctcttgtttcggtgtgtggtgatgctttgaaggtgaatgatggtaaatgtttacacggttgggcggtgaggcaacaggtttattccgatatcattatagaaacatctttgatcagcatgtatgctaaatgcaaacgtgtagacctctgctttagagtattttcggggaatgaacttgtgagtgatgcgttaggtctattcaaacggatgcgacgggaagatgtggagcccaatattgctacattaaacagtctccttccagcatatgcagctttggcagatttgcgtcaagcaatgaatatccattgctacctaaccaaaaccgggtttatgtcaagccttgatgctgctacagggttggttcatgtttactcaaagtgtggaacattagaatctgctcacaagatattcaatggaatccaggaaaaacacaagagcaaagatgtagttctatggggtgcgttaatatccggctacgggatgcacggagatggtcataatgcgttgcaagttttcatggaaatggttcgatctggtgtaacgccaaacgaaatcacatttacatctgccttgaatgcttgcagtcattcgggtttggttgaagaaggcttgacattattcaggttcatgcttgaacattacaaaacgttagccagatcaaaccattacacttgcattgttgatctccttggtcgagcaggtcggttagacgaagcttacaatctcatcacaacaattccatttgaaccaacgtcaaccgtttggggtgcgttgcttgctgcttgtgtcacacatgagaatgtccagcttggagaaatggcagcaaacaagttgttcgagctggaaccagagaacacgggcaactatgtgttgttggcaaacatctatgcggctttaggacgatggaaagatatggagaaggtgagaagcatgatggagaatgttggattgagaaagaaaccaggtcatagcacaatcgagatcagaagtaattcagttgatacaagatga

SEQ ID NO: 78471 - protein, 659 aa, Arabidopsis thaliana
  peptide (1)..(659): Ceres Seq. ID no. 12641513
MSEVLRRANNALSSVKQYQSLLNHFAATQSISKTKALHCHVITGGRVSGHILSTLSVTYALCGHITYARKLFEEMPQSSLLSYNIVIRMYVREGLYHDAISVFIRMVSEGVKCVPDGYTYPFVAKAAGELKSMKLGLVVHGRILRSWFGRDKYVQNALLAMYMNFGKVEMARDVFDVMKNRDVISWNTMISGYYRNGYMNDALMMFDWMVNESVDLDHATIVSMLPVCGHLKDLEMGRNVHKLVEEKRLGDKIEVKNALVNMYLKCGRMDEARFVFDRMERRDVITWTCMINGYTEDGDVENALELCRLMQFEGVRPNAVTIASLVSVCGDALKVNDGKCLHGWAVRQQVYSDIIIETSLISMYAKCKRVDLCFRVFSGNELVSDALGLFKRMRREDVEPNIATLNSLLPAYAALADLRQAMNIHCYLTKTGFMSSLDAATGLVHVYSKCGTLESAHKIFNGIQEKHKSKDVVLWGALISGYGMHGDGHNALQVFMEMVRSGVTPNEITFTSALNACSHSGLVEEGLTLFRFMLEHYKTLARSNHYTCIVDLLGRAGRLDEAYNLITTIPFEPTSTVWGALLAACVTHENVQLGEMAANKLFELEPENTGNYVLLANIYAALGRWKDMEKVRSMMENVGLRKKPGHSTIEIRSNSVDTR

SEQ ID NO: 78472 - protein, 585 aa, Arabidopsis thaliana
  peptide (1)..(585): Ceres Seq. ID no. 12641514
MPQSSLLSYNIVIRMYVREGLYHDAISVFIRMVSEGVKCVPDGYTYPFVAKAAGELKSMKLGLVVHGRILRSWFGRDKYVQNALLAMYMNFGKVEMARDVFDVMKNRDVISWNTMISGYYRNGYMNDALMMFDWMVNESVDLDHATIVSMLPVCGHLKDLEMGRNVHKLVEEKRLGDKIEVKNALVNMYLKCGRMDEARFVFDRMERRDVITWTCMINGYTEDGDVENALELCRLMQFEGVRPNAVTIASLVSVCGDALKVNDGKCLHGWAVRQQVYSDIIIETSLISMYAKCKRVDLCFRVFSGNELVSDALGLFKRMRREDVEPNIATLNSLLPAYAALADLRQAMNIHCYLTKTGFMSSLDAATGLVHVYSKCGTLESAHKIFNGIQEKHKSKDVVLWGALISGYGMHGDGHNALQVFMEMVRSGVTPNEITFTSALNACSHSGLVEEGLTLFRFMLEHYKTLARSNHYTCIVDLLGRAGRLDEAYNLITTIPFEPTSTVWGALLAACVTHENVQLGEMAANKLFELEPENTGNYVLLANIYAALGRWKDMEKVRSMMENVGLRKKPGHSTIEIRSNSVDTR

SEQ ID NO: 78473 - protein, 571 aa, Arabidopsis thaliana
  peptide (1)..(571): Ceres Seq. ID no. 12641515
MYVREGLYHDAISVFIRMVSEGVKCVPDGYTYPFVAKAAGELKSMKLGLVVHGRILRSWFGRDKYVQNALLAMYMNFGKVEMARDVFDVMKNRDVISWNTMISGYYRNGYMNDALMMFDWMVNESVDLDHATIVSMLPVCGHLKDLEMGRNVHKLVEEKRLGDKIEVKNALVNMYLKCGRMDEARFVFDRMERRDVITWTCMINGYTEDGDVENALELCRLMQFEGVRPNAVTIASLVSVCGDALKVNDGKCLHGWAVRQQVYSDIIIETSLISMYAKCKRVDLCFRVFSGNELVSDALGLFKRMRREDVEPNIATLNSLLPAYAALADLRQAMNIHCYLTKTGFMSSLDAATGLVHVYSKCGTLESAHKIFNGIQEKHKSKDVVLWGALISGYGMHGDGHNALQVFMEMVRSGVTPNEITFTSALNACSHSGLVEEGLTLFRFMLEHYKTLARSNHYTCIVDLLGRAGRLDEAYNLITTIPFEPTSTVWGALLAACVTHENVQLGEMAANKLFELEPENTGNYVLLANIYAALGRWKDMEKVRSMMENVGLRKKPGHSTIEIRSNSVDTR

SEQ ID NO: 78474 - DNA, 1425 bp, Arabidopsis thaliana
  misc_feature (1)..(1425): Ceres Seq. ID no. 12641682
  misc_feature (1)..(1425): Ortholog of  Ceres SEQ ID NO 15226943 as cited in SEQ ID NO 53160
atggctcgttaccacaggagatcgatgatcttgtgcttagttctgctctcattaagcatatcgccgagccaaggcttcctagggacagaggaaaagatcaaatccgctgtcttttactcaccaaaacttgtgatgaatccaggatcagttgcaaatccttacttattcgacatcgatttcccaagaggtcatatcggcctcaaagctttcgatgctgaagtggttgacgaagcgggcaaacccgttcctctacacgagacctatctccaccattggattgtcgagccatactatgtacgtaaaggttccaagcttccacagagagaaatgttcaggaatcatggattttccagggaagatcctgaaagcaatcttgattccaagtcagatattattcttgtgaaaaatggagggttgtgcaggagtttaacactcagacatttctttggtttaggatcagaaacccgcgaaacctcgacgtatgttcctgatccctacgctattgaaatcggtaatcctgaggaaacacctgatggttatgaattcaaatggcttcttaacattcacgcgatagacaccagaggtgtggaagataagaaaggatgcatagaatgtttgtgtgatctgtataatgttaccattgatgagtatggtcgagctataaggcctggatacaaaggaggtttatactgctgctatgataagactcaatgtcgggtgaaaagcggatttgacaatggggagaaaacaagaactctgtatttgaagtataccgtgagatgggttgattgggacagctcggttttgcccgctaaggtttatattttcgatgttacagattcttgggaaagatcaaaaggagatagccaagaacatatttgccatgtggaatacgaggtgaaaccgtgcaaaaccaatggcgatggatgcgttgacgttaagaaaaagagcttagtgatgccatttgatgggtatattgtctacggggtagctcaccagcacgctggtggtatcggtggtgctctataccgagagaacggtgaagggatatgcgcttcaatgccgaagtatggcaatggagatgaacctggaaacgaagctggttacattgttggaatgtcgtcttgttatccagctgatccagtgaaagtgagctatggagagacattgactttggaatctaattacagtaatgccgttggtcataccggagttatgggactcttttacatcctcgttgctcagcagctgccggaaccagatagctccttgcctaataaacaacattttgaggcacctgcgagaagcttgagctttttagccatttttgcagtgacggtagttgtggctgttgtggttttaatagccgccgtgatataccggagacagaaacgggaagatggttaccaatcacttagtacttaa

SEQ ID NO: 78475 - protein, 474 aa, Arabidopsis thaliana; identical to SEQ ID NO: 50126
  peptide (1)..(474): Ceres Seq. ID no. 12641683

SEQ ID NO: 78476 - protein, 466 aa, Arabidopsis thaliana
  peptide (1)..(466): Ceres Seq. ID no. 12641684
MILCLVLLSLSISPSQGFLGTEEKIKSAVFYSPKLVMNPGSVANPYLFDIDFPRGHIGLKAFDAEVVDEAGKPVPLHETYLHHWIVEPYYVRKGSKLPQREMFRNHGFSREDPESNLDSKSDIILVKNGGLCRSLTLRHFFGLGSETRETSTYVPDPYAIEIGNPEETPDGYEFKWLLNIHAIDTRGVEDKKGCIECLCDLYNVTIDEYGRAIRPGYKGGLYCCYDKTQCRVKSGFDNGEKTRTLYLKYTVRWVDWDSSVLPAKVYIFDVTDSWERSKGDSQEHICHVEYEVKPCKTNGDGCVDVKKKSLVMPFDGYIVYGVAHQHAGGIGGALYRENGEGICASMPKYGNGDEPGNEAGYIVGMSSCYPADPVKVSYGETLTLESNYSNAVGHTGVMGLFYILVAQQLPEPDSSLPNKQHFEAPARSLSFLAIFAVTVVVAVVVLIAAVIYRRQKREDGYQSLST

SEQ ID NO: 78477 - protein, 430 aa, Arabidopsis thaliana
  peptide (1)..(430): Ceres Seq. ID no. 12641685
MNPGSVANPYLFDIDFPRGHIGLKAFDAEVVDEAGKPVPLHETYLHHWIVEPYYVRKGSKLPQREMFRNHGFSREDPESNLDSKSDIILVKNGGLCRSLTLRHFFGLGSETRETSTYVPDPYAIEIGNPEETPDGYEFKWLLNIHAIDTRGVEDKKGCIECLCDLYNVTIDEYGRAIRPGYKGGLYCCYDKTQCRVKSGFDNGEKTRTLYLKYTVRWVDWDSSVLPAKVYIFDVTDSWERSKGDSQEHICHVEYEVKPCKTNGDGCVDVKKKSLVMPFDGYIVYGVAHQHAGGIGGALYRENGEGICASMPKYGNGDEPGNEAGYIVGMSSCYPADPVKVSYGETLTLESNYSNAVGHTGVMGLFYILVAQQLPEPDSSLPNKQHFEAPARSLSFLAIFAVTVVVAVVVLIAAVIYRRQKREDGYQSLST

SEQ ID NO: 78478 - DNA, 1740 bp, Arabidopsis thaliana
  misc_feature (1)..(1740): Ceres Seq. ID no. 12641735
  misc_feature (1)..(1740): Ortholog of  Ceres SEQ ID NO 13657138 as cited in SEQ ID NO 65923
atgatatcttgttcagaagaaggtagtaacaagatccttgtggcgatctcgttggaccgtgacgagagccaaaatgttctatcttgggccatcaatgttcttgctaaaccaagtgacaccgttgtggctcttcatcttcttgttggtgaagaaccgagaaaattgccaatgaagaagaagaagagaactcagattcgacatgccaaagctcatgttatctccatgcttggagagttcgcttacacttgctgccacaaccaggtgaatttggaagccaaggtagggtttagctcaaacattggaagaggactaatcgatgaagtcaaatccatttctgctcattatcttgttctttctcgaccaacaacccacgagtttaggatatggaatgacatcaaaagatatgtctccgactttgctccatcaagttgctctgttgttttagtcggaaaccaaagaaaaccgcataaagattgttactctgactccgcgatttctctagacataaatagtgagaagtattcaccacgtagtgtactaaacactttatcaagagattcacttagctcttcaggcgatgatgcttcaagcttcaatggttcaatggtctcttctagcttcgcttcgccttcagacaaaccgaagcataagtcaatctctccttacaaattcatatcttctcttatcatgaattctcctctgaggaaatggagaggaagtgagactaagaacaagcccaaacctcagcctctaattcaatgcttcacttacaacgagatttcaaaggccacaaatgattttcaccaagggaatatagtaggcataggaggctactctgaagtgtacagaggagatttatgggatggaagaagaatagcagtgaagagattagccaaggagagtggtgacatgaacaaggagaaagagtttcttacggaacttggcatcataagtcatgtctctcatcccaacactgctcttctcttaggttgttgtgttgagaaaggtctttatcttgtcttcagattctccgagaatggaaccttgtactctgcgctgcacgagaatgagaatgggtcgttagattggcctgtacggtacaaaattgcggttggagttgctcgagggcttcattatcttcacaaacgctgcaaccaccggatcattcaccgcgacattaaatcttccaatgttttacttggacctgattacgaaccgcagataactgattttggattggccaaatggttgcctaacaaatggactcaccatgcggttataccggttgaaggaacgtttggttatctagctccagagtccttaatgcaaggaaccatcgacgagaaaaccgacatctacgcattcggcattctccttctagagatcataactggtcgaagaccggttaatcccactcagaaacacattctcttatgggcaaagccggcgatggagacaggtaacacaagtgagttggttgatccgaaattgcaagataagtacgacgaccaacagatgaacaagctagtccttacagcttcacattgtgttcaacaatctccgatattacgaccaaccatgactcaggtattggagttgcttacaaatgggaacgaggctgagattgcaaagagctggagaatgcctaaggatatgactaatgacgatgatgataataatgaatgggatgattattctatgattttcggatatgatgttccttcagattcttctttttaa

SEQ ID NO: 78479 - protein, 579 aa, Arabidopsis thaliana
  peptide (1)..(579): Ceres Seq. ID no. 12641736
MISCSEEGSNKILVAISLDRDESQNVLSWAINVLAKPSDTVVALHLLVGEEPRKLPMKKKKRTQIRHAKAHVISMLGEFAYTCCHNQVNLEAKVGFSSNIGRGLIDEVKSISAHYLVLSRPTTHEFRIWNDIKRYVSDFAPSSCSVVLVGNQRKPHKDCYSDSAISLDINSEKYSPRSVLNTLSRDSLSSSGDDASSFNGSMVSSSFASPSDKPKHKSISPYKFISSLIMNSPLRKWRGSETKNKPKPQPLIQCFTYNEISKATNDFHQGNIVGIGGYSEVYRGDLWDGRRIAVKRLAKESGDMNKEKEFLTELGIISHVSHPNTALLLGCCVEKGLYLVFRFSENGTLYSALHENENGSLDWPVRYKIAVGVARGLHYLHKRCNHRIIHRDIKSSNVLLGPDYEPQITDFGLAKWLPNKWTHHAVIPVEGTFGYLAPESLMQGTIDEKTDIYAFGILLLEIITGRRPVNPTQKHILLWAKPAMETGNTSELVDPKLQDKYDDQQMNKLVLTASHCVQQSPILRPTMTQVLELLTNGNEAEIAKSWRMPKDMTNDDDDNNEWDDYSMIFGYDVPSDSSF

SEQ ID NO: 78480 - protein, 523 aa, Arabidopsis thaliana
  peptide (1)..(523): Ceres Seq. ID no. 12641737
MKKKKRTQIRHAKAHVISMLGEFAYTCCHNQVNLEAKVGFSSNIGRGLIDEVKSISAHYLVLSRPTTHEFRIWNDIKRYVSDFAPSSCSVVLVGNQRKPHKDCYSDSAISLDINSEKYSPRSVLNTLSRDSLSSSGDDASSFNGSMVSSSFASPSDKPKHKSISPYKFISSLIMNSPLRKWRGSETKNKPKPQPLIQCFTYNEISKATNDFHQGNIVGIGGYSEVYRGDLWDGRRIAVKRLAKESGDMNKEKEFLTELGIISHVSHPNTALLLGCCVEKGLYLVFRFSENGTLYSALHENENGSLDWPVRYKIAVGVARGLHYLHKRCNHRIIHRDIKSSNVLLGPDYEPQITDFGLAKWLPNKWTHHAVIPVEGTFGYLAPESLMQGTIDEKTDIYAFGILLLEIITGRRPVNPTQKHILLWAKPAMETGNTSELVDPKLQDKYDDQQMNKLVLTASHCVQQSPILRPTMTQVLELLTNGNEAEIAKSWRMPKDMTNDDDDNNEWDDYSMIFGYDVPSDSSF

SEQ ID NO: 78481 - protein, 505 aa, Arabidopsis thaliana
  peptide (1)..(505): Ceres Seq. ID no. 12641738
MLGEFAYTCCHNQVNLEAKVGFSSNIGRGLIDEVKSISAHYLVLSRPTTHEFRIWNDIKRYVSDFAPSSCSVVLVGNQRKPHKDCYSDSAISLDINSEKYSPRSVLNTLSRDSLSSSGDDASSFNGSMVSSSFASPSDKPKHKSISPYKFISSLIMNSPLRKWRGSETKNKPKPQPLIQCFTYNEISKATNDFHQGNIVGIGGYSEVYRGDLWDGRRIAVKRLAKESGDMNKEKEFLTELGIISHVSHPNTALLLGCCVEKGLYLVFRFSENGTLYSALHENENGSLDWPVRYKIAVGVARGLHYLHKRCNHRIIHRDIKSSNVLLGPDYEPQITDFGLAKWLPNKWTHHAVIPVEGTFGYLAPESLMQGTIDEKTDIYAFGILLLEIITGRRPVNPTQKHILLWAKPAMETGNTSELVDPKLQDKYDDQQMNKLVLTASHCVQQSPILRPTMTQVLELLTNGNEAEIAKSWRMPKDMTNDDDDNNEWDDYSMIFGYDVPSDSSF

SEQ ID NO: 78482 - DNA, 737 bp, Arabidopsis thaliana
  misc_feature (1)..(737): Ceres Seq. ID no. 12641905
  misc_feature (1)..(737): Ortholog of  Ceres SEQ ID NO 12586195 as cited in SEQ ID NO 63768
  misc_feature (1)..(737): Ortholog of  Ceres SEQ ID NO 13599518 as cited in SEQ ID NO 0
aacgacagattaaagcagagagaaaaacaaaatccattgaagaaggagaagaagaaaaaaaatgggagcattttgcaagttgatcgatgcggttctcttcttatactttgctctcatggcggtaattgcgccgcttatcgacggtcaaacgagtcttcccggcgatatcttcccggcgtttatcgtcgatctgaatcgctggtacattgatgaatttggagattatctagtcaaagagaagccgcatttcctagtcggactcgtctggcatgagcttttgcttctttggccgctctcaatcgtcaacgtctacgcaattctcgctgggaaatcgtggtttggtaccacctcaatggtgtacggagcttccgtcgtgacttctatggctgctatactgggagagatgataggatcagggaaggcatctgagaaattgttgatgatgtatgtgccattcatgggtgttggtattctagctcttcttcgtggtcttctttctcaatccaacaaaagtggtggagctgttggcaagagacctgctattttggccaggagaaagcgtgcttgaggtacacttgatgatcagcaagtgtatcttttgactctgagaatttctgctataggtggatttggcttttcaaacagaaaattttgaacctttgtgatgtattcttcctgtttttttagcaatatcatgtcatctgtgttcttgtttgaaattaaatgaagttaaactg

SEQ ID NO: 78483 - protein, 168 aa, Arabidopsis thaliana; identical to SEQ ID NO: 28325
  peptide (1)..(168): Ceres Seq. ID no. 12641906

SEQ ID NO: 78484 - protein, 150 aa, Arabidopsis thaliana; identical to SEQ ID NO: 28326
  peptide (1)..(150): Ceres Seq. ID no. 12641907

SEQ ID NO: 78485 - DNA, 966 bp, Arabidopsis thaliana
  misc_feature (1)..(966): Ceres Seq. ID no. 12641916
  misc_feature (1)..(966): Ortholog of  Ceres SEQ ID NO 13661001 as cited in SEQ ID NO 67531
atggatggtggtggagagacgacggcgacggctacgatggaggggagagggttgaagaaagggccgtggacaacgacggaggatgcgatcttgacggagtacgtgagaaaacacggtgaaggtaattggaacgccgtgcaaaagaactcaggtttgctccggtgtggcaaaagttgccgtctacggtgggcgaatcatctccggccaaatctaaagaaaggatcttttactcctgatgaagaaaagatcatcatcgaccttcacgctaagcttggaaacaaatgggctcgtatggcttctcagttacctggaagaacagacaatgagatcaagaactattggaacacgaggatgaagagaagacaaagagctggtttgcctttataccctcatgagattcaacatcaagggattgatattgatgatgattctagtcctattattgacaatggtgtccatcttgagccaccttctggcaatagtggactacttgatgccctcttggaggagtctcaagccttgtctcgaggcggactcttcaaggacgttagggtttcctccagtgacctatgtgaggttcaagataaaagggtgaagatggactttgagaatcttttaatagatcatctaaactcttctaatcattcatcattgggagcaaaccctaatattcacaacaagtacaatgagccaacaatggtaaaagtaacggtggatgatgatgatgaattattgacgagccttctcaacaacttcccttcaaccacaacacctttgcctgattggtatcgggtgacagaaatgcaaaacgaggcctcatatcttgccccaccaagtggaattcttatgggaaaccatcaaggtaacggcagggtggaaccacccacggtgccgccttcgtccagtgtagatcctatggcctcgttggggtcatgctattggagcaacatgcctagcatctgttag

SEQ ID NO: 78486 - protein, 321 aa, Arabidopsis thaliana
  peptide (1)..(321): Ceres Seq. ID no. 12641917
MDGGGETTATATMEGRGLKKGPWTTTEDAILTEYVRKHGEGNWNAVQKNSGLLRCGKSCRLRWANHLRPNLKKGSFTPDEEKIIIDLHAKLGNKWARMASQLPGRTDNEIKNYWNTRMKRRQRAGLPLYPHEIQHQGIDIDDDSSPIIDNGVHLEPPSGNSGLLDALLEESQALSRGGLFKDVRVSSSDLCEVQDKRVKMDFENLLIDHLNSSNHSSLGANPNIHNKYNEPTMVKVTVDDDDELLTSLLNNFPSTTTPLPDWYRVTEMQNEASYLAPPSGILMGNHQGNGRVEPPTVPPSSSVDPMASLGSCYWSNMPSIC

SEQ ID NO: 78487 - protein, 309 aa, Arabidopsis thaliana
  peptide (1)..(309): Ceres Seq. ID no. 12641918
MEGRGLKKGPWTTTEDAILTEYVRKHGEGNWNAVQKNSGLLRCGKSCRLRWANHLRPNLKKGSFTPDEEKIIIDLHAKLGNKWARMASQLPGRTDNEIKNYWNTRMKRRQRAGLPLYPHEIQHQGIDIDDDSSPIIDNGVHLEPPSGNSGLLDALLEESQALSRGGLFKDVRVSSSDLCEVQDKRVKMDFENLLIDHLNSSNHSSLGANPNIHNKYNEPTMVKVTVDDDDELLTSLLNNFPSTTTPLPDWYRVTEMQNEASYLAPPSGILMGNHQGNGRVEPPTVPPSSSVDPMASLGSCYWSNMPSIC

SEQ ID NO: 78488 - protein, 224 aa, Arabidopsis thaliana
  peptide (1)..(224): Ceres Seq. ID no. 12641919
MASQLPGRTDNEIKNYWNTRMKRRQRAGLPLYPHEIQHQGIDIDDDSSPIIDNGVHLEPPSGNSGLLDALLEESQALSRGGLFKDVRVSSSDLCEVQDKRVKMDFENLLIDHLNSSNHSSLGANPNIHNKYNEPTMVKVTVDDDDELLTSLLNNFPSTTTPLPDWYRVTEMQNEASYLAPPSGILMGNHQGNGRVEPPTVPPSSSVDPMASLGSCYWSNMPSIC

SEQ ID NO: 78489 - DNA, 1935 bp, Arabidopsis thaliana
  misc_feature (1)..(1935): Ceres Seq. ID no. 12641932
  misc_feature (1)..(1935): Ortholog of  Ceres SEQ ID NO 12617350 as cited in SEQ ID NO 63777
  misc_feature (1)..(1935): Ortholog of  Ceres SEQ ID NO 15176153 as cited in SEQ ID NO 0
atgtcgcgatttcctcgaagattcatagatgattcatcaatggaagatgcaggaatctctctttgcccaagtattcactatagacctataaaccctaatgatctagatcgtttggagcaaatccatcgcgatatcttccccatcaagtatgagtctgagtttttccagagtgttgtgaacggagttgatatcgtctcatgggctgctgttgatcggagccggcctgatgatcactctgatgaacttattggttttgttactgccaaatttgtgcttgccaaagatagcgagatagatgatcttatacattacgattcctcgaaaggagaggagactttgatatacatcttgacactcggagttgtagaaacatacagaaaccgtggaatcgcaatgtcacttattagtgaggtaattaaatatgcttccggtttatctgtgtgtcgcggagtttaccttcatgtgattgcacacaacaatgctgcgatctgtttgtacaaaagattgatgttcagatgcgtgcggagattacatggattttatctaatcaatcgacatcattttgatgcgttcttgtttgtctacttcatcaacggttctcgaactccttgctcacccttagaggtggcgatgtttgttgtgaattatatgaagagtggtatcaagtcagtggcatctaagctggctaacaaggatgagaaagttagcttggttgaaaatagctcttttgcttcattggcaattatccaaaaacaaaatcaccagcttaggatgtcaaaaaataggttaaacgataattttatttacttccctcaaaaaagcctgagaaaatccccatcaaaggccaaaagaacagaaaaaagtttttttcacgcggtggcaatggcaatggcgtctgcttcttcctcctcctcctccatatccgtcatcattttcctcctcttggcgcctctctgcctttcacgtgagccaccttcacaaatcccaaacggaaccctagatctctctttactatggtacggccaattcacgcctactcaaaaggagagggttcacgatttcatagaatcgcttaacttcgacgccaaggaaggtcttgacccgaaggtatcggcgtggtggaaagtggtggagagttaccaagagaggtttgaggtgaaggatatttaccgacagaagaagagtaacagaaccgtagctccgaggattaaggtgaaggttgtccggagttatgtggatgagaagatgaagtatggaaaggaattgacaatggggaacggtgagaaacttgttgagacggctatcggaaatatgtcgaaagtggttcccgtggtattactttcggcgcaagttagggctcatggcgtagggttttgtgacggaacttgccaacataacgccctagccaaaattaaagtattagacaacaaacaaaagaaaaatttgacgtcattacgtaaatcccacgcaggtcaaaaagaaccacgacggtacataatggtaagcaacccggaggtggaatgtcccggagagtgcgcttggcctttccacacggccgataagggtccacgtggcatgacctatcaaccggcaagtggagaagtcggagctgacgcactggttattcagctagccaccggtttagccgatttggccaccaatccagatctaaccaagtccttattcaaatctgagacgacaccgtacaacgatgacgtaaagaaaaaccatgaatcttcgtcaatgtatattgtggaccctgcaaccaagtgcactcgggtttttggatccggagcttttccaggtttcactggtagaattcgggttgacccgattactggtggagcctttaattcacacggaatcaaccacttgaaattcttgattccttctatttgggaccctaagaccaaatcttgctggactcctatgtaa

SEQ ID NO: 78490 - protein, 644 aa, Arabidopsis thaliana
  peptide (1)..(644): Ceres Seq. ID no. 12641933
MSRFPRRFIDDSSMEDAGISLCPSIHYRPINPNDLDRLEQIHRDIFPIKYESEFFQSVVNGVDIVSWAAVDRSRPDDHSDELIGFVTAKFVLAKDSEIDDLIHYDSSKGEETLIYILTLGVVETYRNRGIAMSLISEVIKYASGLSVCRGVYLHVIAHNNAAICLYKRLMFRCVRRLHGFYLINRHHFDAFLFVYFINGSRTPCSPLEVAMFVVNYMKSGIKSVASKLANKDEKVSLVENSSFASLAIIQKQNHQLRMSKNRLNDNFIYFPQKSLRKSPSKAKRTEKSFFHAVAMAMASASSSSSSISVIIFLLLAPLCLSREPPSQIPNGTLDLSLLWYGQFTPTQKERVHDFIESLNFDAKEGLDPKVSAWWKVVESYQERFEVKDIYRQKKSNRTVAPRIKVKVVRSYVDEKMKYGKELTMGNGEKLVETAIGNMSKVVPVVLLSAQVRAHGVGFCDGTCQHNALAKIKVLDNKQKKNLTSLRKSHAGQKEPRRYIMVSNPEVECPGECAWPFHTADKGPRGMTYQPASGEVGADALVIQLATGLADLATNPDLTKSLFKSETTPYNDDVKKNHESSSMYIVDPATKCTRVFGSGAFPGFTGRIRVDPITGGAFNSHGINHLKFLIPSIWDPKTKSCWTPM

SEQ ID NO: 78491 - protein, 631 aa, Arabidopsis thaliana
  peptide (1)..(631): Ceres Seq. ID no. 12641934
MEDAGISLCPSIHYRPINPNDLDRLEQIHRDIFPIKYESEFFQSVVNGVDIVSWAAVDRSRPDDHSDELIGFVTAKFVLAKDSEIDDLIHYDSSKGEETLIYILTLGVVETYRNRGIAMSLISEVIKYASGLSVCRGVYLHVIAHNNAAICLYKRLMFRCVRRLHGFYLINRHHFDAFLFVYFINGSRTPCSPLEVAMFVVNYMKSGIKSVASKLANKDEKVSLVENSSFASLAIIQKQNHQLRMSKNRLNDNFIYFPQKSLRKSPSKAKRTEKSFFHAVAMAMASASSSSSSISVIIFLLLAPLCLSREPPSQIPNGTLDLSLLWYGQFTPTQKERVHDFIESLNFDAKEGLDPKVSAWWKVVESYQERFEVKDIYRQKKSNRTVAPRIKVKVVRSYVDEKMKYGKELTMGNGEKLVETAIGNMSKVVPVVLLSAQVRAHGVGFCDGTCQHNALAKIKVLDNKQKKNLTSLRKSHAGQKEPRRYIMVSNPEVECPGECAWPFHTADKGPRGMTYQPASGEVGADALVIQLATGLADLATNPDLTKSLFKSETTPYNDDVKKNHESSSMYIVDPATKCTRVFGSGAFPGFTGRIRVDPITGGAFNSHGINHLKFLIPSIWDPKTKSCWTPM

SEQ ID NO: 78492 - protein, 513 aa, Arabidopsis thaliana
  peptide (1)..(513): Ceres Seq. ID no. 12641935
MSLISEVIKYASGLSVCRGVYLHVIAHNNAAICLYKRLMFRCVRRLHGFYLINRHHFDAFLFVYFINGSRTPCSPLEVAMFVVNYMKSGIKSVASKLANKDEKVSLVENSSFASLAIIQKQNHQLRMSKNRLNDNFIYFPQKSLRKSPSKAKRTEKSFFHAVAMAMASASSSSSSISVIIFLLLAPLCLSREPPSQIPNGTLDLSLLWYGQFTPTQKERVHDFIESLNFDAKEGLDPKVSAWWKVVESYQERFEVKDIYRQKKSNRTVAPRIKVKVVRSYVDEKMKYGKELTMGNGEKLVETAIGNMSKVVPVVLLSAQVRAHGVGFCDGTCQHNALAKIKVLDNKQKKNLTSLRKSHAGQKEPRRYIMVSNPEVECPGECAWPFHTADKGPRGMTYQPASGEVGADALVIQLATGLADLATNPDLTKSLFKSETTPYNDDVKKNHESSSMYIVDPATKCTRVFGSGAFPGFTGRIRVDPITGGAFNSHGINHLKFLIPSIWDPKTKSCWTPM

SEQ ID NO: 78493 - DNA, 3219 bp, Arabidopsis thaliana
  misc_feature (1)..(3219): Ceres Seq. ID no. 12641950
  misc_feature (1)..(3219): Ortholog of  Ceres SEQ ID NO 12388487 as cited in SEQ ID NO 20511
atggctgccgagaagttaagagacttgagtcagccgattgacgtcgttttactcgatgccactgttgaggccttttactctaccggatctaaggaagaaagagcttctgcggataatatcttgcgggatttgaaagctaatcctgatacttggcttcaagttgttcacattctacagaacaccagtagtacgcataccaaattttttgcccttcaggtgctggaaggtgttataaaatataggtggaatgcattacccgttgaacaacgtgatggaatgaaaaattacatctctgatgtcattgtgcagctgtcaagggatgaagcatctttcagaacggaaaggctttatgtcaacaagttaaatatcatcctggttcagatcgtgaaacaggagtggccggcaaagtggaaaagctttattcctgatttagttatagctgctaagactagtgaaactatctgtgagaattgcatggctattttgaaactcctaagtgaagaggtctttgatttctcaaaaggagagatgactcagcaaaagataaaagaactgaaacagtctctaaacagcgagtttcaactcattcacgagttatgcctatatgtcctctcagcttcccaaagacaagagcttatacgtgctacactctctgcattgcatgcctatctttcttggattccgttgggatacatatttgagtcccctttgctggagatcctacttaaattcttccctgttccagcatataggaatctcacacttcaatgtttgtcagaggttgcatctcttaattttggggacttctacgatatgcaatatgtcaagatgtacagcattttcatgaatcagttgcaggcaattctccctttaaatttaaatatccctgaggcatattcaactggaagtagtgaagaacaggcttttatccagaacttggcactgtttttcacttcgtttttcaagttacatataaaaatcctagaatctgcacccgaaaatatttctctattacttgcgggtctgggatatctcattagcatatcgtatgttgatgacactgaagtattcaaggtttgtttggactattggaattcattagtgttggagttgtttgggacgcgacatcatgcgtgtcaccctgcactaactccaagtctgtttggattgcaaatggctttccttcctagtacagttgatggtgttaaatctgaagtcactgagcggcaaaaactttattcagatccaatgtcaaaattaaggggactcatgattagtcgcacggctaagcctgaagaagtgttaattgttgaggacgaaaatgggaacattgttcgtgaaactatgaaggataatgatgttcttgtccagtataagataatgcgggagacattaatctacctctcacaccttgatcatgaagataccgaaaaacagatgttgagtaagctaagcaaacagttgagcggggaggaatgggcatggaacaatctaaacactttatgctgggctattgggtctatttctgggtccatggtagtagaacaggaaaacagatttctcgtgatggttatccgtgatttgttaagtttatgtgaagtcgtcaagggaaaagacaataaagctgttattaagtacgttgttggacaatattcaagattcttaagagcccattggaagtttttgaagacagttgtccataagctgtttgaatttatgcatgagacgcatcctggtgttcaggacatggcttgcgacacattcttaaaaattgttcagaagtgtaagcgaaaatttgttattgttcaggttggagaaagtgagccatttgtgtctgaacttctatcaggccttgctacaatcgtcggagatcttcaacctcatcagattcatacattttatgaatctgttggtagtatgatccaggcagaatcagatcctcagaagaggggggaatacctccagaggttgatggctctcccgaatcagaaatgggcagaaattataggacaagcacgtcaaagtgcagatatcctcaaggaaccagatgtgatacgtactgtgcttaatatcctccagacaaatacgcgcgttgcaacttcactaggaacattcttcctgtctcaaatttcgttgatcttcttggatatgctgaatgtttacagaatgtatagtgaactcgtttcaagcagcattgctaatggtggcccatacgcttcgagaacatctcttgttaaacttttaaggtctgttaagagggaaattcttaagctgatagagacgtttttagataaagctgaaaaccagccacacattggaaaacagtttgttccaccaatgatggatcaagtacttggcgactatgcaagaaatgttcctgatgcaagagaatcagaagtcttgtcactctttgcgacaataatcaacaaatacaaggttgtaatgcgagatgaagttcccctcatatttgaagctgttttccagtgcacattggagatgattactaagaattttgaagattacccagagcaccgtctcaagtttttctcgttacttcgtgctattgctacattttgtttccgtgcgttgatacagttgtcaagtgagcaactgaagctagtgatggattcagttatctgggcatttaggcatactgaaagaaatatcgctgaaactgggctcaatctcttgctcgagatgctgaaaaactttcagaaatctgacttttgtaacaaattctaccaaacatactttctgcaaattgagcaagaagtatttgctgtcttgaccgataccttccacaagcctgggttcaagttgcatgtgttggtgttgcagcacttatttagcctggttgagagcggatcattggcagaaccattgtgggatgctgcaacggtaccgcatccttattcaaataatgtcgcctttgtgcttgagtacaccaccaagcttctaagctcatcattccccaacatgactacaacagaggtgacacagtttgtgaatggactttacgagtcgagaaacgatgttggcagatttaaggataacatacgcgacttccttatacagtccaaggaattttctgctcaggataacaaagatttatatgctgaggaagctgctgcccaaatggagagagagagacaaagaatgctttcgattcctggacttatagctcccagcgaaattcaagacgacatggccgattcttaa

SEQ ID NO: 78494 - protein, 1072 aa, Arabidopsis thaliana
  peptide (1)..(1072): Ceres Seq. ID no. 12641951
MAAEKLRDLSQPIDVVLLDATVEAFYSTGSKEERASADNILRDLKANPDTWLQVVHILQNTSSTHTKFFALQVLEGVIKYRWNALPVEQRDGMKNYISDVIVQLSRDEASFRTERLYVNKLNIILVQIVKQEWPAKWKSFIPDLVIAAKTSETICENCMAILKLLSEEVFDFSKGEMTQQKIKELKQSLNSEFQLIHELCLYVLSASQRQELIRATLSALHAYLSWIPLGYIFESPLLEILLKFFPVPAYRNLTLQCLSEVASLNFGDFYDMQYVKMYSIFMNQLQAILPLNLNIPEAYSTGSSEEQAFIQNLALFFTSFFKLHIKILESAPENISLLLAGLGYLISISYVDDTEVFKVCLDYWNSLVLELFGTRHHACHPALTPSLFGLQMAFLPSTVDGVKSEVTERQKLYSDPMSKLRGLMISRTAKPEEVLIVEDENGNIVRETMKDNDVLVQYKIMRETLIYLSHLDHEDTEKQMLSKLSKQLSGEEWAWNNLNTLCWAIGSISGSMVVEQENRFLVMVIRDLLSLCEVVKGKDNKAVIKYVVGQYSRFLRAHWKFLKTVVHKLFEFMHETHPGVQDMACDTFLKIVQKCKRKFVIVQVGESEPFVSELLSGLATIVGDLQPHQIHTFYESVGSMIQAESDPQKRGEYLQRLMALPNQKWAEIIGQARQSADILKEPDVIRTVLNILQTNTRVATSLGTFFLSQISLIFLDMLNVYRMYSELVSSSIANGGPYASRTSLVKLLRSVKREILKLIETFLDKAENQPHIGKQFVPPMMDQVLGDYARNVPDARESEVLSLFATIINKYKVVMRDEVPLIFEAVFQCTLEMITKNFEDYPEHRLKFFSLLRAIATFCFRALIQLSSEQLKLVMDSVIWAFRHTERNIAETGLNLLLEMLKNFQKSDFCNKFYQTYFLQIEQEVFAVLTDTFHKPGFKLHVLVLQHLFSLVESGSLAEPLWDAATVPHPYSNNVAFVLEYTTKLLSSSFPNMTTTEVTQFVNGLYESRNDVGRFKDNIRDFLIQSKEFSAQDNKDLYAEEAAAQMERERQRMLSIPGLIAPSEIQDDMADS

SEQ ID NO: 78495 - protein, 980 aa, Arabidopsis thaliana
  peptide (1)..(980): Ceres Seq. ID no. 12641952
MKNYISDVIVQLSRDEASFRTERLYVNKLNIILVQIVKQEWPAKWKSFIPDLVIAAKTSETICENCMAILKLLSEEVFDFSKGEMTQQKIKELKQSLNSEFQLIHELCLYVLSASQRQELIRATLSALHAYLSWIPLGYIFESPLLEILLKFFPVPAYRNLTLQCLSEVASLNFGDFYDMQYVKMYSIFMNQLQAILPLNLNIPEAYSTGSSEEQAFIQNLALFFTSFFKLHIKILESAPENISLLLAGLGYLISISYVDDTEVFKVCLDYWNSLVLELFGTRHHACHPALTPSLFGLQMAFLPSTVDGVKSEVTERQKLYSDPMSKLRGLMISRTAKPEEVLIVEDENGNIVRETMKDNDVLVQYKIMRETLIYLSHLDHEDTEKQMLSKLSKQLSGEEWAWNNLNTLCWAIGSISGSMVVEQENRFLVMVIRDLLSLCEVVKGKDNKAVIKYVVGQYSRFLRAHWKFLKTVVHKLFEFMHETHPGVQDMACDTFLKIVQKCKRKFVIVQVGESEPFVSELLSGLATIVGDLQPHQIHTFYESVGSMIQAESDPQKRGEYLQRLMALPNQKWAEIIGQARQSADILKEPDVIRTVLNILQTNTRVATSLGTFFLSQISLIFLDMLNVYRMYSELVSSSIANGGPYASRTSLVKLLRSVKREILKLIETFLDKAENQPHIGKQFVPPMMDQVLGDYARNVPDARESEVLSLFATIINKYKVVMRDEVPLIFEAVFQCTLEMITKNFEDYPEHRLKFFSLLRAIATFCFRALIQLSSEQLKLVMDSVIWAFRHTERNIAETGLNLLLEMLKNFQKSDFCNKFYQTYFLQIEQEVFAVLTDTFHKPGFKLHVLVLQHLFSLVESGSLAEPLWDAATVPHPYSNNVAFVLEYTTKLLSSSFPNMTTTEVTQFVNGLYESRNDVGRFKDNIRDFLIQSKEFSAQDNKDLYAEEAAAQMERERQRMLSIPGLIAPSEIQDDMADS

SEQ ID NO: 78496 - protein, 914 aa, Arabidopsis thaliana
  peptide (1)..(914): Ceres Seq. ID no. 12641953
MAILKLLSEEVFDFSKGEMTQQKIKELKQSLNSEFQLIHELCLYVLSASQRQELIRATLSALHAYLSWIPLGYIFESPLLEILLKFFPVPAYRNLTLQCLSEVASLNFGDFYDMQYVKMYSIFMNQLQAILPLNLNIPEAYSTGSSEEQAFIQNLALFFTSFFKLHIKILESAPENISLLLAGLGYLISISYVDDTEVFKVCLDYWNSLVLELFGTRHHACHPALTPSLFGLQMAFLPSTVDGVKSEVTERQKLYSDPMSKLRGLMISRTAKPEEVLIVEDENGNIVRETMKDNDVLVQYKIMRETLIYLSHLDHEDTEKQMLSKLSKQLSGEEWAWNNLNTLCWAIGSISGSMVVEQENRFLVMVIRDLLSLCEVVKGKDNKAVIKYVVGQYSRFLRAHWKFLKTVVHKLFEFMHETHPGVQDMACDTFLKIVQKCKRKFVIVQVGESEPFVSELLSGLATIVGDLQPHQIHTFYESVGSMIQAESDPQKRGEYLQRLMALPNQKWAEIIGQARQSADILKEPDVIRTVLNILQTNTRVATSLGTFFLSQISLIFLDMLNVYRMYSELVSSSIANGGPYASRTSLVKLLRSVKREILKLIETFLDKAENQPHIGKQFVPPMMDQVLGDYARNVPDARESEVLSLFATIINKYKVVMRDEVPLIFEAVFQCTLEMITKNFEDYPEHRLKFFSLLRAIATFCFRALIQLSSEQLKLVMDSVIWAFRHTERNIAETGLNLLLEMLKNFQKSDFCNKFYQTYFLQIEQEVFAVLTDTFHKPGFKLHVLVLQHLFSLVESGSLAEPLWDAATVPHPYSNNVAFVLEYTTKLLSSSFPNMTTTEVTQFVNGLYESRNDVGRFKDNIRDFLIQSKEFSAQDNKDLYAEEAAAQMERERQRMLSIPGLIAPSEIQDDMADS

SEQ ID NO: 78497 - DNA, 423 bp, Arabidopsis thaliana
  misc_feature (1)..(423): Ceres Seq. ID no. 12641968
  misc_feature (1)..(423): Ortholog of  Ceres SEQ ID NO 12610046 as cited in SEQ ID NO 55841
  misc_feature (1)..(423): Ortholog of  Ceres SEQ ID NO 13663630 as cited in SEQ ID NO 67065
atggcttccttggagatgaatgacctaaaaaagatagggctaggtttgactggatttggtgtgttctttacattcctgggagtgatatttgtgtttgacaagggactcatagccatggggaacatcctcttcttagctggtgtgactctaaccattggaatcaacccagcaatccaattctttactaaacggcagaattttaagggtactatatcatttggattgggtttcttgttggttgtgtttggatggcctattttcggtttgcttcttgaatcatatgggttccttgtgctcttcagtggtttctggcctacacttgccgtcttccttcaaaggatacctctattaggctggcttttgcagcaaccatacatcagatcgttgctggatcgctaccgtggaaggcgtgtccctgtctaa

SEQ ID NO: 78498 - protein, 140 aa, Arabidopsis thaliana
  peptide (1)..(140): Ceres Seq. ID no. 12641969
MASLEMNDLKKIGLGLTGFGVFFTFLGVIFVFDKGLIAMGNILFLAGVTLTIGINPAIQFFTKRQNFKGTISFGLGFLLVVFGWPIFGLLLESYGFLVLFSGFWPTLAVFLQRIPLLGWLLQQPYIRSLLDRYRGRRVPV

SEQ ID NO: 78499 - protein, 135 aa, Arabidopsis thaliana
  peptide (1)..(135): Ceres Seq. ID no. 12641970
MNDLKKIGLGLTGFGVFFTFLGVIFVFDKGLIAMGNILFLAGVTLTIGINPAIQFFTKRQNFKGTISFGLGFLLVVFGWPIFGLLLESYGFLVLFSGFWPTLAVFLQRIPLLGWLLQQPYIRSLLDRYRGRRVPV

SEQ ID NO: 78500 - protein, 102 aa, Arabidopsis thaliana
  peptide (1)..(102): Ceres Seq. ID no. 12641971
MGNILFLAGVTLTIGINPAIQFFTKRQNFKGTISFGLGFLLVVFGWPIFGLLLESYGFLVLFSGFWPTLAVFLQRIPLLGWLLQQPYIRSLLDRYRGRRVPV

SEQ ID NO: 78501 - DNA, 969 bp, Arabidopsis thaliana
  misc_feature (1)..(969): Ceres Seq. ID no. 12641980
  misc_feature (1)..(969): Ortholog of  Ceres SEQ ID NO 13585342 as cited in SEQ ID NO 63601
atggtgcttctacttgtgattgtgggattaataagctattatgtctacaagtccataacaccgccgccaccgattccactgccggaaaatgtttccgagatatctccaagaatcaagctcaatgatggaaggcatttagcgtacaaggaattagggtttccaaaggacaaagccaaaaacaaaataataatcgtccacggaaatggaaattccaaagacgtcgatttatacatcacacaggaaatgattgatgaattcaagatatactttttgttcttcgatagagctggttatggagaaagcgatcctaatccaacacgaacgctgaaaacagatacatacgatatcgaagaacttgctgacaaattgcaagtcggtccaaagttccacgttataggcatgtcacttggagcttaccctgtttacggttgcctcaaatacattcctaataggctcagtggagcttcgttggttgttccgttagtgaatttttggtggagccgtgtgcctcaaaacttattgaatgcagcgatgaagaaattgccaattggatttcaattgacacttcgagtcgcacactactctccatggttgttatattggtggatgactcagaaatggttcccgaatagtcgaaatcccaaagatactatgaccgagcgcgacctagaactcgagtctgctttacgacaaggtggatatgtgaccacacaacaagacatcatagcgggttacgggaattgggaatttgatccaaccgaattgaagaatccgttttcggatagtaacaaagggtcggttcatatgtggtgtgcactcgaagacaaacaaatttcacgcgatgttttactctatatatgcgataaactgccatggataaagctccatgaggtccctgatggtggacattatattatccatgagaagcggcattttgaagccattatcaaagccgcttgtagtgactag

SEQ ID NO: 78502 - protein, 322 aa, Arabidopsis thaliana
  peptide (1)..(322): Ceres Seq. ID no. 12641981
MVLLLVIVGLISYYVYKSITPPPPIPLPENVSEISPRIKLNDGRHLAYKELGFPKDKAKNKIIIVHGNGNSKDVDLYITQEMIDEFKIYFLFFDRAGYGESDPNPTRTLKTDTYDIEELADKLQVGPKFHVIGMSLGAYPVYGCLKYIPNRLSGASLVVPLVNFWWSRVPQNLLNAAMKKLPIGFQLTLRVAHYSPWLLYWWMTQKWFPNSRNPKDTMTERDLELESALRQGGYVTTQQDIIAGYGNWEFDPTELKNPFSDSNKGSVHMWCALEDKQISRDVLLYICDKLPWIKLHEVPDGGHYIIHEKRHFEAIIKAACSD

SEQ ID NO: 78503 - protein, 241 aa, Arabidopsis thaliana
  peptide (1)..(241): Ceres Seq. ID no. 12641982
MIDEFKIYFLFFDRAGYGESDPNPTRTLKTDTYDIEELADKLQVGPKFHVIGMSLGAYPVYGCLKYIPNRLSGASLVVPLVNFWWSRVPQNLLNAAMKKLPIGFQLTLRVAHYSPWLLYWWMTQKWFPNSRNPKDTMTERDLELESALRQGGYVTTQQDIIAGYGNWEFDPTELKNPFSDSNKGSVHMWCALEDKQISRDVLLYICDKLPWIKLHEVPDGGHYIIHEKRHFEAIIKAACSD

SEQ ID NO: 78504 - protein, 189 aa, Arabidopsis thaliana
  peptide (1)..(189): Ceres Seq. ID no. 12641983
MSLGAYPVYGCLKYIPNRLSGASLVVPLVNFWWSRVPQNLLNAAMKKLPIGFQLTLRVAHYSPWLLYWWMTQKWFPNSRNPKDTMTERDLELESALRQGGYVTTQQDIIAGYGNWEFDPTELKNPFSDSNKGSVHMWCALEDKQISRDVLLYICDKLPWIKLHEVPDGGHYIIHEKRHFEAIIKAACSD

SEQ ID NO: 78505 - DNA, 969 bp, Arabidopsis thaliana
  misc_feature (1)..(969): Ceres Seq. ID no. 12641984
  misc_feature (1)..(969): Ortholog of  Ceres SEQ ID NO 13585342 as cited in SEQ ID NO 63601
atgttgtttctaaccgcggctgtctgtttaatatgcttttacgtctacaagtccgtgaaaccgccgccgccaattccattgccggagaatgtttctgagatatctccaagaatcaagctcaacgatggcagatatttagcttacaaagaattagggtttcctaaagacaaagccaaaaataagattatcattctccatggattcgggagttccaagttagtggatttaaaaatcacacaggaaatgatcgacgaattcgagatatacttcttgttgttcgatagagctggttatggagaaagcgatcctcatccatcacgaacactaaaaacggatacatatgacatcgaagaacttgctgacaaattgcaaatcggtccaaagttccatgtcctaggaatgtcactcggggcttatccagtttacggctgtctcaagtacattcctcatagactaagtggagcaacgttggtggttccgatactgaatttttggtggagttgtctgcctctaaacttgtcgatttcagcgttcaagaaattgccaattcaaaatcagtggacacttggagtcgcacactactttccatggttattatattggtggatgactcagaaatggttttccccatttagtcagaatcctagagaaactatgaccgagcgcgatatagagctcgaatccgcactacgacaaggtgaatatgtgagcatgcaacgagacatcattgcgggttacgagaattgggagtttgatccaaccgaactgagcaatccattttcagatgataacaaagggtcagttcacatttggtgtgcactcgaagacaaacaaatttcgcatgaggttttactctacttatgtgataagcttccatggataaagcttcatgaagtccctgatgctggacatcttattatccatgagaagcagcattttgaagacattattaaagccgcttgtagttga

SEQ ID NO: 78506 - protein, 322 aa, Arabidopsis thaliana
  peptide (1)..(322): Ceres Seq. ID no. 12641985
MLFLTAAVCLICFYVYKSVKPPPPIPLPENVSEISPRIKLNDGRYLAYKELGFPKDKAKNKIIILHGFGSSKLVDLKITQEMIDEFEIYFLLFDRAGYGESDPHPSRTLKTDTYDIEELADKLQIGPKFHVLGMSLGAYPVYGCLKYIPHRLSGATLVVPILNFWWSCLPLNLSISAFKKLPIQNQWTLGVAHYFPWLLYWWMTQKWFSPFSQNPRETMTERDIELESALRQGEYVSMQRDIIAGYENWEFDPTELSNPFSDDNKGSVHIWCALEDKQISHEVLLYLCDKLPWIKLHEVPDAGHLIIHEKQHFEDIIKAACS

SEQ ID NO: 78507 - protein, 241 aa, Arabidopsis thaliana
  peptide (1)..(241): Ceres Seq. ID no. 12641986
MIDEFEIYFLLFDRAGYGESDPHPSRTLKTDTYDIEELADKLQIGPKFHVLGMSLGAYPVYGCLKYIPHRLSGATLVVPILNFWWSCLPLNLSISAFKKLPIQNQWTLGVAHYFPWLLYWWMTQKWFSPFSQNPRETMTERDIELESALRQGEYVSMQRDIIAGYENWEFDPTELSNPFSDDNKGSVHIWCALEDKQISHEVLLYLCDKLPWIKLHEVPDAGHLIIHEKQHFEDIIKAACS

SEQ ID NO: 78508 - protein, 189 aa, Arabidopsis thaliana
  peptide (1)..(189): Ceres Seq. ID no. 12641987
MSLGAYPVYGCLKYIPHRLSGATLVVPILNFWWSCLPLNLSISAFKKLPIQNQWTLGVAHYFPWLLYWWMTQKWFSPFSQNPRETMTERDIELESALRQGEYVSMQRDIIAGYENWEFDPTELSNPFSDDNKGSVHIWCALEDKQISHEVLLYLCDKLPWIKLHEVPDAGHLIIHEKQHFEDIIKAACS

SEQ ID NO: 78509 - DNA, 1070 bp, Arabidopsis thaliana
  misc_feature (1)..(1070): Ceres Seq. ID no. 12642101
  misc_feature (1)..(1070): Ortholog of  Ceres SEQ ID NO 13596762 as cited in SEQ ID NO 63019
aaacccaaacacataaaaaaatgagtcaacacaacatcttagaagctctaaatgtccgggtcgtgggtacgggtgatcggatcctgtttttggcccatggattcggtactgaccaatcagcttggcacttgatccttccttacttcactcaaaactacagagtcgtcctctatgacctagtttgcgccggcagtgtcaaccccgattacttcgatttcaatcgttacacaactctcgatccttacgtcgatgatcttctcaacatcgttgattcactcggaatccaaaactgtgcttacgttggtcactctgtttccgctatgatcggaatcatcgcttcgattcgtcggccggagcttttctccaagcttatcttgatcggattttcgcctaggtttctcaacgacgaggattatcatggaggattcgaagaaggtgagattgagaaagttttctcagctatggaagctaattacgaagcttgggttcatggatttgctccgcttgctgttggagctgatgttccggcggcggttagagaatttagccggactttgtttaatatgcgtccggatatatctctgtttgtttcgaggacggttttcaacagcgatctgagaggtgtgcttgggttagttagagttccgacgtgtgtgattcagacggcgaaggatgtttctgtgccggcttcggtggcggagtatcttaggtctcatctcggtggagatactactgtggagactcttaaaactgaaggacatttgccgcagcttagtgctccggcgcagcttgctcagtttctccggcgagctcttcctcggtgacttttttttatagatataaaaagagaacaataaaatataattggtggaatatgggtttagtggggtccacgtatcgaagaaaagaagggcctctatttgtggaggacagtttggcattgtcacaaatctagtaagataagattgttcacttgacacgtgactttcgcttttttatcactttttttcttgctctcttcattagtttataatcacaagtttatttcataaaataattggagaataacc

SEQ ID NO: 78510 - protein, 273 aa, Arabidopsis thaliana
  peptide (1)..(273): Ceres Seq. ID no. 12642102
TQTHKKMSQHNILEALNVRVVGTGDRILFLAHGFGTDQSAWHLILPYFTQNYRVVLYDLVCAGSVNPDYFDFNRYTTLDPYVDDLLNIVDSLGIQNCAYVGHSVSAMIGIIASIRRPELFSKLILIGFSPRFLNDEDYHGGFEEGEIEKVFSAMEANYEAWVHGFAPLAVGADVPAAVREFSRTLFNMRPDISLFVSRTVFNSDLRGVLGLVRVPTCVIQTAKDVSVPASVAEYLRSHLGGDTTVETLKTEGHLPQLSAPAQLAQFLRRALPR

SEQ ID NO: 78511 - protein, 267 aa, Arabidopsis thaliana; identical to SEQ ID NO: 27265
  peptide (1)..(267): Ceres Seq. ID no. 12642103

SEQ ID NO: 78512 - protein, 167 aa, Arabidopsis thaliana; identical to SEQ ID NO: 27266
  peptide (1)..(167): Ceres Seq. ID no. 12642104

SEQ ID NO: 78513 - DNA, 1487 bp, Arabidopsis thaliana
  misc_feature (1)..(1487): Ceres Seq. ID no. 12642105
  misc_feature (1)..(1487): Ortholog of  Ceres SEQ ID NO 13582619 as cited in SEQ ID NO 56520
  misc_feature (1)..(1487): Ortholog of  Ceres SEQ ID NO 13660872 as cited in SEQ ID NO 60830
  misc_feature (1)..(1487): Ortholog of  Ceres SEQ ID NO 12616221 as cited in SEQ ID NO 63291
atacttttattttcatttcctttaactgcatagttcttcctcaaattgctcatacctttgcttctctttctttctttattcaacctcttatttcttcttcagcaccaacgtgtatctgcagtaaacacatatccatcgatcgatctcctcaaaaagttattgttttcttgaaggatttttcttgttcttgatcaagcatacatatatatagatggtggaagaaggcggcgtagttgtgaatcaaggaggagatcaggaggtggtggatttgcctccggggtttcggtttcaccctactgatgaagagataataactcactacctcaaagagaaggtcttcaacatccgatttaccgcggcagcgattggtcaagccgacctcaacaagaacgagccatgggatctaccaaagattgcaaagatgggggagaaggagttttactttttctgccagagggatcggaagtatccgaccgggatgaggacgaaccgtgcgaccgtgtctggttattggaaggcgaccgggaaggacaaggagatctttagaggcaaaggttgtcttgttgggatgaagaaaacacttgttttctatacaggaagagctcctaaaggtgaaaagaccaattgggttatgcatgaatatcgtcttgatggaaaatattcttatcataacctccccaaaaccgcaagggatgaatgggtggtgtgtagggtttttcacaagaacgctcctagtactacaatcactactacaaaacaactctcaaggattgattctcttgataacattgatcatctcttagacttctcatctctccctcctctcatagatccgggtttcttgggtcaacccggcccaagcttctccggtgcccgtcaacaacacgatctcaaacctgttctccaccatcctacaaccgcaccagtcgacaacacttaccttcctacccaagctctcaatttcccttaccactcggtccataattccggatctgatttcggctacggggcaggttcaggcaataataacaaaggtatgatcaagttggagcattctcttgtgagtgtgtctcaagaaaccggtttgagttccgatgtgaacacaaccgcaacgccagagatatcttcttatccaatgatgatgaatccggcaatgatggatggtagcaagtcagcgtgtgatggtcttgatgacttgatcttctgggaagatttatatactagctaaatttgggaaaaggttatttgttaattgtgattgaagagtggcatattgattactcgtctagtgtttttaatcgtgtaattagttcgtatataatatacatgtacataagatcattaggtttattaggcattggactttagttcggtgattgcttacctagtttttagcttgagaaaaaaggctgtcattggggttatgtttctttgtgattaacttgtacatatatacatttaaattattcgtatggtttatttcgttt

SEQ ID NO: 78514 - protein, 338 aa, Arabidopsis thaliana; identical to SEQ ID NO: 41234
  peptide (1)..(338): Ceres Seq. ID no. 12642106

SEQ ID NO: 78515 - protein, 268 aa, Arabidopsis thaliana; identical to SEQ ID NO: 41235
  peptide (1)..(268): Ceres Seq. ID no. 12642107

SEQ ID NO: 78516 - protein, 249 aa, Arabidopsis thaliana; identical to SEQ ID NO: 41236
  peptide (1)..(249): Ceres Seq. ID no. 12642108

SEQ ID NO: 78517 - DNA, 978 bp, Arabidopsis thaliana
  misc_feature (1)..(978): Ceres Seq. ID no. 12642128
  misc_feature (1)..(978): Ortholog of  Ceres SEQ ID NO 14307431 as cited in SEQ ID NO 54422
atggcctatgaggaagctcgcaagctccgtcttcaagagaatcacaagcgatttcaagttacccttcatcgttaccgcgtttcttcttctcctccttctctgattcgtttatcaattttgattattgaatctcaggatttaggaatttcccagatttctaagactctgactcagattacaaagaaaacgcctcagcttcttcagcagcgtaatcacaaacccatcgataaagccctcttagctactgctgaaccaagacgctcttcccgtgttcgtaccgtaatttcttcctatcgcgatgatgtcgtcgtagacactggtcgtacttcgaatctgaggagatcgcgacatagctctacatgggcgacctacatttctcgacctctccatgagtgcaagtttgcatcttatgaagaaaaggttggagcattcaaggctgcagagaagttccagaggagccttaaatctccacatccttactttgtgaaatctatggttcgctcccatgtttacagttgcttttggctggatttcgtgttagtaccttacttgacctacatgggtttgcttgcaaatttcaaggggcttccttcaagattctgtgcagacaattttcctgaggaaactatggaaatagaactagaggatgaagaaggcgaagtgtatgaagcagtgtacattggtagaagagctggactcagtggtggttggaaaaggtttgctcttgatcataaattggatgatggtgatgctctactctttgaattggttgaaccaaagaagttcaagatctatgtgtttaaaggaaatgagaacgctaatcttacaagcgccagaaagagaggcagagcaacgacgccaagtgaagaagaagaagaagaagaagataaggatgttgaagaatcaggtgatgaggaacacagctcaagagccactaagagatcatccgtaaggttactaaggaagaggaaagcataa

SEQ ID NO: 78518 - protein, 325 aa, Arabidopsis thaliana
  peptide (1)..(325): Ceres Seq. ID no. 12642129
MAYEEARKLRLQENHKRFQVTLHRYRVSSSPPSLIRLSILIIESQDLGISQISKTLTQITKKTPQLLQQRNHKPIDKALLATAEPRRSSRVRTVISSYRDDVVVDTGRTSNLRRSRHSSTWATYISRPLHECKFASYEEKVGAFKAAEKFQRSLKSPHPYFVKSMVRSHVYSCFWLDFVLVPYLTYMGLLANFKGLPSRFCADNFPEETMEIELEDEEGEVYEAVYIGRRAGLSGGWKRFALDHKLDDGDALLFELVEPKKFKIYVFKGNENANLTSARKRGRATTPSEEEEEEEDKDVEESGDEEHSSRATKRSSVRLLRKRKA

SEQ ID NO: 78519 - DNA, 1386 bp, Arabidopsis thaliana
  misc_feature (1)..(1386): Ceres Seq. ID no. 12642144
  misc_feature (1)..(1386): Ortholog of  Ceres SEQ ID NO 15180036 as cited in SEQ ID NO 0
attattctcttccccacttgattgcgatttgagagagataaaggtcgagaaagtcttttcatctccttcaccctcatcgtttcgcgtctcttctcttctctctcagaaaatgctcatcagaaattgtctcctttttgtttccttgatgtgttttctcttctaatctccggtgaaacaaagaacaaaggattcataagacacaaagcagagaaggagagagagatacgaggcttttcttcatctttatggcttctatgaccgagaaggaagctatggtggatccttttctggtcgaggctcttcaaaatcctcgtcatcgtctcaccattttgcgaatggagcttgatatacagaagttctttcaaaaccctgagcagcttcagttcgaattcccgccttttccaacatcgtacctgcgtcttgctgcacatcgagttgctcagcattatggactagtaaccatggctttggacaatggtactggtgcaggagatggatccgataacagaatcctcgtgacgaagacagcggaaagtagatttccttatgtctgcttatccgaaatccctgtgaaacaacctgagaatggtagacccgagggtttcaaaatcgctatcaagcctagacccaagagaggatctggttgtgggggtagcggatcaggagtacagcagaatcttttgagaagtgttgaggagagaaaggaagagtatgataaagctcgcgctcggatctttaatagtcctagcagttccgactctgaagattcttcatcactacgacctccctctcttgaagtgagaaacacatgtataaaccggaatgagactgaagtggcggttaataatagtcctgtcgatgctgttactcgagactctggacggacttctcgagtagccattatcagagatagagagaaagatcgatatgacccggattatgacaggagctatgacaggtatgtcgtggatccggcctacaggtacgttagggttatgccgtctggccaaagcttcagtccaatgccaatccatattccgtttcacgatgggtttttcccgcatatgccaagaggtcatcaagccaacctaaactatgggcatccgcttaaccctgctttgagtccctttactcataacgtggcttcatatacaccgtggccaaactcacccgttatgaactatgcacagccgttgaacggctcagacacaaatctttacaggtatccttctgcaagtaatccctgacagcaagagtagtgtttgagtacttcaatgtctgtaatgaaaagcagattctatagatattagcctttaggagctccctgttctgttccgaacaatggctacttctttcttatataacaaacaagacatctactttttt

SEQ ID NO: 78520 - protein, 333 aa, Arabidopsis thaliana
  peptide (1)..(333): Ceres Seq. ID no. 12642145
MASMTEKEAMVDPFLVEALQNPRHRLTILRMELDIQKFFQNPEQLQFEFPPFPTSYLRLAAHRVAQHYGLVTMALDNGTGAGDGSDNRILVTKTAESRFPYVCLSEIPVKQPENGRPEGFKIAIKPRPKRGSGCGGSGSGVQQNLLRSVEERKEEYDKARARIFNSPSSSDSEDSSSLRPPSLEVRNTCINRNETEVAVNNSPVDAVTRDSGRTSRVAIIRDREKDRYDPDYDRSYDRYVVDPAYRYVRVMPSGQSFSPMPIHIPFHDGFFPHMPRGHQANLNYGHPLNPALSPFTHNVASYTPWPNSPVMNYAQPLNGSDTNLYRYPSASNP

SEQ ID NO: 78521 - protein, 330 aa, Arabidopsis thaliana
  peptide (1)..(330): Ceres Seq. ID no. 12642146
MTEKEAMVDPFLVEALQNPRHRLTILRMELDIQKFFQNPEQLQFEFPPFPTSYLRLAAHRVAQHYGLVTMALDNGTGAGDGSDNRILVTKTAESRFPYVCLSEIPVKQPENGRPEGFKIAIKPRPKRGSGCGGSGSGVQQNLLRSVEERKEEYDKARARIFNSPSSSDSEDSSSLRPPSLEVRNTCINRNETEVAVNNSPVDAVTRDSGRTSRVAIIRDREKDRYDPDYDRSYDRYVVDPAYRYVRVMPSGQSFSPMPIHIPFHDGFFPHMPRGHQANLNYGHPLNPALSPFTHNVASYTPWPNSPVMNYAQPLNGSDTNLYRYPSASNP

SEQ ID NO: 78522 - protein, 324 aa, Arabidopsis thaliana
  peptide (1)..(324): Ceres Seq. ID no. 12642147
MVDPFLVEALQNPRHRLTILRMELDIQKFFQNPEQLQFEFPPFPTSYLRLAAHRVAQHYGLVTMALDNGTGAGDGSDNRILVTKTAESRFPYVCLSEIPVKQPENGRPEGFKIAIKPRPKRGSGCGGSGSGVQQNLLRSVEERKEEYDKARARIFNSPSSSDSEDSSSLRPPSLEVRNTCINRNETEVAVNNSPVDAVTRDSGRTSRVAIIRDREKDRYDPDYDRSYDRYVVDPAYRYVRVMPSGQSFSPMPIHIPFHDGFFPHMPRGHQANLNYGHPLNPALSPFTHNVASYTPWPNSPVMNYAQPLNGSDTNLYRYPSASNP

SEQ ID NO: 78523 - DNA, 908 bp, Arabidopsis thaliana
  misc_feature (1)..(908): Ceres Seq. ID no. 12642178
  misc_feature (1)..(908): Ortholog of  Ceres SEQ ID NO 14306223 as cited in SEQ ID NO 56928
  misc_feature (1)..(908): Ortholog of  Ceres SEQ ID NO 12784326 as cited in SEQ ID NO 61717
aaaatccttcaagaatcgcttcatcttcttcttcttcaacaaatcgagtcctttttctgataactcatttcgatttcagaaactcgccaagaactggatactctggcggaatcagagattaagaaccgagacgtggttctgaaactgtatgaagccctgagatctcgcgacgtcaaatctgtgcaccagatcttaaccccagatctggagtattggttccacggtcctccgccgcaccagtttttgatgcgcgtactcaccggaggtgtctctccgtcttcttcctccttcgaattcgtacctctctccgtcgtttccttcggatctaccgtaatcgcggaaggctgcgacgccgcgacatcgatttcttggatccacgcttggactgtagcgaatgggataatcacacaggtgagggagtactctaacacttctctcaccgtcacacggatcggtaacgttgttgctggacgacgctccgctgagattgcgcctccgtcgcattgttcctccgtgtgggaaagccaattctcgggtcgggctggtaaacccgtacccggtttggttctggcgatttgaaagagtttggtaaagtaagtaacagccacgtcaggagaataactaaataaaggctgcttacgtgtctgtgtgtggttggtttgtttgttgtatgggttaaaaaggattttgttgctgttttaaacgcggtgtgggcttctggggctacggtcgcgtttggctgtcgctagtttttttttttttttaagttgtttgtctgaaaattcgtgtgggtttgtgttttttagtgggagcaagtatggggaaacccaaatcgacttgttgtcccgttgcgtttgatgtaacgtttgcttatgttataattgaaataaaaaagtgcttttgggatc

SEQ ID NO: 78524 - protein, 110 aa, Arabidopsis thaliana; identical to SEQ ID NO: 26872
  peptide (1)..(110): Ceres Seq. ID no. 12642179

SEQ ID NO: 78525 - DNA, 1110 bp, Arabidopsis thaliana
  misc_feature (1)..(1110): Ceres Seq. ID no. 12642198
  misc_feature (1)..(1110): Ortholog of  Ceres SEQ ID NO 14304830 as cited in SEQ ID NO 54884
  misc_feature (1)..(1110): Ortholog of  Ceres SEQ ID NO 14316297 as cited in SEQ ID NO 57465
  misc_feature (1)..(1110): Ortholog of  Ceres SEQ ID NO 12784351 as cited in SEQ ID NO 60968
  misc_feature (1)..(1110): Ortholog of  Ceres SEQ ID NO 13584213 as cited in SEQ ID NO 63690
gagacgttcatgcatttaatctcgcaccttacgacaaagagtgagagagaggatcgctcaggtttgttcatcttcaccggacgattagcttttgcggtgggagaaagaacggcctgtcttcagctctgaaacagaggaacagagaggttaggaaggagacaatggttggacccgcgcggcctcagatcgttttgtttggatcttccattgttcagatgagctttggccatggtggttggggcgccattctttccgaggtctacgctcgtaaggccgacatcattctgcgaggatattatggatggaactcttctcgtgctttggaagttgtcgaccaagtgttccccaaggatgctgcagtacaaccttctctggtcattgtctattttggaggaaacgactcaatggcgcctcactcgtctggactaggacctcatgtaccacttactgaatatgttgataacatgaagaagatcgctcttcatcttcagagcctttcagacttcacccgaatcatatttcttagttctcctccagtggatgaggctaaagttcgccagaaccaaagcccatacttgagcgaggtaatccgcacaaacgacctctgcaagacttattcagatgcttgtgtagagctgtgccaagaactcggcctagaagtagttgatctcttctctacttttcagaaagcagatgactggaaaactgtttgcttcacagacgggattcatttgtcagcacaaggaagcaaaatagtagcgggagagatactaagagtggttaaagaagcggaatggcatccatcacttcactggaaatcaatgccaacagaattcgcagatgactctccttatgatcttgtatcagcagatggcaaacagacagtaaattcttcagaatggacttatttctgggaagaacaatgggactaaacatttcaacacacacaacaacaacaacaagaccctatcttcacataattcactgtcttaatgtgataaagctttgctttagattgtttacattacaagtgtctctgctataatctgattcagtttcgctcgaaaaacgttaccattttaaagtttatacttatctaaatcttaaatc

SEQ ID NO: 78526 - protein, 256 aa, Arabidopsis thaliana
  peptide (1)..(256): Ceres Seq. ID no. 12642199
MVGPARPQIVLFGSSIVQMSFGHGGWGAILSEVYARKADIILRGYYGWNSSRALEVVDQVFPKDAAVQPSLVIVYFGGNDSMAPHSSGLGPHVPLTEYVDNMKKIALHLQSLSDFTRIIFLSSPPVDEAKVRQNQSPYLSEVIRTNDLCKTYSDACVELCQELGLEVVDLFSTFQKADDWKTVCFTDGIHLSAQGSKIVAGEILRVVKEAEWHPSLHWKSMPTEFADDSPYDLVSADGKQTVNSSEWTYFWEEQWD

SEQ ID NO: 78527 - protein, 238 aa, Arabidopsis thaliana
  peptide (1)..(238): Ceres Seq. ID no. 12642200
MSFGHGGWGAILSEVYARKADIILRGYYGWNSSRALEVVDQVFPKDAAVQPSLVIVYFGGNDSMAPHSSGLGPHVPLTEYVDNMKKIALHLQSLSDFTRIIFLSSPPVDEAKVRQNQSPYLSEVIRTNDLCKTYSDACVELCQELGLEVVDLFSTFQKADDWKTVCFTDGIHLSAQGSKIVAGEILRVVKEAEWHPSLHWKSMPTEFADDSPYDLVSADGKQTVNSSEWTYFWEEQWD

SEQ ID NO: 78528 - protein, 175 aa, Arabidopsis thaliana
  peptide (1)..(175): Ceres Seq. ID no. 12642201
MAPHSSGLGPHVPLTEYVDNMKKIALHLQSLSDFTRIIFLSSPPVDEAKVRQNQSPYLSEVIRTNDLCKTYSDACVELCQELGLEVVDLFSTFQKADDWKTVCFTDGIHLSAQGSKIVAGEILRVVKEAEWHPSLHWKSMPTEFADDSPYDLVSADGKQTVNSSEWTYFWEEQWD

SEQ ID NO: 78529 - DNA, 1359 bp, Arabidopsis thaliana
  misc_feature (1)..(1359): Ceres Seq. ID no. 12642230
  misc_feature (1)..(1359): Ortholog of  Ceres SEQ ID NO 14315279 as cited in SEQ ID NO 52534
  misc_feature (1)..(1359): Ortholog of  Ceres SEQ ID NO 12583190 as cited in SEQ ID NO 56386
atggcggcagaacctaaccctaagaatttccctgtcctctcttatgtcttggctcgtctcccttctttcaccgccaaatccccttcctcctccgttcctcccttcgacatcgaacaaccaccaccatcatcatcatcatcatcgattgagatcgtcactcagatgcctcacttaacacaaccagatgttctcgcttcaatgacaagtgcgatctctgacgtcgccgagactcgatctatccttcgaaccctaggacctagaccagatcacgaatcagtcgataagcttgatgaggttcatgcttcgtatgagaagcttttgaaagaagcagaggagaggcttgttaggatttatgaatctgctgagaagaatgcggcggaggatgaggagaatgttgcggctgtggaggttaatgaggaggttgttgggatattgcagcatgcttctgctaatccggtggatcgtgttgatttgtctgggaggaaactgaggttgctacctgaagcttttgggaggattcaagggttgcttgttcttaatctctccaacaataagcttgagtcgattcctgattcaattgctggattgcatagtcttgttgaactggatgtctccacgaattctctggagacattacctgattccatcggtttactgtccaaactaaaaatcctgaatgtttcgactaacaagctcacatccttgcctgactccatctgccgctgtgggtcgttggttatcttggacgtgagcttcaaccgtctcacctacttaccgaccaacatcggtcctgagctagtgaatctagaaaagctcctggttcagtataacaagatccgatccttcccgaccagtataggcgaaatgagatccctaaaacacctcgacgcccacttcaacgaacttaacggccttcctgattctttcgtgttgctcacaaatctcgagtacttaaacctaagcagcaacttcagtgatctcaaggatctcccattctcattcggcgaactcataagcctccaagaactcgacttgagtaacaaccaaatccatgccctccctgacacttttggcacacttgatagcctgaccaaactgaatgtggatcagaacccgctcgtcgtcccacccgaggaagtggtgaaggaaggtgttgaagctgtgaagacgtacatgggtcagagaaggatcagtatgttggaagaagaagagaagaagaaaatggaggaagagatggagcaggcaaacgccgggtggctcacacgaaccacatcgaagctgaaaacatatgtcgcagatgtttcagagtatctcggatcaaattctcctcgagacccttaccttgaacgacagctatga

SEQ ID NO: 78530 - protein, 452 aa, Arabidopsis thaliana
  peptide (1)..(452): Ceres Seq. ID no. 12642231
MAAEPNPKNFPVLSYVLARLPSFTAKSPSSSVPPFDIEQPPPSSSSSSIEIVTQMPHLTQPDVLASMTSAISDVAETRSILRTLGPRPDHESVDKLDEVHASYEKLLKEAEERLVRIYESAEKNAAEDEENVAAVEVNEEVVGILQHASANPVDRVDLSGRKLRLLPEAFGRIQGLLVLNLSNNKLESIPDSIAGLHSLVELDVSTNSLETLPDSIGLLSKLKILNVSTNKLTSLPDSICRCGSLVILDVSFNRLTYLPTNIGPELVNLEKLLVQYNKIRSFPTSIGEMRSLKHLDAHFNELNGLPDSFVLLTNLEYLNLSSNFSDLKDLPFSFGELISLQELDLSNNQIHALPDTFGTLDSLTKLNVDQNPLVVPPEEVVKEGVEAVKTYMGQRRISMLEEEEKKKMEEEMEQANAGWLTRTTSKLKTYVADVSEYLGSNSPRDPYLERQL

SEQ ID NO: 78531 - protein, 398 aa, Arabidopsis thaliana
  peptide (1)..(398): Ceres Seq. ID no. 12642232
MPHLTQPDVLASMTSAISDVAETRSILRTLGPRPDHESVDKLDEVHASYEKLLKEAEERLVRIYESAEKNAAEDEENVAAVEVNEEVVGILQHASANPVDRVDLSGRKLRLLPEAFGRIQGLLVLNLSNNKLESIPDSIAGLHSLVELDVSTNSLETLPDSIGLLSKLKILNVSTNKLTSLPDSICRCGSLVILDVSFNRLTYLPTNIGPELVNLEKLLVQYNKIRSFPTSIGEMRSLKHLDAHFNELNGLPDSFVLLTNLEYLNLSSNFSDLKDLPFSFGELISLQELDLSNNQIHALPDTFGTLDSLTKLNVDQNPLVVPPEEVVKEGVEAVKTYMGQRRISMLEEEEKKKMEEEMEQANAGWLTRTTSKLKTYVADVSEYLGSNSPRDPYLERQL

SEQ ID NO: 78532 - protein, 386 aa, Arabidopsis thaliana
  peptide (1)..(386): Ceres Seq. ID no. 12642233
MTSAISDVAETRSILRTLGPRPDHESVDKLDEVHASYEKLLKEAEERLVRIYESAEKNAAEDEENVAAVEVNEEVVGILQHASANPVDRVDLSGRKLRLLPEAFGRIQGLLVLNLSNNKLESIPDSIAGLHSLVELDVSTNSLETLPDSIGLLSKLKILNVSTNKLTSLPDSICRCGSLVILDVSFNRLTYLPTNIGPELVNLEKLLVQYNKIRSFPTSIGEMRSLKHLDAHFNELNGLPDSFVLLTNLEYLNLSSNFSDLKDLPFSFGELISLQELDLSNNQIHALPDTFGTLDSLTKLNVDQNPLVVPPEEVVKEGVEAVKTYMGQRRISMLEEEEKKKMEEEMEQANAGWLTRTTSKLKTYVADVSEYLGSNSPRDPYLERQL

SEQ ID NO: 78533 - DNA, 3576 bp, Arabidopsis thaliana
  misc_feature (1)..(3576): Ceres Seq. ID no. 12642317
  misc_feature (1)..(3576): Ortholog of  Ceres SEQ ID NO 13593889 as cited in SEQ ID NO 53305
atggatcaagcaaaaggttatgaacatgttcggtatactgcccctgaccctagagatgagggacttggctccattaatcaaaggttttcccacgactcttcaactaatgttaacacttatgtacgacctccagattatggtgtttcaacccctgctcggccagtgctaaactactcaatacagaccggtgaagaatttgcttttgagtttatgagagatagggttattatgaaaccgcagttcatcccaaatgtgtatggtgagcacagtggtatgcctgtttctgttaacttaagtgctctgggaatggttcatccaatgtcagagagtggccctaacgctacagtgcttaacatagaagaaaaacgtcagagctttgagcacgagaggaaacccccttctagaattgaagataagacctatcatgaactggtccagtcagccccagttatctcttcgaaaaatgatactggtcaaaggcgtcatagtttggtttcttctagagcttctgatagctctttgaaccgtgcgaagttcttgtgtagttttggtggtaaagttataccccgccccagagatcagaaacttaggtatgtaggtggtgaaacgcgtatcatacggattagcaagactatttctttccaagaactcatgcataaaatgaaagaaatatttcctgaagcacgcaccataaaatatcagctgccaggagaggatcttgatgccctagtctctgtatcttctgacgaggatttacaaaacatgatggaagaatgtatcgtgtttggtaatggaggatctgagaagcccaggatgttcttgttttcaagcagtgatatagaggaggctcagtttgttatggaacatgcagagggtgattctgaggttcagtatgttgttgctgtcaatgggatggatctaagttcacggagaagttcccttggattaagtcctcccgggaacaatttggatgaactacttcatgggaattttgataggaagatcgatcgggctgctacagaaccagcagtggcttcgcttactcccttagcaggtaatgaatctttaccagcgagccaaacttctcaacctgtaacaggattttctactggaaatgagccattttcacagccttatctaggacaacaattgcagttccccggacttggtaaccaccaaatttacacgtcaggtcacatggcaagcataggctatatagatgagaagaggtctgctcctttacatgttcaaccacaacctcattatatcccgtattctgtgaatcctgaaacacctcttgaaagcctggtgccccactatccacaaaaacctgagcaaggatttttgcgtgaggagcagatctttcatgtacaagatccagaaacttcatcaaaagaggccaaaatgagaagagatgactcatttcagaaggtaaatgatcatcctatatctactgtcgagagcaatctttcagcaaaggagccaaagatgaggagagaatcctcaaccccaagggtcaatgagtatcctgtttcttctatgcctagtgatttaatagtcccagatgacctcccgaaggaagaagctccaattgtcacacaaacatctagttcaacaccagatccaagttcttcaactctctcagagaaaagtcttaggaaatccgaggaccatgttgagaacaatctgtcagcaaaggagccaaagatgagaaaagaacactccaccacaagggtcaatgaatattccgtttcctctgtatctagtgattctatggtcccagatcaagccctcaaggaagaagctcctatttccatgaagatatccaattcaacaccagatccaaaatccttggtttatccagaaaaaagtcttagaacatcccaggagaaaacgggtgccttcgatacaacaaatgaaggcatgaaaaagaatcaggacaatcaattttgtctgcttggaggattctcagtatctggacatggtacttcaaataatagttcatctaatgtgagcaatttcgaccagcctgtgactcagcaaagagtctttcattctgagcgaactgtacgagatccaacagaaactaaccgtttgtctaaatctgatgattcccttgcttctcaatttgtaatggctcaaacaacatcagatgctttcctgcctatcagcgaatcatctgaaacttctcatgaagcaaatatggagtcccagaatgttcatcctactgcgccagtaataccagctcctgatagcatctggacagccgagggtagtatgtcacagtctgaaaaaaaaaacgtggaaactaacaccccggagcatgtaagtcagacagagacttcagcaaaggctgttccacaaggacacaatgagaagggggatatagttgttgatataaatgataggtttcctcgtgagtttcttgctgatatattaaaaacgaaagagtctctgaacttccctggattagggccattgcatgccgatggagctggtgtgagtttaaatattcagaataatgaccctaaaacttggtcgtattttcgaaatttggcgcaggatgagtttgagaggaaggatctatcccttatggatcaggaccaccctggatttcccacttccatgactaacaccaacggaaatgctggagttcctcttattgactttatggctgcggatagtggcatgaggtctctgcaggtcattaaaaatgacgacttggaagaactgaaggaattaggttctggtacttttggaactgtttatcacggaaaatggaggggtacagatgttgctatcaagcgaataaaaaggagctgttttattggtcgttcatctgaacaagagagattgacctcggagttctggcatgaagcagaaattctttcaaagcttcatcatccaaatgttatggcattttacggcgtagtgaaagatggaccaggaggaactttagctacagtgacagagtacatggtcaatggatcgctcaggcatgttctgctcagcaacaggcaccttgatcgacgtaagcgacttatcattgcaatggacgcagcttttgggatggaatatttgcactcaaagagcatagtgcatttcgatttgaagtgtgataacttgcttgtcaacttaaaggatcccgcccgtcccatatgcaaggttggtgattttggtctgtcaaagataaaaagaaacactttggtcactggcggtgtaaggggaaccctcccttggatggctcccgagctacttagtggaagcagcagcaaagtttctgaaaaggttgatgtgttctctttcggaattgtcttatgggaaattcttaccggtgaggaaccctacgccaatatgcattatggggcaataatcggaggcatagtgaacaatacattgagaccaaccgtgccaaactactgtgacccggagtggagaatgctgatggagcagtgttgggctcctgacccatttgttcgacctgcgttcccggaaatagccagacgtctccgcaccatgtcctcctctgcggtccacacaaaaccacacgctgtcaaccaccaaatccacaagtaa

SEQ ID NO: 78534 - protein, 1191 aa, Arabidopsis thaliana
  peptide (1)..(1191): Ceres Seq. ID no. 12642318
MDQAKGYEHVRYTAPDPRDEGLGSINQRFSHDSSTNVNTYVRPPDYGVSTPARPVLNYSIQTGEEFAFEFMRDRVIMKPQFIPNVYGEHSGMPVSVNLSALGMVHPMSESGPNATVLNIEEKRQSFEHERKPPSRIEDKTYHELVQSAPVISSKNDTGQRRHSLVSSRASDSSLNRAKFLCSFGGKVIPRPRDQKLRYVGGETRIIRISKTISFQELMHKMKEIFPEARTIKYQLPGEDLDALVSVSSDEDLQNMMEECIVFGNGGSEKPRMFLFSSSDIEEAQFVMEHAEGDSEVQYVVAVNGMDLSSRRSSLGLSPPGNNLDELLHGNFDRKIDRAATEPAVASLTPLAGNESLPASQTSQPVTGFSTGNEPFSQPYLGQQLQFPGLGNHQIYTSGHMASIGYIDEKRSAPLHVQPQPHYIPYSVNPETPLESLVPHYPQKPEQGFLREEQIFHVQDPETSSKEAKMRRDDSFQKVNDHPISTVESNLSAKEPKMRRESSTPRVNEYPVSSMPSDLIVPDDLPKEEAPIVTQTSSSTPDPSSSTLSEKSLRKSEDHVENNLSAKEPKMRKEHSTTRVNEYSVSSVSSDSMVPDQALKEEAPISMKISNSTPDPKSLVYPEKSLRTSQEKTGAFDTTNEGMKKNQDNQFCLLGGFSVSGHGTSNNSSSNVSNFDQPVTQQRVFHSERTVRDPTETNRLSKSDDSLASQFVMAQTTSDAFLPISESSETSHEANMESQNVHPTAPVIPAPDSIWTAEGSMSQSEKKNVETNTPEHVSQTETSAKAVPQGHNEKGDIVVDINDRFPREFLADILKTKESLNFPGLGPLHADGAGVSLNIQNNDPKTWSYFRNLAQDEFERKDLSLMDQDHPGFPTSMTNTNGNAGVPLIDFMAADSGMRSLQVIKNDDLEELKELGSGTFGTVYHGKWRGTDVAIKRIKRSCFIGRSSEQERLTSEFWHEAEILSKLHHPNVMAFYGVVKDGPGGTLATVTEYMVNGSLRHVLLSNRHLDRRKRLIIAMDAAFGMEYLHSKSIVHFDLKCDNLLVNLKDPARPICKVGDFGLSKIKRNTLVTGGVRGTLPWMAPELLSGSSSKVSEKVDVFSFGIVLWEILTGEEPYANMHYGAIIGGIVNNTLRPTVPNYCDPEWRMLMEQCWAPDPFVRPAFPEIARRLRTMSSSAVHTKPHAVNHQIHK

SEQ ID NO: 78535 - protein, 1121 aa, Arabidopsis thaliana
  peptide (1)..(1121): Ceres Seq. ID no. 12642319
MRDRVIMKPQFIPNVYGEHSGMPVSVNLSALGMVHPMSESGPNATVLNIEEKRQSFEHERKPPSRIEDKTYHELVQSAPVISSKNDTGQRRHSLVSSRASDSSLNRAKFLCSFGGKVIPRPRDQKLRYVGGETRIIRISKTISFQELMHKMKEIFPEARTIKYQLPGEDLDALVSVSSDEDLQNMMEECIVFGNGGSEKPRMFLFSSSDIEEAQFVMEHAEGDSEVQYVVAVNGMDLSSRRSSLGLSPPGNNLDELLHGNFDRKIDRAATEPAVASLTPLAGNESLPASQTSQPVTGFSTGNEPFSQPYLGQQLQFPGLGNHQIYTSGHMASIGYIDEKRSAPLHVQPQPHYIPYSVNPETPLESLVPHYPQKPEQGFLREEQIFHVQDPETSSKEAKMRRDDSFQKVNDHPISTVESNLSAKEPKMRRESSTPRVNEYPVSSMPSDLIVPDDLPKEEAPIVTQTSSSTPDPSSSTLSEKSLRKSEDHVENNLSAKEPKMRKEHSTTRVNEYSVSSVSSDSMVPDQALKEEAPISMKISNSTPDPKSLVYPEKSLRTSQEKTGAFDTTNEGMKKNQDNQFCLLGGFSVSGHGTSNNSSSNVSNFDQPVTQQRVFHSERTVRDPTETNRLSKSDDSLASQFVMAQTTSDAFLPISESSETSHEANMESQNVHPTAPVIPAPDSIWTAEGSMSQSEKKNVETNTPEHVSQTETSAKAVPQGHNEKGDIVVDINDRFPREFLADILKTKESLNFPGLGPLHADGAGVSLNIQNNDPKTWSYFRNLAQDEFERKDLSLMDQDHPGFPTSMTNTNGNAGVPLIDFMAADSGMRSLQVIKNDDLEELKELGSGTFGTVYHGKWRGTDVAIKRIKRSCFIGRSSEQERLTSEFWHEAEILSKLHHPNVMAFYGVVKDGPGGTLATVTEYMVNGSLRHVLLSNRHLDRRKRLIIAMDAAFGMEYLHSKSIVHFDLKCDNLLVNLKDPARPICKVGDFGLSKIKRNTLVTGGVRGTLPWMAPELLSGSSSKVSEKVDVFSFGIVLWEILTGEEPYANMHYGAIIGGIVNNTLRPTVPNYCDPEWRMLMEQCWAPDPFVRPAFPEIARRLRTMSSSAVHTKPHAVNHQIHK

SEQ ID NO: 78536 - protein, 1115 aa, Arabidopsis thaliana
  peptide (1)..(1115): Ceres Seq. ID no. 12642320
MKPQFIPNVYGEHSGMPVSVNLSALGMVHPMSESGPNATVLNIEEKRQSFEHERKPPSRIEDKTYHELVQSAPVISSKNDTGQRRHSLVSSRASDSSLNRAKFLCSFGGKVIPRPRDQKLRYVGGETRIIRISKTISFQELMHKMKEIFPEARTIKYQLPGEDLDALVSVSSDEDLQNMMEECIVFGNGGSEKPRMFLFSSSDIEEAQFVMEHAEGDSEVQYVVAVNGMDLSSRRSSLGLSPPGNNLDELLHGNFDRKIDRAATEPAVASLTPLAGNESLPASQTSQPVTGFSTGNEPFSQPYLGQQLQFPGLGNHQIYTSGHMASIGYIDEKRSAPLHVQPQPHYIPYSVNPETPLESLVPHYPQKPEQGFLREEQIFHVQDPETSSKEAKMRRDDSFQKVNDHPISTVESNLSAKEPKMRRESSTPRVNEYPVSSMPSDLIVPDDLPKEEAPIVTQTSSSTPDPSSSTLSEKSLRKSEDHVENNLSAKEPKMRKEHSTTRVNEYSVSSVSSDSMVPDQALKEEAPISMKISNSTPDPKSLVYPEKSLRTSQEKTGAFDTTNEGMKKNQDNQFCLLGGFSVSGHGTSNNSSSNVSNFDQPVTQQRVFHSERTVRDPTETNRLSKSDDSLASQFVMAQTTSDAFLPISESSETSHEANMESQNVHPTAPVIPAPDSIWTAEGSMSQSEKKNVETNTPEHVSQTETSAKAVPQGHNEKGDIVVDINDRFPREFLADILKTKESLNFPGLGPLHADGAGVSLNIQNNDPKTWSYFRNLAQDEFERKDLSLMDQDHPGFPTSMTNTNGNAGVPLIDFMAADSGMRSLQVIKNDDLEELKELGSGTFGTVYHGKWRGTDVAIKRIKRSCFIGRSSEQERLTSEFWHEAEILSKLHHPNVMAFYGVVKDGPGGTLATVTEYMVNGSLRHVLLSNRHLDRRKRLIIAMDAAFGMEYLHSKSIVHFDLKCDNLLVNLKDPARPICKVGDFGLSKIKRNTLVTGGVRGTLPWMAPELLSGSSSKVSEKVDVFSFGIVLWEILTGEEPYANMHYGAIIGGIVNNTLRPTVPNYCDPEWRMLMEQCWAPDPFVRPAFPEIARRLRTMSSSAVHTKPHAVNHQIHK

SEQ ID NO: 78537 - DNA, 893 bp, Arabidopsis thaliana
  misc_feature (1)..(893): Ceres Seq. ID no. 12642345
  misc_feature (1)..(893): Ortholog of  Ceres SEQ ID NO 15176514 as cited in SEQ ID NO 1114
  misc_feature (1)..(893): Ortholog of  Ceres SEQ ID NO 15173688 as cited in SEQ ID NO 61918
  misc_feature (1)..(893): Ortholog of  Ceres SEQ ID NO 13662513 as cited in SEQ ID NO 63303
  misc_feature (1)..(893): Ortholog of  Ceres SEQ ID NO 12616929 as cited in SEQ ID NO 63962
  misc_feature (1)..(893): Ortholog of  Ceres SEQ ID NO 15225803 as cited in SEQ ID NO 67623
  misc_feature (1)..(893): Ortholog of  Ceres SEQ ID NO 15174088 as cited in SEQ ID NO 0
gtcgtcttcgtcgatcatcgccgggaaaccacaccagtctcaatggcgaaaactctatcccgatccaccgcctcatgcgtcgctaagcgtttcttttccacctccaatgccgtcgcctctccttctccgcttccttctcatctcatctctcgtcgattctcaccgacgatcttccacgccgtcggatacatcccagctttgacccgcttcacaacgatccggacccggatggataggtctggcggctcatattcgccgcttaaatccggatcaaacttcagcgatcgaccacccactgaaatggcacctctatttcctggttgcgattacgagcattggcttatcgtcatggagaagcccggaggtgaaaatgctcagaaacagcaaatgatcgattgctatgttcaaaccctagctaaaattgttggcagtgaggaagaggctagaaagaagatctataatgtttcgtgtgagaggtattttgggtttggctgtgagattgatgaggagacatcaaacaaactcgaaggacttcctggtgttctgttcgtgcttccggactcttatgttgatccagagttcaaagattacggagctgaactgtttgtgaatggagaagtagttcctcgtccaccagagagacagaggaggatggtggagttaacgaatcaaagagggtcggataaaccaaagtaccatgaccgaatcagaaatgtccgacggagggagaacatgcgttgactcttattattctcagactttacgctagagcaatcatttcgatttgatctccgatgcttttttttgttggtttgttcttttaatttgctagactcttaatgaataatgtatatgatggtgttttggtgatatcgaatgtatcaattgtttct

SEQ ID NO: 78538 - protein, 246 aa, Arabidopsis thaliana; identical to SEQ ID NO: 30091
  peptide (1)..(246): Ceres Seq. ID no. 12642346

SEQ ID NO: 78539 - protein, 232 aa, Arabidopsis thaliana; identical to SEQ ID NO: 30092
  peptide (1)..(232): Ceres Seq. ID no. 12642347

SEQ ID NO: 78540 - protein, 170 aa, Arabidopsis thaliana; identical to SEQ ID NO: 30093
  peptide (1)..(170): Ceres Seq. ID no. 12642348

SEQ ID NO: 78541 - DNA, 1230 bp, Arabidopsis thaliana
  misc_feature (1)..(1230): Ceres Seq. ID no. 12642375
  misc_feature (1)..(1230): Ortholog of  Ceres SEQ ID NO 14316553 as cited in SEQ ID NO 20761
  misc_feature (1)..(1230): Ortholog of  Ceres SEQ ID NO 13502573 as cited in SEQ ID NO 60342
atggctagcaatgagatggaaaaatcgagtaaagagaaggaacctaaaacacctcctccttcttctactgcccctccctcttcacaggaaccttcatcggctgtgagtgctggcatggctactccagattggtctggttttcaggcatattctcctatgccgccgcctcatggttatgtggcatctagtccccaacctcacccttatatgtggggagttcagcatatgatgcctccttatggaactccgcctcatccttatgttgcaatgtatcccccaggtggcatgtacgcacatccttcaatgcctccgggttcttatccctatagcccttatgctatgccttctccaaatggaatgactgaagtttctggcaatactacaggcggcactgatggtgatgctaaacaatctgaagtgaaggaaaaattgcccatcaaaagatcaagaggaagcttgggaagtttgaacatgattacaggaaagaacaatgaacctgggaaaaactcaggagcatcagctaatggagcttactccaaaagtggggagagtgcttctgatggttcaagtgaaggaagtgatgggaactctcaaaatgattcgggatctggactagatggaaaggatgctgaagcagcatcagagaatggtggttctgccaatggtccgcaaaatggaagtgctggtacacctattctaccggtgagccagaccgtaccaatcatgccaatgacagctgcaggtgttcctggcccaccaacaaatttaaatattgggatggattactggggtgctccaacttcagctggtatccctggaatgcatgggaaagtatctacaccagttcctggagttgttgctccaggctcgcgagatggtggccattcacaaccctggttacaggacgatagagaacttaagcgacagagacggaagcagtccaatagggagtctgctcgaagatcaaggttgcgtaaacaggccgaatgtgatgagctggcccaacgcgctgaggtgttgaacgaagaaaacacaaatctcagagcagaaatcaacaagctcaaaagccaatgcgaagagcttaccaccgagaacacctctctcaaggaccaactttcattattccctccacttgaaggcataagcatggacaatgaccaccaagaaccagacaccaatcaaacaggtgccgcagagagaaaggttgattcatacaaagactcaacgtga

SEQ ID NO: 78542 - protein, 409 aa, Arabidopsis thaliana
  peptide (1)..(409): Ceres Seq. ID no. 12642376
MASNEMEKSSKEKEPKTPPPSSTAPPSSQEPSSAVSAGMATPDWSGFQAYSPMPPPHGYVASSPQPHPYMWGVQHMMPPYGTPPHPYVAMYPPGGMYAHPSMPPGSYPYSPYAMPSPNGMTEVSGNTTGGTDGDAKQSEVKEKLPIKRSRGSLGSLNMITGKNNEPGKNSGASANGAYSKSGESASDGSSEGSDGNSQNDSGSGLDGKDAEAASENGGSANGPQNGSAGTPILPVSQTVPIMPMTAAGVPGPPTNLNIGMDYWGAPTSAGIPGMHGKVSTPVPGVVAPGSRDGGHSQPWLQDDRELKRQRRKQSNRESARRSRLRKQAECDELAQRAEVLNEENTNLRAEINKLKSQCEELTTENTSLKDQLSLFPPLEGISMDNDHQEPDTNQTGAAERKVDSYKDST

SEQ ID NO: 78543 - protein, 404 aa, Arabidopsis thaliana
  peptide (1)..(404): Ceres Seq. ID no. 12642377
MEKSSKEKEPKTPPPSSTAPPSSQEPSSAVSAGMATPDWSGFQAYSPMPPPHGYVASSPQPHPYMWGVQHMMPPYGTPPHPYVAMYPPGGMYAHPSMPPGSYPYSPYAMPSPNGMTEVSGNTTGGTDGDAKQSEVKEKLPIKRSRGSLGSLNMITGKNNEPGKNSGASANGAYSKSGESASDGSSEGSDGNSQNDSGSGLDGKDAEAASENGGSANGPQNGSAGTPILPVSQTVPIMPMTAAGVPGPPTNLNIGMDYWGAPTSAGIPGMHGKVSTPVPGVVAPGSRDGGHSQPWLQDDRELKRQRRKQSNRESARRSRLRKQAECDELAQRAEVLNEENTNLRAEINKLKSQCEELTTENTSLKDQLSLFPPLEGISMDNDHQEPDTNQTGAAERKVDSYKDST

SEQ ID NO: 78544 - protein, 371 aa, Arabidopsis thaliana
  peptide (1)..(371): Ceres Seq. ID no. 12642378
MATPDWSGFQAYSPMPPPHGYVASSPQPHPYMWGVQHMMPPYGTPPHPYVAMYPPGGMYAHPSMPPGSYPYSPYAMPSPNGMTEVSGNTTGGTDGDAKQSEVKEKLPIKRSRGSLGSLNMITGKNNEPGKNSGASANGAYSKSGESASDGSSEGSDGNSQNDSGSGLDGKDAEAASENGGSANGPQNGSAGTPILPVSQTVPIMPMTAAGVPGPPTNLNIGMDYWGAPTSAGIPGMHGKVSTPVPGVVAPGSRDGGHSQPWLQDDRELKRQRRKQSNRESARRSRLRKQAECDELAQRAEVLNEENTNLRAEINKLKSQCEELTTENTSLKDQLSLFPPLEGISMDNDHQEPDTNQTGAAERKVDSYKDST

SEQ ID NO: 78545 - DNA, 441 bp, Arabidopsis thaliana
  misc_feature (1)..(441): Ceres Seq. ID no. 12642430
  misc_feature (1)..(441): Ortholog of  Ceres SEQ ID NO 12557737 as cited in SEQ ID NO 81
atggcgacccaaccggcgaaagagtctgttcaatgtttcggaaggaagaagacggcaacagcagtcacctactgcaaacggggctcgggcatgattaagctcaacggttcgccgatcgagctttatcagccagagatcctccgattcaagatcttcgagccagtccttctcctcgggaaacaccgtttcgccggagttgacatgaggatccgtgccacgggcggtggtaacacatctcgggtctacgcaatccgtcagagtatcgctaaggccctcgttgcttactaccagaagtacgttgatgagcagtcgaagaaggagatcaaggacatcttgatgaggtacgataggactcttcttgttgcggatccgagaaggtgcgagtcgaagaagtttggtggtcctggtgctcgtgctcgtttccagaagagttaccgttag

SEQ ID NO: 78546 - protein, 146 aa, Arabidopsis thaliana; identical to SEQ ID NO: 30715
  peptide (1)..(146): Ceres Seq. ID no. 12642431

SEQ ID NO: 78547 - protein, 116 aa, Arabidopsis thaliana; identical to SEQ ID NO: 30716
  peptide (1)..(116): Ceres Seq. ID no. 12642432

SEQ ID NO: 78548 - protein, 79 aa, Arabidopsis thaliana; identical to SEQ ID NO: 30717
  peptide (1)..(79): Ceres Seq. ID no. 12642433

SEQ ID NO: 78549 - DNA, 2081 bp, Arabidopsis thaliana
  misc_feature (1)..(2081): Ceres Seq. ID no. 12642491
  misc_feature (1)..(2081): Ortholog of  Ceres SEQ ID NO 15176223 as cited in SEQ ID NO 51535
  misc_feature (1)..(2081): Ortholog of  Ceres SEQ ID NO 15171193 as cited in SEQ ID NO 59370
  misc_feature (1)..(2081): Ortholog of  Ceres SEQ ID NO 13597198 as cited in SEQ ID NO 63665
accggaatctctctctttctccgccgaacttcttcgaatcaagtttccgtttatcactctaatattgttaaagtttccactgataccaccgctctagtcatggctgaagctgaagatcagcaaaatttcgttgcacacaatggagatcaggtaccagatcaagggtcagatgagttgcataatgggttaccgtaccaggttcatgatgagacccttgttcaccaaccatacgaggttgaagatccgattcttgaacctcagcagtacgaggtaccagatccgactcttgaaccacagcagtacgaggtaccagatcagactcttgaacctcagcagtacgaggttgatgatcagttagagtatcatcaataccagttgcaggaccaggctaatgaagatgtccaagatcattcgcaagatgacctacaatatcagccacaaaatcaggagcagtttcagttacaagacgaggctcatgatcaggctcagtatcaggcgcaaggtgatgtacaagatcacaatggtgatgaagtgcaagataaagtagaagatgaggaaggaattcctgagcatcttgagtctctacagaaatcagagcctgaagaagatgcgacagttggaggtgaggagaagaggtggccgggatggcccggagagacggtattccgtatgctggttcctgcacagaaagtgggtagcatcattggtcgcaaaggtgatgtcattaagaaaatagttgaggagacaagggctcgaataaagattctcgatggtcctccaggcacaacagaaagagctgttatggtttctggtaaagaagagcccgaatcatctctaccaccttctatggatggccttcttagagtccacatgcggatagttgatggtttggatggtgaagcttctcaagcccctccgccttcaaaggtgtcaacaagattactagtcccagcatctcaggctggaagtttgattggaaaacagggaggaacagttaaagctattcaagaagcatccgcttgtatagtcagagttcttggatcagaggatttacctgtttttgctcttcaagacgatagggttgttgaagttgtgggggaaccaacaagtgttcatagagccttggagctgattgcgtcacatctcagaaagttcttggttgatcgtagcatcatcccattctttgaaaatcagatgcaaaagccaactcgccaaatggaccatatgccaccaccacaccagtcatggggtcctcctcaaggtcatgccccaagtgttggtggaggaggctatggtcacaacccacctccatatatgcaaccacctcctagacatgatagttactatcctcctcctgagatgcgtcaacctccaatggagaaacagcctcatcaaggtatatctgcatatggtagagagcctcctatgaatgtgcacgtatcatcagccccaccaatggtcgctcagcaagttacgcagcaaatgcagattccactgtcttatgctgatgctgtaattgggacgtcgggttcaaacataagctacactagacgtcttagtggagcaacagtaactattcaggagaccaggggagtacctggtgaaatgactgttgaggttagcggaactggctcacaagtccaaactgccgtgcagcttattcagaacttcatggctgaagctggagcgccggcaccagcacagcctcaaactgtagcaccagagcagcaaggctataacccatacgcaacacacggctcagtttacgcagcggctccaacaaacccgcctggaggatacgctacggattacagctcaggctacggttactgatgaaagattttaagtttctttagaatgttttactagtagttgcaagcaagagtggaaacgctagatgcctaatcgagtatatgttgttattagcgagcactctgtgtactgacaatcaattattatatcacttgttttgagacttcttcatttgtgtactattcataacattgatctaaccggaaatcttctttatattcaaaaaaagtaaaaaaaaaaaaaatgtatggttcattatcgtgtccttc

SEQ ID NO: 78550 - protein, 610 aa, Arabidopsis thaliana; identical to SEQ ID NO: 40615
  peptide (1)..(610): Ceres Seq. ID no. 12642492

SEQ ID NO: 78551 - protein, 577 aa, Arabidopsis thaliana; identical to SEQ ID NO: 40616
  peptide (1)..(577): Ceres Seq. ID no. 12642493

SEQ ID NO: 78552 - protein, 387 aa, Arabidopsis thaliana; identical to SEQ ID NO: 40617
  peptide (1)..(387): Ceres Seq. ID no. 12642494

SEQ ID NO: 78553 - DNA, 2436 bp, Arabidopsis thaliana
  misc_feature (1)..(2436): Ceres Seq. ID no. 12642499
  misc_feature (1)..(2436): Ortholog of  Ceres SEQ ID NO 14310362 as cited in SEQ ID NO 54251
  misc_feature (1)..(2436): Ortholog of  Ceres SEQ ID NO 12583314 as cited in SEQ ID NO 56435
  misc_feature (1)..(2436): Ortholog of  Ceres SEQ ID NO 13654989 as cited in SEQ ID NO 63117
  misc_feature (1)..(2436): Ortholog of  Ceres SEQ ID NO 13584744 as cited in SEQ ID NO 69137
atgagcgggaaaactcggattctctttttcctcacatgtctctcctttctattggtttttccaactagatctaacggacaagatttagctctgagctgcgggacatcagaagcttctgctgaccaagataagaaaaaatgggaaccagatacaaagtttttaaagactggaaactcaattcacgcaacggctacatatcaagacccttcacttctctcaacagttccttatatgacagccagaatctttacagctccagcaacttatgaaatcccgattaaaggagataaaagacatttgcttcggttatatttctacccatcaacatacaccggtctcaacatttccaactcgtatttcactgtggaagctaacgatgttaccttactgagcaatttcagcgccgcgattacgtgtcaagctttgactcaagcttatctggttaaagaatactctcttgcacccactgacaaagatgttttgagcatcaagtttaccccttcagataaataccgagacgcatttgcctttataaacggtatcgaggtgattcagatgccggaattgtttgacacggcggctcttgttggtttcacagaccaaacaatggatgccaagactgcgaatcttcagtcaatgtttagacttaatgttggtggtcaggacatccctggaagccaagactccggtgggttgacaagaacttggtataatgatgcaccttacatctttagtgcgggtcttggtgttacacttcaagcaagcaacaattttaggatcaactaccagaacatgccggtgtctatagctccagccgatatatacaaaaccgcaagatctcaaggcccaaacggagatatcaacctcaaatccaatcttacatggatgttccaaatcgataagaacttcacctacattttgagactccatttctgcgaattccagctttccaagatcaaccagaaggttttcaacatttacatcaataacagaacagcgcagatgactccatcaacttttggtcaaccggaatattatgattcatctcttaacgggttagagattttcaagatggacaccatgaaaaatcttgcgggtccaaaccccgagccatcgcctatgcaagctgaggaagaggttaaaaaagaattcaagaacgaaaagagacacgctttcatcattggttcggccggaggagttttagcggttttaatcggtgccttgtgtttcacggcctacaagaagaaacaaggatatcaaggaggcgactctcacacatcaagttggcttcctatatatggaaactctaccacatcaggaaccaaatcaaccatctcagggaagagcaacaatggaagtcacctatccaatctcgcagcaggtttatgccgtagattctctttaccagaaatcaaacacggaacacaaaacttcgatgattccaacgtcattggagttggagggtttggtaaagtctacaaaggagttatagacggcacaactaaagtagcggtaaaaaaatcaaacccaaattcagaacaaggactcaacgaattcgagacagaaatcgaactcctctcaagactaagacacaaacacttagtctccttgataggatactgcgacgagggaggagaaatgtgtctcgtatacgattacatggcatttggaacactccgtgagcatctatacaacacaaagaaaccacaattaacttggaaacgaaggctagagatagctattggagcagcaagaggattacattaccttcacacaggagcaaagtacacgattatacacagagacgttaaaacaactaacatcctcgtagatgagaactgggtagccaaagtttcagactttgggttatccaaaactggacctaacatgaatggaggccatgtaacaaccgtcgtcaaaggaagcttcggttatttagatcctgaatacttcagaagacaacaactgactgagaaatcagacgtttactcattcggagttgttctgttcgaaatcttatgcgcaagaccagcgttaaacccgagtttgcctaaggaacaagtgagtctcggagactgggcaatgaattgcaaacgaaaagggaatttagaggatataatcgatccgaatctgaaagggaagatcaatgcagagtgtttgaagaaatttgcagacacggcggagaagtgtcttaacgatagtggattagaacggccgacaatgggagatgttttgtggaatctcgaattcgcacttcagcttcaagagactgctgacgggactcgtcatcggactccgaataatggaggaagctctgaggatctcggtagaggaggcatggcggttaacgtcgccggtagagatgatgtgagtgatctctcctcagaggacaataccgaaatattctctcagattgtaaatcccaaaggacgataa

SEQ ID NO: 78554 - protein, 811 aa, Arabidopsis thaliana
  peptide (1)..(811): Ceres Seq. ID no. 12642500
MSGKTRILFFLTCLSFLLVFPTRSNGQDLALSCGTSEASADQDKKKWEPDTKFLKTGNSIHATATYQDPSLLSTVPYMTARIFTAPATYEIPIKGDKRHLLRLYFYPSTYTGLNISNSYFTVEANDVTLLSNFSAAITCQALTQAYLVKEYSLAPTDKDVLSIKFTPSDKYRDAFAFINGIEVIQMPELFDTAALVGFTDQTMDAKTANLQSMFRLNVGGQDIPGSQDSGGLTRTWYNDAPYIFSAGLGVTLQASNNFRINYQNMPVSIAPADIYKTARSQGPNGDINLKSNLTWMFQIDKNFTYILRLHFCEFQLSKINQKVFNIYINNRTAQMTPSTFGQPEYYDSSLNGLEIFKMDTMKNLAGPNPEPSPMQAEEEVKKEFKNEKRHAFIIGSAGGVLAVLIGALCFTAYKKKQGYQGGDSHTSSWLPIYGNSTTSGTKSTISGKSNNGSHLSNLAAGLCRRFSLPEIKHGTQNFDDSNVIGVGGFGKVYKGVIDGTTKVAVKKSNPNSEQGLNEFETEIELLSRLRHKHLVSLIGYCDEGGEMCLVYDYMAFGTLREHLYNTKKPQLTWKRRLEIAIGAARGLHYLHTGAKYTIIHRDVKTTNILVDENWVAKVSDFGLSKTGPNMNGGHVTTVVKGSFGYLDPEYFRRQQLTEKSDVYSFGVVLFEILCARPALNPSLPKEQVSLGDWAMNCKRKGNLEDIIDPNLKGKINAECLKKFADTAEKCLNDSGLERPTMGDVLWNLEFALQLQETADGTRHRTPNNGGSSEDLGRGGMAVNVAGRDDVSDLSSEDNTEIFSQIVNPKGR

SEQ ID NO: 78555 - protein, 734 aa, Arabidopsis thaliana
  peptide (1)..(734): Ceres Seq. ID no. 12642501
MTARIFTAPATYEIPIKGDKRHLLRLYFYPSTYTGLNISNSYFTVEANDVTLLSNFSAAITCQALTQAYLVKEYSLAPTDKDVLSIKFTPSDKYRDAFAFINGIEVIQMPELFDTAALVGFTDQTMDAKTANLQSMFRLNVGGQDIPGSQDSGGLTRTWYNDAPYIFSAGLGVTLQASNNFRINYQNMPVSIAPADIYKTARSQGPNGDINLKSNLTWMFQIDKNFTYILRLHFCEFQLSKINQKVFNIYINNRTAQMTPSTFGQPEYYDSSLNGLEIFKMDTMKNLAGPNPEPSPMQAEEEVKKEFKNEKRHAFIIGSAGGVLAVLIGALCFTAYKKKQGYQGGDSHTSSWLPIYGNSTTSGTKSTISGKSNNGSHLSNLAAGLCRRFSLPEIKHGTQNFDDSNVIGVGGFGKVYKGVIDGTTKVAVKKSNPNSEQGLNEFETEIELLSRLRHKHLVSLIGYCDEGGEMCLVYDYMAFGTLREHLYNTKKPQLTWKRRLEIAIGAARGLHYLHTGAKYTIIHRDVKTTNILVDENWVAKVSDFGLSKTGPNMNGGHVTTVVKGSFGYLDPEYFRRQQLTEKSDVYSFGVVLFEILCARPALNPSLPKEQVSLGDWAMNCKRKGNLEDIIDPNLKGKINAECLKKFADTAEKCLNDSGLERPTMGDVLWNLEFALQLQETADGTRHRTPNNGGSSEDLGRGGMAVNVAGRDDVSDLSSEDNTEIFSQIVNPKGR

SEQ ID NO: 78556 - protein, 626 aa, Arabidopsis thaliana
  peptide (1)..(626): Ceres Seq. ID no. 12642502
MPELFDTAALVGFTDQTMDAKTANLQSMFRLNVGGQDIPGSQDSGGLTRTWYNDAPYIFSAGLGVTLQASNNFRINYQNMPVSIAPADIYKTARSQGPNGDINLKSNLTWMFQIDKNFTYILRLHFCEFQLSKINQKVFNIYINNRTAQMTPSTFGQPEYYDSSLNGLEIFKMDTMKNLAGPNPEPSPMQAEEEVKKEFKNEKRHAFIIGSAGGVLAVLIGALCFTAYKKKQGYQGGDSHTSSWLPIYGNSTTSGTKSTISGKSNNGSHLSNLAAGLCRRFSLPEIKHGTQNFDDSNVIGVGGFGKVYKGVIDGTTKVAVKKSNPNSEQGLNEFETEIELLSRLRHKHLVSLIGYCDEGGEMCLVYDYMAFGTLREHLYNTKKPQLTWKRRLEIAIGAARGLHYLHTGAKYTIIHRDVKTTNILVDENWVAKVSDFGLSKTGPNMNGGHVTTVVKGSFGYLDPEYFRRQQLTEKSDVYSFGVVLFEILCARPALNPSLPKEQVSLGDWAMNCKRKGNLEDIIDPNLKGKINAECLKKFADTAEKCLNDSGLERPTMGDVLWNLEFALQLQETADGTRHRTPNNGGSSEDLGRGGMAVNVAGRDDVSDLSSEDNTEIFSQIVNPKGR

SEQ ID NO: 78557 - DNA, 2343 bp, Arabidopsis thaliana
  misc_feature (1)..(2343): Ceres Seq. ID no. 12642535
  misc_feature (1)..(2343): Ortholog of  Ceres SEQ ID NO 13595857 as cited in SEQ ID NO 56402
atgtggtcttcgagaactctcaagtatattttcaggctaagacctgaaccaatttcttcctcatcgtcttctgcgtattcgctctctcgcatcaccggaggttctccaattccgtcgcagcagcaacgatcgattacctccacggcgccgcttaatggatggatggattcgatcaaaggtgtttttaccgggaacaaggatactcctttagaagaatcaaatctacccgttgaagctttcactcttctccgagagaatctccaagcgagtcaaaagcaagatgcggctaaacattgcaaatgcactataactgatgtggagaatacgctgtccaaatttacttgggccaggcaagctcacaagaagatgacagagttgaaagaaggaggcaaaccgttaccaaagaatatgggagagctgcaaaaaatgatggggtcaacaccaatggatctggcgagatcaaacttagccaaaagtgggcagatcagccgcaatgcactttgtccctgtggttccaaaaagagatataaaagtacagagagaactaagttcagatccatggaacctgcaacttcttcaccattgccacgagacacgtcggagcaggatcccgcgctggcgcagagtgaagatcagtctcaaggaagacttagggtttctgcttatgaccttatggtagtagacagtgatttagagggattagatcaaagaaaggaagagatgcgtaacatttttgatgatattcaggataaagcttcattaattcttcagttctcacttaagtgggaagaaatcgacgacaggtttggttttctaaagcaacgagccatggagaaggaggtctctgtccggaatcagattctggagctggagaagaaggaagagcgactgaggcttgttgaagaaagagagaggaagattgaggcatccttcagtacattgcaggagaaaggaaatgaatctgatctgatactgttaatggaagcgaatgtgatgagattggttcttcaaatgcagtttgaacaagtggtggttgctcagctcaacgcccaagagaactttcttggttcgctccatgattcgatgatgaagaagcatgaagagctaatgacagagcttgaagcaaggaaaaatgaggttgctttgatttctaagacgatcgatgccaagacttgtgatttagacatgaaagtcaaagactttgatcttaagcaaacaacagagtctgagagaatgagaaaagagactgagctgatggaaacatctcttaagcaacttgaagccagggagaatgagcttaggttgcttaatgagaccatccaagggaaatcgatggagctggagaagaaagaagtcaactttcaactgaaacatgaagcagcagccagagagactgaagtgaagaacaagtttcttgagttaaaggaaaagaaacttgaagaaagggagcaacatttggagttgaaacagagaaaaaaagaaaaaccagcaataagagcagagactcgtaagagatctaggcttgaatatgagtctccattgtcggcagagaagggtagatatgctgagactctgattcgccctggaaaaaagcaagtgcagaaaagagaggctcatgaaattatctacattgatgaagatgagccattcaactgtcctgatccagactttcacgattttaacaacacaatgagctctttcgctgtaggtcaagtatgggctctatatgatcctgtagatgatatgcctagatactatgctgagatcaggaaagtattgcaacctcagctgagtttacgggtgacatggctcgaatcattacagaccacagaggaaccaattcctgcttgtgggagattcgaacatggaaaatcagagaccagtagccacttgatgttttctcatgagatgtatcacaccatacgaggccaatatgtcactataaacccgagaaaaggcgagacgtgggcacttttcggagattggaccaagacttggaagagtcacagtgagcaacaaaagactccttacagttacgactttgtggaagtcgtgactgaatttgacagtgatcgaggcattggagtggcttatctagggagagtggaaggattcacatcagtgtatgaacgtgctgcgcaaaatggtcttgtcgaaatcatgatatcatgtgatgaaatgcttaggttttctcatagagttccatctttcaaaatgactggagatgagaaagaaggagtcccagctggctcttttgagctagaccctgctgctgttcctcgagtttatcttaaagatgctaaggtcaaagaagaaaagatggagcccatagtcttggtttga

SEQ ID NO: 78558 - protein, 780 aa, Arabidopsis thaliana
  peptide (1)..(780): Ceres Seq. ID no. 12642536
MWSSRTLKYIFRLRPEPISSSSSSAYSLSRITGGSPIPSQQQRSITSTAPLNGWMDSIKGVFTGNKDTPLEESNLPVEAFTLLRENLQASQKQDAAKHCKCTITDVENTLSKFTWARQAHKKMTELKEGGKPLPKNMGELQKMMGSTPMDLARSNLAKSGQISRNALCPCGSKKRYKSTERTKFRSMEPATSSPLPRDTSEQDPALAQSEDQSQGRLRVSAYDLMVVDSDLEGLDQRKEEMRNIFDDIQDKASLILQFSLKWEEIDDRFGFLKQRAMEKEVSVRNQILELEKKEERLRLVEERERKIEASFSTLQEKGNESDLILLMEANVMRLVLQMQFEQVVVAQLNAQENFLGSLHDSMMKKHEELMTELEARKNEVALISKTIDAKTCDLDMKVKDFDLKQTTESERMRKETELMETSLKQLEARENELRLLNETIQGKSMELEKKEVNFQLKHEAAARETEVKNKFLELKEKKLEEREQHLELKQRKKEKPAIRAETRKRSRLEYESPLSAEKGRYAETLIRPGKKQVQKREAHEIIYIDEDEPFNCPDPDFHDFNNTMSSFAVGQVWALYDPVDDMPRYYAEIRKVLQPQLSLRVTWLESLQTTEEPIPACGRFEHGKSETSSHLMFSHEMYHTIRGQYVTINPRKGETWALFGDWTKTWKSHSEQQKTPYSYDFVEVVTEFDSDRGIGVAYLGRVEGFTSVYERAAQNGLVEIMISCDEMLRFSHRVPSFKMTGDEKEGVPAGSFELDPAAVPRVYLKDAKVKEEKMEPIVLV

SEQ ID NO: 78559 - protein, 726 aa, Arabidopsis thaliana
  peptide (1)..(726): Ceres Seq. ID no. 12642537
MDSIKGVFTGNKDTPLEESNLPVEAFTLLRENLQASQKQDAAKHCKCTITDVENTLSKFTWARQAHKKMTELKEGGKPLPKNMGELQKMMGSTPMDLARSNLAKSGQISRNALCPCGSKKRYKSTERTKFRSMEPATSSPLPRDTSEQDPALAQSEDQSQGRLRVSAYDLMVVDSDLEGLDQRKEEMRNIFDDIQDKASLILQFSLKWEEIDDRFGFLKQRAMEKEVSVRNQILELEKKEERLRLVEERERKIEASFSTLQEKGNESDLILLMEANVMRLVLQMQFEQVVVAQLNAQENFLGSLHDSMMKKHEELMTELEARKNEVALISKTIDAKTCDLDMKVKDFDLKQTTESERMRKETELMETSLKQLEARENELRLLNETIQGKSMELEKKEVNFQLKHEAAARETEVKNKFLELKEKKLEEREQHLELKQRKKEKPAIRAETRKRSRLEYESPLSAEKGRYAETLIRPGKKQVQKREAHEIIYIDEDEPFNCPDPDFHDFNNTMSSFAVGQVWALYDPVDDMPRYYAEIRKVLQPQLSLRVTWLESLQTTEEPIPACGRFEHGKSETSSHLMFSHEMYHTIRGQYVTINPRKGETWALFGDWTKTWKSHSEQQKTPYSYDFVEVVTEFDSDRGIGVAYLGRVEGFTSVYERAAQNGLVEIMISCDEMLRFSHRVPSFKMTGDEKEGVPAGSFELDPAAVPRVYLKDAKVKEEKMEPIVLV

SEQ ID NO: 78560 - protein, 658 aa, Arabidopsis thaliana
  peptide (1)..(658): Ceres Seq. ID no. 12642538
MTELKEGGKPLPKNMGELQKMMGSTPMDLARSNLAKSGQISRNALCPCGSKKRYKSTERTKFRSMEPATSSPLPRDTSEQDPALAQSEDQSQGRLRVSAYDLMVVDSDLEGLDQRKEEMRNIFDDIQDKASLILQFSLKWEEIDDRFGFLKQRAMEKEVSVRNQILELEKKEERLRLVEERERKIEASFSTLQEKGNESDLILLMEANVMRLVLQMQFEQVVVAQLNAQENFLGSLHDSMMKKHEELMTELEARKNEVALISKTIDAKTCDLDMKVKDFDLKQTTESERMRKETELMETSLKQLEARENELRLLNETIQGKSMELEKKEVNFQLKHEAAARETEVKNKFLELKEKKLEEREQHLELKQRKKEKPAIRAETRKRSRLEYESPLSAEKGRYAETLIRPGKKQVQKREAHEIIYIDEDEPFNCPDPDFHDFNNTMSSFAVGQVWALYDPVDDMPRYYAEIRKVLQPQLSLRVTWLESLQTTEEPIPACGRFEHGKSETSSHLMFSHEMYHTIRGQYVTINPRKGETWALFGDWTKTWKSHSEQQKTPYSYDFVEVVTEFDSDRGIGVAYLGRVEGFTSVYERAAQNGLVEIMISCDEMLRFSHRVPSFKMTGDEKEGVPAGSFELDPAAVPRVYLKDAKVKEEKMEPIVLV

SEQ ID NO: 78561 - DNA, 1247 bp, Arabidopsis thaliana
  misc_feature (1)..(1247): Ceres Seq. ID no. 12642597
  misc_feature (1)..(1247): Ortholog of  Ceres SEQ ID NO 15178042 as cited in SEQ ID NO 54787
  misc_feature (1)..(1247): Ortholog of  Ceres SEQ ID NO 13597899 as cited in SEQ ID NO 64374
atctccttctccggcgaagaaattgaaaattcattatccctaaaaccctaataaaggtccagagagtcgtcagaaaccaccgattagcttttgaaatggacggtgccacataccaaagattcccaaagatcaagatccgtgagcttaaagatgattacgccaagttcgagcttcgtgaaaccgacgtttctatggccaacgctctccgtcgcgtaatgatctccgaagtccctaccgtcgcaatagatctagtcgaaatcgaggttaattcatctgtactcaacgacgagttcattgctcatcgattaggtctcattcctctcactagcgaacgtgctatgagcatgcgtttctctcgagattgtgatgcttgtgatggagatggacaatgcgagttttgctctgttgagtttcggcttagttctaagtgtgttactgatcaaaccctagatgttactagtagggatttgtacagtgctgatcctactgttactcctgtggatttcactattgactcgtctgtatctgattcaagcgagcacaagggaattatcattgtgaaactgcgtcggggacaagagttgaagcttagagcgatagcgaggaaagggattgggaaagatcatgcgaaatggtctcctgcagctactgttacgtttatgtatgagcctgacataattattaatgaagatatgatggatactttgtcagacgaggaaaagatcgacttgattgagagcagtcctaccaaagtgtttggcatggatccagtcaccagacaggttgtagtggttgatcctgaagcatacacttacgatgaagaagtgatcaagaaagctgaagcaatggggaaaccgggactcattgagatcagtccgaaagatgacagttttatattcactgttgagtccacaggtgcagtgaaggcttcccaactggtactaaatgccattgatcttctgaagcagaagcttgatgcagtccgtctctcagatgacaccgtagaagcggatgatcagtttggtgaactcggtgcccatatgcgtggaggatgaactcaagtgattaattcgagctctttgttatacctgtttgtttcaggttttgagtttcttctggagcagactgatattaaccgtagtggcactgtcttgtttgataacatgtgaagtggcagtcttctatttgttctggacctctgatccctctgttcctgaatcttgttaagtttggttgttgttagttgt

SEQ ID NO: 78562 - protein, 319 aa, Arabidopsis thaliana; identical to SEQ ID NO: 26759
  peptide (1)..(319): Ceres Seq. ID no. 12642598

SEQ ID NO: 78563 - protein, 287 aa, Arabidopsis thaliana; identical to SEQ ID NO: 26760
  peptide (1)..(287): Ceres Seq. ID no. 12642599

SEQ ID NO: 78564 - protein, 279 aa, Arabidopsis thaliana; identical to SEQ ID NO: 26761
  peptide (1)..(279): Ceres Seq. ID no. 12642600

SEQ ID NO: 78565 - DNA, 1446 bp, Arabidopsis thaliana
  misc_feature (1)..(1446): Ceres Seq. ID no. 12642605
  misc_feature (1)..(1446): Ortholog of  Ceres SEQ ID NO 13597574 as cited in SEQ ID NO 64677
  misc_feature (1)..(1446): Ortholog of  Ceres SEQ ID NO 13597843 as cited in SEQ ID NO 64850
  misc_feature (1)..(1446): Ortholog of  Ceres SEQ ID NO 12617417 as cited in SEQ ID NO 65089
  misc_feature (1)..(1446): Ortholog of  Ceres SEQ ID NO 13597678 as cited in SEQ ID NO 65375
  misc_feature (1)..(1446): Ortholog of  Ceres SEQ ID NO 12779098 as cited in SEQ ID NO 67698
  misc_feature (1)..(1446): Ortholog of  Ceres SEQ ID NO 13596180 as cited in SEQ ID NO 67941
  misc_feature (1)..(1446): Ortholog of  Ceres SEQ ID NO 13591190 as cited in SEQ ID NO 68044
  misc_feature (1)..(1446): Ortholog of  Ceres SEQ ID NO 14313563 as cited in SEQ ID NO 68700
atgaacagagagcaaattcatattttgttcttccccttcatggctcatggccacatgattccactcttagacatggccaagcttttcgctagaagaggagccaaatcaactctcctcacaaccccaataaatgctaagatcttggagaaacccattgaagcattcaaagttcaaaatcctgatctcgaaatcggaatcaagatcctcaatttcccttgtgtagagcttggattgccagaaggatgcgagaaccgtgacttcattaactcataccaaaaatctgactcatttgacttgttcttgaagtttcttttctctaccaagtatatgaaacagcagttggagagtttcattgaaacaaccaaaccgagtgctcttgtagccgatatgttcttcccttgggcaacagaatccgcggagaagatcggtgttccaagacttgtgttccacggcacatcatcctttgccttgtgttgttcgtataacatgaggattcataagccacacaagaaagtcgcttcgagttctactccatttgtaatccctggtctccctggagacatagttattacagaagaccaagccaatgtcaccaacgaagaaactccattcggaaagttttggaaagaagtcagggaatcagagaccagtagctttggtgttttggtgaatagcttctacgagctggaatcatcttatgctgatttttaccgtagttttgtggcgaaaaaagcgtggcatataggtccactttcactatccaacagagggattgcagagaaagccggaagagggaaaaaggcaaacattgatgagcaagaatgcctcaaatggcttgactctaagacacctggctcagtagtttacttgtcctttggtagcggaaccggcttacccaacgaacagctgttagagattgctttcggccttgaaggctctggacaaaatttcatttgggtggttagcaaaaatgaaaaccaaggtgaaaatgaagattggttgcctaaagggtttgaagagaggaataaaggaaaagggctgataatacgcggatgggccccgcaagtgctgatacttgaccacaaagcaatcggaggatttgtgacgcattgcggatggaactcgactttggagggcattgccgcagggctgcctatggtgacttggccgatgggggcagaacagttctacaacgagaagttattgacaaaagtgttgagaataggagtgaacgttggagctaccgagttggtgaaaaaaggaaagttgattagtagagcacaagtggagaaggcagtaagggaagtgattggtggtgagaaggcagaggaaaggcggctaagggctaaggagctgggcgagatggctaaagccgctgtggaagaaggagggtcttcttataatgatgtgaacaagtttatggaagagctgaatggtagaaagtag

SEQ ID NO: 78566 - protein, 481 aa, Arabidopsis thaliana
  peptide (1)..(481): Ceres Seq. ID no. 12642606
MNREQIHILFFPFMAHGHMIPLLDMAKLFARRGAKSTLLTTPINAKILEKPIEAFKVQNPDLEIGIKILNFPCVELGLPEGCENRDFINSYQKSDSFDLFLKFLFSTKYMKQQLESFIETTKPSALVADMFFPWATESAEKIGVPRLVFHGTSSFALCCSYNMRIHKPHKKVASSSTPFVIPGLPGDIVITEDQANVTNEETPFGKFWKEVRESETSSFGVLVNSFYELESSYADFYRSFVAKKAWHIGPLSLSNRGIAEKAGRGKKANIDEQECLKWLDSKTPGSVVYLSFGSGTGLPNEQLLEIAFGLEGSGQNFIWVVSKNENQGENEDWLPKGFEERNKGKGLIIRGWAPQVLILDHKAIGGFVTHCGWNSTLEGIAAGLPMVTWPMGAEQFYNEKLLTKVLRIGVNVGATELVKKGKLISRAQVEKAVREVIGGEKAEERRLRAKELGEMAKAAVEEGGSSYNDVNKFMEELNGRK

SEQ ID NO: 78567 - protein, 468 aa, Arabidopsis thaliana
  peptide (1)..(468): Ceres Seq. ID no. 12642607
MAHGHMIPLLDMAKLFARRGAKSTLLTTPINAKILEKPIEAFKVQNPDLEIGIKILNFPCVELGLPEGCENRDFINSYQKSDSFDLFLKFLFSTKYMKQQLESFIETTKPSALVADMFFPWATESAEKIGVPRLVFHGTSSFALCCSYNMRIHKPHKKVASSSTPFVIPGLPGDIVITEDQANVTNEETPFGKFWKEVRESETSSFGVLVNSFYELESSYADFYRSFVAKKAWHIGPLSLSNRGIAEKAGRGKKANIDEQECLKWLDSKTPGSVVYLSFGSGTGLPNEQLLEIAFGLEGSGQNFIWVVSKNENQGENEDWLPKGFEERNKGKGLIIRGWAPQVLILDHKAIGGFVTHCGWNSTLEGIAAGLPMVTWPMGAEQFYNEKLLTKVLRIGVNVGATELVKKGKLISRAQVEKAVREVIGGEKAEERRLRAKELGEMAKAAVEEGGSSYNDVNKFMEELNGRK

SEQ ID NO: 78568 - protein, 463 aa, Arabidopsis thaliana
  peptide (1)..(463): Ceres Seq. ID no. 12642608
MIPLLDMAKLFARRGAKSTLLTTPINAKILEKPIEAFKVQNPDLEIGIKILNFPCVELGLPEGCENRDFINSYQKSDSFDLFLKFLFSTKYMKQQLESFIETTKPSALVADMFFPWATESAEKIGVPRLVFHGTSSFALCCSYNMRIHKPHKKVASSSTPFVIPGLPGDIVITEDQANVTNEETPFGKFWKEVRESETSSFGVLVNSFYELESSYADFYRSFVAKKAWHIGPLSLSNRGIAEKAGRGKKANIDEQECLKWLDSKTPGSVVYLSFGSGTGLPNEQLLEIAFGLEGSGQNFIWVVSKNENQGENEDWLPKGFEERNKGKGLIIRGWAPQVLILDHKAIGGFVTHCGWNSTLEGIAAGLPMVTWPMGAEQFYNEKLLTKVLRIGVNVGATELVKKGKLISRAQVEKAVREVIGGEKAEERRLRAKELGEMAKAAVEEGGSSYNDVNKFMEELNGRK

SEQ ID NO: 78569 - DNA, 2727 bp, Arabidopsis thaliana
  misc_feature (1)..(2727): Ceres Seq. ID no. 12642758
  misc_feature (1)..(2727): Ortholog of  Ceres SEQ ID NO 15171739 as cited in SEQ ID NO 57134
atgaagagagatatggggagttacaaaatgggtttgtgttgcagtgacaagctcaggatgaacagaggagctccacctcaggatgtggtgacggcgtttgtagagtataccgagggcaggagccacatgacggcagagcagctatgtcggttcttggttgaggtgcaggacgagactgaagtgttggtttcagatgcagagaagatcatagaaagaatcacatgtgaaagacatcatatcactaagttcttgaggcatacgctgaacctcgatgatttcttcagtttcttgttctcagatgatctgaatcatccaattgatagtaaggtgcatcaagacatggcctctcccttgtcgcactatttcatttacaccagccataattcgtatctgactggaaatcagatcaacagcgaatgcagcgacgtacctctcataaaggcattaaagagaggtgttcgagctcttgaacttgacatgtggcctaactctactaaggacgacatacttgttctccatggctgggcatggacacctccagttgaactagtcaaatgcttgagatctataaaagaacatgccttttatgcatctgcataccctgtgatcttaactttggaagatcatttgactccagatcttcaagccaaagcagctgagatgatgaaagagatattcatggatatggtgtattttccagaggctggtggtttaaaagagtttccttcaccagaagatctcaagtacaaaattgtaatatctacaaagcctcctaaaggtagcttaagaaaggacaaggattctgagtcagatgcatcaggaaaggcgtcatcagatgtttcagcagacgatgagaagactgaggaagaaacaagtgaggccaaaaatgaagaggatggatttgatcaagaatccagcaacttggatttcctcacctatagtcgcctaataacgattccttctggaaatgctaaaaatggattaaaggaagcactaacaatcgataatggtggagttagacggctgagtttgagggagcagaagttcaagaaagccactgaaatgtatggaaccgaagtcataaaattcacacagaagaatctgttgagaatatatcccaaggctacccgagtaaattcctccaactataggccatacaacggttggatgtacggagctcaaatggtcgctttcaacatgcagggctatggaagagctctttggatgatgcatggtatgtttaggggaaatggtggatgcgggtacgtgaaaaaaccggactttatgatgaacaataatctcagtggagaagtgttcaacccgaaagcgaagttacccataaagaaaactctaaaagtgaaagtatacatgggcaaaggatgggactctggtttccagcgaacatgtttcaacacttggtcctctcctaacttctacacaagggtggggataacaggagtaagaggtgataaggtaatgaagaaaacaaagaaagaacaaaagacatgggagccattctggaacgaggagtttgagtttcagctaacagtaccggagctggcgttgctaagaatagaagttcacgactacaacatgccagagaaggacgatttctcgggtcagacatgtttgcctgtgtcagagctgagacaaggcatacgttctgttcctttttgcgtcccaaacacctatcttcacactcttaaaaccaaacctctaaaagaagttttgatcgattgtaacagtgacatatcctgcgagtttccaacaactacctccgagagccgtcaacgaaaactcttcctctcttgcgccgttgataattccgatgacgtgatcagaaatctcataacgcatcttgagtcatcttcttcgatcgaggaacagaagcaagctgctatggagattagactcttatcaaagaacaaaccagagaatcgtatcaaactcgctaaagccggtgctattaaaccgttggtttctttaatctcgtcttcggatcttcagcttcaagagtatggagtcactgcggtgttgaatctatctctctgcgatgagaacaaagagatgattgtttcttccggtgcggttaaaccgctcgttaatgcgttgagattaggaacaccgacgacgaaagagaacgctgcttgtgctctgctccggttatctcaagtggaggaaaacaaaatcacgattgggagatcaggagcgattcctttactagtgaaccttctagaaaatggcggattcagagcgaagaaagacgcgtcgacggctttatactcgttgtgttcgacgaacgagaacaaaaccagagctgttgaatctgggattatgaagccgttagtggagttaatgattgattttgaatcggatatggttgataaatcagcgtttgttatgaatctgttaatgtcggcgccggaatcgaagccggcggttgtggaagaaggaggagttccggtgttggttgagattgttgaagcgggaacacagagacagaaggagataagtgtgtcgatattgttgcagctttgtgaggagagtgttgtgtatcgaaccatggtggctcgtgaaggagcggttcctccgctcgtggctttatcgcagggtagtgcgagtcgtggtgctaaggtaaaggctgaggcgttgatagagcttcttaggcaacccagacaacaacaacaacaacaacaacactttgaatctaacgacaacgagagataa

SEQ ID NO: 78570 - protein, 908 aa, Arabidopsis thaliana
  peptide (1)..(908): Ceres Seq. ID no. 12642759
MKRDMGSYKMGLCCSDKLRMNRGAPPQDVVTAFVEYTEGRSHMTAEQLCRFLVEVQDETEVLVSDAEKIIERITCERHHITKFLRHTLNLDDFFSFLFSDDLNHPIDSKVHQDMASPLSHYFIYTSHNSYLTGNQINSECSDVPLIKALKRGVRALELDMWPNSTKDDILVLHGWAWTPPVELVKCLRSIKEHAFYASAYPVILTLEDHLTPDLQAKAAEMMKEIFMDMVYFPEAGGLKEFPSPEDLKYKIVISTKPPKGSLRKDKDSESDASGKASSDVSADDEKTEEETSEAKNEEDGFDQESSNLDFLTYSRLITIPSGNAKNGLKEALTIDNGGVRRLSLREQKFKKATEMYGTEVIKFTQKNLLRIYPKATRVNSSNYRPYNGWMYGAQMVAFNMQGYGRALWMMHGMFRGNGGCGYVKKPDFMMNNNLSGEVFNPKAKLPIKKTLKVKVYMGKGWDSGFQRTCFNTWSSPNFYTRVGITGVRGDKVMKKTKKEQKTWEPFWNEEFEFQLTVPELALLRIEVHDYNMPEKDDFSGQTCLPVSELRQGIRSVPFCVPNTYLHTLKTKPLKEVLIDCNSDISCEFPTTTSESRQRKLFLSCAVDNSDDVIRNLITHLESSSSIEEQKQAAMEIRLLSKNKPENRIKLAKAGAIKPLVSLISSSDLQLQEYGVTAVLNLSLCDENKEMIVSSGAVKPLVNALRLGTPTTKENAACALLRLSQVEENKITIGRSGAIPLLVNLLENGGFRAKKDASTALYSLCSTNENKTRAVESGIMKPLVELMIDFESDMVDKSAFVMNLLMSAPESKPAVVEEGGVPVLVEIVEAGTQRQKEISVSILLQLCEESVVYRTMVAREGAVPPLVALSQGSASRGAKVKAEALIELLRQPRQQQQQQQHFESNDNER

SEQ ID NO: 78571 - protein, 904 aa, Arabidopsis thaliana
  peptide (1)..(904): Ceres Seq. ID no. 12642760
MGSYKMGLCCSDKLRMNRGAPPQDVVTAFVEYTEGRSHMTAEQLCRFLVEVQDETEVLVSDAEKIIERITCERHHITKFLRHTLNLDDFFSFLFSDDLNHPIDSKVHQDMASPLSHYFIYTSHNSYLTGNQINSECSDVPLIKALKRGVRALELDMWPNSTKDDILVLHGWAWTPPVELVKCLRSIKEHAFYASAYPVILTLEDHLTPDLQAKAAEMMKEIFMDMVYFPEAGGLKEFPSPEDLKYKIVISTKPPKGSLRKDKDSESDASGKASSDVSADDEKTEEETSEAKNEEDGFDQESSNLDFLTYSRLITIPSGNAKNGLKEALTIDNGGVRRLSLREQKFKKATEMYGTEVIKFTQKNLLRIYPKATRVNSSNYRPYNGWMYGAQMVAFNMQGYGRALWMMHGMFRGNGGCGYVKKPDFMMNNNLSGEVFNPKAKLPIKKTLKVKVYMGKGWDSGFQRTCFNTWSSPNFYTRVGITGVRGDKVMKKTKKEQKTWEPFWNEEFEFQLTVPELALLRIEVHDYNMPEKDDFSGQTCLPVSELRQGIRSVPFCVPNTYLHTLKTKPLKEVLIDCNSDISCEFPTTTSESRQRKLFLSCAVDNSDDVIRNLITHLESSSSIEEQKQAAMEIRLLSKNKPENRIKLAKAGAIKPLVSLISSSDLQLQEYGVTAVLNLSLCDENKEMIVSSGAVKPLVNALRLGTPTTKENAACALLRLSQVEENKITIGRSGAIPLLVNLLENGGFRAKKDASTALYSLCSTNENKTRAVESGIMKPLVELMIDFESDMVDKSAFVMNLLMSAPESKPAVVEEGGVPVLVEIVEAGTQRQKEISVSILLQLCEESVVYRTMVAREGAVPPLVALSQGSASRGAKVKAEALIELLRQPRQQQQQQQHFESNDNER

SEQ ID NO: 78572 - protein, 899 aa, Arabidopsis thaliana
  peptide (1)..(899): Ceres Seq. ID no. 12642761
MGLCCSDKLRMNRGAPPQDVVTAFVEYTEGRSHMTAEQLCRFLVEVQDETEVLVSDAEKIIERITCERHHITKFLRHTLNLDDFFSFLFSDDLNHPIDSKVHQDMASPLSHYFIYTSHNSYLTGNQINSECSDVPLIKALKRGVRALELDMWPNSTKDDILVLHGWAWTPPVELVKCLRSIKEHAFYASAYPVILTLEDHLTPDLQAKAAEMMKEIFMDMVYFPEAGGLKEFPSPEDLKYKIVISTKPPKGSLRKDKDSESDASGKASSDVSADDEKTEEETSEAKNEEDGFDQESSNLDFLTYSRLITIPSGNAKNGLKEALTIDNGGVRRLSLREQKFKKATEMYGTEVIKFTQKNLLRIYPKATRVNSSNYRPYNGWMYGAQMVAFNMQGYGRALWMMHGMFRGNGGCGYVKKPDFMMNNNLSGEVFNPKAKLPIKKTLKVKVYMGKGWDSGFQRTCFNTWSSPNFYTRVGITGVRGDKVMKKTKKEQKTWEPFWNEEFEFQLTVPELALLRIEVHDYNMPEKDDFSGQTCLPVSELRQGIRSVPFCVPNTYLHTLKTKPLKEVLIDCNSDISCEFPTTTSESRQRKLFLSCAVDNSDDVIRNLITHLESSSSIEEQKQAAMEIRLLSKNKPENRIKLAKAGAIKPLVSLISSSDLQLQEYGVTAVLNLSLCDENKEMIVSSGAVKPLVNALRLGTPTTKENAACALLRLSQVEENKITIGRSGAIPLLVNLLENGGFRAKKDASTALYSLCSTNENKTRAVESGIMKPLVELMIDFESDMVDKSAFVMNLLMSAPESKPAVVEEGGVPVLVEIVEAGTQRQKEISVSILLQLCEESVVYRTMVAREGAVPPLVALSQGSASRGAKVKAEALIELLRQPRQQQQQQQHFESNDNER

SEQ ID NO: 78573 - DNA, 1566 bp, Arabidopsis thaliana
  misc_feature (1)..(1566): Ceres Seq. ID no. 12642816
  misc_feature (1)..(1566): Ortholog of  Ceres SEQ ID NO 13596984 as cited in SEQ ID NO 63196
atggctagagaaaacccattgatgagcttctcctttagtttcagatatctctgtcactttgctctactcctctctctcctctcctttgtctcttttctcttcagacacaacacatcactctgttcttgtctttacgatcacaacacctacgttaacacattcgatcatcagcaaaacaatgaaaccatcgatcttcttcgattctcttctgcttggaaccatctcactttcccttctaaacccaagaagactctcaagatcgctgtggtggtcaagaaatggccgaggaaatcgcaagctggtgggctcgagcgacacgcgcttacattgcatctcgctctagccaatcgtggccacgagcttcatgttttcaccgctgcttctccatcgttccctgaatatcaactgaaaaatctgatgttccatctctctgagccaaccgctgctggatatcttgatcaagcttctgtctcgcaacagcttcagttgaagaaacggaatttaactaacgcaattttcctccggaaatcgcagacgcagaacgctagtggaagaccgtttgacgtaattcacacagagagcgttgggcttctccacacaagagccaagaatctccgtaacgtggtcgcgtcttggcatggaatcgcttacgaaacttttcactctgacatcatccaagaactccttcgtcaagcagacatcgccgccgccaccgctgctggaaccgaagaagaacagccaccgccttcatcgccagctctgacggagcgagcgaagcgagtcgtcgaggaagtcaaattcttccaacgttacgctcaccacgtggcaactagcgatcactgcggtgacgtactcaagaggatttacatgattccggaggaacgtgtccatatcattctaaacggcgtcgacgagaacgttttcaaaccggacgtttcaaaacgtgagagctttagagagaaatttggcgttagaagcggcaagaacaagaaatctcctctggttttgggaattgcagggaggttagtgagagataaaggtcatcctttgatgttctcagctttgaagcgagtgtttgaagaaaacaaggaggcacgtgaaaacgttgtcgttttggtagctggagatggtccatggggaaacagatataaagacctcgggtctactaatgtgattgttcttggaccgttggatcaagaaaagctagcgggattctacaacgcgatcgatgtgtttgtgaatccgacccttcgagctcaagggctggatcacactctcttggaagccatggtttcaggaaaaccggtcttagctactaggctagcgagtatcactgggtcagtggttgtcggtccacatttgggatatactttctcaccaaatgttgagtctcttaccgaggcgattttgcgggttgttagcgatggaacagaggaattacagaggaaaggcaaggaagcgcgtgaacggtcgttgaggcttttcacggcgactaaaatggctgattcatatgaaaggttttttctttgcatttcggatcagaggttttgtacgttacaagcttaa

SEQ ID NO: 78574 - protein, 521 aa, Arabidopsis thaliana
  peptide (1)..(521): Ceres Seq. ID no. 12642817
MARENPLMSFSFSFRYLCHFALLLSLLSFVSFLFRHNTSLCSCLYDHNTYVNTFDHQQNNETIDLLRFSSAWNHLTFPSKPKKTLKIAVVVKKWPRKSQAGGLERHALTLHLALANRGHELHVFTAASPSFPEYQLKNLMFHLSEPTAAGYLDQASVSQQLQLKKRNLTNAIFLRKSQTQNASGRPFDVIHTESVGLLHTRAKNLRNVVASWHGIAYETFHSDIIQELLRQADIAAATAAGTEEEQPPPSSPALTERAKRVVEEVKFFQRYAHHVATSDHCGDVLKRIYMIPEERVHIILNGVDENVFKPDVSKRESFREKFGVRSGKNKKSPLVLGIAGRLVRDKGHPLMFSALKRVFEENKEARENVVVLVAGDGPWGNRYKDLGSTNVIVLGPLDQEKLAGFYNAIDVFVNPTLRAQGLDHTLLEAMVSGKPVLATRLASITGSVVVGPHLGYTFSPNVESLTEAILRVVSDGTEELQRKGKEARERSLRLFTATKMADSYERFFLCISDQRFCTLQA

SEQ ID NO: 78575 - protein, 514 aa, Arabidopsis thaliana
  peptide (1)..(514): Ceres Seq. ID no. 12642818
MSFSFSFRYLCHFALLLSLLSFVSFLFRHNTSLCSCLYDHNTYVNTFDHQQNNETIDLLRFSSAWNHLTFPSKPKKTLKIAVVVKKWPRKSQAGGLERHALTLHLALANRGHELHVFTAASPSFPEYQLKNLMFHLSEPTAAGYLDQASVSQQLQLKKRNLTNAIFLRKSQTQNASGRPFDVIHTESVGLLHTRAKNLRNVVASWHGIAYETFHSDIIQELLRQADIAAATAAGTEEEQPPPSSPALTERAKRVVEEVKFFQRYAHHVATSDHCGDVLKRIYMIPEERVHIILNGVDENVFKPDVSKRESFREKFGVRSGKNKKSPLVLGIAGRLVRDKGHPLMFSALKRVFEENKEARENVVVLVAGDGPWGNRYKDLGSTNVIVLGPLDQEKLAGFYNAIDVFVNPTLRAQGLDHTLLEAMVSGKPVLATRLASITGSVVVGPHLGYTFSPNVESLTEAILRVVSDGTEELQRKGKEARERSLRLFTATKMADSYERFFLCISDQRFCTLQA

SEQ ID NO: 78576 - protein, 382 aa, Arabidopsis thaliana
  peptide (1)..(382): Ceres Seq. ID no. 12642819
MFHLSEPTAAGYLDQASVSQQLQLKKRNLTNAIFLRKSQTQNASGRPFDVIHTESVGLLHTRAKNLRNVVASWHGIAYETFHSDIIQELLRQADIAAATAAGTEEEQPPPSSPALTERAKRVVEEVKFFQRYAHHVATSDHCGDVLKRIYMIPEERVHIILNGVDENVFKPDVSKRESFREKFGVRSGKNKKSPLVLGIAGRLVRDKGHPLMFSALKRVFEENKEARENVVVLVAGDGPWGNRYKDLGSTNVIVLGPLDQEKLAGFYNAIDVFVNPTLRAQGLDHTLLEAMVSGKPVLATRLASITGSVVVGPHLGYTFSPNVESLTEAILRVVSDGTEELQRKGKEARERSLRLFTATKMADSYERFFLCISDQRFCTLQA

SEQ ID NO: 78577 - DNA, 1473 bp, Arabidopsis thaliana
  misc_feature (1)..(1473): Ceres Seq. ID no. 12642846
  misc_feature (1)..(1473): Ortholog of  Ceres SEQ ID NO 15175785 as cited in SEQ ID NO 56970
  misc_feature (1)..(1473): Ortholog of  Ceres SEQ ID NO 13597407 as cited in SEQ ID NO 64106
atgccttatgtatcatcaattatagaagatagaaaattagttatttgcctagattgcactgatttaatagtaatttacttgaatcgtaggtttatcttcccggctttgggaggattattgtttgggtatgacattggggctacctccggtgctacgctctcacttcagtcacctgcgcttagcggaactacatggtttaacttctcacctgttcagctaggacttgtggttagcggatccttgtatggagcccttcttggctcaatttctgtctatggcgttgctgatttccttggaagaaggcgggaacttattatagctgctgttctctatctcctcgggtctctgatcactggctgtgcccctgatcttaatattctcttagttggaaggcttctctatggctttggtattggtttggcaatgcatggggctcccctctatattgctgagacatgcccatctcaaatccgtggaactttgatatctctgaaagaactcttcatcgtattgggaattttgttgggtttttctgttggaagcttccagattgatgtagttggagggtggcgttacatgtatggatttggtacgcctgttgctttgctgatgggactaggcatgtggagtctccctgcatctcctcgctggttgctgcttagagctgtccaaggtaaaggacaattacaagaatacaaagagaaggccatgcttgccctcagcaaattacgtggcagacctccaggtgataaaatctcagagaagttggtagatgatgcctatttatctgtgaaaacggcctatgaagatgagaaatctgggggaaacttcctggaagtattccaagggcctaatttgaaagctttgacaattggtggaggtttagtcctcttccaacagataactggacagcctagtgttctttattatgcgggttcgattcttcagactgctggattctctgctgctgctgatgcaactcgagtctctgttattattggtgttttcaagttactgatgacatgggtagctgttgcgaaagttgatgatctcggcagacgacctttactgattggaggtgtcagcggcattgcgttgtccttgtttctactgtcagcatactacaagtttctcggaggctttccccttgtcgctgttggtgcactgcttctctatgttggttgttaccagcgcgaacagatctcatttggacccatcagctggctaatggtgtcagagattttcccgctccgcacaagagggagagggatcagtcttgcagttcttacaaactttggctccaatgctattgtgacatttgcattttcacctttaaaggaatttcttggagccgagaatcttttccttctctttgggggcatagcactggtatcactgctgtttgtaatactagtagttccagagaccaagggtctcagcttggaagaaattgaatcaaaaatcttgaagtga

SEQ ID NO: 78578 - protein, 490 aa, Arabidopsis thaliana
  peptide (1)..(490): Ceres Seq. ID no. 12642847
MPYVSSIIEDRKLVICLDCTDLIVIYLNRRFIFPALGGLLFGYDIGATSGATLSLQSPALSGTTWFNFSPVQLGLVVSGSLYGALLGSISVYGVADFLGRRRELIIAAVLYLLGSLITGCAPDLNILLVGRLLYGFGIGLAMHGAPLYIAETCPSQIRGTLISLKELFIVLGILLGFSVGSFQIDVVGGWRYMYGFGTPVALLMGLGMWSLPASPRWLLLRAVQGKGQLQEYKEKAMLALSKLRGRPPGDKISEKLVDDAYLSVKTAYEDEKSGGNFLEVFQGPNLKALTIGGGLVLFQQITGQPSVLYYAGSILQTAGFSAAADATRVSVIIGVFKLLMTWVAVAKVDDLGRRPLLIGGVSGIALSLFLLSAYYKFLGGFPLVAVGALLLYVGCYQREQISFGPISWLMVSEIFPLRTRGRGISLAVLTNFGSNAIVTFAFSPLKEFLGAENLFLLFGGIALVSLLFVILVVPETKGLSLEEIESKILK

SEQ ID NO: 78579 - protein, 349 aa, Arabidopsis thaliana
  peptide (1)..(349): Ceres Seq. ID no. 12642848
MHGAPLYIAETCPSQIRGTLISLKELFIVLGILLGFSVGSFQIDVVGGWRYMYGFGTPVALLMGLGMWSLPASPRWLLLRAVQGKGQLQEYKEKAMLALSKLRGRPPGDKISEKLVDDAYLSVKTAYEDEKSGGNFLEVFQGPNLKALTIGGGLVLFQQITGQPSVLYYAGSILQTAGFSAAADATRVSVIIGVFKLLMTWVAVAKVDDLGRRPLLIGGVSGIALSLFLLSAYYKFLGGFPLVAVGALLLYVGCYQREQISFGPISWLMVSEIFPLRTRGRGISLAVLTNFGSNAIVTFAFSPLKEFLGAENLFLLFGGIALVSLLFVILVVPETKGLSLEEIESKILK

SEQ ID NO: 78580 - protein, 298 aa, Arabidopsis thaliana
  peptide (1)..(298): Ceres Seq. ID no. 12642849
MYGFGTPVALLMGLGMWSLPASPRWLLLRAVQGKGQLQEYKEKAMLALSKLRGRPPGDKISEKLVDDAYLSVKTAYEDEKSGGNFLEVFQGPNLKALTIGGGLVLFQQITGQPSVLYYAGSILQTAGFSAAADATRVSVIIGVFKLLMTWVAVAKVDDLGRRPLLIGGVSGIALSLFLLSAYYKFLGGFPLVAVGALLLYVGCYQREQISFGPISWLMVSEIFPLRTRGRGISLAVLTNFGSNAIVTFAFSPLKEFLGAENLFLLFGGIALVSLLFVILVVPETKGLSLEEIESKILK

SEQ ID NO: 78581 - DNA, 2988 bp, Arabidopsis thaliana
  misc_feature (1)..(2988): Ceres Seq. ID no. 12642924
  misc_feature (1)..(2988): Ortholog of  Ceres SEQ ID NO 13654989 as cited in SEQ ID NO 63117
  misc_feature (1)..(2988): Ortholog of  Ceres SEQ ID NO 13584744 as cited in SEQ ID NO 69137
atggctgctgcgattcaaaatcttacgcaactagaaactctcactccaaatcgccaatcgcgttctcaaacagtgctaatcgccgatgaagaggtctcattgtcatcgccgtccttctcacgacgggagatttcgctgccgtatatggccgatttatctccggagattcctcacattcgtcctcctcctcacaaaagttattgggccggctcaaagagatggaatcaaaattctctcagtttcatggccggaagttgcaatagaaaacacatttactcattcgtttcactgactcaggacatcttgccatgttgccagaggcttggactgtttcttgggtttatctatttatacgctgtgtttctctcaaactctggcattggagcttttgccattattggttgtgttcaagctcaggatcaacaagagtttatcagtttggattgcgggttacccatgactgaaccgtcttcttatactgagtcagtaaccggactacggttctcgtctgatgctgaattcatccagactggtgaaagtggtaaaatccaggcgagtatggagaatgactaccttaagccgtacacgaggctgaggtattttccagaggagagaaggaactgctatagtttgagtgttgacaagaacaggaaatatttgatcagggctaggttcatttatgggaattacgatggtcgtaactctaacccgatatttgaactgcatctaggacctaatctgtgggcaactatagatttgcaaaagtttgtgaatggtacaatggaggagatccttcacactccaacatcaaactctttgaacgtttgtcttgttaagacagggacaactacacccttgatctcagccttggaattacggccattaggaaataattcttatctcacagatggttctttgaatcttttcgttcggatatatctcaacaagacagatggctttcttcggtacccggatgatatttatgatcgcagatggcataattactttatggtggatgattggacccaaattttcaccactctcgaagtgaccaatgataacaattatgaaccaccaaaaaaggctcttgcagcggctgccacgccttctaatgccagcgcgccattgacaatcagttggccaccagacaatcctggtgaccaatattacttgtacagccacttctctgagatacaagatttacagaccaatgataccagagaatttgacatattatgggatggagctgttgttgaagaaggtttcatccctccaaagttaggggtgactactatccataatctttctccagtgacatgcaaaggagaaaattgcatttaccagctaataaaaacctcgaggtcaactcttccttctctacttaacgctcttgaaatctacacagttatccaatttccacggtcggaaacaaatgaaaatgatgtggttgctgttaaaaatatcgaagctgcctataaattgagtagaatcaggtggcaaggagatccttgcgtccctcaaaagtatgcgtgggatggtttgaactgtagcaacaacacagatgtttctaaacctccaagagtattatccttaaatttgtcttcgagcggtttaactggaatcattgcggccgcaattcaaaaccttacacatttagaaaaactggacttgtcaaataacacactaactggagtggtgccggaatttctagcccagatgaaatcaaacttaagcggcaacaatcttagtggtccccttcctcaaggtcttcgaagagagggactagaattactagttcaaggcaacccaaggctttgtctctctggttcctgcacagaaaaaaactcgaagaagaaattcccggtggtgattgttgcatcagttgcttctgtggccataattgttgctgtgttggttattatttttgttctcagtaagaaaaagtcatctactgtgggagctctacaacctccactgagtatgccaatggttcatgataattcacctgaaccatcaatcgagacgaaaaagagaaggtttacttattcagaggttatcaaaatgacgaataattttcaaagagttgtaggggaaggaggattcggtgttgtttgtcatggtactataaatggttctgaacaggtggctgttaaagttctctctcaatcatcaagtcaaggatataagcattttaaggcagaggttgatcttcttctacgagttcaccatacaaatttggtgagtcttgttggatattgcgatgaaagagatcacttggctctcatctatgagtttttgcccaagggagacttaagacaacatctatctggaaaaagcggtgggtcctttatcaactggggtaatcgtctacgaatagctctggaggctgcactaggattggaatatctacattctggatgcacaccaccaattgtacatagagatataaaaacgacaaacatattgctggacgaacagttaaaggccaagcttgccgatttcggcctttcgagatctttccctattggaggtgaaacacatatttcaactgtggttgctggtactcctggataccttgatcctgaatattaccagacaactcgactgggtgagaagagcgatgtgtacagcttcggaattgtgttattggagattatcacaaaccaacctgtgattgaccagtcccgttcaaagtctcacatatcacaatgggttggatttgagcttacccgaggagatattactaagatcatggatccaaacctgaacggggattacgaatctcgttctgtatggagagttcttgaactggcaatgtcgtgtgcgaatccttcttctgtgaaccgaccaaacatgtcccaagttgctaatgaactgaaagaatgtcttgtttctgaaaacttgagggaaaatatgaatatggactctcagaattctcttaaagtgagcatgagctttgacacagagttgtttccgagggcaaggtag

SEQ ID NO: 78582 - protein, 995 aa, Arabidopsis thaliana
  peptide (1)..(995): Ceres Seq. ID no. 12642925
MAAAIQNLTQLETLTPNRQSRSQTVLIADEEVSLSSPSFSRREISLPYMADLSPEIPHIRPPPHKSYWAGSKRWNQNSLSFMAGSCNRKHIYSFVSLTQDILPCCQRLGLFLGFIYLYAVFLSNSGIGAFAIIGCVQAQDQQEFISLDCGLPMTEPSSYTESVTGLRFSSDAEFIQTGESGKIQASMENDYLKPYTRLRYFPEERRNCYSLSVDKNRKYLIRARFIYGNYDGRNSNPIFELHLGPNLWATIDLQKFVNGTMEEILHTPTSNSLNVCLVKTGTTTPLISALELRPLGNNSYLTDGSLNLFVRIYLNKTDGFLRYPDDIYDRRWHNYFMVDDWTQIFTTLEVTNDNNYEPPKKALAAAATPSNASAPLTISWPPDNPGDQYYLYSHFSEIQDLQTNDTREFDILWDGAVVEEGFIPPKLGVTTIHNLSPVTCKGENCIYQLIKTSRSTLPSLLNALEIYTVIQFPRSETNENDVVAVKNIEAAYKLSRIRWQGDPCVPQKYAWDGLNCSNNTDVSKPPRVLSLNLSSSGLTGIIAAAIQNLTHLEKLDLSNNTLTGVVPEFLAQMKSNLSGNNLSGPLPQGLRREGLELLVQGNPRLCLSGSCTEKNSKKKFPVVIVASVASVAIIVAVLVIIFVLSKKKSSTVGALQPPLSMPMVHDNSPEPSIETKKRRFTYSEVIKMTNNFQRVVGEGGFGVVCHGTINGSEQVAVKVLSQSSSQGYKHFKAEVDLLLRVHHTNLVSLVGYCDERDHLALIYEFLPKGDLRQHLSGKSGGSFINWGNRLRIALEAALGLEYLHSGCTPPIVHRDIKTTNILLDEQLKAKLADFGLSRSFPIGGETHISTVVAGTPGYLDPEYYQTTRLGEKSDVYSFGIVLLEIITNQPVIDQSRSKSHISQWVGFELTRGDITKIMDPNLNGDYESRSVWRVLELAMSCANPSSVNRPNMSQVANELKECLVSENLRENMNMDSQNSLKVSMSFDTELFPRAR

SEQ ID NO: 78583 - protein, 947 aa, Arabidopsis thaliana
  peptide (1)..(947): Ceres Seq. ID no. 12642926
MADLSPEIPHIRPPPHKSYWAGSKRWNQNSLSFMAGSCNRKHIYSFVSLTQDILPCCQRLGLFLGFIYLYAVFLSNSGIGAFAIIGCVQAQDQQEFISLDCGLPMTEPSSYTESVTGLRFSSDAEFIQTGESGKIQASMENDYLKPYTRLRYFPEERRNCYSLSVDKNRKYLIRARFIYGNYDGRNSNPIFELHLGPNLWATIDLQKFVNGTMEEILHTPTSNSLNVCLVKTGTTTPLISALELRPLGNNSYLTDGSLNLFVRIYLNKTDGFLRYPDDIYDRRWHNYFMVDDWTQIFTTLEVTNDNNYEPPKKALAAAATPSNASAPLTISWPPDNPGDQYYLYSHFSEIQDLQTNDTREFDILWDGAVVEEGFIPPKLGVTTIHNLSPVTCKGENCIYQLIKTSRSTLPSLLNALEIYTVIQFPRSETNENDVVAVKNIEAAYKLSRIRWQGDPCVPQKYAWDGLNCSNNTDVSKPPRVLSLNLSSSGLTGIIAAAIQNLTHLEKLDLSNNTLTGVVPEFLAQMKSNLSGNNLSGPLPQGLRREGLELLVQGNPRLCLSGSCTEKNSKKKFPVVIVASVASVAIIVAVLVIIFVLSKKKSSTVGALQPPLSMPMVHDNSPEPSIETKKRRFTYSEVIKMTNNFQRVVGEGGFGVVCHGTINGSEQVAVKVLSQSSSQGYKHFKAEVDLLLRVHHTNLVSLVGYCDERDHLALIYEFLPKGDLRQHLSGKSGGSFINWGNRLRIALEAALGLEYLHSGCTPPIVHRDIKTTNILLDEQLKAKLADFGLSRSFPIGGETHISTVVAGTPGYLDPEYYQTTRLGEKSDVYSFGIVLLEIITNQPVIDQSRSKSHISQWVGFELTRGDITKIMDPNLNGDYESRSVWRVLELAMSCANPSSVNRPNMSQVANELKECLVSENLRENMNMDSQNSLKVSMSFDTELFPRAR

SEQ ID NO: 78584 - protein, 914 aa, Arabidopsis thaliana
  peptide (1)..(914): Ceres Seq. ID no. 12642927
MAGSCNRKHIYSFVSLTQDILPCCQRLGLFLGFIYLYAVFLSNSGIGAFAIIGCVQAQDQQEFISLDCGLPMTEPSSYTESVTGLRFSSDAEFIQTGESGKIQASMENDYLKPYTRLRYFPEERRNCYSLSVDKNRKYLIRARFIYGNYDGRNSNPIFELHLGPNLWATIDLQKFVNGTMEEILHTPTSNSLNVCLVKTGTTTPLISALELRPLGNNSYLTDGSLNLFVRIYLNKTDGFLRYPDDIYDRRWHNYFMVDDWTQIFTTLEVTNDNNYEPPKKALAAAATPSNASAPLTISWPPDNPGDQYYLYSHFSEIQDLQTNDTREFDILWDGAVVEEGFIPPKLGVTTIHNLSPVTCKGENCIYQLIKTSRSTLPSLLNALEIYTVIQFPRSETNENDVVAVKNIEAAYKLSRIRWQGDPCVPQKYAWDGLNCSNNTDVSKPPRVLSLNLSSSGLTGIIAAAIQNLTHLEKLDLSNNTLTGVVPEFLAQMKSNLSGNNLSGPLPQGLRREGLELLVQGNPRLCLSGSCTEKNSKKKFPVVIVASVASVAIIVAVLVIIFVLSKKKSSTVGALQPPLSMPMVHDNSPEPSIETKKRRFTYSEVIKMTNNFQRVVGEGGFGVVCHGTINGSEQVAVKVLSQSSSQGYKHFKAEVDLLLRVHHTNLVSLVGYCDERDHLALIYEFLPKGDLRQHLSGKSGGSFINWGNRLRIALEAALGLEYLHSGCTPPIVHRDIKTTNILLDEQLKAKLADFGLSRSFPIGGETHISTVVAGTPGYLDPEYYQTTRLGEKSDVYSFGIVLLEIITNQPVIDQSRSKSHISQWVGFELTRGDITKIMDPNLNGDYESRSVWRVLELAMSCANPSSVNRPNMSQVANELKECLVSENLRENMNMDSQNSLKVSMSFDTELFPRAR

SEQ ID NO: 78585 - DNA, 2598 bp, Arabidopsis thaliana
  misc_feature (1)..(2598): Ceres Seq. ID no. 12642932
  misc_feature (1)..(2598): Ortholog of  Ceres SEQ ID NO 13654989 as cited in SEQ ID NO 63117
atggagagttcttttgggcttttgttggcactgttaactttgaccatcattcatattgttcaagctcaagacccacaagggttcatcagtttggattgcgggctacccgcaaatgagacgtctccttatacagagactcaaactggtctgttgttctcttcggacgcaacattcatccagagcggaaaaactggtagagtccaagcaaatcaagagagtaaattcttgaagccatacagaacgctgagatatttcccagagggagtacggaattgctacaatctgagtgtgttcaaggagcgtaaatatttgatcgctgctagttttttatatggaaattacgatggtcataacatagcccctgtgtttgatctttatcttggaccaaatttatgggcgaaaatagatttacaagatgtgaatggtacaggggaagagatcttacacatcccaacatcgaactcgttgcagatatgtcttgttcagactggggaaactacaccgctgatatcctctttggaattacggccaatgagaactggaagctataccactgtgtctggttccctgaaaacatacaggcgtttatattttaaaaagtctggatctaggctacggtacagtaaagatgtttatgatcgctcatggtttccgcgcttcatggacgaatggacccagatttccactgctctcggggtgattaataccaacatctaccaaccaccggaagatgcgctgaaaaatgctgccacgcctactgatgctagtgcgccactgacatttaaatggaattcagaaaaattggatgtccaatattacttttacgcacactatgctgagatccaagacttgcaggcaaatgataccagagaattcaacatcttattgaatggacaaaatttatctgtgactggccctgaagtcccagataagctaagtataaagaccttccaaagctcgtcaccgataagttgcaatggatgggcatgtaattttcagctgataagaaccaaaagatcaactcttccacctctacttaatgctttggaagtctacacagttattcagtttccacggtccgaaacagatgaaagcgacgtggttgctatgaaaaacatctcagccagctatggattgagtagaatcaactggcaaggcgatccatgcttccctcagcagcttaggtgggacgctttagactgcaccaacagaaatatctcccaaccaccaagaatcacttctttaaacttgtcttcaagtcgtttaaatggaaccatagcagctgccattcaaagtattacacaacttgaaacactggacttgtcgtataataacttaactggagaggtgccagagtttcttggcaaaatgaaatcgttaaacttaagcgggaacaatcttaatggttcaattccgcaagctcttcgaaagaaaagactaaaactataccttgaaggaaacccaaggcttataaaaccacctaagaaggaatttcctgtggcaattgttacattagttgtttttgtcacagtcattgtggttctttttcttgttttcagaaagaaaatgtccacgattgtaaaaggtctacgcctgccaccaaggacatcaatggtggatgttacattttctaataaaaaaagcaaaaggttcacatattcagaggtcgtccaagtgacaaagaacttccaaagagttttaggtaaaggagggttcggcatggtctatcacggtactgtaaagggttctgaacaggtggccgttaaggttctctctcaatcgtcaactcaaggctctaaggagttcaaagcagaggttgatctccttctgagagtgcaccatacaaatttggtgagcctggttgggtattgctgtgaaggagattacttggccctcgtctatgagtttcttcccaatggagacttaaaacaacatttgtcaggaaaaggaggtaattccatcatcaactggagtattcgactgcgaatagctttggaagcagcactaggtttggagtacttgcatattggatgcacaccaccgatggttcatagagatgtcaaaactgccaacatattgctcgacgagaattttaaggccaaactcgctgattttggtctttcaagatctttccaaggtgaaggcgaatctcaggaatcgacaacaattgctggtactcttggataccttgatcccgaatgttaccattcaggtcgattgggtgagaagagtgatgtctacagtttcgggatcgtgttattggagatgatcacaaaccaaccagtgatcaatcaaacctcgggagattctcacataacacaatgggttggctttcagatgaaccgaggtgatattcttgagattatggatccaaaccttcgcaaggattataacattaattctgcctggagagctttggaactggcaatgtcatgcgcgtatccttcttcctcaaaacgaccatccatgtctcaggttatacacgagctgaaagagtgtattgcgtgtgaaaacacagggataagtaagaatcgaagcttggaatatcaagaaatgaacgttagcttggacactacggcggttcccatggcaagatag

SEQ ID NO: 78586 - protein, 865 aa, Arabidopsis thaliana
  peptide (1)..(865): Ceres Seq. ID no. 12642933
MESSFGLLLALLTLTIIHIVQAQDPQGFISLDCGLPANETSPYTETQTGLLFSSDATFIQSGKTGRVQANQESKFLKPYRTLRYFPEGVRNCYNLSVFKERKYLIAASFLYGNYDGHNIAPVFDLYLGPNLWAKIDLQDVNGTGEEILHIPTSNSLQICLVQTGETTPLISSLELRPMRTGSYTTVSGSLKTYRRLYFKKSGSRLRYSKDVYDRSWFPRFMDEWTQISTALGVINTNIYQPPEDALKNAATPTDASAPLTFKWNSEKLDVQYYFYAHYAEIQDLQANDTREFNILLNGQNLSVTGPEVPDKLSIKTFQSSSPISCNGWACNFQLIRTKRSTLPPLLNALEVYTVIQFPRSETDESDVVAMKNISASYGLSRINWQGDPCFPQQLRWDALDCTNRNISQPPRITSLNLSSSRLNGTIAAAIQSITQLETLDLSYNNLTGEVPEFLGKMKSLNLSGNNLNGSIPQALRKKRLKLYLEGNPRLIKPPKKEFPVAIVTLVVFVTVIVVLFLVFRKKMSTIVKGLRLPPRTSMVDVTFSNKKSKRFTYSEVVQVTKNFQRVLGKGGFGMVYHGTVKGSEQVAVKVLSQSSTQGSKEFKAEVDLLLRVHHTNLVSLVGYCCEGDYLALVYEFLPNGDLKQHLSGKGGNSIINWSIRLRIALEAALGLEYLHIGCTPPMVHRDVKTANILLDENFKAKLADFGLSRSFQGEGESQESTTIAGTLGYLDPECYHSGRLGEKSDVYSFGIVLLEMITNQPVINQTSGDSHITQWVGFQMNRGDILEIMDPNLRKDYNINSAWRALELAMSCAYPSSSKRPSMSQVIHELKECIACENTGISKNRSLEYQEMNVSLDTTAVPMAR

SEQ ID NO: 78587 - protein, 688 aa, Arabidopsis thaliana
  peptide (1)..(688): Ceres Seq. ID no. 12642934
MRTGSYTTVSGSLKTYRRLYFKKSGSRLRYSKDVYDRSWFPRFMDEWTQISTALGVINTNIYQPPEDALKNAATPTDASAPLTFKWNSEKLDVQYYFYAHYAEIQDLQANDTREFNILLNGQNLSVTGPEVPDKLSIKTFQSSSPISCNGWACNFQLIRTKRSTLPPLLNALEVYTVIQFPRSETDESDVVAMKNISASYGLSRINWQGDPCFPQQLRWDALDCTNRNISQPPRITSLNLSSSRLNGTIAAAIQSITQLETLDLSYNNLTGEVPEFLGKMKSLNLSGNNLNGSIPQALRKKRLKLYLEGNPRLIKPPKKEFPVAIVTLVVFVTVIVVLFLVFRKKMSTIVKGLRLPPRTSMVDVTFSNKKSKRFTYSEVVQVTKNFQRVLGKGGFGMVYHGTVKGSEQVAVKVLSQSSTQGSKEFKAEVDLLLRVHHTNLVSLVGYCCEGDYLALVYEFLPNGDLKQHLSGKGGNSIINWSIRLRIALEAALGLEYLHIGCTPPMVHRDVKTANILLDENFKAKLADFGLSRSFQGEGESQESTTIAGTLGYLDPECYHSGRLGEKSDVYSFGIVLLEMITNQPVINQTSGDSHITQWVGFQMNRGDILEIMDPNLRKDYNINSAWRALELAMSCAYPSSSKRPSMSQVIHELKECIACENTGISKNRSLEYQEMNVSLDTTAVPMAR

SEQ ID NO: 78588 - protein, 645 aa, Arabidopsis thaliana
  peptide (1)..(645): Ceres Seq. ID no. 12642935
MDEWTQISTALGVINTNIYQPPEDALKNAATPTDASAPLTFKWNSEKLDVQYYFYAHYAEIQDLQANDTREFNILLNGQNLSVTGPEVPDKLSIKTFQSSSPISCNGWACNFQLIRTKRSTLPPLLNALEVYTVIQFPRSETDESDVVAMKNISASYGLSRINWQGDPCFPQQLRWDALDCTNRNISQPPRITSLNLSSSRLNGTIAAAIQSITQLETLDLSYNNLTGEVPEFLGKMKSLNLSGNNLNGSIPQALRKKRLKLYLEGNPRLIKPPKKEFPVAIVTLVVFVTVIVVLFLVFRKKMSTIVKGLRLPPRTSMVDVTFSNKKSKRFTYSEVVQVTKNFQRVLGKGGFGMVYHGTVKGSEQVAVKVLSQSSTQGSKEFKAEVDLLLRVHHTNLVSLVGYCCEGDYLALVYEFLPNGDLKQHLSGKGGNSIINWSIRLRIALEAALGLEYLHIGCTPPMVHRDVKTANILLDENFKAKLADFGLSRSFQGEGESQESTTIAGTLGYLDPECYHSGRLGEKSDVYSFGIVLLEMITNQPVINQTSGDSHITQWVGFQMNRGDILEIMDPNLRKDYNINSAWRALELAMSCAYPSSSKRPSMSQVIHELKECIACENTGISKNRSLEYQEMNVSLDTTAVPMAR

SEQ ID NO: 78589 - DNA, 2484 bp, Arabidopsis thaliana
  misc_feature (1)..(2484): Ceres Seq. ID no. 12642936
  misc_feature (1)..(2484): Ortholog of  Ceres SEQ ID NO 13654989 as cited in SEQ ID NO 63117
  misc_feature (1)..(2484): Ortholog of  Ceres SEQ ID NO 13584744 as cited in SEQ ID NO 69137
atggagaggtctcttgagctcttgttgctccttatcagaactttggccatcattcatatttctcaagctcaaagccaacaagggttcatcagtttggattgtggtctacccgcgaatgaaccatctccttatacagagccgaggactggattgcagttttcttcggacgcagcattcatccagagtggaaaaattggtaggattcaagcaaatctggaggctgacttcctgaagccatcaacgacgatgagatattttccagacggaaaacggaactgctacaatctaaacgttgagaagggaagaaatcatcttatcagggctcggtttgtatatggaaattatgatggtcgtgacactggccccaagtttgatctgtatcttggacctaatccatgggccacgatagatttggcaaaacaagtgaatggtacacgtcccgagatcatgcacatcccaacatcaaacaagttgcaggtttgtcttgttaagactggggaaactacaccgctaatatcggttttggaagtacggccgatgggaagtggtacttatctcaccaagtctggctctctgaaactttactatcgagaatattttagcaagtctgattcttctctaaggtaccctgatgatatctatgaccgccaatggacttcgttctttgatacagagtggacacaaattaacaccactagcgatgtgggaaattccaatgactataagccaccaaaagtcgctctcactactgcggccattccaactaatgccagtgcgccattgacgaatgaatggagttcagtaaaccccgatgaacagtattacgtatacgcccatttttctgagatccaagagttgcaggcaaatgaaaccagggaattcaacatgttactaaatgggaaacttttttttggccctgtggttcctccaaagctagcaataagtactatcctaagtgtgtcgccgaatacttgtgaaggaggggagtgcaatttacagctgataagaaccaacagatcaactcttccacctctacttaacgcttatgaggtctacaaagttattcagtttccgcagttggaaacaaatgaaaccgacgtttctgctgtgaaaaacatccaagccacctatgaattgagtagaatcaactggcaaagcgatccatgcgtccctcaacagtttatgtgggatggtttaaactgcagcatcacagatataaccacgccaccaagaatcactactttggacttgtcgaataataacttgaccggagaggtgccagaatttctaagcaacatgaaatcgctaaacttaagcgggaacgatcttaacggtacaattcctcaatctctacaaaggaaaggacttgagctactttatcaaggaaaccccaggcttatttcccctggttcaactgaaaccaaatctggcaagagctttccagtaacaatagttgcatcagttggttctgcagccattcttattgttgtgctggttcttgtactttttctccgaaagaaaaagccgtcggctgttgaagaggttacgaaaatgactaataatttcggaagagttgtaggggaaggaggatttggcgttgtctgccatggtactgtaaatggttctgaacaggtggctgttaaactactttcacaatcatcaactcaaggctataaagagttcaaggcagaggttgatcttcttctgagagttcaccatacgaatttggtaagccttgtcggatattgtgatgaaggagaccacttggcccttatctacgagtttgtacccaatggagacttaagacaacatttgtctggaaaaggaggtaaacccatcgtcaattggggtactcggctaagaatagcggcggaggcagcactaggtttggagtacttacacattggatgcacaccaccaatggttcatagagatgtcaaaactacaaacatattgctggacgagcattataaggccaaacttgctgattttgggctctcgagatctttccctgttggaggtgaatctcatgtttcgacggtgattgctggtactcctggttaccttgatccagaatattaccatacaagtcggttgagtgagaaaagtgatgtttacagtttcgggattgttttattagagatgatcacaaaccaagcagtgattgatcgaaaccgcagaaagtctcacataacacaatgggtagggtctgagcttaacggaggagatattgctaagatcatggatctaaagcttaacggtgattatgattctcgttctgcgtggagagctcttgagctagcaatgtcgtgcgcggatcctacctcagcaagacgaccaaccatgtctcatgttgttattgaactaaaagagtgtctcgtgtctgaaaactcgaggagaaatatgagtcgaggcatggatacactaagttcccctgaagtgagcatgatctttgatgctgagatgattcccagagcaagatag

SEQ ID NO: 78590 - protein, 827 aa, Arabidopsis thaliana
  peptide (1)..(827): Ceres Seq. ID no. 12642937
MERSLELLLLLIRTLAIIHISQAQSQQGFISLDCGLPANEPSPYTEPRTGLQFSSDAAFIQSGKIGRIQANLEADFLKPSTTMRYFPDGKRNCYNLNVEKGRNHLIRARFVYGNYDGRDTGPKFDLYLGPNPWATIDLAKQVNGTRPEIMHIPTSNKLQVCLVKTGETTPLISVLEVRPMGSGTYLTKSGSLKLYYREYFSKSDSSLRYPDDIYDRQWTSFFDTEWTQINTTSDVGNSNDYKPPKVALTTAAIPTNASAPLTNEWSSVNPDEQYYVYAHFSEIQELQANETREFNMLLNGKLFFGPVVPPKLAISTILSVSPNTCEGGECNLQLIRTNRSTLPPLLNAYEVYKVIQFPQLETNETDVSAVKNIQATYELSRINWQSDPCVPQQFMWDGLNCSITDITTPPRITTLDLSNNNLTGEVPEFLSNMKSLNLSGNDLNGTIPQSLQRKGLELLYQGNPRLISPGSTETKSGKSFPVTIVASVGSAAILIVVLVLVLFLRKKKPSAVEEVTKMTNNFGRVVGEGGFGVVCHGTVNGSEQVAVKLLSQSSTQGYKEFKAEVDLLLRVHHTNLVSLVGYCDEGDHLALIYEFVPNGDLRQHLSGKGGKPIVNWGTRLRIAAEAALGLEYLHIGCTPPMVHRDVKTTNILLDEHYKAKLADFGLSRSFPVGGESHVSTVIAGTPGYLDPEYYHTSRLSEKSDVYSFGIVLLEMITNQAVIDRNRRKSHITQWVGSELNGGDIAKIMDLKLNGDYDSRSAWRALELAMSCADPTSARRPTMSHVVIELKECLVSENSRRNMSRGMDTLSSPEVSMIFDAEMIPRAR

SEQ ID NO: 78591 - protein, 745 aa, Arabidopsis thaliana
  peptide (1)..(745): Ceres Seq. ID no. 12642938
MRYFPDGKRNCYNLNVEKGRNHLIRARFVYGNYDGRDTGPKFDLYLGPNPWATIDLAKQVNGTRPEIMHIPTSNKLQVCLVKTGETTPLISVLEVRPMGSGTYLTKSGSLKLYYREYFSKSDSSLRYPDDIYDRQWTSFFDTEWTQINTTSDVGNSNDYKPPKVALTTAAIPTNASAPLTNEWSSVNPDEQYYVYAHFSEIQELQANETREFNMLLNGKLFFGPVVPPKLAISTILSVSPNTCEGGECNLQLIRTNRSTLPPLLNAYEVYKVIQFPQLETNETDVSAVKNIQATYELSRINWQSDPCVPQQFMWDGLNCSITDITTPPRITTLDLSNNNLTGEVPEFLSNMKSLNLSGNDLNGTIPQSLQRKGLELLYQGNPRLISPGSTETKSGKSFPVTIVASVGSAAILIVVLVLVLFLRKKKPSAVEEVTKMTNNFGRVVGEGGFGVVCHGTVNGSEQVAVKLLSQSSTQGYKEFKAEVDLLLRVHHTNLVSLVGYCDEGDHLALIYEFVPNGDLRQHLSGKGGKPIVNWGTRLRIAAEAALGLEYLHIGCTPPMVHRDVKTTNILLDEHYKAKLADFGLSRSFPVGGESHVSTVIAGTPGYLDPEYYHTSRLSEKSDVYSFGIVLLEMITNQAVIDRNRRKSHITQWVGSELNGGDIAKIMDLKLNGDYDSRSAWRALELAMSCADPTSARRPTMSHVVIELKECLVSENSRRNMSRGMDTLSSPEVSMIFDAEMIPRAR

SEQ ID NO: 78592 - protein, 678 aa, Arabidopsis thaliana
  peptide (1)..(678): Ceres Seq. ID no. 12642939
MHIPTSNKLQVCLVKTGETTPLISVLEVRPMGSGTYLTKSGSLKLYYREYFSKSDSSLRYPDDIYDRQWTSFFDTEWTQINTTSDVGNSNDYKPPKVALTTAAIPTNASAPLTNEWSSVNPDEQYYVYAHFSEIQELQANETREFNMLLNGKLFFGPVVPPKLAISTILSVSPNTCEGGECNLQLIRTNRSTLPPLLNAYEVYKVIQFPQLETNETDVSAVKNIQATYELSRINWQSDPCVPQQFMWDGLNCSITDITTPPRITTLDLSNNNLTGEVPEFLSNMKSLNLSGNDLNGTIPQSLQRKGLELLYQGNPRLISPGSTETKSGKSFPVTIVASVGSAAILIVVLVLVLFLRKKKPSAVEEVTKMTNNFGRVVGEGGFGVVCHGTVNGSEQVAVKLLSQSSTQGYKEFKAEVDLLLRVHHTNLVSLVGYCDEGDHLALIYEFVPNGDLRQHLSGKGGKPIVNWGTRLRIAAEAALGLEYLHIGCTPPMVHRDVKTTNILLDEHYKAKLADFGLSRSFPVGGESHVSTVIAGTPGYLDPEYYHTSRLSEKSDVYSFGIVLLEMITNQAVIDRNRRKSHITQWVGSELNGGDIAKIMDLKLNGDYDSRSAWRALELAMSCADPTSARRPTMSHVVIELKECLVSENSRRNMSRGMDTLSSPEVSMIFDAEMIPRAR

SEQ ID NO: 78593 - DNA, 697 bp, Arabidopsis thaliana
  misc_feature (1)..(697): Ceres Seq. ID no. 12642943
  misc_feature (1)..(697): Ortholog of  Ceres SEQ ID NO 12612272 as cited in SEQ ID NO 55946
  misc_feature (1)..(697): Ortholog of  Ceres SEQ ID NO 15169960 as cited in SEQ ID NO 57591
agatcaaatcagcaggaaaatcaagaaccaaaagtctcccgaaaagcaacgaacaatgtctctcattccaagcatttttggaggacgcagatcaaacgtctttgatccgttctcgcaagacttatgggatccattcgaaggattcttcacgccatcttctgcgttggcaaacgcttcaaccgctcgtgatgtggcagcgtttacaaacgcaagagtggattggaaggaaacgccggaggcacatgtgttcaaagcggacttgccaggcctgaagaaggaagaagtcaaggttgaggttgaagacaagaacgttctgcagattagcggagagaggagcaaggagaacgaagagaagaacgataagtggcaccgtgtggagagagctagtgggaagtttatgagaaggtttaggttaccggagaatgcaaagatggaagaagtgaaggcaacaatggagaatggtgtgcttacggttgtggttccgaaagcgcctgagaagaagcctcaagtcaagtccatcgatatctccggggctaattgaatatgaagatgaagatgaaatatttggtgtgtcaaataaaaagcttgtgtgcttaagtttgtgtttttttcttggcttgttgtgttatgaatttgtggctttttctaatattaaatgaatgtaagatctcattataatgaataaacaaatgtttct

SEQ ID NO: 78594 - protein, 179 aa, Arabidopsis thaliana; identical to SEQ ID NO: 38390
  peptide (1)..(179): Ceres Seq. ID no. 12642944

SEQ ID NO: 78595 - protein, 161 aa, Arabidopsis thaliana; identical to SEQ ID NO: 38391
  peptide (1)..(161): Ceres Seq. ID no. 12642945

SEQ ID NO: 78596 - protein, 89 aa, Arabidopsis thaliana; identical to SEQ ID NO: 38392
  peptide (1)..(89): Ceres Seq. ID no. 12642946

SEQ ID NO: 78597 - DNA, 1218 bp, Arabidopsis thaliana
  misc_feature (1)..(1218): Ceres Seq. ID no. 12642967
  misc_feature (1)..(1218): Ortholog of  Ceres SEQ ID NO 13594037 as cited in SEQ ID NO 55666
  misc_feature (1)..(1218): Ortholog of  Ceres SEQ ID NO 15171501 as cited in SEQ ID NO 58322
atggagatgatggtaatgtttatgtttgaggaagttaagagctacatagagaggctccaagagacatcattccccatgaaagtcgaagcttttattcccgccgttttattgctctgttttggggtaatgttatgtttaaaaagctcgtgtgcgttgcagataggtaacaataatgagttgaagaattacataagttgggaagatttgagagttgtggaagatggaagaatagagagaagttttagcattaaggagaatagtaattgggtaaccacaaacgctaacgctaacgcgaacgctactaacgtgagaagagtgattgtggttgataaaaacggaggaggagattctgttacagttcaaggagctgttgatatggttcctgattccaattcacagagagttaaaatcttcattcttcctgggatttacagggagaaggtgattgtgccgaaatcaaaaccgtatatttcgttcataggtaatgagagctatgcgggagatacagtgattagttggagcgataaagcttcagaccttggctgcgatggtaaagaactcggcacttatagaaccgcctctgtttccattgaatctgatttcttctgtgctactgccatcacttttgagaacacggtggttgcagaggcaggggaacaggggaggcaagcggtggcgttgagaataattggggacaaagctgtgttctatagagttagggttttgggatcacaagacactctttttgatgacaatggatctcactacttttaccaatgctatatccaaggcaatgtagatttcatctttggcaatgcgaaatcactttaccaggactgtgatatccactcaaccgcaaagagatatggcgcgatcgcggctcatcatagagactcggagactgaagataccgggttctcctttgtgaactgtgatatcagtggtactgggcagatttacttaggaagggcttggggaaactactcaagaactgtttattcaaactgtttcatagctgatattatcactcctgtgggctggagtgactggaaacaccctgagaggcaaaggaaagtgatgttcggggagtacaattgcaggggaagaggagcagagagaggaggccgagtaccgtggtcgaaaactcttaccagagatgaagtgaagccttttctgggaagagagttcatatatggagatcaatggctgagactctaa

SEQ ID NO: 78598 - protein, 405 aa, Arabidopsis thaliana
  peptide (1)..(405): Ceres Seq. ID no. 12642968
MEMMVMFMFEEVKSYIERLQETSFPMKVEAFIPAVLLLCFGVMLCLKSSCALQIGNNNELKNYISWEDLRVVEDGRIERSFSIKENSNWVTTNANANANATNVRRVIVVDKNGGGDSVTVQGAVDMVPDSNSQRVKIFILPGIYREKVIVPKSKPYISFIGNESYAGDTVISWSDKASDLGCDGKELGTYRTASVSIESDFFCATAITFENTVVAEAGEQGRQAVALRIIGDKAVFYRVRVLGSQDTLFDDNGSHYFYQCYIQGNVDFIFGNAKSLYQDCDIHSTAKRYGAIAAHHRDSETEDTGFSFVNCDISGTGQIYLGRAWGNYSRTVYSNCFIADIITPVGWSDWKHPERQRKVMFGEYNCRGRGAERGGRVPWSKTLTRDEVKPFLGREFIYGDQWLRL

SEQ ID NO: 78599 - protein, 403 aa, Arabidopsis thaliana
  peptide (1)..(403): Ceres Seq. ID no. 12642969
MMVMFMFEEVKSYIERLQETSFPMKVEAFIPAVLLLCFGVMLCLKSSCALQIGNNNELKNYISWEDLRVVEDGRIERSFSIKENSNWVTTNANANANATNVRRVIVVDKNGGGDSVTVQGAVDMVPDSNSQRVKIFILPGIYREKVIVPKSKPYISFIGNESYAGDTVISWSDKASDLGCDGKELGTYRTASVSIESDFFCATAITFENTVVAEAGEQGRQAVALRIIGDKAVFYRVRVLGSQDTLFDDNGSHYFYQCYIQGNVDFIFGNAKSLYQDCDIHSTAKRYGAIAAHHRDSETEDTGFSFVNCDISGTGQIYLGRAWGNYSRTVYSNCFIADIITPVGWSDWKHPERQRKVMFGEYNCRGRGAERGGRVPWSKTLTRDEVKPFLGREFIYGDQWLRL

SEQ ID NO: 78600 - protein, 402 aa, Arabidopsis thaliana
  peptide (1)..(402): Ceres Seq. ID no. 12642970
MVMFMFEEVKSYIERLQETSFPMKVEAFIPAVLLLCFGVMLCLKSSCALQIGNNNELKNYISWEDLRVVEDGRIERSFSIKENSNWVTTNANANANATNVRRVIVVDKNGGGDSVTVQGAVDMVPDSNSQRVKIFILPGIYREKVIVPKSKPYISFIGNESYAGDTVISWSDKASDLGCDGKELGTYRTASVSIESDFFCATAITFENTVVAEAGEQGRQAVALRIIGDKAVFYRVRVLGSQDTLFDDNGSHYFYQCYIQGNVDFIFGNAKSLYQDCDIHSTAKRYGAIAAHHRDSETEDTGFSFVNCDISGTGQIYLGRAWGNYSRTVYSNCFIADIITPVGWSDWKHPERQRKVMFGEYNCRGRGAERGGRVPWSKTLTRDEVKPFLGREFIYGDQWLRL

SEQ ID NO: 78601 - DNA, 1502 bp, Arabidopsis thaliana
  misc_feature (1)..(1502): Ceres Seq. ID no. 12642995
  misc_feature (1)..(1502): Ortholog of  Ceres SEQ ID NO 12593058 as cited in SEQ ID NO 63090
atggccaagaagatgagttctctcatcatcatcttcaacattctccttctcctcacaactcaaacccacgcgcacaacgtcacgcgcctcctagcaaaccacccatcattctcttccttcagccatttcctaacacaaacacacctcgccgacgaaatcaaccggagaagaaccataaccgtttgcgcagtagataacgccgccatgtcagcattaacctctaaaggctatacactctcaactctcaaaaacattctctccctccacgtccttttagattacttcggaaccaaaaaactccaccagatccgtgacggctctgctctcgccgctactctgtttcaagccaccggagctgctcctggaacctcaggattcgttaacataacggatctgagaggtggtaaagttgggtttggtcctgacggtggagatctgtcttctttctttgttaaatctattgaagaagttccgtataacatctccattattcagatcagtagagttttaccgtcggagactgcggcggctccgactcctgctccggcggagatgaatcttaccggaataatgtcggctcatggatgcaaagtgtttgctgagactcttctcactaaccctggagcttcaaaaacctatcaggagagtttagaaggaggcatgacagtgttctgtccaggagatgatgcaatgaaaggtttcttgcccaaatacaagaacttgacagctccaaagaaagaagcatttctcgatttcctcgctgtcccgacatattactcaatggcgatgctcaaatccaacaatggtccgatgaacacacttgcgacagatggagctaacaagtttgagcttactgtacagaacgatggagagaaggttaccctcaagacaaggatcaacactgtcaagatcgttgatactcttattgatgagcagcctttagctatatatgcgactgataaggttttgttgcctaaagagttgtttaaggcttcggctgttgaagctccggctcctgctccggcaccagaggatggtgatgttgcggattctccaaaagcggctaaagggaaagcgaaaggaaagaagaagaaggctgcaccgtcgccagataatgatccttttggtgactcggattcgcctgccgaagggcctgacggagaggccgatgatgcgacggcagatgatgctggtgcggttaggatcatcggaggagctaaggctggtttggtggtgagcttgctctgcttgtttgcttcttcttggcttctatagtttcacttcgtttcttctattcttccatgtttttttttttgtgaatcttttatttatggtttttgggggaaagtaaatgaggattatttatttccctctattgttgagttttttttatttatttaaaagttggttgtcgaattaaatagtcggtagtttatatatttgtgtgttcttgtttcacgtgtttgtttagttgatgatgtaaacaagtcctgattttggtg

SEQ ID NO: 78602 - protein, 424 aa, Arabidopsis thaliana
  peptide (1)..(424): Ceres Seq. ID no. 12642996
MAKKMSSLIIIFNILLLLTTQTHAHNVTRLLANHPSFSSFSHFLTQTHLADEINRRRTITVCAVDNAAMSALTSKGYTLSTLKNILSLHVLLDYFGTKKLHQIRDGSALAATLFQATGAAPGTSGFVNITDLRGGKVGFGPDGGDLSSFFVKSIEEVPYNISIIQISRVLPSETAAAPTPAPAEMNLTGIMSAHGCKVFAETLLTNPGASKTYQESLEGGMTVFCPGDDAMKGFLPKYKNLTAPKKEAFLDFLAVPTYYSMAMLKSNNGPMNTLATDGANKFELTVQNDGEKVTLKTRINTVKIVDTLIDEQPLAIYATDKVLLPKELFKASAVEAPAPAPAPEDGDVADSPKAAKGKAKGKKKKAAPSPDNDPFGDSDSPAEGPDGEADDATADDAGAVRIIGGAKAGLVVSLLCLFASSWLL

SEQ ID NO: 78603 - protein, 420 aa, Arabidopsis thaliana
  peptide (1)..(420): Ceres Seq. ID no. 12642997
MSSLIIIFNILLLLTTQTHAHNVTRLLANHPSFSSFSHFLTQTHLADEINRRRTITVCAVDNAAMSALTSKGYTLSTLKNILSLHVLLDYFGTKKLHQIRDGSALAATLFQATGAAPGTSGFVNITDLRGGKVGFGPDGGDLSSFFVKSIEEVPYNISIIQISRVLPSETAAAPTPAPAEMNLTGIMSAHGCKVFAETLLTNPGASKTYQESLEGGMTVFCPGDDAMKGFLPKYKNLTAPKKEAFLDFLAVPTYYSMAMLKSNNGPMNTLATDGANKFELTVQNDGEKVTLKTRINTVKIVDTLIDEQPLAIYATDKVLLPKELFKASAVEAPAPAPAPEDGDVADSPKAAKGKAKGKKKKAAPSPDNDPFGDSDSPAEGPDGEADDATADDAGAVRIIGGAKAGLVVSLLCLFASSWLL

SEQ ID NO: 78604 - protein, 356 aa, Arabidopsis thaliana
  peptide (1)..(356): Ceres Seq. ID no. 12642998
MSALTSKGYTLSTLKNILSLHVLLDYFGTKKLHQIRDGSALAATLFQATGAAPGTSGFVNITDLRGGKVGFGPDGGDLSSFFVKSIEEVPYNISIIQISRVLPSETAAAPTPAPAEMNLTGIMSAHGCKVFAETLLTNPGASKTYQESLEGGMTVFCPGDDAMKGFLPKYKNLTAPKKEAFLDFLAVPTYYSMAMLKSNNGPMNTLATDGANKFELTVQNDGEKVTLKTRINTVKIVDTLIDEQPLAIYATDKVLLPKELFKASAVEAPAPAPAPEDGDVADSPKAAKGKAKGKKKKAAPSPDNDPFGDSDSPAEGPDGEADDATADDAGAVRIIGGAKAGLVVSLLCLFASSWLL

SEQ ID NO: 78605 - DNA, 2547 bp, Arabidopsis thaliana
  misc_feature (1)..(2547): Ceres Seq. ID no. 12642999
  misc_feature (1)..(2547): Ortholog of  Ceres SEQ ID NO 12586556 as cited in SEQ ID NO 64667
  misc_feature (1)..(2547): Ortholog of  Ceres SEQ ID NO 13660894 as cited in SEQ ID NO 67475
atggcttctcttcctttcaacactatcccgaataaagttccattttcagtatcatcgaaaccttcttctaaacaccacgatgaacaagctcattctccttcttccacatcttactttcatcgcgtttcgtctctttgtaagaacggtgagatcaaagaagctctgagtttagttacagagatggatttcagaaacttacgcattggtcctgagatatacggtgaaatcctccaaggatgcgtttacgagagagatttaagtacagggaagcaaattcatgctcggattttaaagaacggtgatttctacgcgaggaatgagtacatcgagactaaattggtgatattctacgccaagtgcgatgctttggagattgctgaagttcttttctcgaaattgagggttcgtaatgttttctcttgggcagctattattggtgtgaaatgtaggattgggttatgtgaaggagctttaatgggttttgttgagatgcttgaaaatgagatttttcctgataattttgtggttccgaatgtttgtaaagcgtgtggtgcgttgaaatggagtagatttgggagaggggttcatgggtatgtggtaaaatctggtcttgaggattgtgtgtttgtggctagtagtttagctgatatgtatgggaaatgtggtgttttggatgatgcgagtaaggtgtttgatgaaattcctgacagaaatgctgttgcttggaatgcgttgatggttggttatgtacaaaatggtaagaatgaggaagcgattcggcttttttctgatatgaggaagcaaggtgttgagcctactcgtgtcactgtctcgacttgcttatctgcttctgctaatatgggtggggttgaagaggggaaacagtcgcatgccattgctattgtaaatggaatggagctggataatatcttggggacatctttattgaatttctattgcaaagtgggtttgatagagtatgctgagatggtttttgatcggatgtttgaaaaggatgtggttacatggaatctgattatttctgggtatgttcaacaagggctagttgaagatgctatctacatgtgtcaattaatgagactagagaagctgaaatatgattgtgtcactttagcgacattaatgtctgctgctgcacgtactgagaatctaaagctcgggaaagaggtgcagtgttattgcattagacatagttttgaatctgatatcgttttagccagcactgtgatggatatgtatgccaagtgtggcagcattgttgatgctaagaaagtgtttgattctacagtagagaaagacttgatactgtggaatacgttacttgcagcctatgcagaatctggtcttagtggagaggctttgagattgttctatgggatgcagctagaaggtgtacctccaaatgtgataacatggaatttgatcattctaagtcttctaaggaatggtcaggtagatgaggccaaggatatgttcttgcagatgcaatcctcagggataattccaaatcttatctcatggacgactatgatgaatggtatggttcaaaatggttgcagtgaggaggcaattctgtttcttagaaagatgcaagaatcgggcctgagaccaaatgcatttagcatcactgtcgctctctctgcttgcgcacatctagcatcattgcatatcggaagaacaatccacggatacatcataagaaatctacagcattcctctttggtttctattgaaacttctttggttgacatgtatgctaaatgtggagatataaacaaagcagagaaggttttcggaagtaagctatacagcgagttgcctctctccaatgccatgatctcggcgtatgcattatatggtaacttaaaagaagcaatcgctctatacagaagcttagaaggtgtaggtcttaaaccagacaacatcacaatcacaaatgtcttatcagcatgtaaccacgcaggggatattaaccaggctatcgagattttcactgatatcgtttcaaagcgtagtatgaaaccatgcttggaacattatggacttatggtagatcttcttgcatcagctggagaaacagaaaaagctttaaggttaatcgaggaaatgccattcaagccagatgcacgaatgatccaatctttggttgcttcttgcaacaaacagcgtaagactgagcttgtggactacttatcaaggaaattgcttgaatccgagcctgaaaactccggtaactatgtgacgatatcgaatgcttatgcggttgaaggaagttgggatgaagttgtgaagatgagagagatgatgaaagctaagggtttgaagaaaaaacctggatgtagttggatacagattacaggagaagaaggagtccatgtgtttgttgccaatgataagacacatactaggatcaatgagatacaaatgatgttccaaatgataattatgtgtatgaaatattataaatttgatcatgtatatttagactctcaagaattgagaagctttgtgattactgttgtttaa

SEQ ID NO: 78606 - protein, 848 aa, Arabidopsis thaliana
  peptide (1)..(848): Ceres Seq. ID no. 12643000
MASLPFNTIPNKVPFSVSSKPSSKHHDEQAHSPSSTSYFHRVSSLCKNGEIKEALSLVTEMDFRNLRIGPEIYGEILQGCVYERDLSTGKQIHARILKNGDFYARNEYIETKLVIFYAKCDALEIAEVLFSKLRVRNVFSWAAIIGVKCRIGLCEGALMGFVEMLENEIFPDNFVVPNVCKACGALKWSRFGRGVHGYVVKSGLEDCVFVASSLADMYGKCGVLDDASKVFDEIPDRNAVAWNALMVGYVQNGKNEEAIRLFSDMRKQGVEPTRVTVSTCLSASANMGGVEEGKQSHAIAIVNGMELDNILGTSLLNFYCKVGLIEYAEMVFDRMFEKDVVTWNLIISGYVQQGLVEDAIYMCQLMRLEKLKYDCVTLATLMSAAARTENLKLGKEVQCYCIRHSFESDIVLASTVMDMYAKCGSIVDAKKVFDSTVEKDLILWNTLLAAYAESGLSGEALRLFYGMQLEGVPPNVITWNLIILSLLRNGQVDEAKDMFLQMQSSGIIPNLISWTTMMNGMVQNGCSEEAILFLRKMQESGLRPNAFSITVALSACAHLASLHIGRTIHGYIIRNLQHSSLVSIETSLVDMYAKCGDINKAEKVFGSKLYSELPLSNAMISAYALYGNLKEAIALYRSLEGVGLKPDNITITNVLSACNHAGDINQAIEIFTDIVSKRSMKPCLEHYGLMVDLLASAGETEKALRLIEEMPFKPDARMIQSLVASCNKQRKTELVDYLSRKLLESEPENSGNYVTISNAYAVEGSWDEVVKMREMMKAKGLKKKPGCSWIQITGEEGVHVFVANDKTHTRINEIQMMFQMIIMCMKYYKFDHVYLDSQELRSFVITVV

SEQ ID NO: 78607 - protein, 788 aa, Arabidopsis thaliana
  peptide (1)..(788): Ceres Seq. ID no. 12643001
MDFRNLRIGPEIYGEILQGCVYERDLSTGKQIHARILKNGDFYARNEYIETKLVIFYAKCDALEIAEVLFSKLRVRNVFSWAAIIGVKCRIGLCEGALMGFVEMLENEIFPDNFVVPNVCKACGALKWSRFGRGVHGYVVKSGLEDCVFVASSLADMYGKCGVLDDASKVFDEIPDRNAVAWNALMVGYVQNGKNEEAIRLFSDMRKQGVEPTRVTVSTCLSASANMGGVEEGKQSHAIAIVNGMELDNILGTSLLNFYCKVGLIEYAEMVFDRMFEKDVVTWNLIISGYVQQGLVEDAIYMCQLMRLEKLKYDCVTLATLMSAAARTENLKLGKEVQCYCIRHSFESDIVLASTVMDMYAKCGSIVDAKKVFDSTVEKDLILWNTLLAAYAESGLSGEALRLFYGMQLEGVPPNVITWNLIILSLLRNGQVDEAKDMFLQMQSSGIIPNLISWTTMMNGMVQNGCSEEAILFLRKMQESGLRPNAFSITVALSACAHLASLHIGRTIHGYIIRNLQHSSLVSIETSLVDMYAKCGDINKAEKVFGSKLYSELPLSNAMISAYALYGNLKEAIALYRSLEGVGLKPDNITITNVLSACNHAGDINQAIEIFTDIVSKRSMKPCLEHYGLMVDLLASAGETEKALRLIEEMPFKPDARMIQSLVASCNKQRKTELVDYLSRKLLESEPENSGNYVTISNAYAVEGSWDEVVKMREMMKAKGLKKKPGCSWIQITGEEGVHVFVANDKTHTRINEIQMMFQMIIMCMKYYKFDHVYLDSQELRSFVITVV

SEQ ID NO: 78608 - protein, 690 aa, Arabidopsis thaliana
  peptide (1)..(690): Ceres Seq. ID no. 12643002
MGFVEMLENEIFPDNFVVPNVCKACGALKWSRFGRGVHGYVVKSGLEDCVFVASSLADMYGKCGVLDDASKVFDEIPDRNAVAWNALMVGYVQNGKNEEAIRLFSDMRKQGVEPTRVTVSTCLSASANMGGVEEGKQSHAIAIVNGMELDNILGTSLLNFYCKVGLIEYAEMVFDRMFEKDVVTWNLIISGYVQQGLVEDAIYMCQLMRLEKLKYDCVTLATLMSAAARTENLKLGKEVQCYCIRHSFESDIVLASTVMDMYAKCGSIVDAKKVFDSTVEKDLILWNTLLAAYAESGLSGEALRLFYGMQLEGVPPNVITWNLIILSLLRNGQVDEAKDMFLQMQSSGIIPNLISWTTMMNGMVQNGCSEEAILFLRKMQESGLRPNAFSITVALSACAHLASLHIGRTIHGYIIRNLQHSSLVSIETSLVDMYAKCGDINKAEKVFGSKLYSELPLSNAMISAYALYGNLKEAIALYRSLEGVGLKPDNITITNVLSACNHAGDINQAIEIFTDIVSKRSMKPCLEHYGLMVDLLASAGETEKALRLIEEMPFKPDARMIQSLVASCNKQRKTELVDYLSRKLLESEPENSGNYVTISNAYAVEGSWDEVVKMREMMKAKGLKKKPGCSWIQITGEEGVHVFVANDKTHTRINEIQMMFQMIIMCMKYYKFDHVYLDSQELRSFVITVV

SEQ ID NO: 78609 - DNA, 717 bp, Arabidopsis thaliana
  misc_feature (1)..(717): Ceres Seq. ID no. 12643013
  misc_feature (1)..(717): Ortholog of  Ceres SEQ ID NO 13585433 as cited in SEQ ID NO 65192
atggatgtcccgttaccagtcgagaaattatcttatggatcaaacactgaggacaaaacttgtgtagtgcttgtggcaactgggagtttcaatcctcctactttcatgcatttacgcatgtttgagctggcgagagatgaattacgctcaaaaggatttcatgttcttggaggatatatgtctcctgttaatgatgcatataagaagaagggccttttatctgcagaacatcgtttagagatgtgtaatgtatcatgtcaaagctctgactttgtaatggttgatccgtgggaggcatctcaaagcaactaccaacgaactttgacggttttatcaagggtcaagactttcttaacaacaaatcgacatgtacccgaggaatctctcaaagtcatgctactatgtggctcggatttactgctatctttctgcactcccggtgtttggatccctgaacagttaagaactatttgcaaagattatggcattgtgtgcatccgtagagaaggacaagatgttgaaaatatgatctctggtgacgaaatcttaaacgaaaactgtgctaacgtcaaaatcgttgacaatactgttcctaatcaaatcagttcgagtagattaaggcaatgcatttcgcgagggttatcggttaaatacttgactgaagatggagtaatagattatatcagacaacatcaactatacactgagctcacatga

SEQ ID NO: 78610 - protein, 238 aa, Arabidopsis thaliana
  peptide (1)..(238): Ceres Seq. ID no. 12643014
MDVPLPVEKLSYGSNTEDKTCVVLVATGSFNPPTFMHLRMFELARDELRSKGFHVLGGYMSPVNDAYKKKGLLSAEHRLEMCNVSCQSSDFVMVDPWEASQSNYQRTLTVLSRVKTFLTTNRHVPEESLKVMLLCGSDLLLSFCTPGVWIPEQLRTICKDYGIVCIRREGQDVENMISGDEILNENCANVKIVDNTVPNQISSSRLRQCISRGLSVKYLTEDGVIDYIRQHQLYTELT

SEQ ID NO: 78611 - protein, 203 aa, Arabidopsis thaliana
  peptide (1)..(203): Ceres Seq. ID no. 12643015
MHLRMFELARDELRSKGFHVLGGYMSPVNDAYKKKGLLSAEHRLEMCNVSCQSSDFVMVDPWEASQSNYQRTLTVLSRVKTFLTTNRHVPEESLKVMLLCGSDLLLSFCTPGVWIPEQLRTICKDYGIVCIRREGQDVENMISGDEILNENCANVKIVDNTVPNQISSSRLRQCISRGLSVKYLTEDGVIDYIRQHQLYTELT

SEQ ID NO: 78612 - protein, 199 aa, Arabidopsis thaliana
  peptide (1)..(199): Ceres Seq. ID no. 12643016
MFELARDELRSKGFHVLGGYMSPVNDAYKKKGLLSAEHRLEMCNVSCQSSDFVMVDPWEASQSNYQRTLTVLSRVKTFLTTNRHVPEESLKVMLLCGSDLLLSFCTPGVWIPEQLRTICKDYGIVCIRREGQDVENMISGDEILNENCANVKIVDNTVPNQISSSRLRQCISRGLSVKYLTEDGVIDYIRQHQLYTELT

SEQ ID NO: 78613 - DNA, 1002 bp, Arabidopsis thaliana
  misc_feature (1)..(1002): Ceres Seq. ID no. 12643027
  misc_feature (1)..(1002): Ortholog of  Ceres SEQ ID NO 12611392 as cited in SEQ ID NO 56826
  misc_feature (1)..(1002): Ortholog of  Ceres SEQ ID NO 13660872 as cited in SEQ ID NO 60830
  misc_feature (1)..(1002): Ortholog of  Ceres SEQ ID NO 12616221 as cited in SEQ ID NO 63291
atggatgatgaagagagtaacaacgttgaaagatatgacgacgtcgtattgccagggtttaggttccatcccactgatgaagaactcgtaagtttctacttgaaacggaaggttttacacaaatctcttccctttgatctcatcaagaaagtcgacatttacaaatacgatccatgggacctcccaaagcttgcagcgatgggggaaaaagagtggtacttttattgtcctagagacaggaaataccgcaacagcacaagacctaaccgagtaactggaggtggcttctggaaagcaaccggaacagaccggcctatatactcattggactccactcgatgcatcggtttgaagaaatcacttgtgttctaccgtggtcgagctgctaaaggagtcaaaaccgattggatgatgcatgaatttcgtctcccttctctctctgactctcatcactcatcatatcccaattacaataacaagaagcaacaccttaacaataacaacaacagcaaggagcttccttcaaacgatgcttgggcgatatgtagaatatttaagaagacaaatgcagtatcctcacaaagatcaatcccacaatcttgggtttatccaacgattcctgacaacaatcaacagtcacacaacaacaccgcaactctcttagcttcatcagacgttctcagccacatatcaacaagacaaaactttattccttctccagtcaacgaacccgcaagcttcacagaatcagctgcttcttacttcgcgtctcagatgctcggagtcacgtacaatacagccagaaacaacggaacaggggatgctctgtttctgagaaacaatggaacaggggatgctctggttctgagcaacaatgagaataactacttcaacaacttgactggagggttgactcatgaggttccgaatgtaagatcaatggtgatggaggagactacggggagtgagatgtcggcgacgtcgtattccactaacaattaa

SEQ ID NO: 78614 - protein, 333 aa, Arabidopsis thaliana
  peptide (1)..(333): Ceres Seq. ID no. 12643028
MDDEESNNVERYDDVVLPGFRFHPTDEELVSFYLKRKVLHKSLPFDLIKKVDIYKYDPWDLPKLAAMGEKEWYFYCPRDRKYRNSTRPNRVTGGGFWKATGTDRPIYSLDSTRCIGLKKSLVFYRGRAAKGVKTDWMMHEFRLPSLSDSHHSSYPNYNNKKQHLNNNNNSKELPSNDAWAICRIFKKTNAVSSQRSIPQSWVYPTIPDNNQQSHNNTATLLASSDVLSHISTRQNFIPSPVNEPASFTESAASYFASQMLGVTYNTARNNGTGDALFLRNNGTGDALVLSNNENNYFNNLTGGLTHEVPNVRSMVMEETTGSEMSATSYSTNN

SEQ ID NO: 78615 - protein, 267 aa, Arabidopsis thaliana
  peptide (1)..(267): Ceres Seq. ID no. 12643029
MGEKEWYFYCPRDRKYRNSTRPNRVTGGGFWKATGTDRPIYSLDSTRCIGLKKSLVFYRGRAAKGVKTDWMMHEFRLPSLSDSHHSSYPNYNNKKQHLNNNNNSKELPSNDAWAICRIFKKTNAVSSQRSIPQSWVYPTIPDNNQQSHNNTATLLASSDVLSHISTRQNFIPSPVNEPASFTESAASYFASQMLGVTYNTARNNGTGDALFLRNNGTGDALVLSNNENNYFNNLTGGLTHEVPNVRSMVMEETTGSEMSATSYSTNN

SEQ ID NO: 78616 - protein, 197 aa, Arabidopsis thaliana
  peptide (1)..(197): Ceres Seq. ID no. 12643030
MMHEFRLPSLSDSHHSSYPNYNNKKQHLNNNNNSKELPSNDAWAICRIFKKTNAVSSQRSIPQSWVYPTIPDNNQQSHNNTATLLASSDVLSHISTRQNFIPSPVNEPASFTESAASYFASQMLGVTYNTARNNGTGDALFLRNNGTGDALVLSNNENNYFNNLTGGLTHEVPNVRSMVMEETTGSEMSATSYSTNN

SEQ ID NO: 78617 - DNA, 723 bp, Arabidopsis thaliana
  misc_feature (1)..(723): Ceres Seq. ID no. 12643105
  misc_feature (1)..(723): Ortholog of  Ceres SEQ ID NO 14303493 as cited in SEQ ID NO 54484
  misc_feature (1)..(723): Ortholog of  Ceres SEQ ID NO 14312258 as cited in SEQ ID NO 57251
atgtcttcaagatcatcacttcattcattaccacaaacaacgattgaatcacctcctgattcaccaaccctctcttcaatccccgatagccatggatcttctcctcacacgattattccaactccttctgtggccaagacggagactccttttagggttactaacggagaggaggagaagaaagtcagcgagagtaggagacaattgagaccgagcttttcttcttcttcttctactccgcgtgaatcgaaatgggcaagtttgattaggaaagctctacttggatttagggttattgcgtttgtttcgtgtcttgtttcgttctctgtaatggtttctgatagagataaaggatgggctcatgattctttctacaactacaaagaattcaggttctgtttggctgcgaatgtgattggttttgtctactctggttttatgatatgtgatcttgtatacctgttatctactagcatccgaagatcacgacataacctgcgacatttcttggaatttggtcttgatcaaatgctagcttatcttcttgcatcagcttcaacttcagcttcgatccgcgtagatgattggcaatcaaactggggagcagacaagttcccagacttagctagagcatctgtcgcactgtcttacgtctcctttgtcgcattcgccttctgctcattggcttccggttatgctctatgtgcactccggtccatctaa

SEQ ID NO: 78618 - protein, 240 aa, Arabidopsis thaliana; identical to SEQ ID NO: 37753
  peptide (1)..(240): Ceres Seq. ID no. 12643106

SEQ ID NO: 78619 - protein, 130 aa, Arabidopsis thaliana
  peptide (1)..(130): Ceres Seq. ID no. 12643107
MVSDRDKGWAHDSFYNYKEFRFCLAANVIGFVYSGFMICDLVYLLSTSIRRSRHNLRHFLEFGLDQMLAYLLASASTSASIRVDDWQSNWGADKFPDLARASVALSYVSFVAFAFCSLASGYALCALRSI

SEQ ID NO: 78620 - DNA, 1391 bp, Arabidopsis thaliana
  misc_feature (1)..(1391): Ceres Seq. ID no. 12643137
  misc_feature (1)..(1391): Ortholog of  Ceres SEQ ID NO 13655244 as cited in SEQ ID NO 62716
attgcactcttcctccattttttgattacttccatttcctcaaaagtcaaagctctctttcttctctctcgagatttgctaacttgtcaatggcggatgttgagaatctgaactctgttccggcgtcggaagacacagagtatggatttaaacggccggagatgtacagcacaaacatagccaattccataacttcctacgctcgtcatgtttttgttctttacaaaactcctgaagcttggctctctcacgtcgaagaagaaggtttacctcaacgtttcgctacgttgcttaaagatcgcaaatctgatcttcttgttcagacgaagctcaatgtatgtgaaggtggtggatctgacggtgatgttttgatttttcccgatatgatcagatacaagggggttaaggatacggatgtggaaggtttctttgaagatgttcttgtgaatgggaagccatggagttctgggatacaagaagagatatctggaacatttgtatttgtgtgtactcatgctagtcgtgacaagagatgtggtgtttgtggaccagtgatcttggagaggtttaagcaagagattggttctcgaggactgtcggaccagattacactgaaacgttgttctcatgttggacagcacaagtatgctggtaatttgatcatcttctgtcctgattcagctggaaagattactggcaattggtatggctatgtaacacctgatgatgtacctgaattgcttgatcaacatattgcaaaaggagaaatcatacaaaggatttggagggggcaaatgggtctacctggaggtgaagctgagaaagtgcatgaacagaaagttataccaaatggtcacggtgtagtgaaagaggagagcaaaggattcacaggaggatgttgtcagggatcaaacggtgtttcgtgttgccaagacgaaactccaaagccagagccaatcaagaaagaagtaaaaaagtgtaccatatggttccagcctcttgacaaagaagagctttacattggagctgctgtggttggagccattgcaactatagccatggctttcacctttttcaagaggtcaggttaagaacctaaccttacttacttaccaatagaagtttttccttggagattgccatgagacaatagaaaaagaaaacctccattgattcgaccacaaaacagaagcgaagaattatgtttttgtctttgattttaccattaaagaaacatataaactttttggtttctgtgagcgtttttttgccttgctatcttctcacattatgtgtttttgttgtaatggccataacttctgtgattggtctaaactctctcactttggtgcattaacaaaactttgatttggtttggtttggcttatgtt

SEQ ID NO: 78621 - protein, 362 aa, Arabidopsis thaliana
  peptide (1)..(362): Ceres Seq. ID no. 12643138
CTLPPFFDYFHFLKSQSSLSSLSRFANLSMADVENLNSVPASEDTEYGFKRPEMYSTNIANSITSYARHVFVLYKTPEAWLSHVEEEGLPQRFATLLKDRKSDLLVQTKLNVCEGGGSDGDVLIFPDMIRYKGVKDTDVEGFFEDVLVNGKPWSSGIQEEISGTFVFVCTHASRDKRCGVCGPVILERFKQEIGSRGLSDQITLKRCSHVGQHKYAGNLIIFCPDSAGKITGNWYGYVTPDDVPELLDQHIAKGEIIQRIWRGQMGLPGGEAEKVHEQKVIPNGHGVVKEESKGFTGGCCQGSNGVSCCQDETPKPEPIKKEVKKCTIWFQPLDKEELYIGAAVVGAIATIAMAFTFFKRSG

SEQ ID NO: 78622 - protein, 333 aa, Arabidopsis thaliana; identical to SEQ ID NO: 42513
  peptide (1)..(333): Ceres Seq. ID no. 12643139

SEQ ID NO: 78623 - protein, 309 aa, Arabidopsis thaliana; identical to SEQ ID NO: 42514
  peptide (1)..(309): Ceres Seq. ID no. 12643140

SEQ ID NO: 78624 - DNA, 1086 bp, Arabidopsis thaliana
  misc_feature (1)..(1086): Ceres Seq. ID no. 12643192
  misc_feature (1)..(1086): Ortholog of  Ceres SEQ ID NO 13595688 as cited in SEQ ID NO 54342
  misc_feature (1)..(1086): Ortholog of  Ceres SEQ ID NO 13595240 as cited in SEQ ID NO 56316
  misc_feature (1)..(1086): Ortholog of  Ceres SEQ ID NO 15168425 as cited in SEQ ID NO 57370
atgacccataagtccagtcgcgtcatccggagacatccattttctctggtagctgtttacttcttcttcttcttcttcttcttcttcctcctcctctgttcgtcaatcgccgatctcgttgcttcattttccttgagatcgattggtacaagtgttcatccaatggttggaggaggagttatccggcagcttcttagaaggaaacttcattcccaatcagtcgcaactccggtattgtcatggttgtcttcgaagaaagcgaatgaagatgctgggtctgctggtttaagagcatttgctctcatgggtgctggtattaccggattattgagtttttctactgttgcatctgctgatgaggctgaacatggtctggagtgtcctaactacccttggccacatgagggcattctcagctcatatgaccatgcttcgatccgtcgtggtcaccaagtttatcagcaagtttgtgcgtcttgccattcgatgtctctgatctcataccgagacttggtgggtgttgcctacacagaggaagaggcgaaggccatggcagctgaaatcgaggttgttgatggaccaaatgatgagggtgagatgttcacccgacctggtaaactcagtgatcggcttcctgaaccatactcaaatgaatcggctgctaggttcgccaatggaggagcgtatccaccggatctaagtcttgtaactaaggcacgtcacaatggccaaaattatgtctttgctctgttgactggttatcgtgatcctcctgctggaatttcgatcagagaggggctacactacaatccttatttccctggtggagcaatcgctatgccaaaaatgctcaacgatgaagctgtggaatatgaagatggaactcctgcaacagaagcacagatgggtaaagatgttgtatccttcttgtcctgggcagctgaaccagagatggaagagaggaaattgatggggttcaaatggatattcttactgtctttggctctgcttcaagctgcgtattacaggagactgaaatggtcagtactcaaatcccgtaagcttgttctcgacgttgttaactaa

SEQ ID NO: 78625 - protein, 361 aa, Arabidopsis thaliana
  peptide (1)..(361): Ceres Seq. ID no. 12643193
MTHKSSRVIRRHPFSLVAVYFFFFFFFFFLLLCSSIADLVASFSLRSIGTSVHPMVGGGVIRQLLRRKLHSQSVATPVLSWLSSKKANEDAGSAGLRAFALMGAGITGLLSFSTVASADEAEHGLECPNYPWPHEGILSSYDHASIRRGHQVYQQVCASCHSMSLISYRDLVGVAYTEEEAKAMAAEIEVVDGPNDEGEMFTRPGKLSDRLPEPYSNESAARFANGGAYPPDLSLVTKARHNGQNYVFALLTGYRDPPAGISIREGLHYNPYFPGGAIAMPKMLNDEAVEYEDGTPATEAQMGKDVVSFLSWAAEPEMEERKLMGFKWIFLLSLALLQAAYYRRLKWSVLKSRKLVLDVVN

SEQ ID NO: 78626 - protein, 307 aa, Arabidopsis thaliana; identical to SEQ ID NO: 40157
  peptide (1)..(307): Ceres Seq. ID no. 12643194

SEQ ID NO: 78627 - protein, 260 aa, Arabidopsis thaliana; identical to SEQ ID NO: 23964
  peptide (1)..(260): Ceres Seq. ID no. 12643195

SEQ ID NO: 78628 - DNA, 906 bp, Arabidopsis thaliana
  misc_feature (1)..(906): Ceres Seq. ID no. 12643383
  misc_feature (1)..(906): Ortholog of  Ceres SEQ ID NO 14316095 as cited in SEQ ID NO 52477
atggctaattcctcctccttctccccctctaccaccgtaacagatttaatctccaccgtccatgacgacatcatagagtctcacatcttgacacgtctcgacggcgcaaccttagcatccgtctcttgcgcctcctcacatcttcatcatctcgcttccaatgagatcctctggtccaaaatctgccgatccacgtggccttcttgctccggtggttctcgttctttcttctccgacgcttattctatggtggaaaccgccggtacagtctctgatctcgaccgtccgtttccggaattgatctccgccgtggatcttcactacagagggaagttgatttttagtagagtcgtgaagacggagactacgacggcgtggtttaagagttcgccgttgaggattgatctggtggatacaaaggatacggtggcgacgccgattaagagaagacagaggacggaagacacgtgtcgtgatctagagaaggatttgactttgagctggatcgtgattgatccgatcgggaaacgagcggcgaatatttcgagtcaccggccggtgtcggtgcagaggaactggataagcggagaagtggaggcgcaattcgcgacggtggtgggggcggtggagtgtgtgatcacggtggtcacgtgcggtgaggaggagatgcacgtgagggaagtgagtctcaaggtagagaagatggagggaacgcatttaaacgggagggacagtttggttattttaaggagtgtcatggagggtaaaagggtaaatggaagtaggagggaagtagaatcgaagaagagacacgaagagtttatggagaagaagagagagatgaaggagaagaagatgagggtagaatcggtatttgacattttgactgtacttttggtattttag

SEQ ID NO: 78629 - protein, 301 aa, Arabidopsis thaliana
  peptide (1)..(301): Ceres Seq. ID no. 12643384
MANSSSFSPSTTVTDLISTVHDDIIESHILTRLDGATLASVSCASSHLHHLASNEILWSKICRSTWPSCSGGSRSFFSDAYSMVETAGTVSDLDRPFPELISAVDLHYRGKLIFSRVVKTETTTAWFKSSPLRIDLVDTKDTVATPIKRRQRTEDTCRDLEKDLTLSWIVIDPIGKRAANISSHRPVSVQRNWISGEVEAQFATVVGAVECVITVVTCGEEEMHVREVSLKVEKMEGTHLNGRDSLVILRSVMEGKRVNGSRREVESKKRHEEFMEKKREMKEKKMRVESVFDILTVLLVF

SEQ ID NO: 78630 - protein, 219 aa, Arabidopsis thaliana
  peptide (1)..(219): Ceres Seq. ID no. 12643385
MVETAGTVSDLDRPFPELISAVDLHYRGKLIFSRVVKTETTTAWFKSSPLRIDLVDTKDTVATPIKRRQRTEDTCRDLEKDLTLSWIVIDPIGKRAANISSHRPVSVQRNWISGEVEAQFATVVGAVECVITVVTCGEEEMHVREVSLKVEKMEGTHLNGRDSLVILRSVMEGKRVNGSRREVESKKRHEEFMEKKREMKEKKMRVESVFDILTVLLVF

SEQ ID NO: 78631 - DNA, 984 bp, Arabidopsis thaliana
  misc_feature (1)..(984): Ceres Seq. ID no. 12643444
  misc_feature (1)..(984): Ortholog of  Ceres SEQ ID NO 13637685 as cited in SEQ ID NO 53978
atgagaggtctcgcggcttgttacagtgaacacgccattaaagtatcagatacatattgttcaggtccatcgaatcattcctatatatctccgacattacctccttcaatccccgacacagtaaccaccacttatagatccaatctcccatcttccgacaaacccgtctctgtttcactcacctggtcggataatctcaccgtcgtcatctcaacgccgccgaaatcatactctgtttcactcagaaaacctaaaggatcaagaaagttgacttcttcctccggttcactcaacgccgagatcctctgggatctatcggaagcagagtacgaaaacaacggacctgaaccaataagaagattcttcgtcgtcgtcgttgtaaattccgagattaccctcggagtcggcgacgttgaccacgagcgagacacgtcatcatcgtcgtcgtggcgagtctcaaaaacggagagattctctggaacttgttggctcacgacgaaagctcaattctccgacgtcggaaggaaacacgagatacagattcaatgcggcggaggaggaggaggaggaggagaggaagggtatttatggaaagtgaaaagtcctgaaacgatgtcggtttatgttgataagaggaaagtgttttcggtgaagaagcttaagtggaactttagagggaatcaaaccatgtttttcgatggaatgcttatagacatgatgtgggatttacacgactggttctacaaagaaacgttgtcgtctgtttcgactagttcatcgtctaaaacggcgtcgtcgtcatcgtcttcttcaacttcatcgtctactcctccgtgtgctgtgtttatgtttaggaggaggagtggtttggatagtagattatggattgatgaagatgaacaagagagtgagatgaagaagaatattggttctagagatgagaaacattcgttttcacttatcatttgtgcctctaaaaagtga

SEQ ID NO: 78632 - protein, 327 aa, Arabidopsis thaliana
  peptide (1)..(327): Ceres Seq. ID no. 12643445
MRGLAACYSEHAIKVSDTYCSGPSNHSYISPTLPPSIPDTVTTTYRSNLPSSDKPVSVSLTWSDNLTVVISTPPKSYSVSLRKPKGSRKLTSSSGSLNAEILWDLSEAEYENNGPEPIRRFFVVVVVNSEITLGVGDVDHERDTSSSSSWRVSKTERFSGTCWLTTKAQFSDVGRKHEIQIQCGGGGGGGGEEGYLWKVKSPETMSVYVDKRKVFSVKKLKWNFRGNQTMFFDGMLIDMMWDLHDWFYKETLSSVSTSSSSKTASSSSSSSTSSSTPPCAVFMFRRRSGLDSRLWIDEDEQESEMKKNIGSRDEKHSFSLIICASKK

SEQ ID NO: 78633 - DNA, 1651 bp, Arabidopsis thaliana
  misc_feature (1)..(1651): Ceres Seq. ID no. 12643452
  misc_feature (1)..(1651): Ortholog of  Ceres SEQ ID NO 15227226 as cited in SEQ ID NO 54691
  misc_feature (1)..(1651): Ortholog of  Ceres SEQ ID NO 14303169 as cited in SEQ ID NO 65741
agctactactgttgaagcgattctcactaaaaccctcgaacacatcgcctttatctctttctctagatctactcgctatggctactatcaccgttgttaaggctagacagatcttcgacagtcgtggtaatcccaccgttgaggttgatatccacacgtcaaatggtattaaggttacagcagctgttccaagtggagcttccactggtatctatgaggctcttgagctgagggatggaggatctgactaccttggaaagggtgtatctaaggctgttggcaatgtgaacaacatcatcgggccagcacttattggaaaggacccaactcagcagactgctattgacaacttcatggtccatgaacttgacggaacccaaaacgagtgggggtggtgcaagcaaaagcttggagccaatgcgattcttgctgtgtctcttgctgtctgcaaagctggggctgttgtcagcggcattcctctatacaagcacattgccaaccttgctggtaaccccaagattgtgctaccagttcctgccttcaacgtcatcaatggtggatcccatgccggaaacaagcttgctatgcaggagtttatgatcctccctgttggagctgcttctttcaaggaagccatgaagatgggtgtggaagtttaccaccacttgaagtctgtgattaagaagaagtacggccaggatgccacaaatgttggtgatgaaggtgggtttgcaccaaacattcaggagaacaaggagggtcttgaattgctcaagactgctatcgagaaggctggatacactggaaaggttgtcattggaatggatgttgccgcttcagagttctactcagaagacaagacctacgacttgaacttcaaagaagagaacaacaatggctctcagaagatttctggtgatgctctaaaggacctgtacaagtcctttgtcgctgagtacccaatcgtgtccattgaggacccatttgaccaagatgactgggagcactatgctaagatgaccactgagtgtggaaccgaggttcagattgtcggtgatgatttgttggtcactaaccccaagagagttgctaaggcaatcgcagagaagtcttgcaatgctcttcttttgaaggttaaccaaatcggatctgtaaccgagagtatcgaggcagttaagatgtcgaagaaagcaggttggggagtgatgaccagccacagaagtggtgaaaccgaggacacattcattgctgacttagccgttggcttgtccactggacaaatcaaaaccggtgctccttgcagatccgagcgtcttgccaagtacaaccagcttttgcgtattgaggaggagttgggatcagaggcaatttacgctggagtcaacttccgcaaacctgtggaaccctactaaatggagcttttagaagcaaagtggtcttctttgtgacgaggagaagatgacctgagtttgatcatttgctttaattaaataaaacgttctgtttttgtttcttctttgtttggtttcttacgtcttttgttgaaccctttttgggaaaagttactcatttttgtaagggaaacatgagaatgctctgcctttgtcgaggacggtagccccttatttcaatctaatttcggctttactct

SEQ ID NO: 78634 - protein, 469 aa, Arabidopsis thaliana; identical to SEQ ID NO: 28966
  peptide (1)..(469): Ceres Seq. ID no. 12643453

SEQ ID NO: 78635 - protein, 444 aa, Arabidopsis thaliana; identical to SEQ ID NO: 28967
  peptide (1)..(444): Ceres Seq. ID no. 12643454

SEQ ID NO: 78636 - protein, 352 aa, Arabidopsis thaliana; identical to SEQ ID NO: 15479
  peptide (1)..(352): Ceres Seq. ID no. 12643455

SEQ ID NO: 78637 - DNA, 657 bp, Arabidopsis thaliana
  misc_feature (1)..(657): Ceres Seq. ID no. 12643466
  misc_feature (1)..(657): Ortholog of  Ceres SEQ ID NO 15170857 as cited in SEQ ID NO 54658
  misc_feature (1)..(657): Ortholog of  Ceres SEQ ID NO 15180523 as cited in SEQ ID NO 0
atgttcaatttctggggatcaaaagaacagcaacaaggacaatctcgtccttctccagaagcttctgcaacaccgtggtattcgccgtctcttgtcacctctcctagctcatcccggcctcaaacctcagggcagattccatcacatgtttcaccaggtgaagccgccggcattattgccattttaaaagacaaaagtgtggatgagcttaggaagcttctctctgacaaggatgcgtatcaacagtttctgcactcgcttgaccaggtcactattcaaaacaatatcagagaagagcttcgcaaagaaacgttacatctagctagagaaaacttggagaaggaaccacagatagtggagctcagaaaccaatgcagaataatccgtacatccgagcttgcgactgctcaagagaagctcaatgagcttgagaatcaaagagaagagatcctcaaattctactctccaggttctcttcttcatagacttcaagatgctatgaaccaggtggatgaagaatcagaggagctgcaacagaagtttatggagaaggatattgacacagctgcatttgtgcagaaatacaaaaagctaagaagcaagtatcatcgacgggctttgattcatctcgctgctaaaacttcatctattggctga

SEQ ID NO: 78638 - protein, 218 aa, Arabidopsis thaliana
  peptide (1)..(218): Ceres Seq. ID no. 12643467
MFNFWGSKEQQQGQSRPSPEASATPWYSPSLVTSPSSSRPQTSGQIPSHVSPGEAAGIIAILKDKSVDELRKLLSDKDAYQQFLHSLDQVTIQNNIREELRKETLHLARENLEKEPQIVELRNQCRIIRTSELATAQEKLNELENQREEILKFYSPGSLLHRLQDAMNQVDEESEELQQKFMEKDIDTAAFVQKYKKLRSKYHRRALIHLAAKTSSIG

SEQ ID NO: 78639 - DNA, 1011 bp, Arabidopsis thaliana
  misc_feature (1)..(1011): Ceres Seq. ID no. 12643468
  misc_feature (1)..(1011): Ortholog of  Ceres SEQ ID NO 12636774 as cited in SEQ ID NO 372
  misc_feature (1)..(1011): Ortholog of  Ceres SEQ ID NO 13582350 as cited in SEQ ID NO 56734
  misc_feature (1)..(1011): Ortholog of  Ceres SEQ ID NO 12476493 as cited in SEQ ID NO 58163
  misc_feature (1)..(1011): Ortholog of  Ceres SEQ ID NO 13596470 as cited in SEQ ID NO 62158
  misc_feature (1)..(1011): Ortholog of  Ceres SEQ ID NO 12578315 as cited in SEQ ID NO 62451
  misc_feature (1)..(1011): Ortholog of  Ceres SEQ ID NO 12615907 as cited in SEQ ID NO 62860
  misc_feature (1)..(1011): Ortholog of  Ceres SEQ ID NO 13597295 as cited in SEQ ID NO 63743
  misc_feature (1)..(1011): Ortholog of  Ceres SEQ ID NO 12617090 as cited in SEQ ID NO 64005
  misc_feature (1)..(1011): Ortholog of  Ceres SEQ ID NO 13597233 as cited in SEQ ID NO 64370
  misc_feature (1)..(1011): Ortholog of  Ceres SEQ ID NO 13584577 as cited in SEQ ID NO 65298
  misc_feature (1)..(1011): Ortholog of  Ceres SEQ ID NO 13600370 as cited in SEQ ID NO 0
atgtcgccgtcaatgatagctccggtgatggaagaagagaacaagaaataccaaaaaggcgtgaaacatctttgtgaaaatggtctgaccaaagtaccaaccaagtatatatggcctgaacctgaccgacccatcttgacaaaatcggacaagctcatcaaaccaaacaaaaacctaaagctccccctcatagatttcgctgagctccttggacctaaccggcctcatgttctacgaaccatagccgaggcctgcaaaacctacggcttctttcaggttgtgaatcatgggatggaaggagacgtgagcaagaatatgatagacgtgtgtaagagattctttgagcttccgtacgaggagagatccaagtacatgtcgtcggacatgtcggctccagtacgatacggcacgagtttcaaccagatcaaagacaatgtcttttgttggagagacttcttgaaactctatgcacatccactccctgactatcttcctcattggccttcttctccttctgacttcagtgatgaggcggctaaggagttggaagagggaagtcaggtggtggtggtgaactgttatccaccgtgtccggagccagagctgacgctagggatgccaccgcactcagactacggcttcttgacgcttctacttcaagacgaagtcgaaggtcttcaaattctgtatcgtgacgagtgggtcaccgttgatcccatccctggctcttttgttgtcaacgtaggcgatcatctcgagatatttagcaatgggaggtataaaagcgtgctacatagggtattggtgaactctacaaaacctaggatatcggtggcgtcgctacacagcttccctttgacttctgtcgtaaagccatcgccgaaactcgtcgataaacataatccatcacagtatatggacactgattttaccacttttcttcagtatataacttctcgtgaacccaaatggaagaattttcttgaatcacgcaagattcaccatgtatga

SEQ ID NO: 78640 - protein, 336 aa, Arabidopsis thaliana
  peptide (1)..(336): Ceres Seq. ID no. 12643469
MSPSMIAPVMEEENKKYQKGVKHLCENGLTKVPTKYIWPEPDRPILTKSDKLIKPNKNLKLPLIDFAELLGPNRPHVLRTIAEACKTYGFFQVVNHGMEGDVSKNMIDVCKRFFELPYEERSKYMSSDMSAPVRYGTSFNQIKDNVFCWRDFLKLYAHPLPDYLPHWPSSPSDFSDEAAKELEEGSQVVVVNCYPPCPEPELTLGMPPHSDYGFLTLLLQDEVEGLQILYRDEWVTVDPIPGSFVVNVGDHLEIFSNGRYKSVLHRVLVNSTKPRISVASLHSFPLTSVVKPSPKLVDKHNPSQYMDTDFTTFLQYITSREPKWKNFLESRKIHHV

SEQ ID NO: 78641 - protein, 332 aa, Arabidopsis thaliana
  peptide (1)..(332): Ceres Seq. ID no. 12643470
MIAPVMEEENKKYQKGVKHLCENGLTKVPTKYIWPEPDRPILTKSDKLIKPNKNLKLPLIDFAELLGPNRPHVLRTIAEACKTYGFFQVVNHGMEGDVSKNMIDVCKRFFELPYEERSKYMSSDMSAPVRYGTSFNQIKDNVFCWRDFLKLYAHPLPDYLPHWPSSPSDFSDEAAKELEEGSQVVVVNCYPPCPEPELTLGMPPHSDYGFLTLLLQDEVEGLQILYRDEWVTVDPIPGSFVVNVGDHLEIFSNGRYKSVLHRVLVNSTKPRISVASLHSFPLTSVVKPSPKLVDKHNPSQYMDTDFTTFLQYITSREPKWKNFLESRKIHHV

SEQ ID NO: 78642 - protein, 327 aa, Arabidopsis thaliana
  peptide (1)..(327): Ceres Seq. ID no. 12643471
MEEENKKYQKGVKHLCENGLTKVPTKYIWPEPDRPILTKSDKLIKPNKNLKLPLIDFAELLGPNRPHVLRTIAEACKTYGFFQVVNHGMEGDVSKNMIDVCKRFFELPYEERSKYMSSDMSAPVRYGTSFNQIKDNVFCWRDFLKLYAHPLPDYLPHWPSSPSDFSDEAAKELEEGSQVVVVNCYPPCPEPELTLGMPPHSDYGFLTLLLQDEVEGLQILYRDEWVTVDPIPGSFVVNVGDHLEIFSNGRYKSVLHRVLVNSTKPRISVASLHSFPLTSVVKPSPKLVDKHNPSQYMDTDFTTFLQYITSREPKWKNFLESRKIHHV

SEQ ID NO: 78643 - DNA, 1422 bp, Arabidopsis thaliana
  misc_feature (1)..(1422): Ceres Seq. ID no. 12643545
  misc_feature (1)..(1422): Ortholog of  Ceres SEQ ID NO 13584744 as cited in SEQ ID NO 69137
atggactgtggcagacacctcgagaacaaccgactaaccggaaagatcccttcctcgttgacgaaactcccaaacctgaaagaactgtacctgcagaacaatgtgttaacaggaacaataccatcagacctggccaaagatgtgatctcaaacttctctgggaaccttaaccttgaaaaaagtggagataaaggcaagaagctcggtgtcatcatcggtgcatcagttggtgcttttgttctgctaattgcaaccatcatttcttgcatcgtcatgtgcaaaagcaagaagaataacaagttgggaaaaacttcggcagagttaacgaatcgtcccttaccgattcagagagtttcgtctaccttgagtgaagctcatggagacgctgcacattgcttcacactttatgagatcgaggaagccacaaaaaaattcgaaaagagaattgggtcgggaggttttggaatcgtatactatggtaaaacaagggaggggaaagagattgctgtaaaggttcttgcaaataattcatatcagggaaagagagagtttgcaaacgaggttacattactctcaaggatacatcatcggaaccttgtgcagtttcttggttattgccaagaagagggaaaaaacatgcttgtgtatgagttcatgcacaatgggactttgaaggagcatctttatggcgtggtaccacgtgaccggagaatcagttggattaaaaggcttgagatagctgaagatgcagcccgagggatcgagtatcttcacacagggtgtgttccagcaatcatacatagagatctcaagactagtaacatcctacttgacaaacacatgagggcaaaggtttcagatttcggtttgtcgaaattcgcagttgacgggacctcacatgtctccagcattgtccgtggcacagttggatatcttgaccccgagtactatatatcgcagcagttaacagagaagagtgatgtatatagcttcggagtcattcttcttgagctaatgtctggccaagaagccatatcgaatgaaagctttggtgtcaactgccggaacatagtccaatgggctaagatgcatatagacaacggggacatccgagggatcatcgatccagcgctagcggaagatgattacagtctccaatcaatgtggaagattgcggagaaagcgttgctgtgtgtgaaaccgcacgggaacatgagaccttcgatgtccgaggtgcaaaaagatatccaagacgcgattaggatcgagaaggaagcgttggctgcaagaggcggtatatcagacgagttttccaggagctcggctcattcgtcttcgctcaacatgggaatgcttgacctggctggatcacagagttatgtatccattgatgaatcagtattgcagccaacagctcggtag

SEQ ID NO: 78644 - protein, 473 aa, Arabidopsis thaliana
  peptide (1)..(473): Ceres Seq. ID no. 12643546
MDCGRHLENNRLTGKIPSSLTKLPNLKELYLQNNVLTGTIPSDLAKDVISNFSGNLNLEKSGDKGKKLGVIIGASVGAFVLLIATIISCIVMCKSKKNNKLGKTSAELTNRPLPIQRVSSTLSEAHGDAAHCFTLYEIEEATKKFEKRIGSGGFGIVYYGKTREGKEIAVKVLANNSYQGKREFANEVTLLSRIHHRNLVQFLGYCQEEGKNMLVYEFMHNGTLKEHLYGVVPRDRRISWIKRLEIAEDAARGIEYLHTGCVPAIIHRDLKTSNILLDKHMRAKVSDFGLSKFAVDGTSHVSSIVRGTVGYLDPEYYISQQLTEKSDVYSFGVILLELMSGQEAISNESFGVNCRNIVQWAKMHIDNGDIRGIIDPALAEDDYSLQSMWKIAEKALLCVKPHGNMRPSMSEVQKDIQDAIRIEKEALAARGGISDEFSRSSAHSSSLNMGMLDLAGSQSYVSIDESVLQPTAR

SEQ ID NO: 78645 - protein, 382 aa, Arabidopsis thaliana
  peptide (1)..(382): Ceres Seq. ID no. 12643547
MCKSKKNNKLGKTSAELTNRPLPIQRVSSTLSEAHGDAAHCFTLYEIEEATKKFEKRIGSGGFGIVYYGKTREGKEIAVKVLANNSYQGKREFANEVTLLSRIHHRNLVQFLGYCQEEGKNMLVYEFMHNGTLKEHLYGVVPRDRRISWIKRLEIAEDAARGIEYLHTGCVPAIIHRDLKTSNILLDKHMRAKVSDFGLSKFAVDGTSHVSSIVRGTVGYLDPEYYISQQLTEKSDVYSFGVILLELMSGQEAISNESFGVNCRNIVQWAKMHIDNGDIRGIIDPALAEDDYSLQSMWKIAEKALLCVKPHGNMRPSMSEVQKDIQDAIRIEKEALAARGGISDEFSRSSAHSSSLNMGMLDLAGSQSYVSIDESVLQPTAR

SEQ ID NO: 78646 - protein, 261 aa, Arabidopsis thaliana
  peptide (1)..(261): Ceres Seq. ID no. 12643548
MLVYEFMHNGTLKEHLYGVVPRDRRISWIKRLEIAEDAARGIEYLHTGCVPAIIHRDLKTSNILLDKHMRAKVSDFGLSKFAVDGTSHVSSIVRGTVGYLDPEYYISQQLTEKSDVYSFGVILLELMSGQEAISNESFGVNCRNIVQWAKMHIDNGDIRGIIDPALAEDDYSLQSMWKIAEKALLCVKPHGNMRPSMSEVQKDIQDAIRIEKEALAARGGISDEFSRSSAHSSSLNMGMLDLAGSQSYVSIDESVLQPTAR

SEQ ID NO: 78647 - DNA, 2010 bp, Arabidopsis thaliana
  misc_feature (1)..(2010): Ceres Seq. ID no. 12643552
  misc_feature (1)..(2010): Ortholog of  Ceres SEQ ID NO 12611435 as cited in SEQ ID NO 56451
atggatgaatccttaactccaaaccctaagcaaaagccagcttcaacgacgactcgaatccaggctccgacgagtcccttcttcttgggatctaacgatgacagattggaacgggaacaagctcgagccgcaagagccgctgctagccgtcgtaggtctgtcattttcgctcgtgggtctcagcctgagacggagtctgatccttgtttcgacaaacagcaaattctcgagttgtttcagaactgtatcaaattagccagtgaaaacaaaatcaatcaaaagaatacatgggagttgaatttgatcgaccatctttgtgagattatcaaagttgaagatgagaacaatacagaaacaaattttcaaaaggcaagttgcactcttgaagctggagttaagatttactcaatgcgggtagactctgttcattcagaggcatacaaggtcttgggtggaattacccgagctggccatgatgacggtggagatcacgaggatgctgctggtgccgtagaaaatgcaactaaccaaaagaagcagccagagaaaaagatatcgcctttatcaacactggaaccttcctttgatgcccttaacgtgaagaaatttgatgtggcatttgcagtggatcccctttatcatcagacttcagcacagtttgatgaaggtggagcaaagggcctgctgctaaacaatttaggagtctatggagggtgtcaagttctatttgattcacaagaaatccctggaaagcttgtttcgtctgcaaataagcatgacaaatcagaaacaattgatctatcctttgttaaagaatgtgtggagcaaatggtgctaaacatgcgaaagaaggatgagattgtaccatctcttcgggctataatcaatcaatttgatgaagagaaccaaagaccatctgacacgttttcttgtggtcagcagacgaccgagtcatttgatatttcacatggtaatgatgctagctatgccgacgatgatgaaggatatgagaactttggaacttcttttgattatgagggtcaatccggtgatgttgatgaaaactttggccccaatgaagcagaaccaatatattcaaattttcatgaggaagttgaaccagcctccctgcaagacatggattcagatgacagactggagaatgttgatgactatctctttttgtcgttgggaatttcatctaagcaaaattcttgggcaggtcctgatcactggaagtatcgaaaaacaaaaggtccagatgttcaacctgcttcagaaattaaatcctctccaccagcgaagaaaaccaggaaaaagaagcaagcagagcctgaactagattttgcaaaagctttggaggaagaaatgcctgatatttttgcccctccaaaaaacccaaagactttacttctcccagcaagtagaaccccttgtcaaacgaagcttccagaggattgccattatcaacctgagaatctaataaagctatttctactaccgaatgtgatggtatggcttgccaaacacagaccaagtgaaacttcaagacagcagcctgatgattatgaacatggggaatcctggggaaatgataatgtttatgatgatgatgatggcccattcgatgataatgaaaatgatcaaagtgatgcagaggataccaacacattaatctctcagccacgccaggtcaacaaaattgatgtccaatacgataaagcttcaaaacaagttgatgtgcaagtgctaaaggaaactctttgggagtgtcttcaggaatctcatcaacctccaattcaggatgaggaacatcaacaagaaccacctgaaagtagatctttcaaagtgctattggctagcttcccagatgattgccaagcagccgagagaacccaagacatctcaccacatctatgtttcatctgcttgctgcatttggcgaacgagcacaatctcagcctcattggttctcaaaacttggatgatctaacaatacaccttgcctga

SEQ ID NO: 78648 - protein, 669 aa, Arabidopsis thaliana
  peptide (1)..(669): Ceres Seq. ID no. 12643553
MDESLTPNPKQKPASTTTRIQAPTSPFFLGSNDDRLEREQARAARAAASRRRSVIFARGSQPETESDPCFDKQQILELFQNCIKLASENKINQKNTWELNLIDHLCEIIKVEDENNTETNFQKASCTLEAGVKIYSMRVDSVHSEAYKVLGGITRAGHDDGGDHEDAAGAVENATNQKKQPEKKISPLSTLEPSFDALNVKKFDVAFAVDPLYHQTSAQFDEGGAKGLLLNNLGVYGGCQVLFDSQEIPGKLVSSANKHDKSETIDLSFVKECVEQMVLNMRKKDEIVPSLRAIINQFDEENQRPSDTFSCGQQTTESFDISHGNDASYADDDEGYENFGTSFDYEGQSGDVDENFGPNEAEPIYSNFHEEVEPASLQDMDSDDRLENVDDYLFLSLGISSKQNSWAGPDHWKYRKTKGPDVQPASEIKSSPPAKKTRKKKQAEPELDFAKALEEEMPDIFAPPKNPKTLLLPASRTPCQTKLPEDCHYQPENLIKLFLLPNVMVWLAKHRPSETSRQQPDDYEHGESWGNDNVYDDDDGPFDDNENDQSDAEDTNTLISQPRQVNKIDVQYDKASKQVDVQVLKETLWECLQESHQPPIQDEEHQQEPPESRSFKVLLASFPDDCQAAERTQDISPHLCFICLLHLANEHNLSLIGSQNLDDLTIHLA

SEQ ID NO: 78649 - protein, 533 aa, Arabidopsis thaliana
  peptide (1)..(533): Ceres Seq. ID no. 12643554
MRVDSVHSEAYKVLGGITRAGHDDGGDHEDAAGAVENATNQKKQPEKKISPLSTLEPSFDALNVKKFDVAFAVDPLYHQTSAQFDEGGAKGLLLNNLGVYGGCQVLFDSQEIPGKLVSSANKHDKSETIDLSFVKECVEQMVLNMRKKDEIVPSLRAIINQFDEENQRPSDTFSCGQQTTESFDISHGNDASYADDDEGYENFGTSFDYEGQSGDVDENFGPNEAEPIYSNFHEEVEPASLQDMDSDDRLENVDDYLFLSLGISSKQNSWAGPDHWKYRKTKGPDVQPASEIKSSPPAKKTRKKKQAEPELDFAKALEEEMPDIFAPPKNPKTLLLPASRTPCQTKLPEDCHYQPENLIKLFLLPNVMVWLAKHRPSETSRQQPDDYEHGESWGNDNVYDDDDGPFDDNENDQSDAEDTNTLISQPRQVNKIDVQYDKASKQVDVQVLKETLWECLQESHQPPIQDEEHQQEPPESRSFKVLLASFPDDCQAAERTQDISPHLCFICLLHLANEHNLSLIGSQNLDDLTIHLA

SEQ ID NO: 78650 - protein, 393 aa, Arabidopsis thaliana
  peptide (1)..(393): Ceres Seq. ID no. 12643555
MVLNMRKKDEIVPSLRAIINQFDEENQRPSDTFSCGQQTTESFDISHGNDASYADDDEGYENFGTSFDYEGQSGDVDENFGPNEAEPIYSNFHEEVEPASLQDMDSDDRLENVDDYLFLSLGISSKQNSWAGPDHWKYRKTKGPDVQPASEIKSSPPAKKTRKKKQAEPELDFAKALEEEMPDIFAPPKNPKTLLLPASRTPCQTKLPEDCHYQPENLIKLFLLPNVMVWLAKHRPSETSRQQPDDYEHGESWGNDNVYDDDDGPFDDNENDQSDAEDTNTLISQPRQVNKIDVQYDKASKQVDVQVLKETLWECLQESHQPPIQDEEHQQEPPESRSFKVLLASFPDDCQAAERTQDISPHLCFICLLHLANEHNLSLIGSQNLDDLTIHLA

SEQ ID NO: 78651 - DNA, 1536 bp, Arabidopsis thaliana
  misc_feature (1)..(1536): Ceres Seq. ID no. 12643579
  misc_feature (1)..(1536): Ortholog of  Ceres SEQ ID NO 14310024 as cited in SEQ ID NO 20634
  misc_feature (1)..(1536): Ortholog of  Ceres SEQ ID NO 15177184 as cited in SEQ ID NO 58157
atgaagatgatgaaaccagttccaaagctttgggttgtcatctcaagtgcctttgtgttctgtcttttagttctgtttcaaatcaataaatcagatttgatcgaagcaaatctccaaatcactcatcaagttaacaacttcctcatctccttcgttgcttcttcaaataatcaaatcctaaatcacaccaaacatgcgaatgagagtgatggaatcagagcgaaacagcttgaggaagaagaaacggatacttgcgccggaagatacatctacatgtacaatcttccaagcacattcaacgacgacatcatcaaagaatgtcgtccactcatcaaatggttcgatatgtgtccattcatggtcaattccgggctcggtccacagattttggtctccgataaaaccacagctcgagtcttaaccgtgaaaaccggttcttggtactcaacgaaccaattcttgctttcggttatcttccgagagaggatgaaacactacgagtgtttgaccaacaactcttctctagcctcagcgatctatgtcccatactacgcaggatttgatgtgagccgtcacctctggggatacaacgtgacggttagagacgaattggcgataaagctggcacaatggctgagagagagacctgaatgggggaagatgtacggccgagatcacttctttgtgaccggacggattggttgggatttcaggaggtttcacgatgaagattcagattggggaagcaaactgatgctattacctgaattctcgaatctgacaatgttaggtatcgaaacgactgcttgggctaacgaatttgcgattccttatcctacttatttccatccaaagagcttaacagagatttggagatggcagaagaaagtgaagagtgtgaagaggaagtatttgttttcgtttgttggaggtccaagacctaaattggatggatctattaggggagagattataaagcagtgccttgcatctcacggtaaatgcaactttcttaactgctttgttaatgactgcgataatccggttaagataatgaaggtgtttgaaaattctgtcttctgtttacaaccttcgggagattcgtacactcggagatcgatattcgattcgattctggcgggttgtataccggttttcttcagcccaggttcgggttacaaccaatatatttggtattttccaaaggattataccaagtactcggtttacataccagagaatgaaatgagaaatggaacggttagtctcaagaatattttgggtatgatcgctaaggagaggattttgaggatgagaaaagaggttgtgaagattataccaaaaatcatatataataaaccagggtttggaccggagaagattgaagatgcgtttgacattgcagtggataggatgcttgagagggtagcaatggttaagaggatgatggaagaagggaaagatgttcaaagtcagtattattcacagacaaaggatttgaaaaaacttgagattatacatgaaaaaactgcttaa

SEQ ID NO: 78652 - protein, 511 aa, Arabidopsis thaliana
  peptide (1)..(511): Ceres Seq. ID no. 12643580
MKMMKPVPKLWVVISSAFVFCLLVLFQINKSDLIEANLQITHQVNNFLISFVASSNNQILNHTKHANESDGIRAKQLEEEETDTCAGRYIYMYNLPSTFNDDIIKECRPLIKWFDMCPFMVNSGLGPQILVSDKTTARVLTVKTGSWYSTNQFLLSVIFRERMKHYECLTNNSSLASAIYVPYYAGFDVSRHLWGYNVTVRDELAIKLAQWLRERPEWGKMYGRDHFFVTGRIGWDFRRFHDEDSDWGSKLMLLPEFSNLTMLGIETTAWANEFAIPYPTYFHPKSLTEIWRWQKKVKSVKRKYLFSFVGGPRPKLDGSIRGEIIKQCLASHGKCNFLNCFVNDCDNPVKIMKVFENSVFCLQPSGDSYTRRSIFDSILAGCIPVFFSPGSGYNQYIWYFPKDYTKYSVYIPENEMRNGTVSLKNILGMIAKERILRMRKEVVKIIPKIIYNKPGFGPEKIEDAFDIAVDRMLERVAMVKRMMEEGKDVQSQYYSQTKDLKKLEIIHEKTA

SEQ ID NO: 78653 - protein, 509 aa, Arabidopsis thaliana
  peptide (1)..(509): Ceres Seq. ID no. 12643581
MMKPVPKLWVVISSAFVFCLLVLFQINKSDLIEANLQITHQVNNFLISFVASSNNQILNHTKHANESDGIRAKQLEEEETDTCAGRYIYMYNLPSTFNDDIIKECRPLIKWFDMCPFMVNSGLGPQILVSDKTTARVLTVKTGSWYSTNQFLLSVIFRERMKHYECLTNNSSLASAIYVPYYAGFDVSRHLWGYNVTVRDELAIKLAQWLRERPEWGKMYGRDHFFVTGRIGWDFRRFHDEDSDWGSKLMLLPEFSNLTMLGIETTAWANEFAIPYPTYFHPKSLTEIWRWQKKVKSVKRKYLFSFVGGPRPKLDGSIRGEIIKQCLASHGKCNFLNCFVNDCDNPVKIMKVFENSVFCLQPSGDSYTRRSIFDSILAGCIPVFFSPGSGYNQYIWYFPKDYTKYSVYIPENEMRNGTVSLKNILGMIAKERILRMRKEVVKIIPKIIYNKPGFGPEKIEDAFDIAVDRMLERVAMVKRMMEEGKDVQSQYYSQTKDLKKLEIIHEKTA

SEQ ID NO: 78654 - protein, 508 aa, Arabidopsis thaliana
  peptide (1)..(508): Ceres Seq. ID no. 12643582
MKPVPKLWVVISSAFVFCLLVLFQINKSDLIEANLQITHQVNNFLISFVASSNNQILNHTKHANESDGIRAKQLEEEETDTCAGRYIYMYNLPSTFNDDIIKECRPLIKWFDMCPFMVNSGLGPQILVSDKTTARVLTVKTGSWYSTNQFLLSVIFRERMKHYECLTNNSSLASAIYVPYYAGFDVSRHLWGYNVTVRDELAIKLAQWLRERPEWGKMYGRDHFFVTGRIGWDFRRFHDEDSDWGSKLMLLPEFSNLTMLGIETTAWANEFAIPYPTYFHPKSLTEIWRWQKKVKSVKRKYLFSFVGGPRPKLDGSIRGEIIKQCLASHGKCNFLNCFVNDCDNPVKIMKVFENSVFCLQPSGDSYTRRSIFDSILAGCIPVFFSPGSGYNQYIWYFPKDYTKYSVYIPENEMRNGTVSLKNILGMIAKERILRMRKEVVKIIPKIIYNKPGFGPEKIEDAFDIAVDRMLERVAMVKRMMEEGKDVQSQYYSQTKDLKKLEIIHEKTA

SEQ ID NO: 78655 - DNA, 942 bp, Arabidopsis thaliana
  misc_feature (1)..(942): Ceres Seq. ID no. 12643627
  misc_feature (1)..(942): Ortholog of  Ceres SEQ ID NO 13518411 as cited in SEQ ID NO 55230
  misc_feature (1)..(942): Ortholog of  Ceres SEQ ID NO 13598724 as cited in SEQ ID NO 61069
atgagacacggtgatttggctagctctttgttcaggaaatccgaaaacgaaggtgatggattgaagtctttggattggataacaaggttgaaaattgctcttggtgcagctgagggactctcttatttgcatcatgagtgttcaccgcctctagttcatagggatgtacaagcaagtagcatacttcttgatgataaatttgaggtacgtcttggaagcctaagcgaggcatatgctcaaggtgatgcttatcaaagcagaatttctcgtttacttcgattaccgcaatcgagtgaaccatcttcttcaggtgtaacaaatgcaatatgttcgtatgatgtctactgctttggcaaagtgttacttgagctagtaacggggaagctcgggattagctcgccagacaacgcacttgcaaaagagtacatggaagaagctttgccatacatcagcacaaacgagaaagaactagtaaccaagatcttagacccgtcattaatggtggacgaagaccttctagaagaagtatgggcaatggctatcattgcaaagtcatgcctaaacccaaaaccaacaagaagaccattaatgagacacattgtgaacgcacttgagaacccactgaaagtagtaagagaagataccaactcgggttcaggctcttcccggttaagaacaaactcgtcgagagggtcttggaacgctgctatatttgggagctggaggcagagtgcgtcggatgtaacagctgttcaagcgggagcaacaacaagcggtggtggtggtggtggtggtggtaatggtttgagaaactcggggtcgcaaggaagtagcggaaggaacaataacaacaacgggaattcatcgtcgtcgagaagacggcaatctagtgagattgtaccggaacctgctgcttatggagtagtagaggataatttatga

SEQ ID NO: 78656 - protein, 313 aa, Arabidopsis thaliana
  peptide (1)..(313): Ceres Seq. ID no. 12643628
MRHGDLASSLFRKSENEGDGLKSLDWITRLKIALGAAEGLSYLHHECSPPLVHRDVQASSILLDDKFEVRLGSLSEAYAQGDAYQSRISRLLRLPQSSEPSSSGVTNAICSYDVYCFGKVLLELVTGKLGISSPDNALAKEYMEEALPYISTNEKELVTKILDPSLMVDEDLLEEVWAMAIIAKSCLNPKPTRRPLMRHIVNALENPLKVVREDTNSGSGSSRLRTNSSRGSWNAAIFGSWRQSASDVTAVQAGATTSGGGGGGGGNGLRNSGSQGSSGRNNNNNGNSSSSRRRQSSEIVPEPAAYGVVEDNL

SEQ ID NO: 78657 - protein, 171 aa, Arabidopsis thaliana
  peptide (1)..(171): Ceres Seq. ID no. 12643629
MEEALPYISTNEKELVTKILDPSLMVDEDLLEEVWAMAIIAKSCLNPKPTRRPLMRHIVNALENPLKVVREDTNSGSGSSRLRTNSSRGSWNAAIFGSWRQSASDVTAVQAGATTSGGGGGGGGNGLRNSGSQGSSGRNNNNNGNSSSSRRRQSSEIVPEPAAYGVVEDNL

SEQ ID NO: 78658 - DNA, 1895 bp, Arabidopsis thaliana
  misc_feature (1)..(1895): Ceres Seq. ID no. 12643698
  misc_feature (1)..(1895): Ortholog of  Ceres SEQ ID NO 13597411 as cited in SEQ ID NO 64125
cacacacactttctcatcttctttctacaaatgggtttccaaagatctatctcttcttcttctgcattaaaatggcttggatttgtaacagcggtttgggttcaatccatctccggcaacaactacactttttcaaactactccggtgctcttaagtctctcatgaatctcaaccagctcgagctcaacaacctctctgtcgctaaagacgtcggaaaagcctttgggatcctggctggccttgcctctgaccgtcttcccactccggtcatcctccttattggttgctttgaaggtcttcttggttatggtgtacaatggctcgttgttagccgcaccatccaaccaatcccttattggcagatgtgtatattcctctgtatgggagggaacagcacaacgtggatgaacacggcggttctagtgacttgcatacgcaattttcgacgaaaccgtggtccggtctccgggatattgaaaggatatgtcggtttaagcacagctatattcactgatctctgtactgctctgttctcaaacgatccggcgtcgtttttggttttactagccgtggtgccttttgccgtatgtctcacggcggttttcttcctccgtgagatcccaccagcatcttccgcagctgaggagaacgaagagactcgttactttaccatattcaacattgtggccgttgttgtcgccgtgtatcttcagtcttacgacatcattggaatcaaaactggagtgttctctgtcgctttcgcttctatacttctcttcctcttggcttctccaatagccattcctttccactccttcatcaagagcttgaactacggtgaacaagatgacttagaaggacggattcaagaaccgttgcttagatccgagatagcggcagcggagaaagaagtaatagttgtagctgcggtggcagcggaagaggaggagaagaagaggaagaaaccggttttgggagaagaccacactataatggaagcagtgttgaccgttgacttttgggtgctttttgtgtccttcttgtgtggtgtaggaactggtttagctgtgatgaacaatatgggtcagataggtcttgcccttggatacacaaatgtctcaatctttgtctccatgactagtatttggggattcttcggtcgcattctctccggtactctctccgaatactttctcaagaaagctggaacaccaagaccactatggaatgcagcctctcaaatccttatggccgtaggatatatactaatggctttagccgtgcctaattcactctacatcggttcaatggtggttggagtatgttacggtgtccgtctagccataactgtaccaacagcttccgaactctttggtctcaaatactacggtctcatctacaacatcttagtacttaacttgccacttggctcgtttctcttctcgggtctcctcgctggcttcctctacgatgcagaggcaacaccaactcctggtgggggcaacacgtgcgtaggagctcattgctaccgtctcatcttcatagtcatggcattagcttctgttatcggagtcggtttggatcttgtgttggcttataggactaaggagatttacgctaagattcacgctagcaagaagtcaaagaaatctggtggtagccttagttaagacactgtatatctagttccggtgcactacattgttttcagatgctgattttgtatacatgatacaatatcggattcaagatattgttgaacaaaatttcaagtaccagagatcattgttgtagtagcatcgccaatgtatttttttgtctttccgagatttgttcaaaattatataaatgtatgacattttgatagtccaattccaattattttctaagattt

SEQ ID NO: 78659 - protein, 556 aa, Arabidopsis thaliana; identical to SEQ ID NO: 41272
  peptide (1)..(556): Ceres Seq. ID no. 12643699

SEQ ID NO: 78660 - protein, 546 aa, Arabidopsis thaliana; identical to SEQ ID NO: 41273
  peptide (1)..(546): Ceres Seq. ID no. 12643700

SEQ ID NO: 78661 - protein, 502 aa, Arabidopsis thaliana; identical to SEQ ID NO: 41274
  peptide (1)..(502): Ceres Seq. ID no. 12643701

SEQ ID NO: 78662 - DNA, 1485 bp, Arabidopsis thaliana
  misc_feature (1)..(1485): Ceres Seq. ID no. 12643756
  misc_feature (1)..(1485): Ortholog of  Ceres SEQ ID NO 13657677 as cited in SEQ ID NO 66119
atgtctaagaaaggtcgtttgagtgatcttaaggaattgttgttggatatgaagaagaatggattggtgccaaatagggttacttataataatttagtgtatggttactgtaagttaggttcgttgaaagaagcatttcagattgtggagctgatgaagcaaactaatgtattaccggatctttgtacctataacattttgatcaatgggctttgcaatgcggggagtatgagggaaggtcttgaattaatggatgcgatgaagagtttgaagttacagcccgatgtggttacttacaatacattgattgatgggtgtttcgaattggggcttagtttggaggctaggaagttgatggagcaaatggaaaatgatggagtcaaagctaaccaagtgactcataatatctctcttaagtggctttgtaaggaagagaaaagggaagcggttactagaaaggttaaggaattggtggacatgcacgggttttctcctgatatagtaacttatcatactctgattaaagcgtatttgaaagtaggagatttgagtggtgcccttgagatgatgcgtgagatggggcaaaaagggattaagatgaatactattacccttaataccattcttgatgctctatgtaaggagaggaaacttgatgaggctcacaatttgctgaatagtgcgcacaaacgaggatttattgttgacgaggttacttatggcacattaatcatgggattcttcagggaagaaaaagtggagaaagctttggagatgtgggatgagatgaagaaggtaaagattactcctacagtgagcacgttcaactctttaattggaggtctctgtcaccatggaaaaactgagctagcaatggagaaattcgatgagcttgctgagagtggtttgcttcctgatgacagtactttcaattcaatcatcctcggatactgcaaagaaggacgagttgagaaagcattcgagttttataatgaatccatcaaacactctttcaagcctgataactatacatgcaacattctcctcaatggtctttgtaaggaaggtatgacagaaaaggctctcaatttcttcaacacgctaatagaggagagagaggttgatacagttacatacaacacgatgatctcggctttctgcaaggacaagaagttaaaagaagcatatgaccttctatcagaaatggaggagaaaggactagagcctgatcggtttacatacaacagttttatcagtttgcttatggaagatggtaagctgagtgaaacagatgaattgttaaagaaattttccggaaagtttggatcgatgaagcgggatttacaggtagagacagagaaaaatccagcaacaagtgaatcaaaggaggaacttaacactgaagctattgcttattcagatgtaatagatgaactttgtagtagaggaagattaaaggagcattctagatcttacactagttga

SEQ ID NO: 78663 - protein, 494 aa, Arabidopsis thaliana
  peptide (1)..(494): Ceres Seq. ID no. 12643757
MSKKGRLSDLKELLLDMKKNGLVPNRVTYNNLVYGYCKLGSLKEAFQIVELMKQTNVLPDLCTYNILINGLCNAGSMREGLELMDAMKSLKLQPDVVTYNTLIDGCFELGLSLEARKLMEQMENDGVKANQVTHNISLKWLCKEEKREAVTRKVKELVDMHGFSPDIVTYHTLIKAYLKVGDLSGALEMMREMGQKGIKMNTITLNTILDALCKERKLDEAHNLLNSAHKRGFIVDEVTYGTLIMGFFREEKVEKALEMWDEMKKVKITPTVSTFNSLIGGLCHHGKTELAMEKFDELAESGLLPDDSTFNSIILGYCKEGRVEKAFEFYNESIKHSFKPDNYTCNILLNGLCKEGMTEKALNFFNTLIEEREVDTVTYNTMISAFCKDKKLKEAYDLLSEMEEKGLEPDRFTYNSFISLLMEDGKLSETDELLKKFSGKFGSMKRDLQVETEKNPATSESKEELNTEAIAYSDVIDELCSRGRLKEHSRSYTS

SEQ ID NO: 78664 - protein, 478 aa, Arabidopsis thaliana
  peptide (1)..(478): Ceres Seq. ID no. 12643758
MKKNGLVPNRVTYNNLVYGYCKLGSLKEAFQIVELMKQTNVLPDLCTYNILINGLCNAGSMREGLELMDAMKSLKLQPDVVTYNTLIDGCFELGLSLEARKLMEQMENDGVKANQVTHNISLKWLCKEEKREAVTRKVKELVDMHGFSPDIVTYHTLIKAYLKVGDLSGALEMMREMGQKGIKMNTITLNTILDALCKERKLDEAHNLLNSAHKRGFIVDEVTYGTLIMGFFREEKVEKALEMWDEMKKVKITPTVSTFNSLIGGLCHHGKTELAMEKFDELAESGLLPDDSTFNSIILGYCKEGRVEKAFEFYNESIKHSFKPDNYTCNILLNGLCKEGMTEKALNFFNTLIEEREVDTVTYNTMISAFCKDKKLKEAYDLLSEMEEKGLEPDRFTYNSFISLLMEDGKLSETDELLKKFSGKFGSMKRDLQVETEKNPATSESKEELNTEAIAYSDVIDELCSRGRLKEHSRSYTS

SEQ ID NO: 78665 - protein, 443 aa, Arabidopsis thaliana
  peptide (1)..(443): Ceres Seq. ID no. 12643759
MKQTNVLPDLCTYNILINGLCNAGSMREGLELMDAMKSLKLQPDVVTYNTLIDGCFELGLSLEARKLMEQMENDGVKANQVTHNISLKWLCKEEKREAVTRKVKELVDMHGFSPDIVTYHTLIKAYLKVGDLSGALEMMREMGQKGIKMNTITLNTILDALCKERKLDEAHNLLNSAHKRGFIVDEVTYGTLIMGFFREEKVEKALEMWDEMKKVKITPTVSTFNSLIGGLCHHGKTELAMEKFDELAESGLLPDDSTFNSIILGYCKEGRVEKAFEFYNESIKHSFKPDNYTCNILLNGLCKEGMTEKALNFFNTLIEEREVDTVTYNTMISAFCKDKKLKEAYDLLSEMEEKGLEPDRFTYNSFISLLMEDGKLSETDELLKKFSGKFGSMKRDLQVETEKNPATSESKEELNTEAIAYSDVIDELCSRGRLKEHSRSYTS

SEQ ID NO: 78666 - DNA, 1637 bp, Arabidopsis thaliana
  misc_feature (1)..(1637): Ceres Seq. ID no. 12643764
  misc_feature (1)..(1637): Ortholog of  Ceres SEQ ID NO 13597574 as cited in SEQ ID NO 64677
  misc_feature (1)..(1637): Ortholog of  Ceres SEQ ID NO 12617417 as cited in SEQ ID NO 65089
  misc_feature (1)..(1637): Ortholog of  Ceres SEQ ID NO 13597678 as cited in SEQ ID NO 65375
  misc_feature (1)..(1637): Ortholog of  Ceres SEQ ID NO 13596180 as cited in SEQ ID NO 67941
  misc_feature (1)..(1637): Ortholog of  Ceres SEQ ID NO 13591190 as cited in SEQ ID NO 68044
  misc_feature (1)..(1637): Ortholog of  Ceres SEQ ID NO 13595961 as cited in SEQ ID NO 68223
aactaagaaacacccaagaaaacaaacaaactttttaaaaaatgtccgtttcaacacatcaccaccacgtggtcctcttccctttcatgtcaaaaggccacatcatccctctcctccaattcggtcgtctcctcctccgtcaccaccgcaaagaaccaaccatcaccgtcaccgttttcaccactcccaagaaccaacctttcatctcagacttcctctcggatacgccggagatcaaagtcatctctctccctttcccggaaaacatcaccggaatccctcccggcgtcgagaacaccgaaaagctcccatccatgtcacttttcgtccccttcacacgcgccacgaagcttctccaacctttcttcgaagaaacactcaagactcttccaaaagtttcgttcatggtctctgatggattcctctggtggacatcggagtctgcagctaagttcaacattccaagatttgtctcctacggcatgaactcttactccgccgctgtctccatctctgttttcaaacacgaactctttaccgaaccggaaagtaaatctgataccgaaccggtcactgtaccagactttccatggatcaaggtcaagaagtgtgatttcgaccatggcactaccgagccggaagaatcaggtgcagccctcgaactatctatggaccaaatcaagtcgaccaccacaagccatgggtttttagtcaatagcttctacgagctcgagtcagcatttgttgattacaacaacaactctggtgataaaccaaagtcgtggtgtgttgggccactgtgtttgacagatcctcctaaacaggggagtgctaaaccggcttggattcattggttggatcagaagcgagaggaagggcgtccggttttgtacgtggcgtttggaacgcaggcagagatatcgaacaagcagcttatggaactagctttcggcttggaagattcaaaggtgaactttctgtgggtcacaagaaaagatgtggaggagattattggagaaggattcaacgatagaataagagagagtgggatgatagtgagagattgggtggaccaatgggagatattgtcacatgaaagtgtcaaaggatttttgagccattgtgggtggaactcagcacaagagagcatatgtgtcggggtcccattgttggcttggccgatgatggccgagcaaccgctcaatgcgaagatggttgtggaggagataaaggtgggagtaagagttgaaacggaagatgggagtgtaaaaggttttgtgacaagagaagaactaagtggaaagattaaagaactgatggaaggagaaacggggaaaaccgcaagaaagaatgtaaaagaatattcgaaaatggcgaaagcggctttggtcgaagggactggttcgtcatggaagaatttagatatgattcttaaggagttatgtaagagtagagattcaaacggtgctagtgagtagagtgattaagaattgaataactgaaccagtctatacgtttactaattaaaacaagtattttcaatatacgtcttgtgtaagtcttggtttagttgaaaagatgttatcgattacaataactgactctctcatttgataatactgactatgattaatatt

SEQ ID NO: 78667 - protein, 478 aa, Arabidopsis thaliana
  peptide (1)..(478): Ceres Seq. ID no. 12643765
MSVSTHHHHVVLFPFMSKGHIIPLLQFGRLLLRHHRKEPTITVTVFTTPKNQPFISDFLSDTPEIKVISLPFPENITGIPPGVENTEKLPSMSLFVPFTRATKLLQPFFEETLKTLPKVSFMVSDGFLWWTSESAAKFNIPRFVSYGMNSYSAAVSISVFKHELFTEPESKSDTEPVTVPDFPWIKVKKCDFDHGTTEPEESGAALELSMDQIKSTTTSHGFLVNSFYELESAFVDYNNNSGDKPKSWCVGPLCLTDPPKQGSAKPAWIHWLDQKREEGRPVLYVAFGTQAEISNKQLMELAFGLEDSKVNFLWVTRKDVEEIIGEGFNDRIRESGMIVRDWVDQWEILSHESVKGFLSHCGWNSAQESICVGVPLLAWPMMAEQPLNAKMVVEEIKVGVRVETEDGSVKGFVTREELSGKIKELMEGETGKTARKNVKEYSKMAKAALVEGTGSSWKNLDMILKELCKSRDSNGASE

SEQ ID NO: 78668 - protein, 463 aa, Arabidopsis thaliana
  peptide (1)..(463): Ceres Seq. ID no. 12643766
MSKGHIIPLLQFGRLLLRHHRKEPTITVTVFTTPKNQPFISDFLSDTPEIKVISLPFPENITGIPPGVENTEKLPSMSLFVPFTRATKLLQPFFEETLKTLPKVSFMVSDGFLWWTSESAAKFNIPRFVSYGMNSYSAAVSISVFKHELFTEPESKSDTEPVTVPDFPWIKVKKCDFDHGTTEPEESGAALELSMDQIKSTTTSHGFLVNSFYELESAFVDYNNNSGDKPKSWCVGPLCLTDPPKQGSAKPAWIHWLDQKREEGRPVLYVAFGTQAEISNKQLMELAFGLEDSKVNFLWVTRKDVEEIIGEGFNDRIRESGMIVRDWVDQWEILSHESVKGFLSHCGWNSAQESICVGVPLLAWPMMAEQPLNAKMVVEEIKVGVRVETEDGSVKGFVTREELSGKIKELMEGETGKTARKNVKEYSKMAKAALVEGTGSSWKNLDMILKELCKSRDSNGASE

SEQ ID NO: 78669 - protein, 387 aa, Arabidopsis thaliana
  peptide (1)..(387): Ceres Seq. ID no. 12643767
MSLFVPFTRATKLLQPFFEETLKTLPKVSFMVSDGFLWWTSESAAKFNIPRFVSYGMNSYSAAVSISVFKHELFTEPESKSDTEPVTVPDFPWIKVKKCDFDHGTTEPEESGAALELSMDQIKSTTTSHGFLVNSFYELESAFVDYNNNSGDKPKSWCVGPLCLTDPPKQGSAKPAWIHWLDQKREEGRPVLYVAFGTQAEISNKQLMELAFGLEDSKVNFLWVTRKDVEEIIGEGFNDRIRESGMIVRDWVDQWEILSHESVKGFLSHCGWNSAQESICVGVPLLAWPMMAEQPLNAKMVVEEIKVGVRVETEDGSVKGFVTREELSGKIKELMEGETGKTARKNVKEYSKMAKAALVEGTGSSWKNLDMILKELCKSRDSNGASE

SEQ ID NO: 78670 - DNA, 1245 bp, Arabidopsis thaliana
  misc_feature (1)..(1245): Ceres Seq. ID no. 12643797
  misc_feature (1)..(1245): Ortholog of  Ceres SEQ ID NO 14307022 as cited in SEQ ID NO 54437
atggcaacacttcaatcaaggaacagaacacaatgtgaaaccagactgttctcatttattttccagcaagtcaaaaagtcaaactcaaaaagtcctctctcggtcaactttcttcttggtccccatcttcacaaatcacaactctttttatttccaaagaccaaaaacctgagaacacaccggcgacctgaaaatggaaacttcctgttttacccttctcggtctccttgtctccctctccttcttcctcactctctccgcccaaatgaccggaaacttcaactgcagtggctcaacctcgacgtgtcaatctctcgttggttactcaacaagaacgcaacaacgttgcgcaatatccaaaccctttttgccgtcaagaacctccgctcgatcctcggagctaacaatctcccactcaacacctcacgtgaccaacgcgtgaacccgaatcaagtcgtacgtgtcccaatccattgctcttgctccaatggaaccggtgtctcgaaccgggacatcgaatacaccatcaagaaagacgacatactctctttcgtcgcaactgagattttcggtggtctcgttacgtacgagaagatcagtgaggttaacaaaatccctgacccgaacaaaatcgaaatcggtcaaaagttttggatccctttgccttgtagctgtgataaattgaacggtgaggatgttgttcactacgcacatgtagtcaaactagggagctctctcggtgagatcgctgctcagtttggaacggacaacacgacgttggctcagctcaatggaatcattggtgactctcagcttcttgctgataaacctctcgacgtccctctcaaagcttgtagctcttctgtgaggaaggactcgttggatgctcctctgcttctgtctaacaactcatacgtcttcactgcaaacaattgcgtcaagtgtacttgtgacgctttgaagaattggactttaagctgtcaatcatcatctgagattaagccttcgaactggcaaacctgcccaccattttcacaatgtgatggagctttgcttaacgcctcttgcagacaacctcgtgattgcgtctatgctggttactccaaccaaaccatcttcaccacagcttccccagcttgtccagattctgctggtcctgataactatgcatcaacgctcagctcaagcttcaatttcgtgattgtgttgattcagtgtgctctgctttgtctctgccttctctag

SEQ ID NO: 78671 - protein, 414 aa, Arabidopsis thaliana
  peptide (1)..(414): Ceres Seq. ID no. 12643798
MATLQSRNRTQCETRLFSFIFQQVKKSNSKSPLSVNFLLGPHLHKSQLFLFPKTKNLRTHRRPENGNFLFYPSRSPCLPLLLPHSLRPNDRKLQLQWLNLDVSISRWLLNKNATTLRNIQTLFAVKNLRSILGANNLPLNTSRDQRVNPNQVVRVPIHCSCSNGTGVSNRDIEYTIKKDDILSFVATEIFGGLVTYEKISEVNKIPDPNKIEIGQKFWIPLPCSCDKLNGEDVVHYAHVVKLGSSLGEIAAQFGTDNTTLAQLNGIIGDSQLLADKPLDVPLKACSSSVRKDSLDAPLLLSNNSYVFTANNCVKCTCDALKNWTLSCQSSSEIKPSNWQTCPPFSQCDGALLNASCRQPRDCVYAGYSNQTIFTTASPACPDSAGPDNYASTLSSSFNFVIVLIQCALLCLCLL

SEQ ID NO: 78672 - DNA, 2589 bp, Arabidopsis thaliana
  misc_feature (1)..(2589): Ceres Seq. ID no. 12643803
  misc_feature (1)..(2589): Ortholog of  Ceres SEQ ID NO 15170741 as cited in SEQ ID NO 58530
atggaagatgatggtggtagtgatggaggcgaaggaaatggtgggttttcacctaattctagctttggggcattcgctgacactgccatggatttggatttcatggatgaactcttgtttgatggatgttggctagagacaacagatagtaagagcttgaagcagacagaacaatctccttcagcttctaccgccatgaatgacaatagccctttcctctgctttggtgagaatccatctcaagataatttctctaatgaagaaacagagagaatgtttcctcaggctgaaaagtttctcctagaagaagctgaggtgggaaaaagttggtggattgctccaagtgcaagtgaaggcccgtcttcatctgtgaaggagaggctactacaagctattagtggtcttaacgaggcggtgcaagataaggacttcttggttcagatatgggtgccaattcagcaggaagggaagagctttcttactacttgggctcagccacatttattcaaccaagaatactccagccttgcagaatacagacatgtttcagagacttataatttcccggctgatgagggtatgaaagattttgtgggtcttcccggtcgtgttttcttgcagaagtttcctgagtggactcctgatgtgcgtttctttagaagagatgaatatccacgcatcaaagaagcacaaaagtgtgatgttcgtggttcacttgcccttcctgttttcgaaagaggtagtgggacttgtttgggtgttgttgagatcgtcacaacaactcagaagatgaattaccggcaagaacttgagaagatgtgtaaagctcttgagtttctgcaggtctatagtgatttctactgtgctgcattacctgaaataaaagatttcctggccacaatctgcagatcatatgattttcctctagctttgtcatgggcgccgtgtgctcggcaagggaaagttggttcccgacattctgatgagaacttctctgagtgtgtttcaacaatcgattctgcttgttctgtccccgacgaacagagcaaaagtttttgggaggcatgctctgaacaccatctgctccagggggaaggcattgttgggaaagcatttgaagccaccaaactcttttttgtgcccgaagtggccacatttagcaagactaactacccccttgcacaccacgccaagatatctggactacatgctgctttagcagttccattaaagagcaaatctggtttggttgagtttgtgttggaatttttctttccgaaagcatgccttgacactgaagcgcaacaggaaatgctcaagtcactatgtgtgacactgcagcaagatttcaggaaaaccgtagagtcgttgacagaaattcaaatgcaagaatcctcatggatcgcccacatgataaaggcaaacgagaagggtaaagatgtatcactttcttgggagtaccagaaagaagatcctaaagagctctcatctggccgggagaacagtcagcttgatccagtccccaataatgttcctttagaagctgagcaattacagcaagcatcaactccaggactcagagtcgacatcggtccaagcacagaatcagcttcgactggtgggggaaatatgttaagcagtaggagaccaggggagaaaaaaagagcaaaaacagaaaagaccattggcttggaggttcttcgacaatactttgctggaagcctcaaggatgcagccaagagcattggtgtttgtccaactaccttgaaaaggatatgcaggcaacatggaataatgcgatggccctcccgaaaaatcaagaaggttgggcattcgttgaagaaactccaactagttatggactctgtccaaggtgcgcagggctctatccaactcgattcattctatacaagcttcccagagttgaactccccaaatatgtctagcaatggcccttccttgaagagtaatgaacagccaagtcatttgaatgctcaaaccgataatggtattatggcagaggaaaaccccaggtcaccatcatcttcttgcagcaagagctctggttcaagcaacaataatgagaatactggaaacattctagttgctgaggatgctgatgcggtgttaaagagagctcatagcgaagcacaactgcataatgtgaatcaggaggaaacaaaatgtcttgcaagaacccagagccataaaacattcaaggagcctcttgttcttgataattcatctccattaacaggtagtagcaacacgagtttaagagctagaggtgccatcaaagtgaaagcgacatttggtgaggccagaatacggtttaccttactcccgagttggggcttcgcagagctgaagcaagagattgctaggcgtttcaacatagatgacatttcctggtttgaccttaagtacctggatgatgataaggagtgggttcttctgacatgtgaagcggatctcgtggaatgcattgacatatatagattaacacagacccacacaattaaaataagtctgaacgaagcttctcaagtcaagctaagtggttcttttggcaacactggtctttcctga

SEQ ID NO: 78673 - protein, 862 aa, Arabidopsis thaliana
  peptide (1)..(862): Ceres Seq. ID no. 12643804
MEDDGGSDGGEGNGGFSPNSSFGAFADTAMDLDFMDELLFDGCWLETTDSKSLKQTEQSPSASTAMNDNSPFLCFGENPSQDNFSNEETERMFPQAEKFLLEEAEVGKSWWIAPSASEGPSSSVKERLLQAISGLNEAVQDKDFLVQIWVPIQQEGKSFLTTWAQPHLFNQEYSSLAEYRHVSETYNFPADEGMKDFVGLPGRVFLQKFPEWTPDVRFFRRDEYPRIKEAQKCDVRGSLALPVFERGSGTCLGVVEIVTTTQKMNYRQELEKMCKALEFLQVYSDFYCAALPEIKDFLATICRSYDFPLALSWAPCARQGKVGSRHSDENFSECVSTIDSACSVPDEQSKSFWEACSEHHLLQGEGIVGKAFEATKLFFVPEVATFSKTNYPLAHHAKISGLHAALAVPLKSKSGLVEFVLEFFFPKACLDTEAQQEMLKSLCVTLQQDFRKTVESLTEIQMQESSWIAHMIKANEKGKDVSLSWEYQKEDPKELSSGRENSQLDPVPNNVPLEAEQLQQASTPGLRVDIGPSTESASTGGGNMLSSRRPGEKKRAKTEKTIGLEVLRQYFAGSLKDAAKSIGVCPTTLKRICRQHGIMRWPSRKIKKVGHSLKKLQLVMDSVQGAQGSIQLDSFYTSFPELNSPNMSSNGPSLKSNEQPSHLNAQTDNGIMAEENPRSPSSSCSKSSGSSNNNENTGNILVAEDADAVLKRAHSEAQLHNVNQEETKCLARTQSHKTFKEPLVLDNSSPLTGSSNTSLRARGAIKVKATFGEARIRFTLLPSWGFAELKQEIARRFNIDDISWFDLKYLDDDKEWVLLTCEADLVECIDIYRLTQTHTIKISLNEASQVKLSGSFGNTGLS

SEQ ID NO: 78674 - protein, 833 aa, Arabidopsis thaliana
  peptide (1)..(833): Ceres Seq. ID no. 12643805
MDLDFMDELLFDGCWLETTDSKSLKQTEQSPSASTAMNDNSPFLCFGENPSQDNFSNEETERMFPQAEKFLLEEAEVGKSWWIAPSASEGPSSSVKERLLQAISGLNEAVQDKDFLVQIWVPIQQEGKSFLTTWAQPHLFNQEYSSLAEYRHVSETYNFPADEGMKDFVGLPGRVFLQKFPEWTPDVRFFRRDEYPRIKEAQKCDVRGSLALPVFERGSGTCLGVVEIVTTTQKMNYRQELEKMCKALEFLQVYSDFYCAALPEIKDFLATICRSYDFPLALSWAPCARQGKVGSRHSDENFSECVSTIDSACSVPDEQSKSFWEACSEHHLLQGEGIVGKAFEATKLFFVPEVATFSKTNYPLAHHAKISGLHAALAVPLKSKSGLVEFVLEFFFPKACLDTEAQQEMLKSLCVTLQQDFRKTVESLTEIQMQESSWIAHMIKANEKGKDVSLSWEYQKEDPKELSSGRENSQLDPVPNNVPLEAEQLQQASTPGLRVDIGPSTESASTGGGNMLSSRRPGEKKRAKTEKTIGLEVLRQYFAGSLKDAAKSIGVCPTTLKRICRQHGIMRWPSRKIKKVGHSLKKLQLVMDSVQGAQGSIQLDSFYTSFPELNSPNMSSNGPSLKSNEQPSHLNAQTDNGIMAEENPRSPSSSCSKSSGSSNNNENTGNILVAEDADAVLKRAHSEAQLHNVNQEETKCLARTQSHKTFKEPLVLDNSSPLTGSSNTSLRARGAIKVKATFGEARIRFTLLPSWGFAELKQEIARRFNIDDISWFDLKYLDDDKEWVLLTCEADLVECIDIYRLTQTHTIKISLNEASQVKLSGSFGNTGLS

SEQ ID NO: 78675 - protein, 828 aa, Arabidopsis thaliana
  peptide (1)..(828): Ceres Seq. ID no. 12643806
MDELLFDGCWLETTDSKSLKQTEQSPSASTAMNDNSPFLCFGENPSQDNFSNEETERMFPQAEKFLLEEAEVGKSWWIAPSASEGPSSSVKERLLQAISGLNEAVQDKDFLVQIWVPIQQEGKSFLTTWAQPHLFNQEYSSLAEYRHVSETYNFPADEGMKDFVGLPGRVFLQKFPEWTPDVRFFRRDEYPRIKEAQKCDVRGSLALPVFERGSGTCLGVVEIVTTTQKMNYRQELEKMCKALEFLQVYSDFYCAALPEIKDFLATICRSYDFPLALSWAPCARQGKVGSRHSDENFSECVSTIDSACSVPDEQSKSFWEACSEHHLLQGEGIVGKAFEATKLFFVPEVATFSKTNYPLAHHAKISGLHAALAVPLKSKSGLVEFVLEFFFPKACLDTEAQQEMLKSLCVTLQQDFRKTVESLTEIQMQESSWIAHMIKANEKGKDVSLSWEYQKEDPKELSSGRENSQLDPVPNNVPLEAEQLQQASTPGLRVDIGPSTESASTGGGNMLSSRRPGEKKRAKTEKTIGLEVLRQYFAGSLKDAAKSIGVCPTTLKRICRQHGIMRWPSRKIKKVGHSLKKLQLVMDSVQGAQGSIQLDSFYTSFPELNSPNMSSNGPSLKSNEQPSHLNAQTDNGIMAEENPRSPSSSCSKSSGSSNNNENTGNILVAEDADAVLKRAHSEAQLHNVNQEETKCLARTQSHKTFKEPLVLDNSSPLTGSSNTSLRARGAIKVKATFGEARIRFTLLPSWGFAELKQEIARRFNIDDISWFDLKYLDDDKEWVLLTCEADLVECIDIYRLTQTHTIKISLNEASQVKLSGSFGNTGLS

SEQ ID NO: 78676 - DNA, 3273 bp, Arabidopsis thaliana
  misc_feature (1)..(3273): Ceres Seq. ID no. 12643896
  misc_feature (1)..(3273): Ortholog of  Ceres SEQ ID NO 14303870 as cited in SEQ ID NO 53632
atgccacgtaaccctagattctgcttcttcctcttccttctttttcactcctctcttttcttctccatcccctgtttttccatagacgaacagggtctagctctcctctcatggaaatctcagttgaacatctccggagacgctttatcttcttggaaagcctccgaatcgaatccttgtcaatgggtgggaatcaaatgcaacgaaagaggtcaagtctcggagatacaactccaagtcatggattttcaaggtccgttaccggcgacgaatctccgacagataaagtctctgactttgctcagcttaacctccgtgaatctcactggttcaatccctaaggagcttggagacttgtcggagctagaagttcttgatttagctgataattctctctctggtgaaatccctgtggatatcttcaagctcaagaaactaaagattctgtctctcaacacaaataatctcgaaggtgtgattccatcggagttagggaatctcgttaacctcatcgagctcactctcttcgacaataaactcgccggagagattcctagaaccatcggagaactcaagaatctagaaatcttccgtgcaggtggtaacaagaatctcagaggagagcttccttgggagattggtaactgcgagagtcttgtgactttaggtctcgccgaaacaagtctctccggtagacttccggcgtcgatcggaaacctgaaaaaggttcagacaatagctctttacacgtcactcttgtctggtccaatccctgatgagattggaaactgcacagagcttcaaaacctctacttgtaccaaaactcaatctctggatcgattcctgtatcaatgggacgtctcaagaagcttcaaagtcttctcttatggcaaaacaatctcgtcggaaagatccctaccgagctaggcacctgtccggagcttttcctcgtcgatttatcggaaaatctcctcaccggaaacatcccaagaagcttcggaaaccttccaaatctccaagagcttcagctaagtgttaaccagctctccggtacaatccctgaagaactcgcgaattgcacgaagttgacgcatttagagatcgataacaaccaaatctccggcgagattccgccgttgatcgggaaattaacaagcttgacgatgttctttgcgtggcagaatcagttaaccggaataattccagagtctctttctcaatgtcaagagcttcaagcgattgatctctcctacaacaatctctctggttcgatacctaatggaatctttgagattcgaaacctcacgaagcttcttcttctctctaactacttatctggattcataccaccggatattggaaactgcacgaatctttaccggttaagactcaacggtaacagactcgcggggaatattccggcggagattgggaatctgaaaaatctcaacttcatcgatataagtgagaatcgtctcatcggaaacattcctccggagatctccggttgtacaagtctcgaattcgtcgatctacattcaaacggtttaaccggtggtttacccggtacacttccgaagagcttacaattcattgatttatccgataattcattaaccggttctctaccaaccggaatcggatcgttaaccgaactcacgaagctcaatctcgcgaagaatcgtttctccggcgaaatccctcgagagatatcttcctgtcggagtcttcagcttctcaacctcggcgacaatggcttcaccggagaaatccctaacgagttaggacggatcccgtctcttgcgatctctctaaatctcagctgcaatcacttcaccggagagatcccgtcgagattctctagcctcactaatctcggaaccctcgatgtctctcacaacaaactcgccggaaacctaaacgtcttagctgatctacagaacctcgtctcactcaacatctccttcaacgaattctcaggcgagttaccaaatactctgtttttcaggaaacttccactctctgttcttgaatcaaacaaagggctatttatttcgacccgacccgagaatgggatccaaacccgacaccgttcggctgtcaaagtaaccatgtcgatcctcgtagcagcaagcgtcgttcttgttctcatggcggtttacactctcgtcaaagctcaacgaatcaccggaaaacaagaggagttagattcttgggaagtgactctttatcagaaactcgatttctccatcgacgacatcgtcaagaacttaacttcagctaacgtgatcggaactggaagctccggtgtagtttacagagtcacaatcccgtccggtgaaactttagctgtgaagaaaatgtggtcaaaggaagaaaacagagcgtttaactcagagatcaacactcttggatcgattcgacataggaacataatccgtcttttgggttggtgttcgaatcggaatctgaagcttttgttctatgattatcttcctaacggaagtttaagctctctgcttcacggtgccggtaaaggaagtggaggagctgattgggaagcacgttacgacgtcgttttaggcgttgcacatgcactagcttatcttcatcatgattgtcttcctccgattctacacggtgacgttaaagctatgaatgtcttattgggttcccgcttcgaatcttacttagccgatttcggtttagcaaaaatcgtctccggtgagggagttaccgatggagattcgtctaaattgagtaaccggcctccgttagccggttcttatggttacatggctccagaacatgcttcgatgcaacatataacagaaaagagtgatgtgtatagctatggagtggtgctactagaagttttaaccgggaagcatccattggacccggatctacccggaggtgctcatttggttcaatgggtgagagatcatttagccggaaagaaagatcctagagaaattcttgacccgagactccgcgggcgggcagatcctataatgcatgagatgctacaaactctagcggtctcgttcctttgtgtgagcaacaaggcatccgatcggcctatgatgaaagacattgtggcaatgcttaaagagattaggcagtttgatatggatagatcggaatccgatatgataaaaggcggaaaatgcgaaaaatggcagccgcaaccgttaccaccggagaaaattgtcagtactcctcgaggttcatctaattgttcgtttgcttactcggatgaatccgtataa

SEQ ID NO: 78677 - protein, 1090 aa, Arabidopsis thaliana
  peptide (1)..(1090): Ceres Seq. ID no. 12643897
MPRNPRFCFFLFLLFHSSLFFSIPCFSIDEQGLALLSWKSQLNISGDALSSWKASESNPCQWVGIKCNERGQVSEIQLQVMDFQGPLPATNLRQIKSLTLLSLTSVNLTGSIPKELGDLSELEVLDLADNSLSGEIPVDIFKLKKLKILSLNTNNLEGVIPSELGNLVNLIELTLFDNKLAGEIPRTIGELKNLEIFRAGGNKNLRGELPWEIGNCESLVTLGLAETSLSGRLPASIGNLKKVQTIALYTSLLSGPIPDEIGNCTELQNLYLYQNSISGSIPVSMGRLKKLQSLLLWQNNLVGKIPTELGTCPELFLVDLSENLLTGNIPRSFGNLPNLQELQLSVNQLSGTIPEELANCTKLTHLEIDNNQISGEIPPLIGKLTSLTMFFAWQNQLTGIIPESLSQCQELQAIDLSYNNLSGSIPNGIFEIRNLTKLLLLSNYLSGFIPPDIGNCTNLYRLRLNGNRLAGNIPAEIGNLKNLNFIDISENRLIGNIPPEISGCTSLEFVDLHSNGLTGGLPGTLPKSLQFIDLSDNSLTGSLPTGIGSLTELTKLNLAKNRFSGEIPREISSCRSLQLLNLGDNGFTGEIPNELGRIPSLAISLNLSCNHFTGEIPSRFSSLTNLGTLDVSHNKLAGNLNVLADLQNLVSLNISFNEFSGELPNTLFFRKLPLSVLESNKGLFISTRPENGIQTRHRSAVKVTMSILVAASVVLVLMAVYTLVKAQRITGKQEELDSWEVTLYQKLDFSIDDIVKNLTSANVIGTGSSGVVYRVTIPSGETLAVKKMWSKEENRAFNSEINTLGSIRHRNIIRLLGWCSNRNLKLLFYDYLPNGSLSSLLHGAGKGSGGADWEARYDVVLGVAHALAYLHHDCLPPILHGDVKAMNVLLGSRFESYLADFGLAKIVSGEGVTDGDSSKLSNRPPLAGSYGYMAPEHASMQHITEKSDVYSYGVVLLEVLTGKHPLDPDLPGGAHLVQWVRDHLAGKKDPREILDPRLRGRADPIMHEMLQTLAVSFLCVSNKASDRPMMKDIVAMLKEIRQFDMDRSESDMIKGGKCEKWQPQPLPPEKIVSTPRGSSNCSFAYSDESV

SEQ ID NO: 78678 - protein, 1010 aa, Arabidopsis thaliana
  peptide (1)..(1010): Ceres Seq. ID no. 12643898
MDFQGPLPATNLRQIKSLTLLSLTSVNLTGSIPKELGDLSELEVLDLADNSLSGEIPVDIFKLKKLKILSLNTNNLEGVIPSELGNLVNLIELTLFDNKLAGEIPRTIGELKNLEIFRAGGNKNLRGELPWEIGNCESLVTLGLAETSLSGRLPASIGNLKKVQTIALYTSLLSGPIPDEIGNCTELQNLYLYQNSISGSIPVSMGRLKKLQSLLLWQNNLVGKIPTELGTCPELFLVDLSENLLTGNIPRSFGNLPNLQELQLSVNQLSGTIPEELANCTKLTHLEIDNNQISGEIPPLIGKLTSLTMFFAWQNQLTGIIPESLSQCQELQAIDLSYNNLSGSIPNGIFEIRNLTKLLLLSNYLSGFIPPDIGNCTNLYRLRLNGNRLAGNIPAEIGNLKNLNFIDISENRLIGNIPPEISGCTSLEFVDLHSNGLTGGLPGTLPKSLQFIDLSDNSLTGSLPTGIGSLTELTKLNLAKNRFSGEIPREISSCRSLQLLNLGDNGFTGEIPNELGRIPSLAISLNLSCNHFTGEIPSRFSSLTNLGTLDVSHNKLAGNLNVLADLQNLVSLNISFNEFSGELPNTLFFRKLPLSVLESNKGLFISTRPENGIQTRHRSAVKVTMSILVAASVVLVLMAVYTLVKAQRITGKQEELDSWEVTLYQKLDFSIDDIVKNLTSANVIGTGSSGVVYRVTIPSGETLAVKKMWSKEENRAFNSEINTLGSIRHRNIIRLLGWCSNRNLKLLFYDYLPNGSLSSLLHGAGKGSGGADWEARYDVVLGVAHALAYLHHDCLPPILHGDVKAMNVLLGSRFESYLADFGLAKIVSGEGVTDGDSSKLSNRPPLAGSYGYMAPEHASMQHITEKSDVYSYGVVLLEVLTGKHPLDPDLPGGAHLVQWVRDHLAGKKDPREILDPRLRGRADPIMHEMLQTLAVSFLCVSNKASDRPMMKDIVAMLKEIRQFDMDRSESDMIKGGKCEKWQPQPLPPEKIVSTPRGSSNCSFAYSDESV

SEQ ID NO: 78679 - protein, 806 aa, Arabidopsis thaliana
  peptide (1)..(806): Ceres Seq. ID no. 12643899
MGRLKKLQSLLLWQNNLVGKIPTELGTCPELFLVDLSENLLTGNIPRSFGNLPNLQELQLSVNQLSGTIPEELANCTKLTHLEIDNNQISGEIPPLIGKLTSLTMFFAWQNQLTGIIPESLSQCQELQAIDLSYNNLSGSIPNGIFEIRNLTKLLLLSNYLSGFIPPDIGNCTNLYRLRLNGNRLAGNIPAEIGNLKNLNFIDISENRLIGNIPPEISGCTSLEFVDLHSNGLTGGLPGTLPKSLQFIDLSDNSLTGSLPTGIGSLTELTKLNLAKNRFSGEIPREISSCRSLQLLNLGDNGFTGEIPNELGRIPSLAISLNLSCNHFTGEIPSRFSSLTNLGTLDVSHNKLAGNLNVLADLQNLVSLNISFNEFSGELPNTLFFRKLPLSVLESNKGLFISTRPENGIQTRHRSAVKVTMSILVAASVVLVLMAVYTLVKAQRITGKQEELDSWEVTLYQKLDFSIDDIVKNLTSANVIGTGSSGVVYRVTIPSGETLAVKKMWSKEENRAFNSEINTLGSIRHRNIIRLLGWCSNRNLKLLFYDYLPNGSLSSLLHGAGKGSGGADWEARYDVVLGVAHALAYLHHDCLPPILHGDVKAMNVLLGSRFESYLADFGLAKIVSGEGVTDGDSSKLSNRPPLAGSYGYMAPEHASMQHITEKSDVYSYGVVLLEVLTGKHPLDPDLPGGAHLVQWVRDHLAGKKDPREILDPRLRGRADPIMHEMLQTLAVSFLCVSNKASDRPMMKDIVAMLKEIRQFDMDRSESDMIKGGKCEKWQPQPLPPEKIVSTPRGSSNCSFAYSDESV

SEQ ID NO: 78680 - DNA, 1305 bp, Arabidopsis thaliana
  misc_feature (1)..(1305): Ceres Seq. ID no. 12643931
  misc_feature (1)..(1305): Ortholog of  Ceres SEQ ID NO 12586556 as cited in SEQ ID NO 64667
atgattcagagaatcaatgccttgagcttaagctctggtctaaattggttccctgacacgtttactttcccgtttgtgttgaagattgctgttagggtttctgatgtttggtttgggagacagattcatggacaagttgtggtttttgggtttgattcgagcgttcatgttgtaacaggtttgattcagatgtatttttcgtgtggtggtttgggagatgcacgtaagatgttcgatgaaatgcttgtcaaggatgtgaatgtttggaatgcgttgttagcagggtatgggaaagttggtgagatggatgaagctaggagtttgcttgagatgatgccttgttgggtaaggaatgaggtttcttggacttgtgtgatctctggatatgcgaaaagtggacgagctagcgaagctattgaagtgtttcagagaatgctgatggagaatgttgagcctgatgaagttacgcttttggctgtgctctcagcttgtgctgatcttggttcacttgaattgggtgaaagaatatgtagctatgttgatcaccgagggatgaacagagcggtttcattgaacaatgcggtcattgatatgtatgcgaaatcagggaatataacaaaggcgttggatgtgtttgagtgtgttaatgagagaaatgttgttacttggacgactataatcgcagggctagctacgcacgggcacggagctgaagccttagcgatgtttaaccgtatggttaaagctggcgtgagaccgaacgatgttactttcattgcaatcctttcagcttgcagtcatgtcggttgggttgatcttggaaaacgtttgtttaactcaatgagatcgaaatacgggattcatccaaacattgagcattacggatgcatgattgatttgctaggacgagcaggtaaactccgagaggcggatgaagttattaaaagcatgccctttaaggccaatgctgcaatatggggatctcttcttgctgcttcaaatgttcatcatgatcttgagcttggagaaagagctttgagtgagctgattaagttagaaccgaataacagcggtaactatatgcttttagctaatttatactcgaatttaggaaggtgggatgagtcgaggatgatgaggaacatgatgaaagggattggtgtgaagaagatggctggtgaaagctccatagaagttgaaaacagagtatacaaattcatttcaggggatcttacgcatcctcaagtcgaaaggattcatgaaattctacaagagatggatttgcaaatacagagcaaagtttga

SEQ ID NO: 78681 - protein, 434 aa, Arabidopsis thaliana
  peptide (1)..(434): Ceres Seq. ID no. 12643932
MIQRINALSLSSGLNWFPDTFTFPFVLKIAVRVSDVWFGRQIHGQVVVFGFDSSVHVVTGLIQMYFSCGGLGDARKMFDEMLVKDVNVWNALLAGYGKVGEMDEARSLLEMMPCWVRNEVSWTCVISGYAKSGRASEAIEVFQRMLMENVEPDEVTLLAVLSACADLGSLELGERICSYVDHRGMNRAVSLNNAVIDMYAKSGNITKALDVFECVNERNVVTWTTIIAGLATHGHGAEALAMFNRMVKAGVRPNDVTFIAILSACSHVGWVDLGKRLFNSMRSKYGIHPNIEHYGCMIDLLGRAGKLREADEVIKSMPFKANAAIWGSLLAASNVHHDLELGERALSELIKLEPNNSGNYMLLANLYSNLGRWDESRMMRNMMKGIGVKKMAGESSIEVENRVYKFISGDLTHPQVERIHEILQEMDLQIQSKV

SEQ ID NO: 78682 - protein, 371 aa, Arabidopsis thaliana
  peptide (1)..(371): Ceres Seq. ID no. 12643933
MYFSCGGLGDARKMFDEMLVKDVNVWNALLAGYGKVGEMDEARSLLEMMPCWVRNEVSWTCVISGYAKSGRASEAIEVFQRMLMENVEPDEVTLLAVLSACADLGSLELGERICSYVDHRGMNRAVSLNNAVIDMYAKSGNITKALDVFECVNERNVVTWTTIIAGLATHGHGAEALAMFNRMVKAGVRPNDVTFIAILSACSHVGWVDLGKRLFNSMRSKYGIHPNIEHYGCMIDLLGRAGKLREADEVIKSMPFKANAAIWGSLLAASNVHHDLELGERALSELIKLEPNNSGNYMLLANLYSNLGRWDESRMMRNMMKGIGVKKMAGESSIEVENRVYKFISGDLTHPQVERIHEILQEMDLQIQSKV

SEQ ID NO: 78683 - protein, 358 aa, Arabidopsis thaliana
  peptide (1)..(358): Ceres Seq. ID no. 12643934
MFDEMLVKDVNVWNALLAGYGKVGEMDEARSLLEMMPCWVRNEVSWTCVISGYAKSGRASEAIEVFQRMLMENVEPDEVTLLAVLSACADLGSLELGERICSYVDHRGMNRAVSLNNAVIDMYAKSGNITKALDVFECVNERNVVTWTTIIAGLATHGHGAEALAMFNRMVKAGVRPNDVTFIAILSACSHVGWVDLGKRLFNSMRSKYGIHPNIEHYGCMIDLLGRAGKLREADEVIKSMPFKANAAIWGSLLAASNVHHDLELGERALSELIKLEPNNSGNYMLLANLYSNLGRWDESRMMRNMMKGIGVKKMAGESSIEVENRVYKFISGDLTHPQVERIHEILQEMDLQIQSKV

SEQ ID NO: 78684 - DNA, 1203 bp, Arabidopsis thaliana
  misc_feature (1)..(1203): Ceres Seq. ID no. 12643935
  misc_feature (1)..(1203): Ortholog of  Ceres SEQ ID NO 13596519 as cited in SEQ ID NO 62572
  misc_feature (1)..(1203): Ortholog of  Ceres SEQ ID NO 12625108 as cited in SEQ ID NO 68102
acaacaacattgaaacccatttcttcgcctttaaccttacttgaatttttgtgtgggtcctttttttttctttctccaagccattgaataaaaaggcagagaaaatggagttttttggtaaaatgataatttcattgagtcttatgatgatgataatgtggaagagcgtggatggttacagtagtggttgggtcaatgctcgagccacattctatggaggagctgatgcttctggcaccatgggcggcgcgtgtggttacggaaacttatacagtcaaggatacggcactaacacggcggctctaagcacggctctattcaacggcggccaaagctgtggtgcttgttttcagataaaatgcgtagacgacccaaaatggtgtatcggtggaacaatcaccgtcaccggaacaaacttttgtccacccaactttgctcaagccaacaacgccggaggttggtgtaatcctcctcaacaccacttcgatttagctcagcccatcttcctccgtattgctcaatacaaagccggcgtcgtccctgtccaataccggagagtggcttgccggagaaaaggaggaataagattcacgatcaacggtcattcatacttcaacctcgtacttataaccaacgtcgccggcgccggagatgttatctccgtctccattaaaggaaccaatacacgttggcaaagcatgtcaagaaactggggacagaattggcaaagcaatgcaaaacttgatggtcaagctttgtcctttaaagtaacaactagtgatggccgtacagttatatctaacaatgctacaccacgtaactggagcttcggacagacttataccggaaaacagttccgggctcagaggtgatgatgacgtggactgtctggaggggaaaaaaaaagttttacttattactgattttggagttttctagagtttgcatagtttgaaaaaagttttcaggaattaaccctaatcaaaataaccaatttctaaatggcggaaatcgaggttttttctcactggcagcttttgtaattcgccggtgagactgaggtgttttcacccgccgcctgagtgattgagttttttttttttttttttgtactttgtttggcttttaagatgttcaatggtctgtttctttaagacattgtctactgaaataataataaaatcaagttaatttataattttt

SEQ ID NO: 78685 - protein, 255 aa, Arabidopsis thaliana [sequence omitted]

SEQ ID NO: 78686 - protein, 249 aa, Arabidopsis thaliana
  peptide (1)..(249): Ceres Seq. ID no. 12643937
MIISLSLMMMIMWKSVDGYSSGWVNARATFYGGADASGTMGGACGYGNLYSQGYGTNTAALSTALFNGGQSCGACFQIKCVDDPKWCIGGTITVTGTNFCPPNFAQANNAGGWCNPPQHHFDLAQPIFLRIAQYKAGVVPVQYRRVACRRKGGIRFTINGHSYFNLVLITNVAGAGDVISVSIKGTNTRWQSMSRNWGQNWQSNAKLDGQALSFKVTTSDGRTVISNNATPRNWSFGQTYTGKQFRAQR

SEQ ID NO: 78687 - protein, 242 aa, Arabidopsis thaliana
  peptide (1)..(242): Ceres Seq. ID no. 12643938
MMMIMWKSVDGYSSGWVNARATFYGGADASGTMGGACGYGNLYSQGYGTNTAALSTALFNGGQSCGACFQIKCVDDPKWCIGGTITVTGTNFCPPNFAQANNAGGWCNPPQHHFDLAQPIFLRIAQYKAGVVPVQYRRVACRRKGGIRFTINGHSYFNLVLITNVAGAGDVISVSIKGTNTRWQSMSRNWGQNWQSNAKLDGQALSFKVTTSDGRTVISNNATPRNWSFGQTYTGKQFRAQR

SEQ ID NO: 78688 - DNA, 3060 bp, Arabidopsis thaliana
  misc_feature (1)..(3060): Ceres Seq. ID no. 12644062
  misc_feature (1)..(3060): Ortholog of  Ceres SEQ ID NO 15227147 as cited in SEQ ID NO 61351
atgtttgaagagagtaatcgatacatcttaggaatgagagagcgagactcggattccactgccgcgaaaaccgccgttcaaggctacgattatgaccggaattgtttggatccacgactgagtaagacgaattcgttggaggaaagatggaggagaaagagaaacaaaattacctgcgaatgcgacggaggttattgtgcggtgcgtcgaggagacgaactcgtttgcgggattgaaatatggcgcatcgagaacttcaaacctgtcactgttccacaagagtctcatgggaaatttttcaccggggattcctatatagtcttaaagaccacagcgtcaagaagcggttctttgcatcatgatattcactactggctcggtaaagattccagccaggatgaagcaggtgctgtagccgtcatgactgttgaattagattcagcattaggtggacgtgctgttcagtaccgagaagtacagggtcacgaaaccgagaagtttctttcctacttcaaaccttgcataatacctcaagaaggtggagttgcttcagggttcaaccatgtaaagcccgaggagcatcagacgcgtctgtatatctgcaaaggcaaacatgtcgtccgtgttaaagaggttccgtttgttcgatcgactctcaaccacgaagacgtttttattcttgatacagagtctaaaatttttcaattcagtggttccaagtcgagtattcaagaaagagcaaaagctcttgaggttgttcagtacattaaagacacttaccatgatggaaagtgcgatatcgcagctgttgaggatgggaggatgatggctgatgctgaagctggagagttttggggcttgtttggtgggtttgctccgcttcctaagaaaccagcagtcaatgatgacgaaaccgctgcatctgatggtatcaaacttttcagtgtcgagaagggacagacagatgccgtagaggctgagtgtttgacgaaagagcttctggacactaacaaatgttatattctcgattgcggtcttgaattgttcgtttggaagggacgaagtacttcaatcgaccaaagaaagagcgcaactgaagctgcagaagaatttttccgttcgtctgaaccgccaaaatcaaacctggtcagtgtgatggaagggtatgaaacagtgatgttccgatctaagtttgattcatggccggcttcaagtaccatagctgagccccaacaaggcagaggcaaagtcgcagctcttttgcagcggcaaggagttaacgttcaaggcctggttaagacttcttcttcttcttctaaagacgaaccgaagccatacattgatggtacaggaaatctccaggtctggcgaatcaattgtgaagaaaagatccttctcgaagcagcagagcaatcaaagttctatagcggggattgttatatactccagtactcatacccaggagaagacagagaggaacatctagtgggtacttggtttggcaagcaaagcgttgaggaagacagagcatctgctatttctttggcaaacaagatggttgaatccatgaagtttgtgccggctcaggctcgcattaatgagggaaaagagccaattcagttttttgtgatcatgcaaagcttcatcacatttaagggtggtgtaagtgatgctttcaaaaagtacatagctgagaacgacatccctgatactacttacgaagcagaaggtgttgcactgtttcgggttcaaggttctggacccgagaacatgcaagccatacagatagaagcggcttccgcaggactaaattcttcgcactgttatatattacacggtgattctactgttttcacttggtgtggcaatcttacttcctcggaagatcaagaacttatggaaagaatgttggatttgattaagccaaatgaacccactaaggcacaaaaggaaggctcagagtctgaacagttttgggaattattaggaggcaaatcagaatatccgagccaaaagatcaaaagggatggagagagtgatcctcatctcttttcttgcacatatacaaacgaaagtctgaaggctacagagatcttcaacttcactcaagatgatttgatgactgaagatatcttcatacttgattgtcacactgaggtctttgtctgggtgggacaacaagttgacccaaagaagaaacctcaagctttggacattggagagaactttcttaagcatgatttcctcctagagaatctagcaagtgaaacaccgatatacattgtaacagagggaaacgaacctccatttttcactcggttcttcacctgggactcttctaaatctggaatgcatggagactctttccagagaaagcttgcgatcctgacaaataaaggaaagccgcttctagataaacctaaaaggagagtccctgcatacagtagcaggtccaccgttccagacaaatcgcagcctcggtccagaagtatgacttttagtccagacagggcccgcgtgaggggacggtctccagctttcaacgcacttgcagcaaactttgagaaactaaatataagaaaccaatcaactccaccacctatggttagtccaatggtccggaagctttacccgaaatctcatgccccagacctctcgaagatagctcctaaatccgctatagctgcccgtacagcgctttttgaaaaacctactcctacttctcaagaaccacctactagccccagttcttcagaagctacaaaccaagcagaagcaccaaaatcgacatcagagacaaacgaggaagaagcaatgagcagcatcaatgaagactcaaaagaagaagaagcagaagaagagagcagcctccctactttcccatatgaacgccttaaaaccgactcagaggatcctgtttcagatgtcgacctcactagaagagaggcatacttgacttcagtagagttcaaggagaagtttgagatgacaaagaatgagttctacaaactgcctaaatggaaacaaaacaagctcaaaatgtctgtcaatctcttctaa

SEQ ID NO: 78689 - protein, 1019 aa, Arabidopsis thaliana
  peptide (1)..(1019): Ceres Seq. ID no. 12644063
MFEESNRYILGMRERDSDSTAAKTAVQGYDYDRNCLDPRLSKTNSLEERWRRKRNKITCECDGGYCAVRRGDELVCGIEIWRIENFKPVTVPQESHGKFFTGDSYIVLKTTASRSGSLHHDIHYWLGKDSSQDEAGAVAVMTVELDSALGGRAVQYREVQGHETEKFLSYFKPCIIPQEGGVASGFNHVKPEEHQTRLYICKGKHVVRVKEVPFVRSTLNHEDVFILDTESKIFQFSGSKSSIQERAKALEVVQYIKDTYHDGKCDIAAVEDGRMMADAEAGEFWGLFGGFAPLPKKPAVNDDETAASDGIKLFSVEKGQTDAVEAECLTKELLDTNKCYILDCGLELFVWKGRSTSIDQRKSATEAAEEFFRSSEPPKSNLVSVMEGYETVMFRSKFDSWPASSTIAEPQQGRGKVAALLQRQGVNVQGLVKTSSSSSKDEPKPYIDGTGNLQVWRINCEEKILLEAAEQSKFYSGDCYILQYSYPGEDREEHLVGTWFGKQSVEEDRASAISLANKMVESMKFVPAQARINEGKEPIQFFVIMQSFITFKGGVSDAFKKYIAENDIPDTTYEAEGVALFRVQGSGPENMQAIQIEAASAGLNSSHCYILHGDSTVFTWCGNLTSSEDQELMERMLDLIKPNEPTKAQKEGSESEQFWELLGGKSEYPSQKIKRDGESDPHLFSCTYTNESLKATEIFNFTQDDLMTEDIFILDCHTEVFVWVGQQVDPKKKPQALDIGENFLKHDFLLENLASETPIYIVTEGNEPPFFTRFFTWDSSKSGMHGDSFQRKLAILTNKGKPLLDKPKRRVPAYSSRSTVPDKSQPRSRSMTFSPDRARVRGRSPAFNALAANFEKLNIRNQSTPPPMVSPMVRKLYPKSHAPDLSKIAPKSAIAARTALFEKPTPTSQEPPTSPSSSEATNQAEAPKSTSETNEEEAMSSINEDSKEEEAEEESSLPTFPYERLKTDSEDPVSDVDLTRREAYLTSVEFKEKFEMTKNEFYKLPKWKQNKLKMSVNLF

SEQ ID NO: 78690 - protein, 1008 aa, Arabidopsis thaliana
  peptide (1)..(1008): Ceres Seq. ID no. 12644064
MRERDSDSTAAKTAVQGYDYDRNCLDPRLSKTNSLEERWRRKRNKITCECDGGYCAVRRGDELVCGIEIWRIENFKPVTVPQESHGKFFTGDSYIVLKTTASRSGSLHHDIHYWLGKDSSQDEAGAVAVMTVELDSALGGRAVQYREVQGHETEKFLSYFKPCIIPQEGGVASGFNHVKPEEHQTRLYICKGKHVVRVKEVPFVRSTLNHEDVFILDTESKIFQFSGSKSSIQERAKALEVVQYIKDTYHDGKCDIAAVEDGRMMADAEAGEFWGLFGGFAPLPKKPAVNDDETAASDGIKLFSVEKGQTDAVEAECLTKELLDTNKCYILDCGLELFVWKGRSTSIDQRKSATEAAEEFFRSSEPPKSNLVSVMEGYETVMFRSKFDSWPASSTIAEPQQGRGKVAALLQRQGVNVQGLVKTSSSSSKDEPKPYIDGTGNLQVWRINCEEKILLEAAEQSKFYSGDCYILQYSYPGEDREEHLVGTWFGKQSVEEDRASAISLANKMVESMKFVPAQARINEGKEPIQFFVIMQSFITFKGGVSDAFKKYIAENDIPDTTYEAEGVALFRVQGSGPENMQAIQIEAASAGLNSSHCYILHGDSTVFTWCGNLTSSEDQELMERMLDLIKPNEPTKAQKEGSESEQFWELLGGKSEYPSQKIKRDGESDPHLFSCTYTNESLKATEIFNFTQDDLMTEDIFILDCHTEVFVWVGQQVDPKKKPQALDIGENFLKHDFLLENLASETPIYIVTEGNEPPFFTRFFTWDSSKSGMHGDSFQRKLAILTNKGKPLLDKPKRRVPAYSSRSTVPDKSQPRSRSMTFSPDRARVRGRSPAFNALAANFEKLNIRNQSTPPPMVSPMVRKLYPKSHAPDLSKIAPKSAIAARTALFEKPTPTSQEPPTSPSSSEATNQAEAPKSTSETNEEEAMSSINEDSKEEEAEEESSLPTFPYERLKTDSEDPVSDVDLTRREAYLTSVEFKEKFEMTKNEFYKLPKWKQNKLKMSVNLF

SEQ ID NO: 78691 - protein, 879 aa, Arabidopsis thaliana
  peptide (1)..(879): Ceres Seq. ID no. 12644065
MTVELDSALGGRAVQYREVQGHETEKFLSYFKPCIIPQEGGVASGFNHVKPEEHQTRLYICKGKHVVRVKEVPFVRSTLNHEDVFILDTESKIFQFSGSKSSIQERAKALEVVQYIKDTYHDGKCDIAAVEDGRMMADAEAGEFWGLFGGFAPLPKKPAVNDDETAASDGIKLFSVEKGQTDAVEAECLTKELLDTNKCYILDCGLELFVWKGRSTSIDQRKSATEAAEEFFRSSEPPKSNLVSVMEGYETVMFRSKFDSWPASSTIAEPQQGRGKVAALLQRQGVNVQGLVKTSSSSSKDEPKPYIDGTGNLQVWRINCEEKILLEAAEQSKFYSGDCYILQYSYPGEDREEHLVGTWFGKQSVEEDRASAISLANKMVESMKFVPAQARINEGKEPIQFFVIMQSFITFKGGVSDAFKKYIAENDIPDTTYEAEGVALFRVQGSGPENMQAIQIEAASAGLNSSHCYILHGDSTVFTWCGNLTSSEDQELMERMLDLIKPNEPTKAQKEGSESEQFWELLGGKSEYPSQKIKRDGESDPHLFSCTYTNESLKATEIFNFTQDDLMTEDIFILDCHTEVFVWVGQQVDPKKKPQALDIGENFLKHDFLLENLASETPIYIVTEGNEPPFFTRFFTWDSSKSGMHGDSFQRKLAILTNKGKPLLDKPKRRVPAYSSRSTVPDKSQPRSRSMTFSPDRARVRGRSPAFNALAANFEKLNIRNQSTPPPMVSPMVRKLYPKSHAPDLSKIAPKSAIAARTALFEKPTPTSQEPPTSPSSSEATNQAEAPKSTSETNEEEAMSSINEDSKEEEAEEESSLPTFPYERLKTDSEDPVSDVDLTRREAYLTSVEFKEKFEMTKNEFYKLPKWKQNKLKMSVNLF

SEQ ID NO: 78692 - DNA, 1062 bp, Arabidopsis thaliana
  misc_feature (1)..(1062): Ceres Seq. ID no. 12644166
  misc_feature (1)..(1062): Ortholog of  Ceres SEQ ID NO 13596891 as cited in SEQ ID NO 62868
  misc_feature (1)..(1062): Ortholog of  Ceres SEQ ID NO 12617235 as cited in SEQ ID NO 63990
  misc_feature (1)..(1062): Ortholog of  Ceres SEQ ID NO 13655371 as cited in SEQ ID NO 68945
atggcaaacatcggcgtagtgacgacagcgactaacaaccaggtgatcttccgtaactacgtgaatggattccctaaagaatccgacctctacattgcagcaagcaccgttgacttacgtgtacctcccggatccatggcggttctagtgaagaatctctacttatcttgcgatcctcatagccgcactcgcatggggaagcctgatccctcgtctcctgcttccatggctcatgctttcactatcggcaagccaatctctgggtttggagtggctaaagcaatagattcagggcacccaaattacaaaacaggagatttactttggggaagagttggttgggaagagtatagtgttattactccaactccttcttcacatttcaagattcatcacaccgatgttccattatctttctacactggacttcttggtattccgggtctcactgcgtatattgggttttacgagatatgttctccgaaaaaaggagagactgtttttgtatcagctgcatctggcgcagtaggtcaactcgtgggacagtttgcgaagatggcgggatgctatgtcgttggaagcgctagcagtgaagagaaggttgatcttctcaagactaagtttgggtatgatgacgctttcaattataaggaagaaaaggatcttagtgctgccctaaagaggtgtttcccagaaggaatagacatatactttgagaacgtgggaggtaaaatgttagaggcagtgctcgaaaacatgaggacacatggccgaatcgcagcgtgtggaatgatatcacaatacaatctaaagaaaccagaagttttacataacacagccaccattgttcacaaacgcatccgtgttcaaggttttgctgctgtcgaattctttgataggtactccaagtttttggacttcatacttccacatgtaagagaagggaagttaacatatgttgaggatatatcccaaggacttgagaatggaccttctgctttgattggactcttccacggtaagaacgtcgggaaacaacttgtcgaagttgctcgcgtgtga

SEQ ID NO: 78693 - protein, 353 aa, Arabidopsis thaliana
  peptide (1)..(353): Ceres Seq. ID no. 12644167
MANIGVVTTATNNQVIFRNYVNGFPKESDLYIAASTVDLRVPPGSMAVLVKNLYLSCDPHSRTRMGKPDPSSPASMAHAFTIGKPISGFGVAKAIDSGHPNYKTGDLLWGRVGWEEYSVITPTPSSHFKIHHTDVPLSFYTGLLGIPGLTAYIGFYEICSPKKGETVFVSAASGAVGQLVGQFAKMAGCYVVGSASSEEKVDLLKTKFGYDDAFNYKEEKDLSAALKRCFPEGIDIYFENVGGKMLEAVLENMRTHGRIAACGMISQYNLKKPEVLHNTATIVHKRIRVQGFAAVEFFDRYSKFLDFILPHVREGKLTYVEDISQGLENGPSALIGLFHGKNVGKQLVEVARV

SEQ ID NO: 78694 - protein, 308 aa, Arabidopsis thaliana
  peptide (1)..(308): Ceres Seq. ID no. 12644168
MAVLVKNLYLSCDPHSRTRMGKPDPSSPASMAHAFTIGKPISGFGVAKAIDSGHPNYKTGDLLWGRVGWEEYSVITPTPSSHFKIHHTDVPLSFYTGLLGIPGLTAYIGFYEICSPKKGETVFVSAASGAVGQLVGQFAKMAGCYVVGSASSEEKVDLLKTKFGYDDAFNYKEEKDLSAALKRCFPEGIDIYFENVGGKMLEAVLENMRTHGRIAACGMISQYNLKKPEVLHNTATIVHKRIRVQGFAAVEFFDRYSKFLDFILPHVREGKLTYVEDISQGLENGPSALIGLFHGKNVGKQLVEVARV

SEQ ID NO: 78695 - protein, 289 aa, Arabidopsis thaliana
  peptide (1)..(289): Ceres Seq. ID no. 12644169
MGKPDPSSPASMAHAFTIGKPISGFGVAKAIDSGHPNYKTGDLLWGRVGWEEYSVITPTPSSHFKIHHTDVPLSFYTGLLGIPGLTAYIGFYEICSPKKGETVFVSAASGAVGQLVGQFAKMAGCYVVGSASSEEKVDLLKTKFGYDDAFNYKEEKDLSAALKRCFPEGIDIYFENVGGKMLEAVLENMRTHGRIAACGMISQYNLKKPEVLHNTATIVHKRIRVQGFAAVEFFDRYSKFLDFILPHVREGKLTYVEDISQGLENGPSALIGLFHGKNVGKQLVEVARV

SEQ ID NO: 78696 - DNA, 1893 bp, Arabidopsis thaliana
  misc_feature (1)..(1893): Ceres Seq. ID no. 12644214
  misc_feature (1)..(1893): Ortholog of  Ceres SEQ ID NO 14306268 as cited in SEQ ID NO 51135
  misc_feature (1)..(1893): Ortholog of  Ceres SEQ ID NO 15225368 as cited in SEQ ID NO 58345
  misc_feature (1)..(1893): Ortholog of  Ceres SEQ ID NO 13584744 as cited in SEQ ID NO 69137
atgatcaatctttctctgtctctgacaaaatcttggtccaatacaatcatatggatgctctttgtgatcccctcttgtgttttctcagttgttgatgagcaacacaaacactgcagtcctaggtttaaatgcggaaaccagtcagaactctattatcccttttggatatctgagagaaaagagtgcggtcacccagatttcgaggtcaactgcagcggagattttgcagagcttactgtatccacagttaagttccaaatccttgagatgaactatgagtttgaaatcataagactagccagaatggattatcgcaacaatctttgtcctcagcatcctgcgaatgcatctatcaaccatgatgtccttccattttctcccgacaccaagctgtcaactttttatcacgactgccaatcaacggtagatgtacatcccaatgattacattaaacagcttaactgtgaggattatatcggtgggaaaagttactttgtctcgtcctcttcacattctggggatagagctaccttagctgcattgagtgcatcgtgcgaaggggtcgatattccagtctctcggtcagccttgaagacagtagagaaaaatcagagtctggaggctatgaagaaggctattgatgagggtttcgaacttggcttcaacaatgaatgttcccaatgcgcaatatcagggggcgcttgtggctttgatcagagattgaaagcatttgtttgctattgtgcggatgagcctcacgagagcatcggattcgcttctggattcttgggtgccacacttatcggcggatgtttactctgtatcttcatccggagaaggaagaaactagcaacacaatacacaaacaaagtcttcagctacgaagaactcgaggaagccactgaaaatttctccaaagaactcggagatggaggcttcggtactgtctactacggtacactaaaagacggacgagcagtagctgtgaaacgactcttcgaaagatcactaaaacgcgtggaacaattcaagaacgaaatcgatatcttgaaatccctaaaacacccgaacctagtgattctatacggatgcacaacaagacatagcagagagttactcctagtatacgaatacatctccaatggcacactcgctgaacatctccatggaaaccaagcacaatctcgccctatttgttggcctgctcgactccaaatagccatcgaaaccgctagcgccttgtcctatctccacgcctcagggatcatacacagagacgttaagactactaacattctcttagatagcaattaccaagtcaaagtagctgatttcggactctcacggttgtttccgatggatcaaactcacatctccactgctccacaaggtactccaggatatgtagatcctgagtattaccaatgttaccgattaaacgagaagagtgacgtttacagcttcggagtcgtactctccgaactaatctcatcgaaagaagctgttgatatcaccagacaccgccacgatattaacctcgccaacatggcgatttcgaaaatccaaaacgacgccgtacatgagctcgcggatctatcactcggattcgcgagagatccttcggtgaagaagatgatgtcgtcggttgctgaattagcattccgatgtttgcaacaggagagagacgtacggccatcgatggatgagatcgttgaggttttgagagtgattcagaaggatgggataagtgattcgaaggatgtggttgtggagattgatgtgaacggtggtgatgatgttggattgttgaagcatggtgttcctccgccgttatcgccggagactgataaaacgacggcgagtagttcgaatactacggcgagttcgttttga

SEQ ID NO: 78697 - protein, 630 aa, Arabidopsis thaliana
  peptide (1)..(630): Ceres Seq. ID no. 12644215
MINLSLSLTKSWSNTIIWMLFVIPSCVFSVVDEQHKHCSPRFKCGNQSELYYPFWISERKECGHPDFEVNCSGDFAELTVSTVKFQILEMNYEFEIIRLARMDYRNNLCPQHPANASINHDVLPFSPDTKLSTFYHDCQSTVDVHPNDYIKQLNCEDYIGGKSYFVSSSSHSGDRATLAALSASCEGVDIPVSRSALKTVEKNQSLEAMKKAIDEGFELGFNNECSQCAISGGACGFDQRLKAFVCYCADEPHESIGFASGFLGATLIGGCLLCIFIRRRKKLATQYTNKVFSYEELEEATENFSKELGDGGFGTVYYGTLKDGRAVAVKRLFERSLKRVEQFKNEIDILKSLKHPNLVILYGCTTRHSRELLLVYEYISNGTLAEHLHGNQAQSRPICWPARLQIAIETASALSYLHASGIIHRDVKTTNILLDSNYQVKVADFGLSRLFPMDQTHISTAPQGTPGYVDPEYYQCYRLNEKSDVYSFGVVLSELISSKEAVDITRHRHDINLANMAISKIQNDAVHELADLSLGFARDPSVKKMMSSVAELAFRCLQQERDVRPSMDEIVEVLRVIQKDGISDSKDVVVEIDVNGGDDVGLLKHGVPPPLSPETDKTTASSSNTTASSF

SEQ ID NO: 78698 - protein, 612 aa, Arabidopsis thaliana
  peptide (1)..(612): Ceres Seq. ID no. 12644216
MLFVIPSCVFSVVDEQHKHCSPRFKCGNQSELYYPFWISERKECGHPDFEVNCSGDFAELTVSTVKFQILEMNYEFEIIRLARMDYRNNLCPQHPANASINHDVLPFSPDTKLSTFYHDCQSTVDVHPNDYIKQLNCEDYIGGKSYFVSSSSHSGDRATLAALSASCEGVDIPVSRSALKTVEKNQSLEAMKKAIDEGFELGFNNECSQCAISGGACGFDQRLKAFVCYCADEPHESIGFASGFLGATLIGGCLLCIFIRRRKKLATQYTNKVFSYEELEEATENFSKELGDGGFGTVYYGTLKDGRAVAVKRLFERSLKRVEQFKNEIDILKSLKHPNLVILYGCTTRHSRELLLVYEYISNGTLAEHLHGNQAQSRPICWPARLQIAIETASALSYLHASGIIHRDVKTTNILLDSNYQVKVADFGLSRLFPMDQTHISTAPQGTPGYVDPEYYQCYRLNEKSDVYSFGVVLSELISSKEAVDITRHRHDINLANMAISKIQNDAVHELADLSLGFARDPSVKKMMSSVAELAFRCLQQERDVRPSMDEIVEVLRVIQKDGISDSKDVVVEIDVNGGDDVGLLKHGVPPPLSPETDKTTASSSNTTASSF

SEQ ID NO: 78699 - protein, 541 aa, Arabidopsis thaliana
  peptide (1)..(541): Ceres Seq. ID no. 12644217
MNYEFEIIRLARMDYRNNLCPQHPANASINHDVLPFSPDTKLSTFYHDCQSTVDVHPNDYIKQLNCEDYIGGKSYFVSSSSHSGDRATLAALSASCEGVDIPVSRSALKTVEKNQSLEAMKKAIDEGFELGFNNECSQCAISGGACGFDQRLKAFVCYCADEPHESIGFASGFLGATLIGGCLLCIFIRRRKKLATQYTNKVFSYEELEEATENFSKELGDGGFGTVYYGTLKDGRAVAVKRLFERSLKRVEQFKNEIDILKSLKHPNLVILYGCTTRHSRELLLVYEYISNGTLAEHLHGNQAQSRPICWPARLQIAIETASALSYLHASGIIHRDVKTTNILLDSNYQVKVADFGLSRLFPMDQTHISTAPQGTPGYVDPEYYQCYRLNEKSDVYSFGVVLSELISSKEAVDITRHRHDINLANMAISKIQNDAVHELADLSLGFARDPSVKKMMSSVAELAFRCLQQERDVRPSMDEIVEVLRVIQKDGISDSKDVVVEIDVNGGDDVGLLKHGVPPPLSPETDKTTASSSNTTASSF

SEQ ID NO: 78700 - DNA, 1857 bp, Arabidopsis thaliana
  misc_feature (1)..(1857): Ceres Seq. ID no. 12644226
  misc_feature (1)..(1857): Ortholog of  Ceres SEQ ID NO 15176941 as cited in SEQ ID NO 55559
atgggatctcaaacagctaggttctgtctgatcttgttattcttgttttattatcttccttgtgctctaagccaagatgatttatggggctgtggtactccgtttcggtgtggaaacatcacagctggttttcctttcttgggagggattcgcggtgaagtttgcggtcaccattctctgaaactaaactgcaacaaacactcaaacacaacctctcttatcttctcaggccacaactacactgtcctctatatagacaacaacaacaattccgtcactcttggactttcaagacaagatttctcaggtcctttctgctctgcttcattctcctccacacttttatcttcaggtctcttccagaatttaccatcttacaaaagcctcactgtgttctacgcttgtgaccctcgtcgccatttccttgggaatttcacatgtccagtgaaaggtcttggctctattattcaaaactctacatatggtatactttgtgatgggagtttcagtgttccagttcctacgagttttgtttcggaggaggaagttttggatttgacccatttagagagtgttcttagaaaaggatttgaagtgaagcttaatatagatgagataccttgtccactagaatgtttttcctctcgtgcaaattgcctctttcttgccggatcttgctgcaaatatcatgatcgtacaacgacctgcggtggtgatacaggagatttattacgtgagataatccctaacactcgctccatactgataacaattggacaagttgtagggttccatgtatttataattgtggtgatgattatagcattcttgttctggaggagaaaaaaagtaaatgatctgagaaagcagaacctcgaggcgcttgtaacctcgagacgatatagttatagacaaatcaagaaaattacaaaatcatttacagaagtagttggacgaggaggatttggaactgtatataaagggaatttacgcgatggtcgtaaagtagccgtgaagattttgaaggattcaaatggaaattgcgaagatttcatcaacgaagttgcaagcataagccaaacatctcatgttaacattgtttctctacttggtttttgctttgaaaaatccaaaagagcgattgtgtatgaatttctagagaatgggtctctagatcagtcttcgaatcttgatgtgagtacactttatggaatcgcgctaggcgtggctcggggaatagagtacttgcactttggctgcaaaaaaaggattgtgcattttgacattaaaccacagaatgtactattagatgaaaatctcaaacccaaagttgctgattttggcctcgctaagctttgtgagaagcaagaaagcatattgtcattgcttgacacgagaggaactataggatacattgctccagagttgttttcaagagtgtatgggaatgtatctcacaagtcggatgtgtacagctatggaatgttggttcttgagatgactggagcaaggaacaaagaaagagtccaaaatgctgattcgaacaatagctcagcttactttccagattggatctttaaggatcttgaaaatggagattacgtaaagcttcttgccgatggactaacccgagaggaagaagatattgcgaaaaagatgatcttggtgggtctatggtgtattcagttccgcccatcagaccgtccatcaatgaacaaagttgtagggatgatggaaggaaatttggattctcttgatccccctcctaagcctcttttgcatatgccaatgcaaaataataatgcagaatcatctcagccatcagaggaggacagctcaatttactcagaagtatga

SEQ ID NO: 78701 - protein, 618 aa, Arabidopsis thaliana
  peptide (1)..(618): Ceres Seq. ID no. 12644227
MGSQTARFCLILLFLFYYLPCALSQDDLWGCGTPFRCGNITAGFPFLGGIRGEVCGHHSLKLNCNKHSNTTSLIFSGHNYTVLYIDNNNNSVTLGLSRQDFSGPFCSASFSSTLLSSGLFQNLPSYKSLTVFYACDPRRHFLGNFTCPVKGLGSIIQNSTYGILCDGSFSVPVPTSFVSEEEVLDLTHLESVLRKGFEVKLNIDEIPCPLECFSSRANCLFLAGSCCKYHDRTTTCGGDTGDLLREIIPNTRSILITIGQVVGFHVFIIVVMIIAFLFWRRKKVNDLRKQNLEALVTSRRYSYRQIKKITKSFTEVVGRGGFGTVYKGNLRDGRKVAVKILKDSNGNCEDFINEVASISQTSHVNIVSLLGFCFEKSKRAIVYEFLENGSLDQSSNLDVSTLYGIALGVARGIEYLHFGCKKRIVHFDIKPQNVLLDENLKPKVADFGLAKLCEKQESILSLLDTRGTIGYIAPELFSRVYGNVSHKSDVYSYGMLVLEMTGARNKERVQNADSNNSSAYFPDWIFKDLENGDYVKLLADGLTREEEDIAKKMILVGLWCIQFRPSDRPSMNKVVGMMEGNLDSLDPPPKPLLHMPMQNNNAESSQPSEEDSSIYSEV

SEQ ID NO: 78702 - protein, 347 aa, Arabidopsis thaliana
  peptide (1)..(347): Ceres Seq. ID no. 12644228
MIIAFLFWRRKKVNDLRKQNLEALVTSRRYSYRQIKKITKSFTEVVGRGGFGTVYKGNLRDGRKVAVKILKDSNGNCEDFINEVASISQTSHVNIVSLLGFCFEKSKRAIVYEFLENGSLDQSSNLDVSTLYGIALGVARGIEYLHFGCKKRIVHFDIKPQNVLLDENLKPKVADFGLAKLCEKQESILSLLDTRGTIGYIAPELFSRVYGNVSHKSDVYSYGMLVLEMTGARNKERVQNADSNNSSAYFPDWIFKDLENGDYVKLLADGLTREEEDIAKKMILVGLWCIQFRPSDRPSMNKVVGMMEGNLDSLDPPPKPLLHMPMQNNNAESSQPSEEDSSIYSEV

SEQ ID NO: 78703 - DNA, 1839 bp, Arabidopsis thaliana
  misc_feature (1)..(1839): Ceres Seq. ID no. 12644229
  misc_feature (1)..(1839): Ortholog of  Ceres SEQ ID NO 15176941 as cited in SEQ ID NO 55559
atgggatttcaaacagctagtttttttctgatcttgttattcttgttttatcatcttccttgtgttccaagccagcaagaacgaagtaggttatgtaaaccttttcagtgtggcgacatcaccgtcggttttcccttctggggagagaatcgccaaagtgattgcggtcacttttctctgaaactaaactgcaacaaaccctcaaacacaacctctcttacaatctcaggccacaactacagtgtcctccatatagacaacaaatccaacattcttagcctatccagacaagatttctcaggtcctttctgttctgcttcattctcttccacacctttgcgttcagatctcttccagaatttgcaaccttacagaaacctcactgtgttctatatgtgtgaccctcgtcgccatttctttgggaatttcacatgtccagtgaaaggtcttggctctgtggttcagaactctacgtatcgtaaactttgtgataaaagttttagcgtcacagttcctacgagttatgttccagaggaagaagctctgaatttgacacatttggaaagtgttttgaggaaagggttagaggtgaagctgaagataagtgagatgtctggtcaagaatgtgtaaccactgatggaaactctggcttcacacggttttgctgcacgaacgtatcaggaccagaaatcagttgccttacttcaataactactatgaataatggaacttacagcgataatcgccctttcctggtaacaattggaacagggtcaatactatgtgtatgtgtggtgctgtttctagcattttatcttaacgagagaagaatagcaaaggctgcgagaattcagcacctcgaggcgcttggaaccctgagagggtacaattataaacaaatcaagaaaattacaaaatcatttacagaagtagttggacgaggaggatttggaactgtatatagagggagattacgcgatggtcgaaaggttgccgtgaaggtcttgaaagattcaaagggaaactgtgaagatttcatcaacgaagtcgcaagcatgagccaaacatctcatgttaacattgtaactctgcttggtttctgctatgaaggatccaaaagggcgatcatatatgaatttctagagaatggatctctggatcagtcgttgaatcttgatgtgagtacactttatggaatcgcgctaggcgtggcacggggacttgagtacctgcactatggctgcaaaaccaggattgtgcattttgacattaaacctcagaatgtactgttagatgaaaatctcagacccaaagttgctgattttggactcgctaagctctgtgagaagcaagaaagcatcttatcattgcttgataccagaggaacaataggatacattgctccagagttgttttcaagaatgtacggaagcgtgtctcacaagtcagatgtgtacagctatgggatgttggttcttgagatgatcggagcaaggaacaaagaaagagtccaaaatgctgatccgaacaatagctcggcttactttccggattggatctacaaggatcttgaaaattttgataacacaaggcttcttggcgatggactaacccgagaggaagaaaaaaatgcgaaaaagatgatcttggtgggtctatggtgtattcagttccgtccatcagaccgtccatcaatgaacaaagttgtagagatgatggaaggaagtttggattctcttgatccccctcctaagcctcttttgcatatgccaatgcaaaacaataatgcagaatcatctcagctatcagtggaaagctcaatttactccgaagtatga

SEQ ID NO: 78704 - protein, 612 aa, Arabidopsis thaliana
  peptide (1)..(612): Ceres Seq. ID no. 12644230
MGFQTASFFLILLFLFYHLPCVPSQQERSRLCKPFQCGDITVGFPFWGENRQSDCGHFSLKLNCNKPSNTTSLTISGHNYSVLHIDNKSNILSLSRQDFSGPFCSASFSSTPLRSDLFQNLQPYRNLTVFYMCDPRRHFFGNFTCPVKGLGSVVQNSTYRKLCDKSFSVTVPTSYVPEEEALNLTHLESVLRKGLEVKLKISEMSGQECVTTDGNSGFTRFCCTNVSGPEISCLTSITTMNNGTYSDNRPFLVTIGTGSILCVCVVLFLAFYLNERRIAKAARIQHLEALGTLRGYNYKQIKKITKSFTEVVGRGGFGTVYRGRLRDGRKVAVKVLKDSKGNCEDFINEVASMSQTSHVNIVTLLGFCYEGSKRAIIYEFLENGSLDQSLNLDVSTLYGIALGVARGLEYLHYGCKTRIVHFDIKPQNVLLDENLRPKVADFGLAKLCEKQESILSLLDTRGTIGYIAPELFSRMYGSVSHKSDVYSYGMLVLEMIGARNKERVQNADPNNSSAYFPDWIYKDLENFDNTRLLGDGLTREEEKNAKKMILVGLWCIQFRPSDRPSMNKVVEMMEGSLDSLDPPPKPLLHMPMQNNNAESSQLSVESSIYSEV

SEQ ID NO: 78705 - protein, 481 aa, Arabidopsis thaliana
  peptide (1)..(481): Ceres Seq. ID no. 12644231
MCDPRRHFFGNFTCPVKGLGSVVQNSTYRKLCDKSFSVTVPTSYVPEEEALNLTHLESVLRKGLEVKLKISEMSGQECVTTDGNSGFTRFCCTNVSGPEISCLTSITTMNNGTYSDNRPFLVTIGTGSILCVCVVLFLAFYLNERRIAKAARIQHLEALGTLRGYNYKQIKKITKSFTEVVGRGGFGTVYRGRLRDGRKVAVKVLKDSKGNCEDFINEVASMSQTSHVNIVTLLGFCYEGSKRAIIYEFLENGSLDQSLNLDVSTLYGIALGVARGLEYLHYGCKTRIVHFDIKPQNVLLDENLRPKVADFGLAKLCEKQESILSLLDTRGTIGYIAPELFSRMYGSVSHKSDVYSYGMLVLEMIGARNKERVQNADPNNSSAYFPDWIYKDLENFDNTRLLGDGLTREEEKNAKKMILVGLWCIQFRPSDRPSMNKVVEMMEGSLDSLDPPPKPLLHMPMQNNNAESSQLSVESSIYSEV

SEQ ID NO: 78706 - protein, 409 aa, Arabidopsis thaliana
  peptide (1)..(409): Ceres Seq. ID no. 12644232
MSGQECVTTDGNSGFTRFCCTNVSGPEISCLTSITTMNNGTYSDNRPFLVTIGTGSILCVCVVLFLAFYLNERRIAKAARIQHLEALGTLRGYNYKQIKKITKSFTEVVGRGGFGTVYRGRLRDGRKVAVKVLKDSKGNCEDFINEVASMSQTSHVNIVTLLGFCYEGSKRAIIYEFLENGSLDQSLNLDVSTLYGIALGVARGLEYLHYGCKTRIVHFDIKPQNVLLDENLRPKVADFGLAKLCEKQESILSLLDTRGTIGYIAPELFSRMYGSVSHKSDVYSYGMLVLEMIGARNKERVQNADPNNSSAYFPDWIYKDLENFDNTRLLGDGLTREEEKNAKKMILVGLWCIQFRPSDRPSMNKVVEMMEGSLDSLDPPPKPLLHMPMQNNNAESSQLSVESSIYSEV

SEQ ID NO: 78707 - DNA, 1422 bp, Arabidopsis thaliana
  misc_feature (1)..(1422): Ceres Seq. ID no. 12644280
  misc_feature (1)..(1422): Ortholog of  Ceres SEQ ID NO 12614670 as cited in SEQ ID NO 68565
atgttgcttactatattaaaatcactcctcgtgatattcgtgactacgatattgagagttttatacgacaccatatcgtgctactggctaacacctagacgaatcaagaagatcatggaacagcaaggcgtaacgggtcctaaaccgcgtccgttaaccggaaatatccttgaaatctcggccatggtttcgcaatccgcttccaaggattgtgactctattcaccatgacatcgtcggccgccttctcccgcattacgttgcttggtccaaacaatacgggaagaggtttattgtgtggaacgggacggatcctcggctttgcttaacggaaacggaattgataaaggagttgctgatgaaacacaacggtggatacgcaaggcatatggtggagtgcacaagcaagctagttgagaggttgaggaaggaagttggggaaggagcaaatgaggtggagataggagaggagatgcataaactcacggctgatattatatcgaggacaaagttcggaagcagctttgagaaaggcaaagagcttttcaaccacctcactgtcctccagcgccgttgcgctcaagccacccgccacctctgctttcccggcagccggtttcttccaagcaaatacaacagagagatcaagtctctgaaaaaagaagttgagcgtttgttgattgagatcatacaaagcaggcgagactgcgctgaaatgggtaggagtagcactcacggtgacgaccttctcgggcttctcttgaacgaaatggatattgacaagaacaataacaataacaacaacaatcttcagttgataatggatgaatgcaagacattcttctttgctggccatgaaaccacggctttgctcctcacatggacaacaatgctcctcgccgataatcccacatggcaggaaaaagtccgtgaggaggtcagggaggtctttggccgcaatggccttccctcagtcgatcaactatctaagctaacctcgttaagcaaagtgattaacgagtcactaagactttaccctccagctactcttctaccaaggatggcatttgaagatctaaaactaggtgatctaaccattcctaaaggtttatcaatatggataccggttcttgctatccatcacagtgaagaattatggggtaaagacgcgaaccaattcaatcccgaacgttttggaggcagaccattcgcgtctggtcgccatttcatcccatttgcagccggtccacggaactgcatcggacaacagtttgcgttgatggaagctaaaataatattagccacgttaatttcaaagtttaacttcacaatatcaaagaattataggcatgccccaatcgttgtgcttactataaaacctaagtatggagttcaagtgatattgaagccattggtttcatga

SEQ ID NO: 78708 - protein, 473 aa, Arabidopsis thaliana
  peptide (1)..(473): Ceres Seq. ID no. 12644281
MLLTILKSLLVIFVTTILRVLYDTISCYWLTPRRIKKIMEQQGVTGPKPRPLTGNILEISAMVSQSASKDCDSIHHDIVGRLLPHYVAWSKQYGKRFIVWNGTDPRLCLTETELIKELLMKHNGGYARHMVECTSKLVERLRKEVGEGANEVEIGEEMHKLTADIISRTKFGSSFEKGKELFNHLTVLQRRCAQATRHLCFPGSRFLPSKYNREIKSLKKEVERLLIEIIQSRRDCAEMGRSSTHGDDLLGLLLNEMDIDKNNNNNNNNLQLIMDECKTFFFAGHETTALLLTWTTMLLADNPTWQEKVREEVREVFGRNGLPSVDQLSKLTSLSKVINESLRLYPPATLLPRMAFEDLKLGDLTIPKGLSIWIPVLAIHHSEELWGKDANQFNPERFGGRPFASGRHFIPFAAGPRNCIGQQFALMEAKIILATLISKFNFTISKNYRHAPIVVLTIKPKYGVQVILKPLVS

SEQ ID NO: 78709 - protein, 435 aa, Arabidopsis thaliana
  peptide (1)..(435): Ceres Seq. ID no. 12644282
MEQQGVTGPKPRPLTGNILEISAMVSQSASKDCDSIHHDIVGRLLPHYVAWSKQYGKRFIVWNGTDPRLCLTETELIKELLMKHNGGYARHMVECTSKLVERLRKEVGEGANEVEIGEEMHKLTADIISRTKFGSSFEKGKELFNHLTVLQRRCAQATRHLCFPGSRFLPSKYNREIKSLKKEVERLLIEIIQSRRDCAEMGRSSTHGDDLLGLLLNEMDIDKNNNNNNNNLQLIMDECKTFFFAGHETTALLLTWTTMLLADNPTWQEKVREEVREVFGRNGLPSVDQLSKLTSLSKVINESLRLYPPATLLPRMAFEDLKLGDLTIPKGLSIWIPVLAIHHSEELWGKDANQFNPERFGGRPFASGRHFIPFAAGPRNCIGQQFALMEAKIILATLISKFNFTISKNYRHAPIVVLTIKPKYGVQVILKPLVS

SEQ ID NO: 78710 - protein, 412 aa, Arabidopsis thaliana
  peptide (1)..(412): Ceres Seq. ID no. 12644283
MVSQSASKDCDSIHHDIVGRLLPHYVAWSKQYGKRFIVWNGTDPRLCLTETELIKELLMKHNGGYARHMVECTSKLVERLRKEVGEGANEVEIGEEMHKLTADIISRTKFGSSFEKGKELFNHLTVLQRRCAQATRHLCFPGSRFLPSKYNREIKSLKKEVERLLIEIIQSRRDCAEMGRSSTHGDDLLGLLLNEMDIDKNNNNNNNNLQLIMDECKTFFFAGHETTALLLTWTTMLLADNPTWQEKVREEVREVFGRNGLPSVDQLSKLTSLSKVINESLRLYPPATLLPRMAFEDLKLGDLTIPKGLSIWIPVLAIHHSEELWGKDANQFNPERFGGRPFASGRHFIPFAAGPRNCIGQQFALMEAKIILATLISKFNFTISKNYRHAPIVVLTIKPKYGVQVILKPLVS

SEQ ID NO: 78711 - DNA, 1380 bp, Arabidopsis thaliana
  misc_feature (1)..(1380): Ceres Seq. ID no. 12644372
  misc_feature (1)..(1380): Ortholog of  Ceres SEQ ID NO 13598488 as cited in SEQ ID NO 63862
  misc_feature (1)..(1380): Ortholog of  Ceres SEQ ID NO 13659640 as cited in SEQ ID NO 67101
aaacaaaaacttcaaagagagagagagagagagttttgtgaactcaagaaaataaaaaaagttatagttaatgggattcggcttagagagtatcaaatcaatctccggcggatggggcgcggcggcgcgttcctgtgacgcttgtaaatcagttaccgccgccgtgttctgtcgagttgactcagctttcttatgcatagcatgtgacacaagaatccattccttcactcgccacgagcgcgtgtgggtttgtgaagtttgtgaacaagctcccgccgccgtcacttgcaaagccgacgccgccgctctttgcgtcagttgtgatgccgatattcactctgctaatcctctcgctagccgtcacgaacgtgtccccgtcgaaactttcttcgactcagccgaaaccgccgtcgccaaaatctcagcttcttcgacttttggtatccttggctcatccaccaccgttgatttaaccgctgttccggttatggctgatgatctcggtttatgtccgtggttacttcctaatgatttcaacgaaccggctaaaatcgaaatcggaactgaaaacatgaaaggttcttctgactttatgttttctgatttcgatcggcttattgatttcgagtttccgaattcgttcaatcatcatcaaaacaacgccggaggagatagtcttgttccggttcagacgaaaacagagcctctcccgttaactaacaatgatcattgcttcgatattgatttctgcagatcaaagctctctgctttcacttacccttctcaatcagtcagccacagtgtttcgacttcttctattgaatacggtgtagttcctgacggaaacacaaacaactctgttaaccggagcacgatcactagctcgacgactggtggtgatcatcaagcgagctctatggatagagaagctagggttttgaggtacagagagaagagaaagaacaggaaatttgagaagacgattcgttacgcttcgaggaaagcttatgcagagtcacggccaaggatcaaaggccggtttgcgaaaagaacagagacagaaaacgacgacattttccttagtcatgtttatgcttcagcagcacacgcacagtacggtgtcgtaccaacgttctgattcgaatctacggtggataaacaatcaacctgaagacttcatatcttccaccgttgatttacagtcggtgtataataagtatagtgagtcttaccgtagacaaacatcttatcctctttaccgttttaattactttttttttacgcgctctcactgccactgtaactctttttttttttcttcctatatatgtatgcttatttttatttagaaaatgttatgaaatcatataatttggtaat

SEQ ID NO: 78712 - protein, 355 aa, Arabidopsis thaliana; identical to SEQ ID NO: 27540
  peptide (1)..(355): Ceres Seq. ID no. 12644373

SEQ ID NO: 78713 - protein, 216 aa, Arabidopsis thaliana; identical to SEQ ID NO: 27541
  peptide (1)..(216): Ceres Seq. ID no. 12644374

SEQ ID NO: 78714 - protein, 188 aa, Arabidopsis thaliana; identical to SEQ ID NO: 27542
  peptide (1)..(188): Ceres Seq. ID no. 12644375

SEQ ID NO: 78715 - DNA, 1194 bp, Arabidopsis thaliana
  misc_feature (1)..(1194): Ceres Seq. ID no. 12644441
  misc_feature (1)..(1194): Ortholog of  Ceres SEQ ID NO 14315614 as cited in SEQ ID NO 52972
  misc_feature (1)..(1194): Ortholog of  Ceres SEQ ID NO 14302754 as cited in SEQ ID NO 61212
atggcattaacccttttgtctcacgaattatctgacctctgtatcggtaagccacctttacggtgtctctccgtcgccacagccaccgtagctgacgccatcgccgctctcaaatcctctgacgaaccgttcctcaccgtatggagctgtaatcacgatgagaaaacagatgataatgataagtgtgagtgtttgggtaagatctgtatggctgatgtaatctgttacctatccaaattcgacaacaatgttttgtctctttcctctgctttcgacgcatctgtctctgttcttcttcccaaatctcgtgccctcgtcgtccatgttcaatcttcttgcagtttgattgaagctattgatctgataatcaaaggagcacagaatctgattgttccgattcatacgaaatcaatcacaaagagaagacaacaacaaaaacttctgaaacgaaacgtcgtcgtttcactcaccaacgcaacttcaacaacccacaaaaacagccgagaattctgctggatcacacaagaagacattattcgattccttctcgattccattagcgttttctctccattaccgtcgctttctatctccgatcttggagttatcaatagtacacacactatcctcgccgttgattactactcctcagctgcttccgccgtctctgccatctctcgtgccatcttggacaatgtctctgtcgcggtggttggtaaaggatgcgagatttcaccgatgacactcgcttgctgcgatgaaactgccgtagcagcggttgctacactctctgccggagatttaatgtcctatatcgacggtagtggtccgccggagagtctagttggagtagttaggaatcgtttggaagataaagggatggttggattaatctcactcattgattctttgtcgttgtcgtcggggtcttcctcggatgaagaatctccggcggggaagacgagaatgacttcttcgtatgggaggtcggtgagtagcgcggcgaggatggctaggaaatcggtggcgatagtgtgtaatcggaagagttctttaatggcggtgatgatacaagctattgctcatagagtgagttatgtgtgggtgattgatgaagatggttgtttgattggtatggttacttttgttgatatattgaaactttttagggaatttttggatgatgaaaactaa

SEQ ID NO: 78716 - protein, 397 aa, Arabidopsis thaliana
  peptide (1)..(397): Ceres Seq. ID no. 12644442
MALTLLSHELSDLCIGKPPLRCLSVATATVADAIAALKSSDEPFLTVWSCNHDEKTDDNDKCECLGKICMADVICYLSKFDNNVLSLSSAFDASVSVLLPKSRALVVHVQSSCSLIEAIDLIIKGAQNLIVPIHTKSITKRRQQQKLLKRNVVVSLTNATSTTHKNSREFCWITQEDIIRFLLDSISVFSPLPSLSISDLGVINSTHTILAVDYYSSAASAVSAISRAILDNVSVAVVGKGCEISPMTLACCDETAVAAVATLSAGDLMSYIDGSGPPESLVGVVRNRLEDKGMVGLISLIDSLSLSSGSSSDEESPAGKTRMTSSYGRSVSSAARMARKSVAIVCNRKSSLMAVMIQAIAHRVSYVWVIDEDGCLIGMVTFVDILKLFREFLDDEN

SEQ ID NO: 78717 - protein, 328 aa, Arabidopsis thaliana
  peptide (1)..(328): Ceres Seq. ID no. 12644443
MADVICYLSKFDNNVLSLSSAFDASVSVLLPKSRALVVHVQSSCSLIEAIDLIIKGAQNLIVPIHTKSITKRRQQQKLLKRNVVVSLTNATSTTHKNSREFCWITQEDIIRFLLDSISVFSPLPSLSISDLGVINSTHTILAVDYYSSAASAVSAISRAILDNVSVAVVGKGCEISPMTLACCDETAVAAVATLSAGDLMSYIDGSGPPESLVGVVRNRLEDKGMVGLISLIDSLSLSSGSSSDEESPAGKTRMTSSYGRSVSSAARMARKSVAIVCNRKSSLMAVMIQAIAHRVSYVWVIDEDGCLIGMVTFVDILKLFREFLDDEN

SEQ ID NO: 78718 - DNA, 1407 bp, Arabidopsis thaliana
  misc_feature (1)..(1407): Ceres Seq. ID no. 12644485
  misc_feature (1)..(1407): Ortholog of  Ceres SEQ ID NO 13582281 as cited in SEQ ID NO 51014
  misc_feature (1)..(1407): Ortholog of  Ceres SEQ ID NO 14315606 as cited in SEQ ID NO 53515
  misc_feature (1)..(1407): Ortholog of  Ceres SEQ ID NO 15176795 as cited in SEQ ID NO 54453
  misc_feature (1)..(1407): Ortholog of  Ceres SEQ ID NO 14310508 as cited in SEQ ID NO 58965
  misc_feature (1)..(1407): Ortholog of  Ceres SEQ ID NO 12617417 as cited in SEQ ID NO 65089
atgggtgtttttggatcgaatgaatcgtcaagcatgagtattgtgatgtatccgtggttagcctttggtcacatgactccttttcttcacctatccaacaagctcgcagagaaaggtcacaagattgttttcttgcttcccaagaaagcactaaaccagcttgaacctcttaatctctacccaaatctcatcactttccacaccatctctatccctcaggtcaaagggctccctccgggtgcggagacaaactccgacgtccctttcttcttgacacatttgcttgcagttgcaatggaccaaacccggccagaggtcgagaccattttccgtacaatcaaaccggacttggttttctatgattctgcccattggataccggaaattgctaaaccgatcggtgctaaaaccgtttgcttcaacatcgttagcgctgcgtcaatcgcactgtctcttgtcccttctgcggagagagaggtcattgatggcaaggaaatgtcaggggaggagttagctaagacgcctctaggttacccatcttcgaaagtagtcttacgtccgcacgaagcaaaatccctgagtttcgtgtggaggaagcacgaggcgattggctctttctttgatgggaaagttaccgcgatgagaaactgcgacgcaatcgctataaggacttgccgtgagacagaaggcaaattctgcgattacataagtaggcagtacagtaaaccggtttacctaacaggaccggttctccctggatcccaacctaatcagccctccttagatcctcaatgggcggagtggctagccaaattcaaccacggttcggttgtgttctgcgctttcggtagccaacccgttgtaaacaagatagatcagtttcaagaactctgtttaggtctagaatcaactggttttccgtttctggttgccattaagcctccttcgggtgtatcaaccgtcgaggaagccttaccggaaggattcaaagagagggttcaaggacgtggcgttgtgtttggaggttggattcagcaaccgttggtgttgaaccatccttcagtgggttgttttgttagccattgcgggtttgggtcgatgtgggagtcgttgatgagtgattgtcagatcgttttggttccgcagcacggagaacagattttgaacgcaaggctgatgacggaggagatggaggtggcggttgaagtggagagggaaaagaaagggtggttctcgcggcaaagcttggagaatgctgtgaagagtgtgatggaggaaggtagtgagatcggtgagaaagtgaggaagaatcatgacaagtggagatgtgttttgactgactctggtttttcagatggttatattgataagtttgaacaaaatttaattgaacttgtgaagtcatga

SEQ ID NO: 78719 - protein, 468 aa, Arabidopsis thaliana
  peptide (1)..(468): Ceres Seq. ID no. 12644486
MGVFGSNESSSMSIVMYPWLAFGHMTPFLHLSNKLAEKGHKIVFLLPKKALNQLEPLNLYPNLITFHTISIPQVKGLPPGAETNSDVPFFLTHLLAVAMDQTRPEVETIFRTIKPDLVFYDSAHWIPEIAKPIGAKTVCFNIVSAASIALSLVPSAEREVIDGKEMSGEELAKTPLGYPSSKVVLRPHEAKSLSFVWRKHEAIGSFFDGKVTAMRNCDAIAIRTCRETEGKFCDYISRQYSKPVYLTGPVLPGSQPNQPSLDPQWAEWLAKFNHGSVVFCAFGSQPVVNKIDQFQELCLGLESTGFPFLVAIKPPSGVSTVEEALPEGFKERVQGRGVVFGGWIQQPLVLNHPSVGCFVSHCGFGSMWESLMSDCQIVLVPQHGEQILNARLMTEEMEVAVEVEREKKGWFSRQSLENAVKSVMEEGSEIGEKVRKNHDKWRCVLTDSGFSDGYIDKFEQNLIELVKS

SEQ ID NO: 78720 - protein, 457 aa, Arabidopsis thaliana
  peptide (1)..(457): Ceres Seq. ID no. 12644487
MSIVMYPWLAFGHMTPFLHLSNKLAEKGHKIVFLLPKKALNQLEPLNLYPNLITFHTISIPQVKGLPPGAETNSDVPFFLTHLLAVAMDQTRPEVETIFRTIKPDLVFYDSAHWIPEIAKPIGAKTVCFNIVSAASIALSLVPSAEREVIDGKEMSGEELAKTPLGYPSSKVVLRPHEAKSLSFVWRKHEAIGSFFDGKVTAMRNCDAIAIRTCRETEGKFCDYISRQYSKPVYLTGPVLPGSQPNQPSLDPQWAEWLAKFNHGSVVFCAFGSQPVVNKIDQFQELCLGLESTGFPFLVAIKPPSGVSTVEEALPEGFKERVQGRGVVFGGWIQQPLVLNHPSVGCFVSHCGFGSMWESLMSDCQIVLVPQHGEQILNARLMTEEMEVAVEVEREKKGWFSRQSLENAVKSVMEEGSEIGEKVRKNHDKWRCVLTDSGFSDGYIDKFEQNLIELVKS

SEQ ID NO: 78721 - protein, 453 aa, Arabidopsis thaliana
  peptide (1)..(453): Ceres Seq. ID no. 12644488
MYPWLAFGHMTPFLHLSNKLAEKGHKIVFLLPKKALNQLEPLNLYPNLITFHTISIPQVKGLPPGAETNSDVPFFLTHLLAVAMDQTRPEVETIFRTIKPDLVFYDSAHWIPEIAKPIGAKTVCFNIVSAASIALSLVPSAEREVIDGKEMSGEELAKTPLGYPSSKVVLRPHEAKSLSFVWRKHEAIGSFFDGKVTAMRNCDAIAIRTCRETEGKFCDYISRQYSKPVYLTGPVLPGSQPNQPSLDPQWAEWLAKFNHGSVVFCAFGSQPVVNKIDQFQELCLGLESTGFPFLVAIKPPSGVSTVEEALPEGFKERVQGRGVVFGGWIQQPLVLNHPSVGCFVSHCGFGSMWESLMSDCQIVLVPQHGEQILNARLMTEEMEVAVEVEREKKGWFSRQSLENAVKSVMEEGSEIGEKVRKNHDKWRCVLTDSGFSDGYIDKFEQNLIELVKS

SEQ ID NO: 78722 - DNA, 615 bp, Arabidopsis thaliana
  misc_feature (1)..(615): Ceres Seq. ID no. 12644562
  misc_feature (1)..(615): Ortholog of  Ceres SEQ ID NO 13594828 as cited in SEQ ID NO 56431
  misc_feature (1)..(615): Ortholog of  Ceres SEQ ID NO 14316363 as cited in SEQ ID NO 57222
  misc_feature (1)..(615): Ortholog of  Ceres SEQ ID NO 15177754 as cited in SEQ ID NO 57945
  misc_feature (1)..(615): Ortholog of  Ceres SEQ ID NO 13594354 as cited in SEQ ID NO 58082
  misc_feature (1)..(615): Ortholog of  Ceres SEQ ID NO 14316408 as cited in SEQ ID NO 58228
  misc_feature (1)..(615): Ortholog of  Ceres SEQ ID NO 13528075 as cited in SEQ ID NO 60188
  misc_feature (1)..(615): Ortholog of  Ceres SEQ ID NO 13600483 as cited in SEQ ID NO 0
atggcgactaaagtatatatcgtgtactactctatgtatggtcatgttgagaaattggctgaagaaataaggaaaggagctgcttctgttgaaggtgttgaagctaaactatggcaggtaccagagacgcttcacgaagaggcactctctaagatgagcgcaccaccaaagagtgaatccccaatcataaccccgaatgagctagctgaagctgatgggtttgtctttggtttcccaacaagatttggtatgatggctgctcagttcaaagcctttttggatgcaaccggtggactctggagggctcaggcactcgccggtaaaccagctggtatcttctacagcactggctctcaaggtggtggccaagaaaccacagcattgacggcaataactcagctggttcaccacgggatgttatttgtcccaatcggttacacatttggcgcgggaatgttcgaaatggagaatgtgaaaggtggaagcccatatggagctggaacatttgcaggagacggttcaaggcagccaacagagctggagctacagcaagcatttcaccaaggccagtacattgccagcatcaccaagaagctcaagggatctactgcttag

SEQ ID NO: 78723 - protein, 204 aa, Arabidopsis thaliana [sequence omitted]

SEQ ID NO: 78724 - protein, 193 aa, Arabidopsis thaliana; identical to SEQ ID NO: 39070
  peptide (1)..(193): Ceres Seq. ID no. 12644564

SEQ ID NO: 78725 - protein, 153 aa, Arabidopsis thaliana; identical to SEQ ID NO: 39071
  peptide (1)..(153): Ceres Seq. ID no. 12644565

SEQ ID NO: 78726 - DNA, 1050 bp, Arabidopsis thaliana
  misc_feature (1)..(1050): Ceres Seq. ID no. 12644605
  misc_feature (1)..(1050): Ortholog of  Ceres SEQ ID NO 12614942 as cited in SEQ ID NO 68635
atggctgccatagcttctactctctctctttcttcaaccaaacctcagagacttttcgattcttccttccatggctcagccatctccgcagctcctatctccatcggtctcaaaccacgatctttctccgttcgcgccacaaccgctggttacgacttgaacgctttcacgttcgacccgatcaaggaatcgatcgtgtcacgtgagatgacgagaaggtacatgacggatatgatcacttatgctgagactgatgtcgtcgtcgttggtgctggatctgctggtttatctgctgcttatgagatcagtaagaaccctaatgttcaagttgccattattgagcaatctgttagtcctggtggtggtgcttggctcggtggtcagcttttctccgccatgattgttcgcaaaccagctcacttgttccttgacgagattggtgtggcttacgatgagcaagacacctacgttgtggttaagcacgcggctctgttcacatcaaccatcatgagcaagcttttggctcgtcctaatgtgaagctcttcaacgctgtggctgctgaggatttgattgtgaaaggaaacagagttggtggtgtggtgactaactgggctcttgtggctcagaaccaccacacacaatcgtgtatggaccctaatgttatggaagcgaagattgtggttagctcttgtggtcatgatggtccttttggagctactggtgttaagaggttgaagagtattgggatgattgatcatgttcctgggatgaaagctttggacatgaacactgctgaggacgctattgtgaggttgaccagagaggttgttcctggtatgattgttaccggtatggaagttgctgagatcgatggtgcaccgagaatgggaccaacttttggtgctatgatgatatcgggacaaaaggcgggacaacttgctcttaaggctttggggctaccgaatgctattgacggaactctcgttggaaacctaagcccggagctggtcttagccgcagcagattcagctgaaaccgtagatgcttaa

SEQ ID NO: 78727 - protein, 349 aa, Arabidopsis thaliana; identical to SEQ ID NO: 76367
  peptide (1)..(349): Ceres Seq. ID no. 12644606

SEQ ID NO: 78728 - protein, 280 aa, Arabidopsis thaliana; identical to SEQ ID NO: 76368
  peptide (1)..(280): Ceres Seq. ID no. 12644607

SEQ ID NO: 78729 - protein, 275 aa, Arabidopsis thaliana; identical to SEQ ID NO: 77243
  peptide (1)..(275): Ceres Seq. ID no. 12644608

SEQ ID NO: 78730 - DNA, 1542 bp, Arabidopsis thaliana
  misc_feature (1)..(1542): Ceres Seq. ID no. 12644686
  misc_feature (1)..(1542): Ortholog of  Ceres SEQ ID NO 13654989 as cited in SEQ ID NO 63117
  misc_feature (1)..(1542): Ortholog of  Ceres SEQ ID NO 13655640 as cited in SEQ ID NO 63844
  misc_feature (1)..(1542): Ortholog of  Ceres SEQ ID NO 13584744 as cited in SEQ ID NO 69137
atggcgcgtagtaatagatgtgtaccccaaaatagttccattgtccaaattccgatagaagaagtattcaaaactcaactcaagtctcggtggcagcagatcacaatgtcatctgcttcttctccaccgccgccgcaggttttcgtcccagagccacttttttccgaacccccgcctcctcccaaagcacccgttaacgtttccctatctccaccgcctcctccgcggtctccctccacatccactccacctaggttgggaaatcgaaaccctccacctccagcgagtccctctggccaggaacctacaactccaactatgaccccaggcttttctctatcaccgccgtctccctcaagattatcaacgggagctgtggtcgggatctccataggaggaggagtttttgtgttgactttgatttttttcctttgtaagaagaaacgaccaagagacgataaagcacttccggctcccatagggcttgtattaggcatccatcaaagcactttcacttacggggagctagctagagccaccaataaattctctgaggccaatttgttaggagagggtggatttggattcgtatacaaaggtatattgaataatggaaatgaagttgcagttaaacagttgaaagtagggagtgctcagggtgagaaagagtttcaggctgaggttaatattattagccaaattcaccataggaatttggtttcccttgtcggttattgcatcgctggtgctcaaagattgcttgtctatgagtttgttcccaacaacactctcgagtttcacctccatgggaaaggacggcctacgatggaatggagtttaagattaaagattgctgtcagttcttccaaaggattgtcttatcttcatgaaaattgcaatcctaaaatcatccaccgtgatatcaaggcggcaaacatattgattgatttcaaatttgaagcaaaggttgctgattttggtctcgccaagattgctttggatacaaacactcatgtatctacacgtgttatgggaacctttgggtatttggctccggaatatgctgcaagtggaaagcttactgaaaagtctgatgtttactcattcggcgttgtacttttggagctaataacgggacgtcgccctgttgatgcaaacaatgtctatgcggatgacagcttggttgattgggcacgaccattgcttgtacaagcacttgaagaaagtaactttgaaggtttggctgatataaagctgaataatgagtatgatagagaagagatggctcgcatggttgcttgtgctgcagcttgtgtccgctatacagctcgccgaagacctcgcatggaccaggttgtgcgtgtgctagaaggaaacatatcgccgtcagatctgaatcaagggataacacccggtcacagcaatacgtacacgaggaagtttcggataaaaatggggcacgactgtatccgtccggctggacgctcgagcagtgagggtcaagccacacggggaaatggattcgagatggggaagatttaa

SEQ ID NO: 78731 - protein, 513 aa, Arabidopsis thaliana
  peptide (1)..(513): Ceres Seq. ID no. 12644687
MARSNRCVPQNSSIVQIPIEEVFKTQLKSRWQQITMSSASSPPPPQVFVPEPLFSEPPPPPKAPVNVSLSPPPPPRSPSTSTPPRLGNRNPPPPASPSGQEPTTPTMTPGFSLSPPSPSRLSTGAVVGISIGGGVFVLTLIFFLCKKKRPRDDKALPAPIGLVLGIHQSTFTYGELARATNKFSEANLLGEGGFGFVYKGILNNGNEVAVKQLKVGSAQGEKEFQAEVNIISQIHHRNLVSLVGYCIAGAQRLLVYEFVPNNTLEFHLHGKGRPTMEWSLRLKIAVSSSKGLSYLHENCNPKIIHRDIKAANILIDFKFEAKVADFGLAKIALDTNTHVSTRVMGTFGYLAPEYAASGKLTEKSDVYSFGVVLLELITGRRPVDANNVYADDSLVDWARPLLVQALEESNFEGLADIKLNNEYDREEMARMVACAAACVRYTARRRPRMDQVVRVLEGNISPSDLNQGITPGHSNTYTRKFRIKMGHDCIRPAGRSSSEGQATRGNGFEMGKI

SEQ ID NO: 78732 - protein, 478 aa, Arabidopsis thaliana
  peptide (1)..(478): Ceres Seq. ID no. 12644688
MSSASSPPPPQVFVPEPLFSEPPPPPKAPVNVSLSPPPPPRSPSTSTPPRLGNRNPPPPASPSGQEPTTPTMTPGFSLSPPSPSRLSTGAVVGISIGGGVFVLTLIFFLCKKKRPRDDKALPAPIGLVLGIHQSTFTYGELARATNKFSEANLLGEGGFGFVYKGILNNGNEVAVKQLKVGSAQGEKEFQAEVNIISQIHHRNLVSLVGYCIAGAQRLLVYEFVPNNTLEFHLHGKGRPTMEWSLRLKIAVSSSKGLSYLHENCNPKIIHRDIKAANILIDFKFEAKVADFGLAKIALDTNTHVSTRVMGTFGYLAPEYAASGKLTEKSDVYSFGVVLLELITGRRPVDANNVYADDSLVDWARPLLVQALEESNFEGLADIKLNNEYDREEMARMVACAAACVRYTARRRPRMDQVVRVLEGNISPSDLNQGITPGHSNTYTRKFRIKMGHDCIRPAGRSSSEGQATRGNGFEMGKI

SEQ ID NO: 78733 - protein, 407 aa, Arabidopsis thaliana
  peptide (1)..(407): Ceres Seq. ID no. 12644689
MTPGFSLSPPSPSRLSTGAVVGISIGGGVFVLTLIFFLCKKKRPRDDKALPAPIGLVLGIHQSTFTYGELARATNKFSEANLLGEGGFGFVYKGILNNGNEVAVKQLKVGSAQGEKEFQAEVNIISQIHHRNLVSLVGYCIAGAQRLLVYEFVPNNTLEFHLHGKGRPTMEWSLRLKIAVSSSKGLSYLHENCNPKIIHRDIKAANILIDFKFEAKVADFGLAKIALDTNTHVSTRVMGTFGYLAPEYAASGKLTEKSDVYSFGVVLLELITGRRPVDANNVYADDSLVDWARPLLVQALEESNFEGLADIKLNNEYDREEMARMVACAAACVRYTARRRPRMDQVVRVLEGNISPSDLNQGITPGHSNTYTRKFRIKMGHDCIRPAGRSSSEGQATRGNGFEMGKI

SEQ ID NO: 78734 - DNA, 3300 bp, Arabidopsis thaliana
  misc_feature (1)..(3300): Ceres Seq. ID no. 12644720
  misc_feature (1)..(3300): Ortholog of  Ceres SEQ ID NO 13593889 as cited in SEQ ID NO 53305
  misc_feature (1)..(3300): Ortholog of  Ceres SEQ ID NO 13581959 as cited in SEQ ID NO 56156
atgtcagatagatgggctcgacaaaacgcggaacgtcctgcaactactttggctgagagaagaaatgtgaataaaaacgtttcacttcagactggtgaagagttttcaatggagtttcttaaggatcatactcctgtccaatctcctatcgttgcaggaagaactcataatgatgtgcatagatttggagacctttactatcagaatcaaccacaggggtatgatagtgctgctcggtttcatgaactgaggaggatagaatctgaatgtccttctgatgcatatgattttggtcgagacccgaggagtactatacggcttgagaatggcggttatatgcctcattttaatgcttaccacaatgtaggttgtgataaagaagttattactaggaaagcttttggtgaaataaattctaaccgaggagatgtcacggggatgtctgcgccttgcgtgttcttgccagagcgtactcagtccaacaactttaccggaggaggaggagattttgatagattcggaaaagtaaagtttctttgtagctttggtggtagaattatgccaagatccactgatgaaaaactgaaatacgttggaggagagacgcatattatttcgatacgcaagaatctttcgtgggaagaactcaagaagaagacctcagctatatgccaacagttgcattcaattaagtatcagcttccaggagatgagcttgactccttgatatcagtatcttcggatgaggatcttcagaatatgattgaagagtacaatggacttgaaaggcttgaaggttcacaacggccacgactgttcttgattcctattggagagcctgaaagaaaggctcagcagaacattcctgattgccaatatgctgcagctttaaattgtaatgctgatcctaatcctaggaacatttctgatggtcagactttggctggtgattcacgttatcatataaacaatttggatcgtaatccaagtttctgtaaacgaacaccgggtcagatgcttcgactggatgctactgctatgcgtcctaatccacttttcaatggagttcagtataacatggcttcatatccatcacctcctgtttctccttcaccattccagcaaagggattcaaatggtgcatactcacagttccatggcaacaactccagctcggagagcaataattccttcactccacgaccactaccttcagttaactatcagtctaacaagcaggaggcagagaacctatatgggattcagttccagaatggctttaatgacaaacctgtgactcccaatcttggtcatgttgataatctttgctttaaccctgagaggtctgcgaataacggaagggtcttctatgataaagtgagcatgcccgaggaatctaaggtttccttctctgggtctacaaactcaaatgattcttgcttgggaatcccacactcgtactcagactctacattggagattactggtggacactctagctacttttcacaagagagacaacaaagcccatcttcaacattgaactttacaaagaaacaaacacaagaaaagcaagtacaggtgcataggaataacgatctagctgaccgtcgtacacaaagcgatatactcgacatgaagtccactgagggaggagagactatgtttaaattttccccaagtccacgaggacctagactatccggtgaaaacaagacgttgcatatagacatttctgctgcaggcaatcattatgatgaaatttatctaaatcaggaaaccaagaatcaaggagggaatagtgataccatttttcatctaggagggaaagtactgggaacaagagcaatgcctactgacatggaaggcaagaagttgcctatatatggaaaccaaacctcagttgttgttgatccatggaagcaaataaagcaagataatgagcgtttgatggctggagctggaacttcatctgctaatctaatttccttagaggaaggtatagcagctaatacccctaatgaggaacctgaatctcgtgctgcccgagaaaggaacttggaagtttcagggatctttataagtaagagagtagtctctgatgagaatttcttgttcagcatcgcctctgaatcaccaaacagcaagattgttcatgagacacaaaagaatagaacagaaagagaaggtggtttaggccatgtgagaatcccaatcatggatttgaatcagccagcgccagcaacagcgagtgaaacttacagtttgaagacaccaagagaagactcaccacaaagcattccacatgcaaagattaccagcggtgatacaatattcctttctgaggaagctgaagccaataccggccagaaagagaacagtttcaaagacacactctttgttgaaatggaagccagtgtttatggcttgcagataataaagaacgctgatcttgaagacctgacagaactgggatccgggacatatggaactgtctatcatggaacatggcggggaacggatgttgctataaagagaatacggaacagttgctttgcagggagatcatctgaacaagaacgcttgacgaaagatttctggagggaagcacaaatactctcaaatcttcatcacccaaacgttgttgcattctacggtatagtgcctgatggaactggaggaaccttggcaactgttacagagttcatggtgaatgggtcactcaggcatgctcttctcaaaaaggacagattgcttgacactcggaaaaagataataattgcaatggatgctgcttttggcatggagtatttgcactcgaagaacatcgtccactttgatctcaaatgcgaaaacttacttgtcaatttaagggatccacaacggcctatatgcaaggtgggagatcttggcttatctagaatcaaacgtaacactttagtatctgggggagtgagaggaactcttccatggatggccccagaactcttgaacggaagcagcacccgagtttctgagaaagttgatgttttttcatatggaatctcgctgtgggagattctaaccggagaggaaccctatgcagatatgcattgtggagcaatcattggcgggatcgtgaagaacacacttcgacctcctataccaaaaagctgttctccggaatggaaaaagctgatggaacaatgctggtctgtcgacccggattctcgtcctccattcaccgaaataacatgccgacttcggtccatgtcaatggaagtcgtcactaaaagcaaaagaagagaaaataaaccctga

SEQ ID NO: 78735 - protein, 1099 aa, Arabidopsis thaliana
  peptide (1)..(1099): Ceres Seq. ID no. 12644721
MSDRWARQNAERPATTLAERRNVNKNVSLQTGEEFSMEFLKDHTPVQSPIVAGRTHNDVHRFGDLYYQNQPQGYDSAARFHELRRIESECPSDAYDFGRDPRSTIRLENGGYMPHFNAYHNVGCDKEVITRKAFGEINSNRGDVTGMSAPCVFLPERTQSNNFTGGGGDFDRFGKVKFLCSFGGRIMPRSTDEKLKYVGGETHIISIRKNLSWEELKKKTSAICQQLHSIKYQLPGDELDSLISVSSDEDLQNMIEEYNGLERLEGSQRPRLFLIPIGEPERKAQQNIPDCQYAAALNCNADPNPRNISDGQTLAGDSRYHINNLDRNPSFCKRTPGQMLRLDATAMRPNPLFNGVQYNMASYPSPPVSPSPFQQRDSNGAYSQFHGNNSSSESNNSFTPRPLPSVNYQSNKQEAENLYGIQFQNGFNDKPVTPNLGHVDNLCFNPERSANNGRVFYDKVSMPEESKVSFSGSTNSNDSCLGIPHSYSDSTLEITGGHSSYFSQERQQSPSSTLNFTKKQTQEKQVQVHRNNDLADRRTQSDILDMKSTEGGETMFKFSPSPRGPRLSGENKTLHIDISAAGNHYDEIYLNQETKNQGGNSDTIFHLGGKVLGTRAMPTDMEGKKLPIYGNQTSVVVDPWKQIKQDNERLMAGAGTSSANLISLEEGIAANTPNEEPESRAARERNLEVSGIFISKRVVSDENFLFSIASESPNSKIVHETQKNRTEREGGLGHVRIPIMDLNQPAPATASETYSLKTPREDSPQSIPHAKITSGDTIFLSEEAEANTGQKENSFKDTLFVEMEASVYGLQIIKNADLEDLTELGSGTYGTVYHGTWRGTDVAIKRIRNSCFAGRSSEQERLTKDFWREAQILSNLHHPNVVAFYGIVPDGTGGTLATVTEFMVNGSLRHALLKKDRLLDTRKKIIIAMDAAFGMEYLHSKNIVHFDLKCENLLVNLRDPQRPICKVGDLGLSRIKRNTLVSGGVRGTLPWMAPELLNGSSTRVSEKVDVFSYGISLWEILTGEEPYADMHCGAIIGGIVKNTLRPPIPKSCSPEWKKLMEQCWSVDPDSRPPFTEITCRLRSMSMEVVTKSKRRENKP

SEQ ID NO: 78736 - protein, 1063 aa, Arabidopsis thaliana
  peptide (1)..(1063): Ceres Seq. ID no. 12644722
MEFLKDHTPVQSPIVAGRTHNDVHRFGDLYYQNQPQGYDSAARFHELRRIESECPSDAYDFGRDPRSTIRLENGGYMPHFNAYHNVGCDKEVITRKAFGEINSNRGDVTGMSAPCVFLPERTQSNNFTGGGGDFDRFGKVKFLCSFGGRIMPRSTDEKLKYVGGETHIISIRKNLSWEELKKKTSAICQQLHSIKYQLPGDELDSLISVSSDEDLQNMIEEYNGLERLEGSQRPRLFLIPIGEPERKAQQNIPDCQYAAALNCNADPNPRNISDGQTLAGDSRYHINNLDRNPSFCKRTPGQMLRLDATAMRPNPLFNGVQYNMASYPSPPVSPSPFQQRDSNGAYSQFHGNNSSSESNNSFTPRPLPSVNYQSNKQEAENLYGIQFQNGFNDKPVTPNLGHVDNLCFNPERSANNGRVFYDKVSMPEESKVSFSGSTNSNDSCLGIPHSYSDSTLEITGGHSSYFSQERQQSPSSTLNFTKKQTQEKQVQVHRNNDLADRRTQSDILDMKSTEGGETMFKFSPSPRGPRLSGENKTLHIDISAAGNHYDEIYLNQETKNQGGNSDTIFHLGGKVLGTRAMPTDMEGKKLPIYGNQTSVVVDPWKQIKQDNERLMAGAGTSSANLISLEEGIAANTPNEEPESRAARERNLEVSGIFISKRVVSDENFLFSIASESPNSKIVHETQKNRTEREGGLGHVRIPIMDLNQPAPATASETYSLKTPREDSPQSIPHAKITSGDTIFLSEEAEANTGQKENSFKDTLFVEMEASVYGLQIIKNADLEDLTELGSGTYGTVYHGTWRGTDVAIKRIRNSCFAGRSSEQERLTKDFWREAQILSNLHHPNVVAFYGIVPDGTGGTLATVTEFMVNGSLRHALLKKDRLLDTRKKIIIAMDAAFGMEYLHSKNIVHFDLKCENLLVNLRDPQRPICKVGDLGLSRIKRNTLVSGGVRGTLPWMAPELLNGSSTRVSEKVDVFSYGISLWEILTGEEPYADMHCGAIIGGIVKNTLRPPIPKSCSPEWKKLMEQCWSVDPDSRPPFTEITCRLRSMSMEVVTKSKRRENKP

SEQ ID NO: 78737 - protein, 987 aa, Arabidopsis thaliana
  peptide (1)..(987): Ceres Seq. ID no. 12644723
MPHFNAYHNVGCDKEVITRKAFGEINSNRGDVTGMSAPCVFLPERTQSNNFTGGGGDFDRFGKVKFLCSFGGRIMPRSTDEKLKYVGGETHIISIRKNLSWEELKKKTSAICQQLHSIKYQLPGDELDSLISVSSDEDLQNMIEEYNGLERLEGSQRPRLFLIPIGEPERKAQQNIPDCQYAAALNCNADPNPRNISDGQTLAGDSRYHINNLDRNPSFCKRTPGQMLRLDATAMRPNPLFNGVQYNMASYPSPPVSPSPFQQRDSNGAYSQFHGNNSSSESNNSFTPRPLPSVNYQSNKQEAENLYGIQFQNGFNDKPVTPNLGHVDNLCFNPERSANNGRVFYDKVSMPEESKVSFSGSTNSNDSCLGIPHSYSDSTLEITGGHSSYFSQERQQSPSSTLNFTKKQTQEKQVQVHRNNDLADRRTQSDILDMKSTEGGETMFKFSPSPRGPRLSGENKTLHIDISAAGNHYDEIYLNQETKNQGGNSDTIFHLGGKVLGTRAMPTDMEGKKLPIYGNQTSVVVDPWKQIKQDNERLMAGAGTSSANLISLEEGIAANTPNEEPESRAARERNLEVSGIFISKRVVSDENFLFSIASESPNSKIVHETQKNRTEREGGLGHVRIPIMDLNQPAPATASETYSLKTPREDSPQSIPHAKITSGDTIFLSEEAEANTGQKENSFKDTLFVEMEASVYGLQIIKNADLEDLTELGSGTYGTVYHGTWRGTDVAIKRIRNSCFAGRSSEQERLTKDFWREAQILSNLHHPNVVAFYGIVPDGTGGTLATVTEFMVNGSLRHALLKKDRLLDTRKKIIIAMDAAFGMEYLHSKNIVHFDLKCENLLVNLRDPQRPICKVGDLGLSRIKRNTLVSGGVRGTLPWMAPELLNGSSTRVSEKVDVFSYGISLWEILTGEEPYADMHCGAIIGGIVKNTLRPPIPKSCSPEWKKLMEQCWSVDPDSRPPFTEITCRLRSMSMEVVTKSKRRENKP

SEQ ID NO: 78738 - DNA, 486 bp, Arabidopsis thaliana
  misc_feature (1)..(486): Ceres Seq. ID no. 12644861
  misc_feature (1)..(486): Ortholog of  Ceres SEQ ID NO 14305967 as cited in SEQ ID NO 1343
  misc_feature (1)..(486): Ortholog of  Ceres SEQ ID NO 14309614 as cited in SEQ ID NO 52633
  misc_feature (1)..(486): Ortholog of  Ceres SEQ ID NO 12626306 as cited in SEQ ID NO 65869
atggcgtcaacaaaaccaaccgatcaaatcaaacaactcaaagatatcttcgctcgtttcgacatggacaaggacggaagcttaacgcagctagaactcgccgctcttctgcgttctctcggaatcaaacctcgcagcgatcaaatctctcttctgttgaaccaaatcgaccgtaacggtaacggatccgtagagttcgacgagctggtcgtggcgatattgccggatataaacgaagaggttttgataaatcaagaacagttgatggaggttttccgttcgtttgatcgtgacggaaacggttcaataacggcggcggaacttgctgggtcaatggctaaaatgggacatccgttgacttaccgtgaattaacggaaatgatgacggaagctgattctaacggtgacggtgttattagttttaatgagttttctcatattatggctaaatcggctgctgattttcttggattaaccgcttcttga

SEQ ID NO: 78739 - protein, 161 aa, Arabidopsis thaliana
  peptide (1)..(161): Ceres Seq. ID no. 12644862
MASTKPTDQIKQLKDIFARFDMDKDGSLTQLELAALLRSLGIKPRSDQISLLLNQIDRNGNGSVEFDELVVAILPDINEEVLINQEQLMEVFRSFDRDGNGSITAAELAGSMAKMGHPLTYRELTEMMTEADSNGDGVISFNEFSHIMAKSAADFLGLTAS

SEQ ID NO: 78740 - protein, 140 aa, Arabidopsis thaliana
  peptide (1)..(140): Ceres Seq. ID no. 12644863
MDKDGSLTQLELAALLRSLGIKPRSDQISLLLNQIDRNGNGSVEFDELVVAILPDINEEVLINQEQLMEVFRSFDRDGNGSITAAELAGSMAKMGHPLTYRELTEMMTEADSNGDGVISFNEFSHIMAKSAADFLGLTAS

SEQ ID NO: 78741 - DNA, 2040 bp, Arabidopsis thaliana
  misc_feature (1)..(2040): Ceres Seq. ID no. 12644893
  misc_feature (1)..(2040): Ortholog of  Ceres SEQ ID NO 14308107 as cited in SEQ ID NO 59030
  misc_feature (1)..(2040): Ortholog of  Ceres SEQ ID NO 15226612 as cited in SEQ ID NO 62700
  misc_feature (1)..(2040): Ortholog of  Ceres SEQ ID NO 13597638 as cited in SEQ ID NO 65448
  misc_feature (1)..(2040): Ortholog of  Ceres SEQ ID NO 14302772 as cited in SEQ ID NO 69055
atggatgccatgagtagcgtagacgagagctctacaactacagattccattccggcgagaaagtcatcgtctccggcgagtttactatatagaatgggaagcggaacaagcgtggtacttgattcagagaacggtgtcgaagtcgaagtcgaagccgaatcaagaaagcttccttcttcaagattcaaaggtgttgttcctcaaccaaatggaagatggggagctcagatttacgagaaacatcaacgcgtgtggcttggtactttcaacgaggaagacgaagcagctcgtgcttacgacgtcgcggctcaccgtttccgtggccgcgatgccgttactaatttcaaagacacgacgttcgaagaagaggttgagttcttaaacgcgcattcgaaatcagagatcgtagatatgttgagaaaacacacttacaaagaagagttagaccaaaggaaacgtaaccgtgacggtaacggaaaagagacgacggcgtttgctttggcttcgatggtggttatgacggggtttaaaacggcggagttactgtttgagaaaacggtaacgccaagtgacgtcgggaaactaaaccgtttagttataccaaaacaccaagcggagaaacattttccgttaccgttaggtaataataacgtctccgttaaaggtatgctgttgaatttcgaagacgttaacgggaaagtgtggaggttccgttactcttattggaatagtagtcaaagttatgtgttgaccaaaggttggagtagattcgttaaagagaagagactttgtgctggtgatttgatcagttttaaaagatccaacgatcaagatcaaaaattctttatcgggtggaaatcgaaatccgggttggatctagagacgggtcgggttatgagattgtttggggttgatatttctttaaacgccgtcgttgtagtgaaggaaacaacggaggtgttaatgtcgtcgttaaggtgtaagaagcaacgaggaaaaatgttgcagaagatttctcagtctatttctttatgtaacggcgatcaatttaagccgttaatatacctcgccggagctccgacgaacttcatctcttcccctctctcagtttcaggcaagaagaaatcatcttctctgagaattaaaaggatacaacaacttcaaagtacattagaagatagaataaatccaccactagtatgtggaacagtatcgccacgtcttagtgttcctgatcatatactaaagcctctatatgttgagtctagcaaagttccagagatatcaagtgaattacagattcctgactctataggcattgtgaaaatgaagaaagcgtgtgagctcgcggctcgtgtattagactatgcaggaactttggttagaccgtttgttactacagatgaaattgataaagcagtgcatcagatggttattgagtttggtgcatatccttcacctcttggatatggtggatttcctaaaagtgtttgtacatcggttaatgaatgtatgtttcacgggattcccgattctcgtccgctacagaatggagatattataaacatcgatgttgcggtttacttggatgggtatcatggagatacgtcaaagactttcttatgtggagacgtcaatggaagccttaaacaacttgtcaaggtcacagaagaatgcttggagaaaggtatatcggtttgtaaagatggagcaagcttcaaacaaatcgggaagataatcagtgagcatgctgcaaagtatggctataatatggagcgattcatcggtcatggtgtaggaacggtattacactcggaacctcttatatatcttcatagtaactatgattatgaacttgaatatatgattgaaggtcaaacttttacgctcgaaccaattctcaccattggaacaacagagtttgtaacatggcctgacaaatggacaattgtgaccgcagatggtggtccggccgcacagtttgagcatacaattcttattaccaccactggtgcagaaattctcaccatatcatcatga

SEQ ID NO: 78742 - protein, 679 aa, Arabidopsis thaliana
  peptide (1)..(679): Ceres Seq. ID no. 12644894
MDAMSSVDESSTTTDSIPARKSSSPASLLYRMGSGTSVVLDSENGVEVEVEAESRKLPSSRFKGVVPQPNGRWGAQIYEKHQRVWLGTFNEEDEAARAYDVAAHRFRGRDAVTNFKDTTFEEEVEFLNAHSKSEIVDMLRKHTYKEELDQRKRNRDGNGKETTAFALASMVVMTGFKTAELLFEKTVTPSDVGKLNRLVIPKHQAEKHFPLPLGNNNVSVKGMLLNFEDVNGKVWRFRYSYWNSSQSYVLTKGWSRFVKEKRLCAGDLISFKRSNDQDQKFFIGWKSKSGLDLETGRVMRLFGVDISLNAVVVVKETTEVLMSSLRCKKQRGKMLQKISQSISLCNGDQFKPLIYLAGAPTNFISSPLSVSGKKKSSSLRIKRIQQLQSTLEDRINPPLVCGTVSPRLSVPDHILKPLYVESSKVPEISSELQIPDSIGIVKMKKACELAARVLDYAGTLVRPFVTTDEIDKAVHQMVIEFGAYPSPLGYGGFPKSVCTSVNECMFHGIPDSRPLQNGDIINIDVAVYLDGYHGDTSKTFLCGDVNGSLKQLVKVTEECLEKGISVCKDGASFKQIGKIISEHAAKYGYNMERFIGHGVGTVLHSEPLIYLHSNYDYELEYMIEGQTFTLEPILTIGTTEFVTWPDKWTIVTADGGPAAQFEHTILITTTGAEILTISS

SEQ ID NO: 78743 - protein, 676 aa, Arabidopsis thaliana
  peptide (1)..(676): Ceres Seq. ID no. 12644895
MSSVDESSTTTDSIPARKSSSPASLLYRMGSGTSVVLDSENGVEVEVEAESRKLPSSRFKGVVPQPNGRWGAQIYEKHQRVWLGTFNEEDEAARAYDVAAHRFRGRDAVTNFKDTTFEEEVEFLNAHSKSEIVDMLRKHTYKEELDQRKRNRDGNGKETTAFALASMVVMTGFKTAELLFEKTVTPSDVGKLNRLVIPKHQAEKHFPLPLGNNNVSVKGMLLNFEDVNGKVWRFRYSYWNSSQSYVLTKGWSRFVKEKRLCAGDLISFKRSNDQDQKFFIGWKSKSGLDLETGRVMRLFGVDISLNAVVVVKETTEVLMSSLRCKKQRGKMLQKISQSISLCNGDQFKPLIYLAGAPTNFISSPLSVSGKKKSSSLRIKRIQQLQSTLEDRINPPLVCGTVSPRLSVPDHILKPLYVESSKVPEISSELQIPDSIGIVKMKKACELAARVLDYAGTLVRPFVTTDEIDKAVHQMVIEFGAYPSPLGYGGFPKSVCTSVNECMFHGIPDSRPLQNGDIINIDVAVYLDGYHGDTSKTFLCGDVNGSLKQLVKVTEECLEKGISVCKDGASFKQIGKIISEHAAKYGYNMERFIGHGVGTVLHSEPLIYLHSNYDYELEYMIEGQTFTLEPILTIGTTEFVTWPDKWTIVTADGGPAAQFEHTILITTTGAEILTISS

SEQ ID NO: 78744 - protein, 648 aa, Arabidopsis thaliana
  peptide (1)..(648): Ceres Seq. ID no. 12644896
MGSGTSVVLDSENGVEVEVEAESRKLPSSRFKGVVPQPNGRWGAQIYEKHQRVWLGTFNEEDEAARAYDVAAHRFRGRDAVTNFKDTTFEEEVEFLNAHSKSEIVDMLRKHTYKEELDQRKRNRDGNGKETTAFALASMVVMTGFKTAELLFEKTVTPSDVGKLNRLVIPKHQAEKHFPLPLGNNNVSVKGMLLNFEDVNGKVWRFRYSYWNSSQSYVLTKGWSRFVKEKRLCAGDLISFKRSNDQDQKFFIGWKSKSGLDLETGRVMRLFGVDISLNAVVVVKETTEVLMSSLRCKKQRGKMLQKISQSISLCNGDQFKPLIYLAGAPTNFISSPLSVSGKKKSSSLRIKRIQQLQSTLEDRINPPLVCGTVSPRLSVPDHILKPLYVESSKVPEISSELQIPDSIGIVKMKKACELAARVLDYAGTLVRPFVTTDEIDKAVHQMVIEFGAYPSPLGYGGFPKSVCTSVNECMFHGIPDSRPLQNGDIINIDVAVYLDGYHGDTSKTFLCGDVNGSLKQLVKVTEECLEKGISVCKDGASFKQIGKIISEHAAKYGYNMERFIGHGVGTVLHSEPLIYLHSNYDYELEYMIEGQTFTLEPILTIGTTEFVTWPDKWTIVTADGGPAAQFEHTILITTTGAEILTISS

SEQ ID NO: 78745 - DNA, 2664 bp, Arabidopsis thaliana
  misc_feature (1)..(2664): Ceres Seq. ID no. 12644991
  misc_feature (1)..(2664): Ortholog of  Ceres SEQ ID NO 13600595 as cited in SEQ ID NO 629
  misc_feature (1)..(2664): Ortholog of  Ceres SEQ ID NO 13593379 as cited in SEQ ID NO 20573
atggcagagtcaattcgaactttttcgcttcaatggcggatactgtcactgatcatcgctttacttgtgtactttccgattctgtcgggaagttactttaaaccgttcaatgtgagctacgatcaccgggctttaatcatcgccggcaagaggcgcatgctcgtctcagctggaattcactaccctcgagccactcctgagatgtggtctgatctcatcgcaaagagtaaagaaggtggagctgatgtggttcaaacttatgtgttttggaatgggcacgagcctgtaaagggtcagtataactttgaaggaagatatgaccttgtcaaatttgtgaagcttattggatcaagtggtctttatctccatctacggataggtccttatgtttgtgctgagtggaactttggggggttcccagtgtggctgcgggatattcctggcattgagtttcgaacagataatgaaccttttaagaaagagatgcaaaagtttgtaacaaagattgtggatttgatgcgagaagcaaagctcttctgttggcaaggaggtcccataatcatgctgcagatcgagaatgaatatggggatgttgaaaaatcttacgggcagaagggaaaggattacgtcaaatgggcagctagcatggctctagggcttggtgctggagttccgtgggttatgtgcaaacaaacggacgctccagagaatattattgatgcatgcaatggatactattgtgatggttttaaaccaaattcgcggacgaagccagtactttggacagaggattgggatggatggtacacgaagtggggtggaagtttgcctcaccgacctgctgaagatcttgcatttgcagttgcaagattttatcagcgtggaggaagctttcaaaattattatatgtattttggtggaacaaactttggtcgaacttctggtggtcctttctacattacaagctatgattatgatgctcctcttgatgaatatggtctgaggagcgagccaaaatgggggcatctaaaggaccttcatgctgccataaaactttgtgaacctgctcttgtcgcggcggatgcacctcaatatagaaaattgggatcaaagcaggaggcacacatttatcatggagatggtgagactggaggaaaggtgtgcgctgcatttctcgcaaacattgatgagcataaatctgcacatgtgaaatttaatggccagtcatatactttaccaccttggtcagtgagtatattgccagactgtcgacatgtggccttcaacactgccaaggtaggagcacaaacttctgttaaaacggttgagtctgcaaggccatctttaggtagtatgtctatactgcaaaaagtcgtgaggcaggataatgtttcttatatctcaaaatcatggatggctctgaaagaacctattggcatatggggtgaaaacaatttcactttccaaggattattggagcatttgaatgttacaaaagaccggtctgattacctgtggcataagacaagaataagcgtatctgaagatgatatctcgttctggaagaaaaatggacctaactcaacagtgtcgattgatagcatgagggatgtgttacgtgtgtttgttaacaaacaactcgcaggcagtattgttggtcactgggtgaaggcagtgcagcctgtacgatttatacagggaaacaatgatttacttctgttgactcaaacagttggtttacagaattatggtgctttcttggagaaggatggagccggttttagaggcaaagctaagcttactggattcaagaatggagatttagacctgtcaaaatcgtcatggacgtatcaggtgggattgaagggcgaggctgataaaatatatactgttgaacacaatgaaaaagctgagtggagtactttggagaccgatgcttcaccttcgatcttcatgtggtacaagacatactttgaccccccggccggaacagatcctgttgttcttaatctggaaagtatgggaagggggcaagcttgggtcaatggacaacatattggaaggtattggaatatcatttcccaaaaggatggatgtgacagaacctgtgattatcgtggagcctacaattcagataagtgcacaacaaattgtggaaagcctacacaaaccaggtaccatgtaccgcgttcgtggttaaagccgtcaagtaatctacttgtgctctttgaagagactgggggaaacccatttaagatatcggttaagacagttactgctgggattctgtgcggtcaagtctcggaatcgcattatccacctctgcggaaatggtccacaccagattacataaacggaacaatgtcgataaacagtgtggcaccagaagtgcatctgcattgtgaagatggacatgtcatatcctccatagaatttgctagctatgggactccaagaggtagctgcgacgggttttctatcgggaaatgtcatgcatccaactcattatcaatcgtctctgaggcttgtaaaggacgcaacagctgcttcatcgaggtatcaaatactgcttttatcagtgacccatgtagcggaactttaaagactttagcggttatgtcacgatgttccccgtctcaaaacatgagtgacctcagtttttag

SEQ ID NO: 78746 - protein, 887 aa, Arabidopsis thaliana
  peptide (1)..(887): Ceres Seq. ID no. 12644992
MAESIRTFSLQWRILSLIIALLVYFPILSGSYFKPFNVSYDHRALIIAGKRRMLVSAGIHYPRATPEMWSDLIAKSKEGGADVVQTYVFWNGHEPVKGQYNFEGRYDLVKFVKLIGSSGLYLHLRIGPYVCAEWNFGGFPVWLRDIPGIEFRTDNEPFKKEMQKFVTKIVDLMREAKLFCWQGGPIIMLQIENEYGDVEKSYGQKGKDYVKWAASMALGLGAGVPWVMCKQTDAPENIIDACNGYYCDGFKPNSRTKPVLWTEDWDGWYTKWGGSLPHRPAEDLAFAVARFYQRGGSFQNYYMYFGGTNFGRTSGGPFYITSYDYDAPLDEYGLRSEPKWGHLKDLHAAIKLCEPALVAADAPQYRKLGSKQEAHIYHGDGETGGKVCAAFLANIDEHKSAHVKFNGQSYTLPPWSVSILPDCRHVAFNTAKVGAQTSVKTVESARPSLGSMSILQKVVRQDNVSYISKSWMALKEPIGIWGENNFTFQGLLEHLNVTKDRSDYLWHKTRISVSEDDISFWKKNGPNSTVSIDSMRDVLRVFVNKQLAGSIVGHWVKAVQPVRFIQGNNDLLLLTQTVGLQNYGAFLEKDGAGFRGKAKLTGFKNGDLDLSKSSWTYQVGLKGEADKIYTVEHNEKAEWSTLETDASPSIFMWYKTYFDPPAGTDPVVLNLESMGRGQAWVNGQHIGRYWNIISQKDGCDRTCDYRGAYNSDKCTTNCGKPTQTRYHVPRSWLKPSSNLLVLFEETGGNPFKISVKTVTAGILCGQVSESHYPPLRKWSTPDYINGTMSINSVAPEVHLHCEDGHVISSIEFASYGTPRGSCDGFSIGKCHASNSLSIVSEACKGRNSCFIEVSNTAFISDPCSGTLKTLAVMSRCSPSQNMSDLSF

SEQ ID NO: 78747 - protein, 835 aa, Arabidopsis thaliana
  peptide (1)..(835): Ceres Seq. ID no. 12644993
MLVSAGIHYPRATPEMWSDLIAKSKEGGADVVQTYVFWNGHEPVKGQYNFEGRYDLVKFVKLIGSSGLYLHLRIGPYVCAEWNFGGFPVWLRDIPGIEFRTDNEPFKKEMQKFVTKIVDLMREAKLFCWQGGPIIMLQIENEYGDVEKSYGQKGKDYVKWAASMALGLGAGVPWVMCKQTDAPENIIDACNGYYCDGFKPNSRTKPVLWTEDWDGWYTKWGGSLPHRPAEDLAFAVARFYQRGGSFQNYYMYFGGTNFGRTSGGPFYITSYDYDAPLDEYGLRSEPKWGHLKDLHAAIKLCEPALVAADAPQYRKLGSKQEAHIYHGDGETGGKVCAAFLANIDEHKSAHVKFNGQSYTLPPWSVSILPDCRHVAFNTAKVGAQTSVKTVESARPSLGSMSILQKVVRQDNVSYISKSWMALKEPIGIWGENNFTFQGLLEHLNVTKDRSDYLWHKTRISVSEDDISFWKKNGPNSTVSIDSMRDVLRVFVNKQLAGSIVGHWVKAVQPVRFIQGNNDLLLLTQTVGLQNYGAFLEKDGAGFRGKAKLTGFKNGDLDLSKSSWTYQVGLKGEADKIYTVEHNEKAEWSTLETDASPSIFMWYKTYFDPPAGTDPVVLNLESMGRGQAWVNGQHIGRYWNIISQKDGCDRTCDYRGAYNSDKCTTNCGKPTQTRYHVPRSWLKPSSNLLVLFEETGGNPFKISVKTVTAGILCGQVSESHYPPLRKWSTPDYINGTMSINSVAPEVHLHCEDGHVISSIEFASYGTPRGSCDGFSIGKCHASNSLSIVSEACKGRNSCFIEVSNTAFISDPCSGTLKTLAVMSRCSPSQNMSDLSF

SEQ ID NO: 78748 - protein, 820 aa, Arabidopsis thaliana
  peptide (1)..(820): Ceres Seq. ID no. 12644994
MWSDLIAKSKEGGADVVQTYVFWNGHEPVKGQYNFEGRYDLVKFVKLIGSSGLYLHLRIGPYVCAEWNFGGFPVWLRDIPGIEFRTDNEPFKKEMQKFVTKIVDLMREAKLFCWQGGPIIMLQIENEYGDVEKSYGQKGKDYVKWAASMALGLGAGVPWVMCKQTDAPENIIDACNGYYCDGFKPNSRTKPVLWTEDWDGWYTKWGGSLPHRPAEDLAFAVARFYQRGGSFQNYYMYFGGTNFGRTSGGPFYITSYDYDAPLDEYGLRSEPKWGHLKDLHAAIKLCEPALVAADAPQYRKLGSKQEAHIYHGDGETGGKVCAAFLANIDEHKSAHVKFNGQSYTLPPWSVSILPDCRHVAFNTAKVGAQTSVKTVESARPSLGSMSILQKVVRQDNVSYISKSWMALKEPIGIWGENNFTFQGLLEHLNVTKDRSDYLWHKTRISVSEDDISFWKKNGPNSTVSIDSMRDVLRVFVNKQLAGSIVGHWVKAVQPVRFIQGNNDLLLLTQTVGLQNYGAFLEKDGAGFRGKAKLTGFKNGDLDLSKSSWTYQVGLKGEADKIYTVEHNEKAEWSTLETDASPSIFMWYKTYFDPPAGTDPVVLNLESMGRGQAWVNGQHIGRYWNIISQKDGCDRTCDYRGAYNSDKCTTNCGKPTQTRYHVPRSWLKPSSNLLVLFEETGGNPFKISVKTVTAGILCGQVSESHYPPLRKWSTPDYINGTMSINSVAPEVHLHCEDGHVISSIEFASYGTPRGSCDGFSIGKCHASNSLSIVSEACKGRNSCFIEVSNTAFISDPCSGTLKTLAVMSRCSPSQNMSDLSF

SEQ ID NO: 78749 - DNA, 1848 bp, Arabidopsis thaliana
  misc_feature (1)..(1848): Ceres Seq. ID no. 12644995
  misc_feature (1)..(1848): Ortholog of  Ceres SEQ ID NO 13600220 as cited in SEQ ID NO 0
atggctacagctactctcactcttttcctagggctcttagccttaactagtaccatacttagcttcaacgccgatgctaggcctcaaccaagtgatgaggatcttggtaccatcattggacctcatcaaactagcttcgatgacgagataggcatcgtgattggaccacatgcgaccgtagatgacgaagacattgacatggacatgggcaccaccgttggaccgcagaccaacctaaatgatgatgatttgggcaccatcattggacccgagtttgagatccacaagcaagatttccccgcagatttcatatttggaacatctgtttccgcatatcaggttgaaggtgctaaaaagggttctgggagaggcttgacctcatgggacgaatttacacacatgtttcctgagaaggttcaacaaaatggcgatggagatgagggagtcgacttctatacccgttacaaggatgatataaaattaatgaaggagttgaacacgaatggcttcagattttcaatctcatggaccaggatcttgccttatggaactattaaaaaaggtgtaaacgaggagggggtgaagttctacaacgatcttataaatgaacttttagctaatggaattcagccttcggttactctctttcactgggaatctccacttgctctagaaatggagtacggaggtttcctaaacgaaaggatagtagaggatttccgtgagtttgcaaacttttgcttcaaggaatttggagatagggtgaagaattgggcgacgtttaacgagccatcggtatacagcgttgctggttactcgaaaggtaagaaagcaccaggacggtgctctaaatggcaagccccaaaatgtcccacaggagattcatccgaggagccatacatagttgctcacaaccaaattcttgctcatcttgctgctgttgatgaattccgaaactgtaaaaagtgccaagagggtggagggaaaattgggatagtgttggtatctcactggttcgagcctaaagatccaaattcgagtgaagacgtcaaagcagctagacgatccctcgagtaccaactcggctggtttcttcgccctctcacatatggacagtatccagcggaaatgttagaagatgtaaacatccgactgcgtgaatttacaccagaagaatctgagaaactaagaaaatctttggatttcgtcggattaaattactatggagcattcttctctacccctctcgccaaagtcaattcatcgcagcttaattatgagaccgacttacgtgtaaactggacagttattactaataacctaagtcttcctgatttgcagacaacttcaatgggtatagtgatatatccagcgggtttgaagaatatcttgaaacatatcaaagacgaatacatggacccagagatttacattatggagaatgggatggacgagatcgactatgggaccaaaaacataacggaagctactaacgattacgggaggaaagagttcatcaagagtcacatcttaatcatgggtaaatccatcaggatggacaaagtgaggctgaagggttactacatatggtcgttaatggacaacttcgagtgggataaaggttataaagtcaggttcgggctctattacgtcgattataatgacaacatgaaacgttatataaggtcatctggaaaatggctaagtgagtttcttgattccaaagagactctccataaatgctatttcgagggccatcgtgagaaaggatatgcacccaagttgttcgacgttgagtatctggaacctgagaactcgcagctaagttacaggagcgattttatgtga

SEQ ID NO: 78750 - protein, 615 aa, Arabidopsis thaliana
  peptide (1)..(615): Ceres Seq. ID no. 12644996
MATATLTLFLGLLALTSTILSFNADARPQPSDEDLGTIIGPHQTSFDDEIGIVIGPHATVDDEDIDMDMGTTVGPQTNLNDDDLGTIIGPEFEIHKQDFPADFIFGTSVSAYQVEGAKKGSGRGLTSWDEFTHMFPEKVQQNGDGDEGVDFYTRYKDDIKLMKELNTNGFRFSISWTRILPYGTIKKGVNEEGVKFYNDLINELLANGIQPSVTLFHWESPLALEMEYGGFLNERIVEDFREFANFCFKEFGDRVKNWATFNEPSVYSVAGYSKGKKAPGRCSKWQAPKCPTGDSSEEPYIVAHNQILAHLAAVDEFRNCKKCQEGGGKIGIVLVSHWFEPKDPNSSEDVKAARRSLEYQLGWFLRPLTYGQYPAEMLEDVNIRLREFTPEESEKLRKSLDFVGLNYYGAFFSTPLAKVNSSQLNYETDLRVNWTVITNNLSLPDLQTTSMGIVIYPAGLKNILKHIKDEYMDPEIYIMENGMDEIDYGTKNITEATNDYGRKEFIKSHILIMGKSIRMDKVRLKGYYIWSLMDNFEWDKGYKVRFGLYYVDYNDNMKRYIRSSGKWLSEFLDSKETLHKCYFEGHREKGYAPKLFDVEYLEPENSQLSYRSDFM

SEQ ID NO: 78751 - protein, 549 aa, Arabidopsis thaliana
  peptide (1)..(549): Ceres Seq. ID no. 12644997
MDMGTTVGPQTNLNDDDLGTIIGPEFEIHKQDFPADFIFGTSVSAYQVEGAKKGSGRGLTSWDEFTHMFPEKVQQNGDGDEGVDFYTRYKDDIKLMKELNTNGFRFSISWTRILPYGTIKKGVNEEGVKFYNDLINELLANGIQPSVTLFHWESPLALEMEYGGFLNERIVEDFREFANFCFKEFGDRVKNWATFNEPSVYSVAGYSKGKKAPGRCSKWQAPKCPTGDSSEEPYIVAHNQILAHLAAVDEFRNCKKCQEGGGKIGIVLVSHWFEPKDPNSSEDVKAARRSLEYQLGWFLRPLTYGQYPAEMLEDVNIRLREFTPEESEKLRKSLDFVGLNYYGAFFSTPLAKVNSSQLNYETDLRVNWTVITNNLSLPDLQTTSMGIVIYPAGLKNILKHIKDEYMDPEIYIMENGMDEIDYGTKNITEATNDYGRKEFIKSHILIMGKSIRMDKVRLKGYYIWSLMDNFEWDKGYKVRFGLYYVDYNDNMKRYIRSSGKWLSEFLDSKETLHKCYFEGHREKGYAPKLFDVEYLEPENSQLSYRSDFM

SEQ ID NO: 78752 - protein, 547 aa, Arabidopsis thaliana
  peptide (1)..(547): Ceres Seq. ID no. 12644998
MGTTVGPQTNLNDDDLGTIIGPEFEIHKQDFPADFIFGTSVSAYQVEGAKKGSGRGLTSWDEFTHMFPEKVQQNGDGDEGVDFYTRYKDDIKLMKELNTNGFRFSISWTRILPYGTIKKGVNEEGVKFYNDLINELLANGIQPSVTLFHWESPLALEMEYGGFLNERIVEDFREFANFCFKEFGDRVKNWATFNEPSVYSVAGYSKGKKAPGRCSKWQAPKCPTGDSSEEPYIVAHNQILAHLAAVDEFRNCKKCQEGGGKIGIVLVSHWFEPKDPNSSEDVKAARRSLEYQLGWFLRPLTYGQYPAEMLEDVNIRLREFTPEESEKLRKSLDFVGLNYYGAFFSTPLAKVNSSQLNYETDLRVNWTVITNNLSLPDLQTTSMGIVIYPAGLKNILKHIKDEYMDPEIYIMENGMDEIDYGTKNITEATNDYGRKEFIKSHILIMGKSIRMDKVRLKGYYIWSLMDNFEWDKGYKVRFGLYYVDYNDNMKRYIRSSGKWLSEFLDSKETLHKCYFEGHREKGYAPKLFDVEYLEPENSQLSYRSDFM

SEQ ID NO: 78753 - DNA, 633 bp, Arabidopsis thaliana
  misc_feature (1)..(633): Ceres Seq. ID no. 12645014
  misc_feature (1)..(633): Ortholog of  Ceres SEQ ID NO 14316436 as cited in SEQ ID NO 59213
atggaggaggagaagcaagacggtggtgagcttttccataccatcgaggtagctaaagttgaccggaacaacgtgtctcagccgccgccggctgctactgcagcactgctagaagttcccggtgatgaacttaacctaattccaccgttgaacttttcgatggtcgataatggtatattccggtctggattcccggactcggcgaacttctccttcatcaagactcttggccttcgctcaatcatatctttgtgtccagagccatatcctgagaacaacatgcagttcctcaaatccaatggaattagtctttttcagtttggcattgaaggctctaagtccaaggagccatttgtagatatcctagatcagaaaatccgtgaagcactcaaagtccttctcgatgagaagaaccatccacttttgattcattgcaaacgaggcaagcacagaaccgggtgtcttgttgggtgcatgaggaaactccagaaatggtgcataacatcgatactcgatgagtataagcgatttgcagcggctaaagctagagtttcggatcaaaggttcttggagtcattcgatgtatcaggcttgaagcacactccaatgtctttttcttgctccaataggtaa

SEQ ID NO: 78754 - protein, 210 aa, Arabidopsis thaliana; identical to SEQ ID NO: 70425
  peptide (1)..(210): Ceres Seq. ID no. 12645015

SEQ ID NO: 78755 - protein, 157 aa, Arabidopsis thaliana
  peptide (1)..(157): Ceres Seq. ID no. 12645016
MVDNGIFRSGFPDSANFSFIKTLGLRSIISLCPEPYPENNMQFLKSNGISLFQFGIEGSKSKEPFVDILDQKIREALKVLLDEKNHPLLIHCKRGKHRTGCLVGCMRKLQKWCITSILDEYKRFAAAKARVSDQRFLESFDVSGLKHTPMSFSCSNR

SEQ ID NO: 78756 - protein, 117 aa, Arabidopsis thaliana
  peptide (1)..(117): Ceres Seq. ID no. 12645017
MQFLKSNGISLFQFGIEGSKSKEPFVDILDQKIREALKVLLDEKNHPLLIHCKRGKHRTGCLVGCMRKLQKWCITSILDEYKRFAAAKARVSDQRFLESFDVSGLKHTPMSFSCSNR

SEQ ID NO: 78757 - DNA, 3006 bp, Arabidopsis thaliana
  misc_feature (1)..(3006): Ceres Seq. ID no. 12645030
  misc_feature (1)..(3006): Ortholog of  Ceres SEQ ID NO 13658778 as cited in SEQ ID NO 66511
atggcttcaagtccacccaagaagaccttaaattcacaatcttcttccttaagccggcctccacaagctgtcaagtttggtcgccggacgtccagtggtcgcattgttagcctctcccgtgacgatgacatggacgtctctggtgattactccggccaaaatgattacatcaactacaccgtcctcatgcctccaacacctgacaaccaacctgctggctcctctggctccacctcggagtctaaaggtgatgctaaccgaggtggaggaggaggagacgggcccaagatggggaataagctggagaggagattgtctgtcatgaaatcaaataacaaatcaatgttgttgaggagccagacgggagattttgatcataacaggtggttgtttgaatctaaaggaaaatacggtattggaaacgcgttttggtcagaagaggatgatacctatgatggtggcgttagcaagtccgatttcttagacaagccatggaaacctctcacgaggaaagttcagatcccggccaaaattcttagtccctacaggttattaatcgtgattcgtcttgtgatagtcttcttcttcctttggtggcgtattacgaaccctaatgaggatgcaatgtggttatggggactatcgatagtctgcgagatttggttcgctttctcttggattcttgacattcttccgaagctaaaccctataaatagagctactgaccttgctgccttgcatgacaagtttgagcagccctctccgtcaaatcccactggtcgctctgatcttcccggtgttgatgtgttcgtttccacggctgaccctgagaaggaaccgcctttagtcactgcaaacacccttctctcgatccttgctgtggattatccaattgagaagctttctgcttacatttctgacgatggtggtgcaattctcacctttgaagctatggctgaagctgttcgttttgctgagtattgggtgccattttgcagaaaacatgatatagagccacggaacccggatagttactttagcattaaaaaggacccaacaaaaaacaagaaaaggcaagatttcgtcaaagatcgtcgttggatcaagcgtgagtatgacgaattcaaggtcaggatcaatgatggggttgaggtggtaaaagcaacgtggatggctgatggtacgcattggccagggacatggtttgaacctaaacctgatcattcaaaaggagatcacgccggaattctacagatcatgagcaaagtgcctgatcttgaaccggtgatgggcggaccgaatgaaggcgcgctagatttcacagggattgatattcgtgtacctatgtttgcttatgtctcgcgtgagaaacgtccaggttttgaccacaacaagaaagccggcgctatgaatggtatggttagagcttcagccatattatccaatggcgcgtttatcctcaatctggactgtgatcactacatctacaactccaaagctatcaaagaaggaatgtgtttcatgatggaccgaggtggtgacaggatctgttatattcagtttccacaacggttcgaaggaatcgacccatcagatcgatatgcaaatcacaatactgtcttcttcgatggtaacatgagagcattagatgggttacaaggtcctgtctatgttggaacagggtgtatgttccgaaggtatgctctctatggattcaacccacctcgagccaatgagtactcaggcgtgtttggtcaggaaaaggctccagctatgcatgtccggactcagtcccaagcatcccaaacgtcccaagcgtctgatttagagtctgatacacagcctcttaatgatgatccagatcttggtctgcccaaaaagtttggtaattcgaccatgttcacagacactattccagttgcagagtaccaaggacggcctctagcagatcacatgtcggttaaaaacggaagaccacctggtgctttgctcctgccacgacctccccttgatgctccaacagtggctgaagccatcgctgtcatttcttgctggtatgaagacaatactgaatggggagatagaatcggatggatttacgggtcggtcacggaagacgtggtgacaggttatcgtatgcataaccgtggttggcggtccgtttactgcatcacaaaacgtgatgctttccgtggcacagctccaatcaatctcactgaccgtctccatcaagttctccgttgggccacaggctctgtagaaatctttttctccaagaacaatgccatgttcgccaccagaaggctcaagtttctccagcgagtcgcctacctcaatgtcgggatctaccctttcacttccatcttcttggtcgtctattgcttcctccctgctctctgtctcttcagcggaaaattcatcgtccagagcctcgatatccacttcctctcctaccttctctgcatcaccgtaaccctaaccctaatctcactcctcgaggtcaaatggtcgggaatcggactggaagaatggtggagaaatgaacagttttggttaatcggaggcacaagcgctcatcttgcagcagtcgttcaaggtttgctcaaagttatagccggaatcgaaatctccttcaccctgacatcgaaagcctcaggagaagacgaagacgacatctttgcggatctttacattgtgaaatggacaggcttattcatcatgccgcttacaatcatcatagtcaaccttgttgcgatagtgattggagcttcgagaacaatatacagtgtgattccgcaatggggcaagttaatgggaggaatattctttagtttatgggtcttgactcatatgtatccgtttgctaaaggattgatgggtcgaagaggaaaggttccaacgattgtttatgtttggtccgggcttgtgtcgattaccgtctcgctgctttggatcaccattagtcctccagatgatgtttcaggcagtggaggaatctcagtgtaa

SEQ ID NO: 78758 - protein, 1001 aa, Arabidopsis thaliana
  peptide (1)..(1001): Ceres Seq. ID no. 12645031
MASSPPKKTLNSQSSSLSRPPQAVKFGRRTSSGRIVSLSRDDDMDVSGDYSGQNDYINYTVLMPPTPDNQPAGSSGSTSESKGDANRGGGGGDGPKMGNKLERRLSVMKSNNKSMLLRSQTGDFDHNRWLFESKGKYGIGNAFWSEEDDTYDGGVSKSDFLDKPWKPLTRKVQIPAKILSPYRLLIVIRLVIVFFFLWWRITNPNEDAMWLWGLSIVCEIWFAFSWILDILPKLNPINRATDLAALHDKFEQPSPSNPTGRSDLPGVDVFVSTADPEKEPPLVTANTLLSILAVDYPIEKLSAYISDDGGAILTFEAMAEAVRFAEYWVPFCRKHDIEPRNPDSYFSIKKDPTKNKKRQDFVKDRRWIKREYDEFKVRINDGVEVVKATWMADGTHWPGTWFEPKPDHSKGDHAGILQIMSKVPDLEPVMGGPNEGALDFTGIDIRVPMFAYVSREKRPGFDHNKKAGAMNGMVRASAILSNGAFILNLDCDHYIYNSKAIKEGMCFMMDRGGDRICYIQFPQRFEGIDPSDRYANHNTVFFDGNMRALDGLQGPVYVGTGCMFRRYALYGFNPPRANEYSGVFGQEKAPAMHVRTQSQASQTSQASDLESDTQPLNDDPDLGLPKKFGNSTMFTDTIPVAEYQGRPLADHMSVKNGRPPGALLLPRPPLDAPTVAEAIAVISCWYEDNTEWGDRIGWIYGSVTEDVVTGYRMHNRGWRSVYCITKRDAFRGTAPINLTDRLHQVLRWATGSVEIFFSKNNAMFATRRLKFLQRVAYLNVGIYPFTSIFLVVYCFLPALCLFSGKFIVQSLDIHFLSYLLCITVTLTLISLLEVKWSGIGLEEWWRNEQFWLIGGTSAHLAAVVQGLLKVIAGIEISFTLTSKASGEDEDDIFADLYIVKWTGLFIMPLTIIIVNLVAIVIGASRTIYSVIPQWGKLMGGIFFSLWVLTHMYPFAKGLMGRRGKVPTIVYVWSGLVSITVSLLWITISPPDDVSGSGGISV

SEQ ID NO: 78759 - protein, 958 aa, Arabidopsis thaliana
  peptide (1)..(958): Ceres Seq. ID no. 12645032
MDVSGDYSGQNDYINYTVLMPPTPDNQPAGSSGSTSESKGDANRGGGGGDGPKMGNKLERRLSVMKSNNKSMLLRSQTGDFDHNRWLFESKGKYGIGNAFWSEEDDTYDGGVSKSDFLDKPWKPLTRKVQIPAKILSPYRLLIVIRLVIVFFFLWWRITNPNEDAMWLWGLSIVCEIWFAFSWILDILPKLNPINRATDLAALHDKFEQPSPSNPTGRSDLPGVDVFVSTADPEKEPPLVTANTLLSILAVDYPIEKLSAYISDDGGAILTFEAMAEAVRFAEYWVPFCRKHDIEPRNPDSYFSIKKDPTKNKKRQDFVKDRRWIKREYDEFKVRINDGVEVVKATWMADGTHWPGTWFEPKPDHSKGDHAGILQIMSKVPDLEPVMGGPNEGALDFTGIDIRVPMFAYVSREKRPGFDHNKKAGAMNGMVRASAILSNGAFILNLDCDHYIYNSKAIKEGMCFMMDRGGDRICYIQFPQRFEGIDPSDRYANHNTVFFDGNMRALDGLQGPVYVGTGCMFRRYALYGFNPPRANEYSGVFGQEKAPAMHVRTQSQASQTSQASDLESDTQPLNDDPDLGLPKKFGNSTMFTDTIPVAEYQGRPLADHMSVKNGRPPGALLLPRPPLDAPTVAEAIAVISCWYEDNTEWGDRIGWIYGSVTEDVVTGYRMHNRGWRSVYCITKRDAFRGTAPINLTDRLHQVLRWATGSVEIFFSKNNAMFATRRLKFLQRVAYLNVGIYPFTSIFLVVYCFLPALCLFSGKFIVQSLDIHFLSYLLCITVTLTLISLLEVKWSGIGLEEWWRNEQFWLIGGTSAHLAAVVQGLLKVIAGIEISFTLTSKASGEDEDDIFADLYIVKWTGLFIMPLTIIIVNLVAIVIGASRTIYSVIPQWGKLMGGIFFSLWVLTHMYPFAKGLMGRRGKVPTIVYVWSGLVSITVSLLWITISPPDDVSGSGGISV

SEQ ID NO: 78760 - protein, 939 aa, Arabidopsis thaliana
  peptide (1)..(939): Ceres Seq. ID no. 12645033
MPPTPDNQPAGSSGSTSESKGDANRGGGGGDGPKMGNKLERRLSVMKSNNKSMLLRSQTGDFDHNRWLFESKGKYGIGNAFWSEEDDTYDGGVSKSDFLDKPWKPLTRKVQIPAKILSPYRLLIVIRLVIVFFFLWWRITNPNEDAMWLWGLSIVCEIWFAFSWILDILPKLNPINRATDLAALHDKFEQPSPSNPTGRSDLPGVDVFVSTADPEKEPPLVTANTLLSILAVDYPIEKLSAYISDDGGAILTFEAMAEAVRFAEYWVPFCRKHDIEPRNPDSYFSIKKDPTKNKKRQDFVKDRRWIKREYDEFKVRINDGVEVVKATWMADGTHWPGTWFEPKPDHSKGDHAGILQIMSKVPDLEPVMGGPNEGALDFTGIDIRVPMFAYVSREKRPGFDHNKKAGAMNGMVRASAILSNGAFILNLDCDHYIYNSKAIKEGMCFMMDRGGDRICYIQFPQRFEGIDPSDRYANHNTVFFDGNMRALDGLQGPVYVGTGCMFRRYALYGFNPPRANEYSGVFGQEKAPAMHVRTQSQASQTSQASDLESDTQPLNDDPDLGLPKKFGNSTMFTDTIPVAEYQGRPLADHMSVKNGRPPGALLLPRPPLDAPTVAEAIAVISCWYEDNTEWGDRIGWIYGSVTEDVVTGYRMHNRGWRSVYCITKRDAFRGTAPINLTDRLHQVLRWATGSVEIFFSKNNAMFATRRLKFLQRVAYLNVGIYPFTSIFLVVYCFLPALCLFSGKFIVQSLDIHFLSYLLCITVTLTLISLLEVKWSGIGLEEWWRNEQFWLIGGTSAHLAAVVQGLLKVIAGIEISFTLTSKASGEDEDDIFADLYIVKWTGLFIMPLTIIIVNLVAIVIGASRTIYSVIPQWGKLMGGIFFSLWVLTHMYPFAKGLMGRRGKVPTIVYVWSGLVSITVSLLWITISPPDDVSGSGGISV

SEQ ID NO: 78761 - DNA, 1485 bp, Arabidopsis thaliana
  misc_feature (1)..(1485): Ceres Seq. ID no. 12645046
  misc_feature (1)..(1485): Ortholog of  Ceres SEQ ID NO 13599131 as cited in SEQ ID NO 0
atggcggatagaggagctctttcgttaccgcgagcttctacttatcttagtttctcaaacctccatgtctggcgattccacaaccctagatcttatcctccctctcgttctcaactcctctgtttctcttcctcatgctctagagtaacttcggcgaagataattcagctgaaccgccggagattcagctataaaatatgcgccgccgctgatgacggtaggggataccgtttgacggaaaggggaaaaaggggaaggaagcggcgggagctatgggaagaactttttgaagataatgttgaagacgatgatgatgaagatgatggtggtggtggaattggtagtgctaattttgacctgtggaagatcttagaggaaattgtagataatgtttggattttaaaggcattcaaatcgtatggatatctcctcccattcatcatcttatcgcttttcttcagcaccggacccaaagctttcctcgtgtcactagccgtagcaatcgggccatcattgttattttatgcgttccagaagttgattggttgggataaacgcagaggtacatcaatagcaaatcaattcgggatagaggaagaagaagaagaagtggagagaagtagtagcaggattcgatacaacccatcaaccgttagaaacaatgtcaatggccgtggagttaaccgtagttcagctggaatggcttctaagtttggtgggtgggacgagttagacgggcttggtaccaccattcccgaacggccaacaagcgaaccgaagaagaaaccgttaccgaagaggaagagagtaagaagagaaaaggcagcagaaccattattgttgagattgttggtgtctttgtttccattcttaagcacatacacaaacatgctcaaaccttcttgttcgatttccatggcgaatttaacgacgaacgctaaaactcgcctgagaggtgttgtattcgatatggacggaaccctgactgttccggtcatcgatttcgccgcaatgtatagagctgttcttggtgaagatgcttacaagcgaatcaaagcagagagccctagtgggattgatattctgcatcatattgagtcgtggagtcctgataaacagcagaaggcgtatgaaatcattgctgattatgagaaacaaggaatagataagcttcaaatcatgcctggtactgctgaactatgtggcttccttgattccaaaaagataaagagggggctaattacacgcaatgttcaaaaggcaatcgacatcttccatcaacgttttgaggttatcttttctccagcactaggcagagagtttcgtccatataaaccaaacccagacccgctgttgcatatatgttctacatgggacatccaacctaatgaagtcatgatggttggtgacagcttaaaagatgatgtgagtgacagacatgatgacaagcctttggtcaaccctttctccatagcaaatcgataa

SEQ ID NO: 78762 - protein, 494 aa, Arabidopsis thaliana
  peptide (1)..(494): Ceres Seq. ID no. 12645047
MADRGALSLPRASTYLSFSNLHVWRFHNPRSYPPSRSQLLCFSSSCSRVTSAKIIQLNRRRFSYKICAAADDGRGYRLTERGKRGRKRRELWEELFEDNVEDDDDEDDGGGGIGSANFDLWKILEEIVDNVWILKAFKSYGYLLPFIILSLFFSTGPKAFLVSLAVAIGPSLLFYAFQKLIGWDKRRGTSIANQFGIEEEEEEVERSSSRIRYNPSTVRNNVNGRGVNRSSAGMASKFGGWDELDGLGTTIPERPTSEPKKKPLPKRKRVRREKAAEPLLLRLLVSLFPFLSTYTNMLKPSCSISMANLTTNAKTRLRGVVFDMDGTLTVPVIDFAAMYRAVLGEDAYKRIKAESPSGIDILHHIESWSPDKQQKAYEIIADYEKQGIDKLQIMPGTAELCGFLDSKKIKRGLITRNVQKAIDIFHQRFEVIFSPALGREFRPYKPNPDPLLHICSTWDIQPNEVMMVGDSLKDDVSDRHDDKPLVNPFSIANR

SEQ ID NO: 78763 - protein, 261 aa, Arabidopsis thaliana
  peptide (1)..(261): Ceres Seq. ID no. 12645048
MASKFGGWDELDGLGTTIPERPTSEPKKKPLPKRKRVRREKAAEPLLLRLLVSLFPFLSTYTNMLKPSCSISMANLTTNAKTRLRGVVFDMDGTLTVPVIDFAAMYRAVLGEDAYKRIKAESPSGIDILHHIESWSPDKQQKAYEIIADYEKQGIDKLQIMPGTAELCGFLDSKKIKRGLITRNVQKAIDIFHQRFEVIFSPALGREFRPYKPNPDPLLHICSTWDIQPNEVMMVGDSLKDDVSDRHDDKPLVNPFSIANR

SEQ ID NO: 78764 - DNA, 947 bp, Arabidopsis thaliana
  misc_feature (1)..(947): Ceres Seq. ID no. 12645081
  misc_feature (1)..(947): Ortholog of  Ceres SEQ ID NO 13597338 as cited in SEQ ID NO 64272
cgttacgttttaggcgtttaacacaattattattttctaaaacgagagccgtttaaagagaaagagaaatttctaactccagagagcgaagaacacaatcccagagtagcagaatctgatccatcccacctttttcaattctcaggcaaagtgtttgatctcatattcagataagtcaaacttgaaaaaatggaagggactgtgttcacgccttgtttggaaggaatgaagcatgtcaaatctgatcaaggcgagatgcttactaagccatttttagagctttgcaagaccatcttgcctgttatagataaatttggagctgctatgactctcgtgaaatctgacattggtggcaacataacgaggttggagaagaactacttatctgatcccgacaagttcaagtacttgtacacctttgttcaagtcgaaattgagtctaagatagcaaaaggatcgtctagctgtacaaacggtcttctctggttaaccagagcaatggatttcttagtggagctgttccgaaacttggtagcacatcaagactggtcaatgccacaagcttgtgctgactcataccaaaaaacactcaagaaatggcacggatggctcgccagctctaccttctctatggctttaaagctagctccggacaggaagaagttcatggatgtcatatctggttctggtaacatccaagccgacatggaaaggttttgtgctgagtttggtccgtttcttcatgataatcataagtttctggctagcgtcggtatggatgacatgaaagcttcttaagtcatcatatgattatcgccggtatcaaatcttctttgccggaatctttgtctgttttaacttttctccttccaattatagaacctccaaaaagaaacagaataatgtgttggtttctatctgaatgttcactttatattacaagttat

SEQ ID NO: 78765 - protein, 202 aa, Arabidopsis thaliana; identical to SEQ ID NO: 24242
  peptide (1)..(202): Ceres Seq. ID no. 12645082

SEQ ID NO: 78766 - protein, 190 aa, Arabidopsis thaliana; identical to SEQ ID NO: 24243
  peptide (1)..(190): Ceres Seq. ID no. 12645083

SEQ ID NO: 78767 - protein, 180 aa, Arabidopsis thaliana; identical to SEQ ID NO: 24244
  peptide (1)..(180): Ceres Seq. ID no. 12645084

SEQ ID NO: 78768 - DNA, 1374 bp, Arabidopsis thaliana
  misc_feature (1)..(1374): Ceres Seq. ID no. 12645089
  misc_feature (1)..(1374): Ortholog of  Ceres SEQ ID NO 15176457 as cited in SEQ ID NO 55547
  misc_feature (1)..(1374): Ortholog of  Ceres SEQ ID NO 13594349 as cited in SEQ ID NO 58161
  misc_feature (1)..(1374): Ortholog of  Ceres SEQ ID NO 13663419 as cited in SEQ ID NO 66561
atggcgacttcactaattctgctgcttcaagctctgagtttagtgagctcaactattctgtcccgggccgatcggatcacccgtttacccggtcaaccccgagtcgggtttcagcagtactcaggttatgtcactattgacgagaagaaacagagagctctgttttactacttggctgaagcagaaaccaaacccatctctaaacctctcgttctctggctcaatggaggacctggatgttcatcattaggtgttggtgcattctctgagaatggaccttttagaccaaagggatcaatcttggtgagaaatcaacacagctggaatcaagaggctaatatgttgtatctggagacacctgttggagttggattttcttatgcaaatgagagctcctcttatgagggtgtgaatgataagatcactgcaaaagacaatcttgtgttcttgcaaaaatggttcctcaaattccctcaatatctcaacagaagtctcttcatcactggtgaaagctatgctggccattatgttcctcagttggctcagcttatgattcagtacaacaagaagcacaatttgtttaatctcaaaggcattgctattggcaatccggttatggagtttgcaacggatttcaattcacgagcagagtatttctggtctcacgggttgatatcggatccaacttacaaattgttcacatcttcttgtaattactcgagatttttgagtgagtaccatagaggatcagtgtcgagtatgtgcactaaagtgctaagtcaagttggcatcgaaacaagtagattcatagacaaatatgacgttactcttgacgtctgcattccctctgtgctatctcaatccaaagtagttagccctcaacctcaacaagtgggagagacggtggatgtgtgtctagaagatgagacggtgaactatcttaaccggagagatgtgcaaaaagctctccacgctcggcttgtcggaactcgcaaatggactgtttgcagcgatgtgctggattacgaagtacttgatgtggaagtaccaacgataaatatcgtaggaagtcttgttaaagctggtgttccagtttttgtgtacagtggagatcaagactctgtgattccgttaaccggaagtagaacattagtgaagcgactggctgaagagttgggactaagaacaaccgtgccttatcgagtttggttcgcaggacaacaggttggtgggtggactcaagtttatgggaacacattggcgtttgccactgtgagaggagcagcccacgaggtaccattctcgcagcccgcgagagcgcttgtgttgtttaaagcattcttgggtggtcgtcctctccctgaagaattctaa

SEQ ID NO: 78769 - protein, 457 aa, Arabidopsis thaliana; identical to SEQ ID NO: 50170
  peptide (1)..(457): Ceres Seq. ID no. 12645090

SEQ ID NO: 78770 - protein, 344 aa, Arabidopsis thaliana
  peptide (1)..(344): Ceres Seq. ID no. 12645091
MLYLETPVGVGFSYANESSSYEGVNDKITAKDNLVFLQKWFLKFPQYLNRSLFITGESYAGHYVPQLAQLMIQYNKKHNLFNLKGIAIGNPVMEFATDFNSRAEYFWSHGLISDPTYKLFTSSCNYSRFLSEYHRGSVSSMCTKVLSQVGIETSRFIDKYDVTLDVCIPSVLSQSKVVSPQPQQVGETVDVCLEDETVNYLNRRDVQKALHARLVGTRKWTVCSDVLDYEVLDVEVPTINIVGSLVKAGVPVFVYSGDQDSVIPLTGSRTLVKRLAEELGLRTTVPYRVWFAGQQVGGWTQVYGNTLAFATVRGAAHEVPFSQPARALVLFKAFLGGRPLPEEF

SEQ ID NO: 78771 - protein, 274 aa, Arabidopsis thaliana
  peptide (1)..(274): Ceres Seq. ID no. 12645092
MIQYNKKHNLFNLKGIAIGNPVMEFATDFNSRAEYFWSHGLISDPTYKLFTSSCNYSRFLSEYHRGSVSSMCTKVLSQVGIETSRFIDKYDVTLDVCIPSVLSQSKVVSPQPQQVGETVDVCLEDETVNYLNRRDVQKALHARLVGTRKWTVCSDVLDYEVLDVEVPTINIVGSLVKAGVPVFVYSGDQDSVIPLTGSRTLVKRLAEELGLRTTVPYRVWFAGQQVGGWTQVYGNTLAFATVRGAAHEVPFSQPARALVLFKAFLGGRPLPEEF

SEQ ID NO: 78772 - DNA, 2331 bp, Arabidopsis thaliana
  misc_feature (1)..(2331): Ceres Seq. ID no. 12645105
  misc_feature (1)..(2331): Ortholog of  Ceres SEQ ID NO 12586556 as cited in SEQ ID NO 64667
  misc_feature (1)..(2331): Ortholog of  Ceres SEQ ID NO 13660894 as cited in SEQ ID NO 67475
atgaagaaggaagaatttcaaagtagactatgggattcatggggatcaataaagaagaaacttgagaaagatatttacggagttggaagtattggccttttcactgatttagacagagagagtttagcgattagacagaaacctgggttggaagaacactctgttctagataaatcgagaacaacgactcaggacaaacaatgttctataccaatgcatccaagtacctttcaaacagaactcaacccgcatacttccacgttattaaaaaaactgactcatcattcacagcaaaggaacctcgtggctggacgtgcagttcatggacagatcatcagaacgggagcatcaacctgcatccaacatgccaatgtccttgtcaacttttatgcaaaatgtggaaaattggccaaagcccactccatctttaacgccataatctgcaaggatgttgtgtcctggaacagtctcatcactggctattctcagaacggcggtatctccagctcctacactgttatgcagctgtttcgtgagatgagagcgcaagatatactgccaaatgcttatacccttgctgggatttttaaggccgagtcgagtcttcaaagttctacagttgggaggcaggctcacgcgctagtggtcaaaatgtcaagttttggggatatatatgttgatacttcgttggtgggcatgtactgtaaagcgggcttggtcgaggatggacttaaagtgttcgcctatatgcctgaaagaaatacttatacatggtctactatggtttctggttatgctacaagaggacgcgttgaagaggcaattaaagtcttcaatttgtttcttagagagaaggaggaaggaagtgatagtgactatgtcttcaccgcggttctcagctcgctggctgcaaccatatacgtaggactaggcaggcaaatccattgcatcacaattaaaaatgggttgcttgggtttgtagctttgagtaatgcgcttgttacaatgtattcaaagtgtgagagcttgaatgaggcatgcaagatgtttgactcgtctggtgacagaaattcgattacatggtcagcaatggtcactggttattctcagaatggggaatcacttgaagcagtaaagcttttctctagaatgttttctgctggaatcaagcccagtgaatacacgattgttggggttcttaatgcatgcagtgacatttgctatctagaagaagggaagcaacttcattctttcttgttaaagttgggatttgaaagacatttatttgcaactactgctttggttgacatgtatgcaaaagccggttgtctagcagatgccagaaaaggttttgactgcctacaagaacgtgatgtggcgctttggacatcgcttattagcgggtatgttcaaaactcagataacgaagaggctttgattctgtaccgcagaatgaaaacagcaggtattatcccaaacgacccaaccatggcaagtgttctaaaagcttgctcttctctagctaccttggagctcggaaagcaagtacacggccacacaatcaagcatgggtttgggcttgaagttccaataggaagcgcactttctacaatgtactcaaagtgtgggagtttagaagatgggaacctcgtctttagaagaactcccaataaagatgttgtgtcttggaacgctatgatctcaggcttgtcccataatggacaaggagatgaggctttggaactgtttgaggagatgttagcagaaggaatggaaccagatgatgtcactttcgtgaacattatatcagcgtgtagccacaaaggttttgtagagagaggctggttttatttcaatatgatgtcagatcagatcgggcttgatccaaaagttgaccactatgcttgtatggttgatctgctgagccgtgcaggacagctcaaagaggcaaaagagttcatcgaatcagctaatattgatcacggtttatgcctttggcggatactattaagcgcatgtaagaaccatgggaaatgtgagctaggagtttacgcaggagagaagctcatggcccttggatcgagagaatcatcaacttatgtgcaattgtcaggcatttacacggctttagggcggatgagagatgtggaacgggtttggaaacacatgagagcaaacggggtgagcaaagaagtgggttgcagttggatcgagctgaagaatcagtaccatgtttttgttgtgggagatacaatgcatccgatgattgaagagacgaaggatttggtttgtttggttttaattttaggtgtgaaaatgtatcacaaatag

SEQ ID NO: 78773 - protein, 776 aa, Arabidopsis thaliana
  peptide (1)..(776): Ceres Seq. ID no. 12645106
MKKEEFQSRLWDSWGSIKKKLEKDIYGVGSIGLFTDLDRESLAIRQKPGLEEHSVLDKSRTTTQDKQCSIPMHPSTFQTELNPHTSTLLKKLTHHSQQRNLVAGRAVHGQIIRTGASTCIQHANVLVNFYAKCGKLAKAHSIFNAIICKDVVSWNSLITGYSQNGGISSSYTVMQLFREMRAQDILPNAYTLAGIFKAESSLQSSTVGRQAHALVVKMSSFGDIYVDTSLVGMYCKAGLVEDGLKVFAYMPERNTYTWSTMVSGYATRGRVEEAIKVFNLFLREKEEGSDSDYVFTAVLSSLAATIYVGLGRQIHCITIKNGLLGFVALSNALVTMYSKCESLNEACKMFDSSGDRNSITWSAMVTGYSQNGESLEAVKLFSRMFSAGIKPSEYTIVGVLNACSDICYLEEGKQLHSFLLKLGFERHLFATTALVDMYAKAGCLADARKGFDCLQERDVALWTSLISGYVQNSDNEEALILYRRMKTAGIIPNDPTMASVLKACSSLATLELGKQVHGHTIKHGFGLEVPIGSALSTMYSKCGSLEDGNLVFRRTPNKDVVSWNAMISGLSHNGQGDEALELFEEMLAEGMEPDDVTFVNIISACSHKGFVERGWFYFNMMSDQIGLDPKVDHYACMVDLLSRAGQLKEAKEFIESANIDHGLCLWRILLSACKNHGKCELGVYAGEKLMALGSRESSTYVQLSGIYTALGRMRDVERVWKHMRANGVSKEVGCSWIELKNQYHVFVVGDTMHPMIEETKDLVCLVLILGVKMYHK

SEQ ID NO: 78774 - protein, 705 aa, Arabidopsis thaliana
  peptide (1)..(705): Ceres Seq. ID no. 12645107
MHPSTFQTELNPHTSTLLKKLTHHSQQRNLVAGRAVHGQIIRTGASTCIQHANVLVNFYAKCGKLAKAHSIFNAIICKDVVSWNSLITGYSQNGGISSSYTVMQLFREMRAQDILPNAYTLAGIFKAESSLQSSTVGRQAHALVVKMSSFGDIYVDTSLVGMYCKAGLVEDGLKVFAYMPERNTYTWSTMVSGYATRGRVEEAIKVFNLFLREKEEGSDSDYVFTAVLSSLAATIYVGLGRQIHCITIKNGLLGFVALSNALVTMYSKCESLNEACKMFDSSGDRNSITWSAMVTGYSQNGESLEAVKLFSRMFSAGIKPSEYTIVGVLNACSDICYLEEGKQLHSFLLKLGFERHLFATTALVDMYAKAGCLADARKGFDCLQERDVALWTSLISGYVQNSDNEEALILYRRMKTAGIIPNDPTMASVLKACSSLATLELGKQVHGHTIKHGFGLEVPIGSALSTMYSKCGSLEDGNLVFRRTPNKDVVSWNAMISGLSHNGQGDEALELFEEMLAEGMEPDDVTFVNIISACSHKGFVERGWFYFNMMSDQIGLDPKVDHYACMVDLLSRAGQLKEAKEFIESANIDHGLCLWRILLSACKNHGKCELGVYAGEKLMALGSRESSTYVQLSGIYTALGRMRDVERVWKHMRANGVSKEVGCSWIELKNQYHVFVVGDTMHPMIEETKDLVCLVLILGVKMYHK

SEQ ID NO: 78775 - protein, 603 aa, Arabidopsis thaliana
  peptide (1)..(603): Ceres Seq. ID no. 12645108
MQLFREMRAQDILPNAYTLAGIFKAESSLQSSTVGRQAHALVVKMSSFGDIYVDTSLVGMYCKAGLVEDGLKVFAYMPERNTYTWSTMVSGYATRGRVEEAIKVFNLFLREKEEGSDSDYVFTAVLSSLAATIYVGLGRQIHCITIKNGLLGFVALSNALVTMYSKCESLNEACKMFDSSGDRNSITWSAMVTGYSQNGESLEAVKLFSRMFSAGIKPSEYTIVGVLNACSDICYLEEGKQLHSFLLKLGFERHLFATTALVDMYAKAGCLADARKGFDCLQERDVALWTSLISGYVQNSDNEEALILYRRMKTAGIIPNDPTMASVLKACSSLATLELGKQVHGHTIKHGFGLEVPIGSALSTMYSKCGSLEDGNLVFRRTPNKDVVSWNAMISGLSHNGQGDEALELFEEMLAEGMEPDDVTFVNIISACSHKGFVERGWFYFNMMSDQIGLDPKVDHYACMVDLLSRAGQLKEAKEFIESANIDHGLCLWRILLSACKNHGKCELGVYAGEKLMALGSRESSTYVQLSGIYTALGRMRDVERVWKHMRANGVSKEVGCSWIELKNQYHVFVVGDTMHPMIEETKDLVCLVLILGVKMYHK

SEQ ID NO: 78776 - DNA, 1167 bp, Arabidopsis thaliana
  misc_feature (1)..(1167): Ceres Seq. ID no. 12645124
  misc_feature (1)..(1167): Ortholog of  Ceres SEQ ID NO 15170099 as cited in SEQ ID NO 66491
atggcttcttcgaatagacactggccaagcatgttcaagtccaaacctcatccccatcaatggcaacatgacatcaactctcctctcttgccttctgcttctcaccgatcttctcctttctcttcaggatgtgaagtggagaggagtccagagccaaaaccaagatggaatccaaagccagagcagattcggatacttgaagcaatctttaactccgggatggtgaatcctccaagagaggagatcaggaggattagggctcagcttcaagaatacggccaagtcggtgatgctaacgtcttctactggttccaaaaccgtaagtcccgtagtaaacacaaactccgcctcctccacaaccactccaaacactctctccctcaaacgcaaccgcagccgcagccgcaaccttcggcttcctcttcctcttcctcctcctcttcctcctccaaatccaccaaaccccgaaaaagcaagaacaagaacaacactaatctctctttgggtggtagtcaaatgatggggatgtttccaccggaaccggcgtttctcttcccggtctccactgtcggagggtttgaaggtatcaccgtctcatcccaattagggtttctctccggtgatatgattgagcaacaaaaaccggctccaacgtgtaccggactcctgctgagtgagatcatgaacggtagtgtgagttatggaactcatcatcaacaacacttgagtgagaaagaagttgaagaaatgaggatgaagatgttgcaacagccacagactcagatttgttacgctaccactaatcatcaaatagcttcttacaacaacaacaacaacaacaataacatcatgcttcatattcctcccactacttctactgccaccactattactacttcgcattctctcgctactgtcccatcaacttcggaccagcttcaagttcaagcggacgcacgaataagagttttcatcaatgaaatggagcttgaagtgagctcaggaccgttcaatgtgagggatgcatttggggaagaggttgttctgattaattccgcgggtcagcccattgtcaccgatgaatatggcgtcgctcttcaccctcttcaacacggagcctcgtactatctggttttgtttcctctctattttcctttgttatactaa

SEQ ID NO: 78777 - protein, 388 aa, Arabidopsis thaliana
  peptide (1)..(388): Ceres Seq. ID no. 12645125
MASSNRHWPSMFKSKPHPHQWQHDINSPLLPSASHRSSPFSSGCEVERSPEPKPRWNPKPEQIRILEAIFNSGMVNPPREEIRRIRAQLQEYGQVGDANVFYWFQNRKSRSKHKLRLLHNHSKHSLPQTQPQPQPQPSASSSSSSSSSSSKSTKPRKSKNKNNTNLSLGGSQMMGMFPPEPAFLFPVSTVGGFEGITVSSQLGFLSGDMIEQQKPAPTCTGLLLSEIMNGSVSYGTHHQQHLSEKEVEEMRMKMLQQPQTQICYATTNHQIASYNNNNNNNNIMLHIPPTTSTATTITTSHSLATVPSTSDQLQVQADARIRVFINEMELEVSSGPFNVRDAFGEEVVLINSAGQPIVTDEYGVALHPLQHGASYYLVLFPLYFPLLY

SEQ ID NO: 78778 - protein, 378 aa, Arabidopsis thaliana
  peptide (1)..(378): Ceres Seq. ID no. 12645126
MFKSKPHPHQWQHDINSPLLPSASHRSSPFSSGCEVERSPEPKPRWNPKPEQIRILEAIFNSGMVNPPREEIRRIRAQLQEYGQVGDANVFYWFQNRKSRSKHKLRLLHNHSKHSLPQTQPQPQPQPSASSSSSSSSSSSKSTKPRKSKNKNNTNLSLGGSQMMGMFPPEPAFLFPVSTVGGFEGITVSSQLGFLSGDMIEQQKPAPTCTGLLLSEIMNGSVSYGTHHQQHLSEKEVEEMRMKMLQQPQTQICYATTNHQIASYNNNNNNNNIMLHIPPTTSTATTITTSHSLATVPSTSDQLQVQADARIRVFINEMELEVSSGPFNVRDAFGEEVVLINSAGQPIVTDEYGVALHPLQHGASYYLVLFPLYFPLLY

SEQ ID NO: 78779 - protein, 315 aa, Arabidopsis thaliana
  peptide (1)..(315): Ceres Seq. ID no. 12645127
MVNPPREEIRRIRAQLQEYGQVGDANVFYWFQNRKSRSKHKLRLLHNHSKHSLPQTQPQPQPQPSASSSSSSSSSSSKSTKPRKSKNKNNTNLSLGGSQMMGMFPPEPAFLFPVSTVGGFEGITVSSQLGFLSGDMIEQQKPAPTCTGLLLSEIMNGSVSYGTHHQQHLSEKEVEEMRMKMLQQPQTQICYATTNHQIASYNNNNNNNNIMLHIPPTTSTATTITTSHSLATVPSTSDQLQVQADARIRVFINEMELEVSSGPFNVRDAFGEEVVLINSAGQPIVTDEYGVALHPLQHGASYYLVLFPLYFPLLY

SEQ ID NO: 78780 - DNA, 1701 bp, Arabidopsis thaliana
  misc_feature (1)..(1701): Ceres Seq. ID no. 12645128
  misc_feature (1)..(1701): Ortholog of  Ceres SEQ ID NO 15180350 as cited in SEQ ID NO 0
atggcaggtgttactctcttcttctcccttctctctatagctctgattatctctggtgtgagctctcgtgtcctgatcagtcatgtccctctgaataactcgatcttgatatctgatgggatccatgacgccttgaatcacgagtttctcaccctcgatcctccaaagagcttgtcaaggaccgcgtgtgttcatgtctacgggtttcttccatgtgcagacaatgttgaaggttatatcttccaagttttttcctttgggagtctcttgattatcggtgactatttcttgtccgaaggaagatctaaactctttgtaatattcgaggtcgggttctatggtggtatcatcttccctcttcttacaatgttcccaagaatcgctcttatgctctcgaccggactatcattgagtagggatgttgctagctcctttatagatgataacgttggacttactgtgggacacactgtgttttctctcacaattcaatggggagcttgtgttgtgtttagcatcactggtccacgttctgaccaagcagatggattgatcgaaaaactaaagatattgaaaggctttgttgaagcaagagtagaagcggatcctaagaataagaaagctgcagggattatgctgttgagtctatctccctttctcatggtgacattttcggctatatttgattcacattcttggagtcacatcattgtgttgatcacactcataatttcttcttcttcaaccgttgtctactttgtttactcgtatcttgatacggctaaccaagagaagagcttagatcacgcgaggtttgagctcatgtcagaagttcataagcacttaaagaggttttcaccgaaacaccttataaaagatggagaactaagcaaagagagcttgaaaagtttgttcaagaaaactgataagaacaaagatgggaagatacaaatatctgaactaaaagacttaaccatagagctttccaactttgggagaatgagatatgacatcaatgagcttgctaaagcttttcttgaggattttgatggagacaacgacggcgaattagaagagaatgaattcgaggaagggattgcgagacttctcaaacaatacaaattcaacgttgaggatcaaagagagaatcagactgaggaaaatggagttcttaagctggaaattaaaccgaagaaaacacttgttactaagttgctatctatggaaacattaatagctacgactgaagtcatcgtagggatcctaattgtactctttcttgcaaaaccatttatgctgaacatccagctcttatccatctcagctggaattccttctttctacatcgtgttcgcgatgatccctttcgctagaaacttaaagaacactctatctacacgcttctgtcgtggcaaagacaagaaaagagtctcgtccaatactttctccgagatctacaaagatattacaatgaacaatctcttgggaatgtcggtaatattggcaattgtgtatacaaggggcttgacttggaaatactcggtagaaactcttattatggtgatcgttggcctcataatcggcttaccaatctatataagatcgacttacccgttctggatgtgtgtcttggcctttgctatgtacttcttttctcttctccttatctatatccgtttaaattttctagacaagaactaa

SEQ ID NO: 78781 - protein, 566 aa, Arabidopsis thaliana
  peptide (1)..(566): Ceres Seq. ID no. 12645129
MAGVTLFFSLLSIALIISGVSSRVLISHVPLNNSILISDGIHDALNHEFLTLDPPKSLSRTACVHVYGFLPCADNVEGYIFQVFSFGSLLIIGDYFLSEGRSKLFVIFEVGFYGGIIFPLLTMFPRIALMLSTGLSLSRDVASSFIDDNVGLTVGHTVFSLTIQWGACVVFSITGPRSDQADGLIEKLKILKGFVEARVEADPKNKKAAGIMLLSLSPFLMVTFSAIFDSHSWSHIIVLITLIISSSSTVVYFVYSYLDTANQEKSLDHARFELMSEVHKHLKRFSPKHLIKDGELSKESLKSLFKKTDKNKDGKIQISELKDLTIELSNFGRMRYDINELAKAFLEDFDGDNDGELEENEFEEGIARLLKQYKFNVEDQRENQTEENGVLKLEIKPKKTLVTKLLSMETLIATTEVIVGILIVLFLAKPFMLNIQLLSISAGIPSFYIVFAMIPFARNLKNTLSTRFCRGKDKKRVSSNTFSEIYKDITMNNLLGMSVILAIVYTRGLTWKYSVETLIMVIVGLIIGLPIYIRSTYPFWMCVLAFAMYFFSLLLIYIRLNFLDKN

SEQ ID NO: 78782 - protein, 444 aa, Arabidopsis thaliana
  peptide (1)..(444): Ceres Seq. ID no. 12645130
MFPRIALMLSTGLSLSRDVASSFIDDNVGLTVGHTVFSLTIQWGACVVFSITGPRSDQADGLIEKLKILKGFVEARVEADPKNKKAAGIMLLSLSPFLMVTFSAIFDSHSWSHIIVLITLIISSSSTVVYFVYSYLDTANQEKSLDHARFELMSEVHKHLKRFSPKHLIKDGELSKESLKSLFKKTDKNKDGKIQISELKDLTIELSNFGRMRYDINELAKAFLEDFDGDNDGELEENEFEEGIARLLKQYKFNVEDQRENQTEENGVLKLEIKPKKTLVTKLLSMETLIATTEVIVGILIVLFLAKPFMLNIQLLSISAGIPSFYIVFAMIPFARNLKNTLSTRFCRGKDKKRVSSNTFSEIYKDITMNNLLGMSVILAIVYTRGLTWKYSVETLIMVIVGLIIGLPIYIRSTYPFWMCVLAFAMYFFSLLLIYIRLNFLDKN

SEQ ID NO: 78783 - protein, 437 aa, Arabidopsis thaliana
  peptide (1)..(437): Ceres Seq. ID no. 12645131
MLSTGLSLSRDVASSFIDDNVGLTVGHTVFSLTIQWGACVVFSITGPRSDQADGLIEKLKILKGFVEARVEADPKNKKAAGIMLLSLSPFLMVTFSAIFDSHSWSHIIVLITLIISSSSTVVYFVYSYLDTANQEKSLDHARFELMSEVHKHLKRFSPKHLIKDGELSKESLKSLFKKTDKNKDGKIQISELKDLTIELSNFGRMRYDINELAKAFLEDFDGDNDGELEENEFEEGIARLLKQYKFNVEDQRENQTEENGVLKLEIKPKKTLVTKLLSMETLIATTEVIVGILIVLFLAKPFMLNIQLLSISAGIPSFYIVFAMIPFARNLKNTLSTRFCRGKDKKRVSSNTFSEIYKDITMNNLLGMSVILAIVYTRGLTWKYSVETLIMVIVGLIIGLPIYIRSTYPFWMCVLAFAMYFFSLLLIYIRLNFLDKN

SEQ ID NO: 78784 - DNA, 651 bp, Arabidopsis thaliana
  misc_feature (1)..(651): Ceres Seq. ID no. 12645234
  misc_feature (1)..(651): Ortholog of  Ceres SEQ ID NO 13599401 as cited in SEQ ID NO 0
atggctgcttcatcttcctctttcactctctgtaatcacaccacacttcgtactctccctctgagaaagacccttgtcaccaaaacccaattttcagttcccacaaaatcatcagaatctaacttctttggctccacactcactcactcatcgtatatctccccagtctcttcctcttctctcaaaggcttaatctttgccaaggttaacaagggtcaggctgcaccagacttcacactaaaggatcaaaacggaaagccggtgagcctcaaaaagtataaagggaagcctgttgttctctacttctaccctgcagatgaaacccctggctgcaccaagcaggcttgtgctttcagagactcttatgagaaattcaagaaagctggtgcagaggtcattggcattagtggagatgactctgcttctcacaaggcgtttgcaagcaaatacaaactaccgtatacattgttaagcgacgaagggaataaggtgagaaaagattggggagtgcctggagacctgtttggagcattgccagggagacagacttacgttcttgacaaaaacggtgttgttcagctcatctacaacaaccagttccagcctgagaaacacatcgacgagaccttgaagtttctcaaagctgcttga

SEQ ID NO: 78785 - protein, 216 aa, Arabidopsis thaliana; identical to SEQ ID NO: 77633
  peptide (1)..(216): Ceres Seq. ID no. 12645235

SEQ ID NO: 78786 - DNA, 1014 bp, Arabidopsis thaliana
  misc_feature (1)..(1014): Ceres Seq. ID no. 12645257
  misc_feature (1)..(1014): Ortholog of  Ceres SEQ ID NO 15168580 as cited in SEQ ID NO 60279
atggcgacaattcagaagcttgaagaagttgcaggcaaagatcaaactctaagagccgttgatctaaccatcatcaacggcgtcagaaacgtcgaaacttcaagacctttccaagtaaatcccacagtgagtctcgagcccaaggcggagccggtgatgccgtcgttttcaatgtctttagctccaccgtcttcgacaggaccaccattgaagagagcttcgactaaagaccgtcacacgaaggttgaaggaagagggagaaggatacggatgcctgccacgtgtgcggctaggatttttcaattaactcgagagttaggtcacaaatccgacggcgaaacgattcggtggttgttggagaacgctgagccggcgattatagccgccacgggtacgggaacggttcccgccatcgccatgtcggttaacggaaccttaaaaatcccgacgacgacgaacgctgattctgatatgggtgaaaatctgatgaagaagaaacgtaaacgaccttctaacagtgagtatatagacataagcgacgccgtttcagcttcctccggtttagctccaattcaacttctgccgcaaggaatgtatccgatgtgggctattccatcaaacgcaatgattccgacggtcggagctttcttcttgattccacaaatcgctggtccgtcgaatcagcctcagttattagcttttcccgccgccgctgcttcgccgtcgtcttacgtcgccgctgttcaacaggcttccacgatggctagaccacctcctttacaagttgttccaagcagcggctttgtatccgtttcagacgttagcggttcgaatttatcaagagcgacgtcggttatggctccgagctcaagctcaggcgtaacaaccggtagttcatcgtcaattgcaacaacaacgacgcacacgctgagagacttctccctagagatatacgagaaacaagagcttcaccagttcatgagcaccacaacagcacggtcatcgaaccactga

SEQ ID NO: 78787 - protein, 337 aa, Arabidopsis thaliana
  peptide (1)..(337): Ceres Seq. ID no. 12645258
MATIQKLEEVAGKDQTLRAVDLTIINGVRNVETSRPFQVNPTVSLEPKAEPVMPSFSMSLAPPSSTGPPLKRASTKDRHTKVEGRGRRIRMPATCAARIFQLTRELGHKSDGETIRWLLENAEPAIIAATGTGTVPAIAMSVNGTLKIPTTTNADSDMGENLMKKKRKRPSNSEYIDISDAVSASSGLAPIQLLPQGMYPMWAIPSNAMIPTVGAFFLIPQIAGPSNQPQLLAFPAAAASPSSYVAAVQQASTMARPPPLQVVPSSGFVSVSDVSGSNLSRATSVMAPSSSSGVTTGSSSSIATTTTHTLRDFSLEIYEKQELHQFMSTTTARSSNH

SEQ ID NO: 78788 - protein, 285 aa, Arabidopsis thaliana
  peptide (1)..(285): Ceres Seq. ID no. 12645259
MPSFSMSLAPPSSTGPPLKRASTKDRHTKVEGRGRRIRMPATCAARIFQLTRELGHKSDGETIRWLLENAEPAIIAATGTGTVPAIAMSVNGTLKIPTTTNADSDMGENLMKKKRKRPSNSEYIDISDAVSASSGLAPIQLLPQGMYPMWAIPSNAMIPTVGAFFLIPQIAGPSNQPQLLAFPAAAASPSSYVAAVQQASTMARPPPLQVVPSSGFVSVSDVSGSNLSRATSVMAPSSSSGVTTGSSSSIATTTTHTLRDFSLEIYEKQELHQFMSTTTARSSNH

SEQ ID NO: 78789 - protein, 280 aa, Arabidopsis thaliana
  peptide (1)..(280): Ceres Seq. ID no. 12645260
MSLAPPSSTGPPLKRASTKDRHTKVEGRGRRIRMPATCAARIFQLTRELGHKSDGETIRWLLENAEPAIIAATGTGTVPAIAMSVNGTLKIPTTTNADSDMGENLMKKKRKRPSNSEYIDISDAVSASSGLAPIQLLPQGMYPMWAIPSNAMIPTVGAFFLIPQIAGPSNQPQLLAFPAAAASPSSYVAAVQQASTMARPPPLQVVPSSGFVSVSDVSGSNLSRATSVMAPSSSSGVTTGSSSSIATTTTHTLRDFSLEIYEKQELHQFMSTTTARSSNH

SEQ ID NO: 78790 - DNA, 1572 bp, Arabidopsis thaliana
  misc_feature (1)..(1572): Ceres Seq. ID no. 12645272
  misc_feature (1)..(1572): Ortholog of  Ceres SEQ ID NO 12608463 as cited in SEQ ID NO 60238
atgagttctcacgtggttgatgatcaaaggcaacctaataactcaatctcgagtttaagttctaaactaaccaagccatggatcacaaccacaatcttcatctttgtcttcttcttcttcatcatcctcgttggagcttctctcaggtggatggacatgtttttaatcggtggaggtagaatcaaagtgacaccaatatttacaagaaacaccaacgcaactatccccaaggaaaaactcactacaccactgaacttcacattgcaatgctcactagaccagaacatagcaacccagacgtgtcctgcaagcaacccggagaaatcacaacctagtaaggacgagccagagacttgtccagactacttcaggtggatccacaaggatcttgaagcatggcgtgagactggaatcactcgagagacgttagagagagcaagtgataaagctcacttccggctgataataaaaggaggaagagtgtatgtgcatcaatacaagaaatcttttcagacaagagatgttttcactatatggggaatagtacagctgctaaggatgtatcctggtcaagtccctgatcttgagcttctcttcatgtgccatgactcacctgaaatctggagaagagactataggccaagaccaggagtcaatgtgacgtggccacctcctccactcttccactattgtggacattccggtgctttcgacattgtcttccctgactggagcttttggggctggccggagattaacataaaggagtggaataaacagtcggagttgataagtgaagggataaagaaggtgaagtgggaagagagagagccttacgcatattggaaggggaatcctggagttgccatggtcagaagagacctcatgcattgtcatgaccctatggttcatctctatcgccaggattggagcagagagggcaggattgggtataggacatcaaacctagaagatcaatgcacccacaggtacaagatttatgtagaaggaagggcttggtcagtgagtgagaagtatatattagcttgtgacagcatgactcttcttgtgaagccattttactttgacttcttcactagaagcttagttccaatggagcattattggcccataagacctcaagaaaaatgtagtgacattgtctttgctgtccattggggcaacaacaataccaaaaaggccagagctatagggagaaatggaagtgggtatgtgcgaaagaatctaaagatgaagtatgtgtatgattacatgttgcatctactgcaaagctatgggaagttgatgaagatgaatgtagaagtgcctcaaggagccaaggaagtgtgtccggagacaatggcttgtccaatcaatggaggccgaatgagacaatctatggatgactcattggttatgtctccgagcgttaaggctacttgtgagatgcctccaccttttgaagaagatgagctcaaaaagtttcttgagaagaaagaaagtgttgagaaagaagttgagaagtggactaatgagtattggcaggaacagaagaagattcttaaacattga

SEQ ID NO: 78791 - protein, 523 aa, Arabidopsis thaliana
  peptide (1)..(523): Ceres Seq. ID no. 12645273
MSSHVVDDQRQPNNSISSLSSKLTKPWITTTIFIFVFFFFIILVGASLRWMDMFLIGGGRIKVTPIFTRNTNATIPKEKLTTPLNFTLQCSLDQNIATQTCPASNPEKSQPSKDEPETCPDYFRWIHKDLEAWRETGITRETLERASDKAHFRLIIKGGRVYVHQYKKSFQTRDVFTIWGIVQLLRMYPGQVPDLELLFMCHDSPEIWRRDYRPRPGVNVTWPPPPLFHYCGHSGAFDIVFPDWSFWGWPEINIKEWNKQSELISEGIKKVKWEEREPYAYWKGNPGVAMVRRDLMHCHDPMVHLYRQDWSREGRIGYRTSNLEDQCTHRYKIYVEGRAWSVSEKYILACDSMTLLVKPFYFDFFTRSLVPMEHYWPIRPQEKCSDIVFAVHWGNNNTKKARAIGRNGSGYVRKNLKMKYVYDYMLHLLQSYGKLMKMNVEVPQGAKEVCPETMACPINGGRMRQSMDDSLVMSPSVKATCEMPPPFEEDELKKFLEKKESVEKEVEKWTNEYWQEQKKILKH

SEQ ID NO: 78792 - protein, 473 aa, Arabidopsis thaliana
  peptide (1)..(473): Ceres Seq. ID no. 12645274
MDMFLIGGGRIKVTPIFTRNTNATIPKEKLTTPLNFTLQCSLDQNIATQTCPASNPEKSQPSKDEPETCPDYFRWIHKDLEAWRETGITRETLERASDKAHFRLIIKGGRVYVHQYKKSFQTRDVFTIWGIVQLLRMYPGQVPDLELLFMCHDSPEIWRRDYRPRPGVNVTWPPPPLFHYCGHSGAFDIVFPDWSFWGWPEINIKEWNKQSELISEGIKKVKWEEREPYAYWKGNPGVAMVRRDLMHCHDPMVHLYRQDWSREGRIGYRTSNLEDQCTHRYKIYVEGRAWSVSEKYILACDSMTLLVKPFYFDFFTRSLVPMEHYWPIRPQEKCSDIVFAVHWGNNNTKKARAIGRNGSGYVRKNLKMKYVYDYMLHLLQSYGKLMKMNVEVPQGAKEVCPETMACPINGGRMRQSMDDSLVMSPSVKATCEMPPPFEEDELKKFLEKKESVEKEVEKWTNEYWQEQKKILKH

SEQ ID NO: 78793 - protein, 471 aa, Arabidopsis thaliana
  peptide (1)..(471): Ceres Seq. ID no. 12645275
MFLIGGGRIKVTPIFTRNTNATIPKEKLTTPLNFTLQCSLDQNIATQTCPASNPEKSQPSKDEPETCPDYFRWIHKDLEAWRETGITRETLERASDKAHFRLIIKGGRVYVHQYKKSFQTRDVFTIWGIVQLLRMYPGQVPDLELLFMCHDSPEIWRRDYRPRPGVNVTWPPPPLFHYCGHSGAFDIVFPDWSFWGWPEINIKEWNKQSELISEGIKKVKWEEREPYAYWKGNPGVAMVRRDLMHCHDPMVHLYRQDWSREGRIGYRTSNLEDQCTHRYKIYVEGRAWSVSEKYILACDSMTLLVKPFYFDFFTRSLVPMEHYWPIRPQEKCSDIVFAVHWGNNNTKKARAIGRNGSGYVRKNLKMKYVYDYMLHLLQSYGKLMKMNVEVPQGAKEVCPETMACPINGGRMRQSMDDSLVMSPSVKATCEMPPPFEEDELKKFLEKKESVEKEVEKWTNEYWQEQKKILKH

SEQ ID NO: 78794 - DNA, 1641 bp, Arabidopsis thaliana
  misc_feature (1)..(1641): Ceres Seq. ID no. 12645315
  misc_feature (1)..(1641): Ortholog of  Ceres SEQ ID NO 12586556 as cited in SEQ ID NO 64667
  misc_feature (1)..(1641): Ortholog of  Ceres SEQ ID NO 13660894 as cited in SEQ ID NO 67475
atgcgttttacattcctccgatcaactcggatcttccttgcgaaccatcagaaccacttatcatccttgcaaaacattagaaccattccttcttcttcttcttcacctgtagctatatcctctgtatcgaagttatctgctagcttggatcatctctctgacgtgaaacaagaacatggtttcatggtaaaacaagggatttacaattctctgtttcttcaaaacaagctcttgcaagcttacacgaaaatcagagaattcgatgatgcagataagctcttcgacgaaatgcctttgagaaatattgttacttggaacatactgattcacggggtcattcaacgagacggtgacaccaaccacagagctcatctaggtttttgttatttgagtcggattcttttcactgatgtgagtttggatcatgtgtcgttcatggggttgatacggttgtgtactgattcgaccaatatgaaagctggtatccaattacactgtctgatggtgaaacaaggtcttgaatcgagttgctttccgagtactagtctagttcatttctatgggaaatgtggtctcattgtagaagcaagacgagtttttgaggcggttttggatagagatttagtgctatggaacgctttagtttcgtcgtatgttcttaacggtatgattgatgaagcttttggtttactcaagctgatgggttctgacaaaaacagattcaggggtgattattttactttctcgagtcttctcagtgcatgcaggatcgaacaagggaagcagattcacgccattctcttcaaagtgtcatatcaattcgacattccggtggcgactgcattgctgaatatgtatgctaagagtaaccatttgagtgatgctcgggagtgttttgaatcgatggttgtgagaaatgtagtgtcttggaatgcgatgattgtaggttttgcacaaaatggagaaggaagagaagctatgagactttttgattttttgtcggtcgctaattctctgataagttcctactccaggaatggaaatttatctgaagcacttttatgttttcattcgatccgagaacctgatcttgtttcatggacttcagtgataggagctttggcttctcatggattcgcagaagaaagcttgcaaatgtttgaaagtatgctgcagaaacttcaaccagacaagatcacttttttagaggttctgtctgcttgtagccatggaggattagttcaagaagggctccgttgcttcaaacgaatgactgagttttacaagatagaagcagaggatgaacactacacgtgtctgatcgatcttcttggtcgagcaggtttcatcgacgaggcttctgatgttttaaattcaatgcccacagaaccaagcacacatgctttggcagctttcacaggaggatgtaacatccatgagaaaagagaatccatgaaatggggtgcaaagaagcttcttgaaattgaacctaccaaacctgtgaactactccatcctgtcaaacgcttatgtctctgaaggccattggaatcaagcggctctactgcgtaaaagagagaggagaaactgctacaatcccaaaactccaggttgcagttggctaggggactactcaatctag

SEQ ID NO: 78795 - protein, 546 aa, Arabidopsis thaliana
  peptide (1)..(546): Ceres Seq. ID no. 12645316
MRFTFLRSTRIFLANHQNHLSSLQNIRTIPSSSSSPVAISSVSKLSASLDHLSDVKQEHGFMVKQGIYNSLFLQNKLLQAYTKIREFDDADKLFDEMPLRNIVTWNILIHGVIQRDGDTNHRAHLGFCYLSRILFTDVSLDHVSFMGLIRLCTDSTNMKAGIQLHCLMVKQGLESSCFPSTSLVHFYGKCGLIVEARRVFEAVLDRDLVLWNALVSSYVLNGMIDEAFGLLKLMGSDKNRFRGDYFTFSSLLSACRIEQGKQIHAILFKVSYQFDIPVATALLNMYAKSNHLSDARECFESMVVRNVVSWNAMIVGFAQNGEGREAMRLFDFLSVANSLISSYSRNGNLSEALLCFHSIREPDLVSWTSVIGALASHGFAEESLQMFESMLQKLQPDKITFLEVLSACSHGGLVQEGLRCFKRMTEFYKIEAEDEHYTCLIDLLGRAGFIDEASDVLNSMPTEPSTHALAAFTGGCNIHEKRESMKWGAKKLLEIEPTKPVNYSILSNAYVSEGHWNQAALLRKRERRNCYNPKTPGCSWLGDYSI

SEQ ID NO: 78796 - protein, 485 aa, Arabidopsis thaliana
  peptide (1)..(485): Ceres Seq. ID no. 12645317
MVKQGIYNSLFLQNKLLQAYTKIREFDDADKLFDEMPLRNIVTWNILIHGVIQRDGDTNHRAHLGFCYLSRILFTDVSLDHVSFMGLIRLCTDSTNMKAGIQLHCLMVKQGLESSCFPSTSLVHFYGKCGLIVEARRVFEAVLDRDLVLWNALVSSYVLNGMIDEAFGLLKLMGSDKNRFRGDYFTFSSLLSACRIEQGKQIHAILFKVSYQFDIPVATALLNMYAKSNHLSDARECFESMVVRNVVSWNAMIVGFAQNGEGREAMRLFDFLSVANSLISSYSRNGNLSEALLCFHSIREPDLVSWTSVIGALASHGFAEESLQMFESMLQKLQPDKITFLEVLSACSHGGLVQEGLRCFKRMTEFYKIEAEDEHYTCLIDLLGRAGFIDEASDVLNSMPTEPSTHALAAFTGGCNIHEKRESMKWGAKKLLEIEPTKPVNYSILSNAYVSEGHWNQAALLRKRERRNCYNPKTPGCSWLGDYSI

SEQ ID NO: 78797 - protein, 450 aa, Arabidopsis thaliana
  peptide (1)..(450): Ceres Seq. ID no. 12645318
MPLRNIVTWNILIHGVIQRDGDTNHRAHLGFCYLSRILFTDVSLDHVSFMGLIRLCTDSTNMKAGIQLHCLMVKQGLESSCFPSTSLVHFYGKCGLIVEARRVFEAVLDRDLVLWNALVSSYVLNGMIDEAFGLLKLMGSDKNRFRGDYFTFSSLLSACRIEQGKQIHAILFKVSYQFDIPVATALLNMYAKSNHLSDARECFESMVVRNVVSWNAMIVGFAQNGEGREAMRLFDFLSVANSLISSYSRNGNLSEALLCFHSIREPDLVSWTSVIGALASHGFAEESLQMFESMLQKLQPDKITFLEVLSACSHGGLVQEGLRCFKRMTEFYKIEAEDEHYTCLIDLLGRAGFIDEASDVLNSMPTEPSTHALAAFTGGCNIHEKRESMKWGAKKLLEIEPTKPVNYSILSNAYVSEGHWNQAALLRKRERRNCYNPKTPGCSWLGDYSI

SEQ ID NO: 78798 - DNA, 1361 bp, Arabidopsis thaliana
  misc_feature (1)..(1361): Ceres Seq. ID no. 12645327
  misc_feature (1)..(1361): Ortholog of  Ceres SEQ ID NO 13532807 as cited in SEQ ID NO 53012
  misc_feature (1)..(1361): Ortholog of  Ceres SEQ ID NO 13663060 as cited in SEQ ID NO 60964
  misc_feature (1)..(1361): Ortholog of  Ceres SEQ ID NO 13656849 as cited in SEQ ID NO 65764
  misc_feature (1)..(1361): Ortholog of  Ceres SEQ ID NO 13500573 as cited in SEQ ID NO 67431
  misc_feature (1)..(1361): Ortholog of  Ceres SEQ ID NO 13656501 as cited in SEQ ID NO 69206
atggatttagtgtcttcaagagatactttaggagatccttcaacttcaacaaaagcccttcttcttggtttctctcgttctcggtctgatcattgcatcatcatgtctggagaatcaagctctggttctaccgaacattgcatcaaagttgtaccgacacacggtggccgctatgttcagtacaacgtttatggacaactctttgaagtttccagaaagtatgtccctcctattcgtcccattggtagaggcgcttgcggtattgtctgtgctgcggtgaactcagtgactggagagaaagtggctattaagaagatcggtaatgcttttgataacatcatcgatgctaagagaacgctacgtgaaattaaacttctcaggcatatggatcatgagaacgttataaccatcaaagatattgtaagacctccgcaacgagatatcttcaatgatgtctacattgtctatgagttaatggacactgatcttcagcgaatcctccgttctaaccaaacactgaccagtgatcaatgccgtttcctagtataccagctcttaagagggctcaaatacgtgcactcggccaacatattacatcgtgatctaaggccaagcaacgtgctacttaactcgaaaaacgagctaaagattggtgattttgggcttgcaagaacaacttccgacacagacttcatgactgaatatgtcgttacccgttggtacagggctcctgagttgcttcttaactgctcagagtacaccgcagctattgatatttggtctgttggctgcatactcggcgaaatcatgacgggacaaccgttgtttccaggcaaagattatgttcatcagcttaggcttataacagagcttgtaggctctccagacaattccagcctcggcttccttcgcagtgacaacgcaagaagatacgtcaggcaacttccgcgatacccgaaacaacagtttgctgctagattcccgaaaatgcccactacggctatcgatttgcttgagagaatgctcgtctttgatcctaaccggcgcatctcagtcgatgaagcccttggccatgcttacctatcaccgcaccatgatgtggccaaagaaccggtctgttcgactcctttcagctttgatttcgaacatccttcttgcacagaagaacacataaaggagcttatctacaaggagtctgtcaaattcaatcctgaccactgagagagaaacatgtttgaatgatttgattcctttttaaaagtctgctccgtttggtttgatctaagattcctttatattgaatctaaactcattttatctttgattgaataattgctatgatgatacacacatatttatcc

SEQ ID NO: 78799 - protein, 406 aa, Arabidopsis thaliana
  peptide (1)..(406): Ceres Seq. ID no. 12645328
MDLVSSRDTLGDPSTSTKALLLGFSRSRSDHCIIMSGESSSGSTEHCIKVVPTHGGRYVQYNVYGQLFEVSRKYVPPIRPIGRGACGIVCAAVNSVTGEKVAIKKIGNAFDNIIDAKRTLREIKLLRHMDHENVITIKDIVRPPQRDIFNDVYIVYELMDTDLQRILRSNQTLTSDQCRFLVYQLLRGLKYVHSANILHRDLRPSNVLLNSKNELKIGDFGLARTTSDTDFMTEYVVTRWYRAPELLLNCSEYTAAIDIWSVGCILGEIMTGQPLFPGKDYVHQLRLITELVGSPDNSSLGFLRSDNARRYVRQLPRYPKQQFAARFPKMPTTAIDLLERMLVFDPNRRISVDEALGHAYLSPHHDVAKEPVCSTPFSFDFEHPSCTEEHIKELIYKESVKFNPDH

SEQ ID NO: 78800 - protein, 372 aa, Arabidopsis thaliana; identical to SEQ ID NO: 23972
  peptide (1)..(372): Ceres Seq. ID no. 12645329

SEQ ID NO: 78801 - protein, 278 aa, Arabidopsis thaliana; identical to SEQ ID NO: 23973
  peptide (1)..(278): Ceres Seq. ID no. 12645330

SEQ ID NO: 78802 - DNA, 1806 bp, Arabidopsis thaliana
  misc_feature (1)..(1806): Ceres Seq. ID no. 12645331
  misc_feature (1)..(1806): Ortholog of  Ceres SEQ ID NO 14311557 as cited in SEQ ID NO 51432
  misc_feature (1)..(1806): Ortholog of  Ceres SEQ ID NO 13598075 as cited in SEQ ID NO 67351
atgctacgatccacttgctgcactccactttgccctttcacggcgaaacaaccttctttccttaggaaacagcaacgtattacctctgatcgcttcacctttcgcggtggtggtggtggcgatgccgccgccgtcgtctcctcctccggcctccgtgatctcgttttcgtcgtaaaccctcaaggtgctaatggtagaacagctaaagaatggaagaagttgcttcctcaccttcgatctcgtcttggtaaagactgtaatgtaagtgaattattaacatcgggtccttctcatgccattgacattacaagagaggctataagggatggtgcagatgctgtcattgcggttggaggtgatggaacacttcatgaggttgttaatggtttcttttgggaggggaaacctgtcggttatctcagtggggaagctagtcgatcgactgcacttggtctgattcccttaggtactggctcagattttgctagaacatttggttggaacaatgatccttgtgaagcagtggagcgcattgctagagggatgcgatcacggattgatgttggtgttatcgacaaggaaggaaaggatttgcattacttcatcaatgtagctgatgttcatttgagcgcaaaggcaggattttacgcttcaaaatacaagaaatttggaaacttgtgctacgtaattggtgccctacaagcgttcatgggccatcataaccaagatatgagaatcagagtcaatggaggcgaatgggaaatatatccccaggtcactgctctctgcgttggaaacgcaaaatactttggtggtggaatgaaaatcacacccaacgccatccctggaaatggaaatcttgaggttgtggttcttcaaaacttcaaatggtatgatttcgtacttaaacttcataagctgtacaacgggactcatctttcggttaacaatgtgacttcaagaagtgtacaaagcatcgaagttgaagagattacagacagtggaagtatctatgtgcagtcagatggagaacatcttggattcctacctagaaagtttcaggtgttacccggtgccatagacataatcacttctctttcctttcattccatcgccaccgttaatccaatcttctccggcgatggtggtcgttcaatcttccggactaatcgccgattcgaagcaactggagtgagttgccgaggacagaatcctactgacgagccacagacaagtaaaggacccgagccggataatgttctactcaaaatcgcttggtacggatctgagctactcggaatagctgcttctgttttccgatctccggagacttctccgattgtgacaggctttgaggttcctgttgattgttctggtcgagccgttcgtgtagctgtcgtggactcgattaaacaagactttaaacgatcctacttcgtcacaggtaatttgacgccggaggtttatgaggagaagtgtgaattcgctgatccggctggatccttcaagggtcttgctcgtttcaaaaggaattgcactaatttcggaagccttatcgagaaatccaatatgaagctcatgaaatgggagaattttgaggataaaggaattggacattggaaatttagctgtgtcatgtcgtttccatggaaacccattctttcagcaactggttacacggagtattatttcgacacagaatccgggaaaatttgcaggcacgtggagcattggaatgtccctaagattgctctgttcaaacaacttctgagacccagccgtggtttagtggggacacaaaactag

SEQ ID NO: 78803 - protein, 601 aa, Arabidopsis thaliana
  peptide (1)..(601): Ceres Seq. ID no. 12645332
MLRSTCCTPLCPFTAKQPSFLRKQQRITSDRFTFRGGGGGDAAAVVSSSGLRDLVFVVNPQGANGRTAKEWKKLLPHLRSRLGKDCNVSELLTSGPSHAIDITREAIRDGADAVIAVGGDGTLHEVVNGFFWEGKPVGYLSGEASRSTALGLIPLGTGSDFARTFGWNNDPCEAVERIARGMRSRIDVGVIDKEGKDLHYFINVADVHLSAKAGFYASKYKKFGNLCYVIGALQAFMGHHNQDMRIRVNGGEWEIYPQVTALCVGNAKYFGGGMKITPNAIPGNGNLEVVVLQNFKWYDFVLKLHKLYNGTHLSVNNVTSRSVQSIEVEEITDSGSIYVQSDGEHLGFLPRKFQVLPGAIDIITSLSFHSIATVNPIFSGDGGRSIFRTNRRFEATGVSCRGQNPTDEPQTSKGPEPDNVLLKIAWYGSELLGIAASVFRSPETSPIVTGFEVPVDCSGRAVRVAVVDSIKQDFKRSYFVTGNLTPEVYEEKCEFADPAGSFKGLARFKRNCTNFGSLIEKSNMKLMKWENFEDKGIGHWKFSCVMSFPWKPILSATGYTEYYFDTESGKICRHVEHWNVPKIALFKQLLRPSRGLVGTQN

SEQ ID NO: 78804 - protein, 420 aa, Arabidopsis thaliana
  peptide (1)..(420): Ceres Seq. ID no. 12645333
MRSRIDVGVIDKEGKDLHYFINVADVHLSAKAGFYASKYKKFGNLCYVIGALQAFMGHHNQDMRIRVNGGEWEIYPQVTALCVGNAKYFGGGMKITPNAIPGNGNLEVVVLQNFKWYDFVLKLHKLYNGTHLSVNNVTSRSVQSIEVEEITDSGSIYVQSDGEHLGFLPRKFQVLPGAIDIITSLSFHSIATVNPIFSGDGGRSIFRTNRRFEATGVSCRGQNPTDEPQTSKGPEPDNVLLKIAWYGSELLGIAASVFRSPETSPIVTGFEVPVDCSGRAVRVAVVDSIKQDFKRSYFVTGNLTPEVYEEKCEFADPAGSFKGLARFKRNCTNFGSLIEKSNMKLMKWENFEDKGIGHWKFSCVMSFPWKPILSATGYTEYYFDTESGKICRHVEHWNVPKIALFKQLLRPSRGLVGTQN

SEQ ID NO: 78805 - protein, 365 aa, Arabidopsis thaliana
  peptide (1)..(365): Ceres Seq. ID no. 12645334
MGHHNQDMRIRVNGGEWEIYPQVTALCVGNAKYFGGGMKITPNAIPGNGNLEVVVLQNFKWYDFVLKLHKLYNGTHLSVNNVTSRSVQSIEVEEITDSGSIYVQSDGEHLGFLPRKFQVLPGAIDIITSLSFHSIATVNPIFSGDGGRSIFRTNRRFEATGVSCRGQNPTDEPQTSKGPEPDNVLLKIAWYGSELLGIAASVFRSPETSPIVTGFEVPVDCSGRAVRVAVVDSIKQDFKRSYFVTGNLTPEVYEEKCEFADPAGSFKGLARFKRNCTNFGSLIEKSNMKLMKWENFEDKGIGHWKFSCVMSFPWKPILSATGYTEYYFDTESGKICRHVEHWNVPKIALFKQLLRPSRGLVGTQN

SEQ ID NO: 78806 - DNA, 642 bp, Arabidopsis thaliana
  misc_feature (1)..(642): Ceres Seq. ID no. 12645445
  misc_feature (1)..(642): Ortholog of  Ceres SEQ ID NO 15172948 as cited in SEQ ID NO 51777
  misc_feature (1)..(642): Ortholog of  Ceres SEQ ID NO 12784416 as cited in SEQ ID NO 61324
atgagtgaagaagcatatgaagaaactcaggaatcaagtcaatctcctcgtccggttccaaaactgaacgagaggattctctcaacactatccaggagatctgtagctgcacatccatggcacgaccttgagattggtcctgaagctccattggtcttcaatgtggtggttgagatcacaaagggaagcaaagtgaaatatgaactcgacaaaaagaccggtcttatcaaggttgaccggatcttgtactcctccgttgtttatccacacaattacggattcatcccacggacattgtgtgaagacaacgatcctcttgatgtccttgtccttatgcaggaaccagtgcttcccggatgtttcctccgtgctagagccattggattaatgcccatgattgatcagggagagaaagacgacaaaatcatagccgtatgtgctgatgatccagagtacaaacatttcacagacatcaaacaactcgctcctcatcgtctccaagaaatccgccgtttcttcgaagactataagaagaacgagaacaagaaagtggctgtcaacgatttcttgccatcagagagtgcacatgaagctattcaggatctatacgctgagtatattctccacacgttgaggagatga

SEQ ID NO: 78807 - protein, 213 aa, Arabidopsis thaliana
  peptide (1)..(213): Ceres Seq. ID no. 12645446
MSEEAYEETQESSQSPRPVPKLNERILSTLSRRSVAAHPWHDLEIGPEAPLVFNVVVEITKGSKVKYELDKKTGLIKVDRILYSSVVYPHNYGFIPRTLCEDNDPLDVLVLMQEPVLPGCFLRARAIGLMPMIDQGEKDDKIIAVCADDPEYKHFTDIKQLAPHRLQEIRRFFEDYKKNENKKVAVNDFLPSESAHEAIQDLYAEYILHTLRR

SEQ ID NO: 78808 - DNA, 1446 bp, Arabidopsis thaliana
  misc_feature (1)..(1446): Ceres Seq. ID no. 12645466
  misc_feature (1)..(1446): Ortholog of  Ceres SEQ ID NO 15176273 as cited in SEQ ID NO 58534
atgaagcaactggctccaatcttggccgtggtaaacttgatcctcctggttcatggagacgagagatcagcggttggagatcctgggatgaagagagacggtctcagagtggcatttgaagcttggaacttctgcaatgaggttggcttcgaagctcctcacatgggtagtcctcgagctgcagattgcttcgatttgtcatctaaatgcatcaaagcatacacagaagaccaatcaaacaaaaccaccagtggatcttccttggtgcacaaggtatcagactcggataatgagctagggattggaaagcctaaaccaggaatcatatcagaatcagcattgcataaccctgacctttacgcggtcgagaaagaactctacctaggctccctctgtcaagtctcagacaaaccaaacccatggagtttctggatggtcatgctcaaaaatggaaactacgacacaaaatctgctctttgccctaaaaacggcaaaaagatcccacctttcaatcaacccggattattcccctgtttcggcagcggttgtatgaaccaaccgacgctgaaccacggaaaaaccgagcttcagagagatggtcaaaccatgaagggatggttcaatggtacgtacgagcaaggggcagattttggaaatgggttggatgggataagttattacgaggttgtgtgggagaagagagtaggcgttggtggttgggtatttaaacataagcttaagacttcagctaagtacccatggcttatgctttaccttagagctgatgccactaaaggattctctggtggataccattatgacactagaggaatgctcaaaacacttccggagtcaccaaactttaaagtgagactaacactaaatgtaaaacaaggaggcggagccaagagtcaattctatcttctcgacatcggaagctgctggaaaaacaacggcaagccctgcgacggtgacgtaaccaccgacgttactcgttactcggagatgatcataaaccctgaaaccccactttggtgcaaccccaagagtcttcacaactgtccaccgtaccacacgtttcggaacggcaccagagttcaccgtacggaccaccggagcttcccttacgaggcttaccacgtttactgtgcgccgggaaacgccgagcatcttgagcttccggtggggacttgtgatgcttatagtaacccacaagctcaggagattcttcagcttttgcctcacccggtttggggtgaatatggatatcctacccggttgggtgatggttgggtgggtgacccgagaacttgggatcttgatgatcccggtacgattccagcgaggaggatttggacatcggtggatgttggcaccgagatttataaagaagatgaagcaattgcagaatgggatctctctgatttcgatgttcttattacttga

SEQ ID NO: 78809 - protein, 481 aa, Arabidopsis thaliana
  peptide (1)..(481): Ceres Seq. ID no. 12645467
MKQLAPILAVVNLILLVHGDERSAVGDPGMKRDGLRVAFEAWNFCNEVGFEAPHMGSPRAADCFDLSSKCIKAYTEDQSNKTTSGSSLVHKVSDSDNELGIGKPKPGIISESALHNPDLYAVEKELYLGSLCQVSDKPNPWSFWMVMLKNGNYDTKSALCPKNGKKIPPFNQPGLFPCFGSGCMNQPTLNHGKTELQRDGQTMKGWFNGTYEQGADFGNGLDGISYYEVVWEKRVGVGGWVFKHKLKTSAKYPWLMLYLRADATKGFSGGYHYDTRGMLKTLPESPNFKVRLTLNVKQGGGAKSQFYLLDIGSCWKNNGKPCDGDVTTDVTRYSEMIINPETPLWCNPKSLHNCPPYHTFRNGTRVHRTDHRSFPYEAYHVYCAPGNAEHLELPVGTCDAYSNPQAQEILQLLPHPVWGEYGYPTRLGDGWVGDPRTWDLDDPGTIPARRIWTSVDVGTEIYKEDEAIAEWDLSDFDVLIT

SEQ ID NO: 78810 - protein, 452 aa, Arabidopsis thaliana
  peptide (1)..(452): Ceres Seq. ID no. 12645468
MKRDGLRVAFEAWNFCNEVGFEAPHMGSPRAADCFDLSSKCIKAYTEDQSNKTTSGSSLVHKVSDSDNELGIGKPKPGIISESALHNPDLYAVEKELYLGSLCQVSDKPNPWSFWMVMLKNGNYDTKSALCPKNGKKIPPFNQPGLFPCFGSGCMNQPTLNHGKTELQRDGQTMKGWFNGTYEQGADFGNGLDGISYYEVVWEKRVGVGGWVFKHKLKTSAKYPWLMLYLRADATKGFSGGYHYDTRGMLKTLPESPNFKVRLTLNVKQGGGAKSQFYLLDIGSCWKNNGKPCDGDVTTDVTRYSEMIINPETPLWCNPKSLHNCPPYHTFRNGTRVHRTDHRSFPYEAYHVYCAPGNAEHLELPVGTCDAYSNPQAQEILQLLPHPVWGEYGYPTRLGDGWVGDPRTWDLDDPGTIPARRIWTSVDVGTEIYKEDEAIAEWDLSDFDVLIT

SEQ ID NO: 78811 - protein, 427 aa, Arabidopsis thaliana
  peptide (1)..(427): Ceres Seq. ID no. 12645469
MGSPRAADCFDLSSKCIKAYTEDQSNKTTSGSSLVHKVSDSDNELGIGKPKPGIISESALHNPDLYAVEKELYLGSLCQVSDKPNPWSFWMVMLKNGNYDTKSALCPKNGKKIPPFNQPGLFPCFGSGCMNQPTLNHGKTELQRDGQTMKGWFNGTYEQGADFGNGLDGISYYEVVWEKRVGVGGWVFKHKLKTSAKYPWLMLYLRADATKGFSGGYHYDTRGMLKTLPESPNFKVRLTLNVKQGGGAKSQFYLLDIGSCWKNNGKPCDGDVTTDVTRYSEMIINPETPLWCNPKSLHNCPPYHTFRNGTRVHRTDHRSFPYEAYHVYCAPGNAEHLELPVGTCDAYSNPQAQEILQLLPHPVWGEYGYPTRLGDGWVGDPRTWDLDDPGTIPARRIWTSVDVGTEIYKEDEAIAEWDLSDFDVLIT

SEQ ID NO: 78812 - DNA, 2006 bp, Arabidopsis thaliana
  misc_feature (1)..(2006): Ceres Seq. ID no. 12645474
  misc_feature (1)..(2006): Ortholog of  Ceres SEQ ID NO 13594037 as cited in SEQ ID NO 55666
  misc_feature (1)..(2006): Ortholog of  Ceres SEQ ID NO 13657707 as cited in SEQ ID NO 66407
actggcctaagtcattcaacaatttggctttaatctaataaagcctctccctctccgattaaccttaataaatccggagggatcggagagaaaaaagaaccaaaaaaaaaaaaaaacagaaaaaaaaaaatgattggaaaagttgtggtctcggtggcctccatcctcttaatagtcggagttgccataggagtcgttgccttcataaacaaaaatggcgatgctaatctgtctccccaaatgaaagcggttcaaggaatttgccagtcgacatccgacaaagcctcatgtgtcaaaactctcgagccggtcaagagcgaggacccaaacaagctgatcaaggctttcatgctcgctacaaaagacgaattaaccaaatcgtctaacttcacgggtcaaaccgaagtaaacatgggctcgagcatctcgccaaacaacaaagccgttcttgattactgcaagagagttttcatgtacgctcttgaggatctcgctaccattattgaagaaatgggtgaagatcttagccagatcgggagcaaaatcgaccagctcaaacaatggttaatcggtgtttacaattaccaaactgattgtcttgacgatatcgaagaagatgatttaagaaaggcgattggtgagggcattgcaaactccaagattctcactaccaacgctattgacatcttccacactgtcgttagcgccatggccaagattaacaacaaggttgacgacttgaagaacatgacaggcggaatccccactcccggagcccctcctgttgttgatgaatctcccgtggccgacccagatggtcctgctcgtcgtcttcttgaagacattgacgagaccggaatcccaacatgggtttcaggtgctgacaggaagctcatggctaaggctggacgtggccgtagaggcggccgcggaggcggtgctagggtcagaacgaactttgtggtggctaaggatggaagcggacagtttaagacggttcaacaagccgttgatgcttgtcctgagaataaccgaggccgatgcatcatctacatcaaggccggtctctacagagagcaagtaatcatccctaagaagaagaacaacatcttcatgtttggagatggtgcaagaaagaccgtcatttcttacaacagaagtgttgctctcagccgtggaaccaccacatccctcagtgccacagttcaggttgaatcggaaggattcatggcgaaatggatgggattcaagaacaccgccggtccaatgggacaccaagccgcggctatccgagtgaacggagaccgtgccgtgatcttcaactgcagattcgacggttatcaagacacattgtacgttaacaacggtcgtcagttctacagaaactgtgtggtctcgggaacagtagacttcatcttcggcaaatccgcaaccgtgatccaaaacacactaattgttgtccgtaaaggaagcaagggacaatacaacacggtcacagccgatggaaacgaattgggcttagggatgaaaattggtatcgtcctccaaaactgccgcatcgtgcccgacaggaaactaacgccagagagacttacggtggcgacatacttgggaaggccgtggaagaaattctcgaccaccgtgataatgagcaccgagatgggagatttgattagaccagaagggtggaagatttgggatggggaaagtttccacaagtcatgtaggtacgttgagtacaacaaccgtggaccaggagcattcgctaacagaagagttaactgggctaaggttgccaggtctgcagctgaggtcaatggcttcacagctgctaactggttaggtcctattaactggattcaagaagccaatgttcctgtcacaattggattataatttataaagcgtatatgaaaattattttagtttttaagtatatgaaaattggtgtatgaaattggtttatgaaaactttttaagaaagtctataatgtttttcctctgtt

SEQ ID NO: 78813 - protein, 588 aa, Arabidopsis thaliana; identical to SEQ ID NO: 25178
  peptide (1)..(588): Ceres Seq. ID no. 12645475

SEQ ID NO: 78814 - protein, 551 aa, Arabidopsis thaliana; identical to SEQ ID NO: 25179
  peptide (1)..(551): Ceres Seq. ID no. 12645476

SEQ ID NO: 78815 - protein, 515 aa, Arabidopsis thaliana; identical to SEQ ID NO: 25180
  peptide (1)..(515): Ceres Seq. ID no. 12645477

SEQ ID NO: 78816 - DNA, 1698 bp, Arabidopsis thaliana
  misc_feature (1)..(1698): Ceres Seq. ID no. 12645478
  misc_feature (1)..(1698): Ortholog of  Ceres SEQ ID NO 13594037 as cited in SEQ ID NO 55666
  misc_feature (1)..(1698): Ortholog of  Ceres SEQ ID NO 13657707 as cited in SEQ ID NO 66407
atgattggaaaagttgtggtctcggtggcctccatcctcttaatagttggagttgccataggagtcgttgcctacataaacaaaaatggtgatgctaatctgtctccccaaatgaaagcggtccgaggaatttgcgaggcgacttccgacaaagcctcatgtgtcaaaactctcgagccggtcaagagcgatgacccaaacaagctgatcaaggctttcatgctcgctaccagagatgctataacccaatcatcaaacttcacgggtaaaaccgaaggaaacttgggttcgggcatctcgccaaacaacaaagccgttcttgattactgcaagaaagttttcatgtacgcgcttgaggatctcagcaccattgttgaggaaatgggtgaagatcttaaccagatcgggagcaaaatcgaccagcttaaacaatggttaaccggtgtttacaattaccaaactgattgtcttgacgatatcgaagaagatgatttaagaaagactattggagagggcattgcaagctccaagattctcactagcaacgctattgacatcttccacactgtcgttagcgccatggccaagcttaacttgaaggtcgaggacttcaagaacatgacagatggtcctgctcgccgtcttcttgaagacattgacgagaccggaatcccaacatgggtttcaggtgctgacaggaagctcatgactaaggctggacgtggcagtaatgacggtggtgctaggatcagagcaacctttgtggtggctaaggacggaagtggacagtttaagactgttcaacaagccgttaatgcttgtcctgagaaaaacccaggccgttgcatcatccacatcaaggctggtatctacagagagcaagtgatcatccctaagaagaagaacaacatcttcatgttcggagatggtgcaagaaagaccgtcatttcttacaacagaagtgttaaactcagccctggaaccaccacttcccttagtggcacagtccaggttgagtccgaaggattcatggcaaaatggatcggattcaagaacaccgccggtccaatgggacaccaagctgtggctatcagagtgaacggagaccgtgccgtgatcttcaactgcaggttcgacggttaccaagacaccttgtacgtcaacaatggtcgtcagttctacagaaacattgtcgtgtcaggaacagtcgacttcatcttcggcaaatccgcaaccgtgatccaaaactcactcattgttgtccgtaaaggaaacaagggacaattcaacacggtcacagccgatggaaacgaaaagggtctagcgatgaaaatcggtatcgtcctccaaaactgtcgcatcgttcccgacaagaaactagcggcagagagattaatcgtggagtcatacttgggaaggccatggaagaaattctctaccaccgtgattatcaactccgagataggagatgtgattagaccagaaggttggaagatttgggatggggaaagtttccacaagtcatgtaggtacgttgagtacaacaaccgtggaccaggagctatcactaaccgaagagttaactgggttaagatcgccaggtctgcagctgaggtcaatgacttcactgttgctaactggttaggtcctattaactggattcaagaagccaatgttcccgtcacgcttggattataa

SEQ ID NO: 78817 - protein, 565 aa, Arabidopsis thaliana
  peptide (1)..(565): Ceres Seq. ID no. 12645479
MIGKVVVSVASILLIVGVAIGVVAYINKNGDANLSPQMKAVRGICEATSDKASCVKTLEPVKSDDPNKLIKAFMLATRDAITQSSNFTGKTEGNLGSGISPNNKAVLDYCKKVFMYALEDLSTIVEEMGEDLNQIGSKIDQLKQWLTGVYNYQTDCLDDIEEDDLRKTIGEGIASSKILTSNAIDIFHTVVSAMAKLNLKVEDFKNMTDGPARRLLEDIDETGIPTWVSGADRKLMTKAGRGSNDGGARIRATFVVAKDGSGQFKTVQQAVNACPEKNPGRCIIHIKAGIYREQVIIPKKKNNIFMFGDGARKTVISYNRSVKLSPGTTTSLSGTVQVESEGFMAKWIGFKNTAGPMGHQAVAIRVNGDRAVIFNCRFDGYQDTLYVNNGRQFYRNIVVSGTVDFIFGKSATVIQNSLIVVRKGNKGQFNTVTADGNEKGLAMKIGIVLQNCRIVPDKKLAAERLIVESYLGRPWKKFSTTVIINSEIGDVIRPEGWKIWDGESFHKSCRYVEYNNRGPGAITNRRVNWVKIARSAAEVNDFTVANWLGPINWIQEANVPVTLGL

SEQ ID NO: 78818 - protein, 528 aa, Arabidopsis thaliana
  peptide (1)..(528): Ceres Seq. ID no. 12645480
MKAVRGICEATSDKASCVKTLEPVKSDDPNKLIKAFMLATRDAITQSSNFTGKTEGNLGSGISPNNKAVLDYCKKVFMYALEDLSTIVEEMGEDLNQIGSKIDQLKQWLTGVYNYQTDCLDDIEEDDLRKTIGEGIASSKILTSNAIDIFHTVVSAMAKLNLKVEDFKNMTDGPARRLLEDIDETGIPTWVSGADRKLMTKAGRGSNDGGARIRATFVVAKDGSGQFKTVQQAVNACPEKNPGRCIIHIKAGIYREQVIIPKKKNNIFMFGDGARKTVISYNRSVKLSPGTTTSLSGTVQVESEGFMAKWIGFKNTAGPMGHQAVAIRVNGDRAVIFNCRFDGYQDTLYVNNGRQFYRNIVVSGTVDFIFGKSATVIQNSLIVVRKGNKGQFNTVTADGNEKGLAMKIGIVLQNCRIVPDKKLAAERLIVESYLGRPWKKFSTTVIINSEIGDVIRPEGWKIWDGESFHKSCRYVEYNNRGPGAITNRRVNWVKIARSAAEVNDFTVANWLGPINWIQEANVPVTLGL

SEQ ID NO: 78819 - protein, 492 aa, Arabidopsis thaliana
  peptide (1)..(492): Ceres Seq. ID no. 12645481
MLATRDAITQSSNFTGKTEGNLGSGISPNNKAVLDYCKKVFMYALEDLSTIVEEMGEDLNQIGSKIDQLKQWLTGVYNYQTDCLDDIEEDDLRKTIGEGIASSKILTSNAIDIFHTVVSAMAKLNLKVEDFKNMTDGPARRLLEDIDETGIPTWVSGADRKLMTKAGRGSNDGGARIRATFVVAKDGSGQFKTVQQAVNACPEKNPGRCIIHIKAGIYREQVIIPKKKNNIFMFGDGARKTVISYNRSVKLSPGTTTSLSGTVQVESEGFMAKWIGFKNTAGPMGHQAVAIRVNGDRAVIFNCRFDGYQDTLYVNNGRQFYRNIVVSGTVDFIFGKSATVIQNSLIVVRKGNKGQFNTVTADGNEKGLAMKIGIVLQNCRIVPDKKLAAERLIVESYLGRPWKKFSTTVIINSEIGDVIRPEGWKIWDGESFHKSCRYVEYNNRGPGAITNRRVNWVKIARSAAEVNDFTVANWLGPINWIQEANVPVTLGL

SEQ ID NO: 78820 - DNA, 780 bp, Arabidopsis thaliana
  misc_feature (1)..(780): Ceres Seq. ID no. 12645486
  misc_feature (1)..(780): Ortholog of  Ceres SEQ ID NO 13594163 as cited in SEQ ID NO 60426
atgtcgggactcagtagattggaaggcaagatcgtaattataacaggcggagccagcgggattggagccgacgccgctaggctgttcacggaccacggagctaaggtggttatagttgacgtacaagaagaactaggccaaaacgtcgcagttttgatcgggaaagacaaagctagtttttaccgttgcgatgtgacaaatgagacggaagtcgaggacgcagttaagttcaccgtcgaaaaacacggaaagctagacgttctgtttagcaacgccggagtcttggaaccactggaaagcttcctcgactttgacctcgaacggtttgaccgcataatggctgttaacgttcgcggtgcagctgcgtttatcaaacacgcggcacgagccatggtggagaaaggcacgcgtggctccatcgtttgtacgacgagcgtctcggcggagatcggtggggggcatcatggttacacggcgtctaaacacgggcttgtcggcctgattagatcggcctgtggtgatttggggaagtatgggattagagtcaatggagtcgcaccgtacgcggtggcaacgccaatgactagccacgacgaggtaacgggaaagcagttggaggattattttgacgccaagggaattctcaaggggatggtgcttaaagctagccacgttgcacaagtggctctgttcttggcttctgatgattcggcttatataagtggtcagaatttggcggtggatggtggttatactgtcgttaagccaagccgtgattaa

SEQ ID NO: 78821 - protein, 259 aa, Arabidopsis thaliana
  peptide (1)..(259): Ceres Seq. ID no. 12645487
MSGLSRLEGKIVIITGGASGIGADAARLFTDHGAKVVIVDVQEELGQNVAVLIGKDKASFYRCDVTNETEVEDAVKFTVEKHGKLDVLFSNAGVLEPLESFLDFDLERFDRIMAVNVRGAAAFIKHAARAMVEKGTRGSIVCTTSVSAEIGGGHHGYTASKHGLVGLIRSACGDLGKYGIRVNGVAPYAVATPMTSHDEVTGKQLEDYFDAKGILKGMVLKASHVAQVALFLASDDSAYISGQNLAVDGGYTVVKPSRD

SEQ ID NO: 78822 - protein, 147 aa, Arabidopsis thaliana
  peptide (1)..(147): Ceres Seq. ID no. 12645488
MAVNVRGAAAFIKHAARAMVEKGTRGSIVCTTSVSAEIGGGHHGYTASKHGLVGLIRSACGDLGKYGIRVNGVAPYAVATPMTSHDEVTGKQLEDYFDAKGILKGMVLKASHVAQVALFLASDDSAYISGQNLAVDGGYTVVKPSRD

SEQ ID NO: 78823 - protein, 129 aa, Arabidopsis thaliana
  peptide (1)..(129): Ceres Seq. ID no. 12645489
MVEKGTRGSIVCTTSVSAEIGGGHHGYTASKHGLVGLIRSACGDLGKYGIRVNGVAPYAVATPMTSHDEVTGKQLEDYFDAKGILKGMVLKASHVAQVALFLASDDSAYISGQNLAVDGGYTVVKPSRD

SEQ ID NO: 78824 - DNA, 1592 bp, Arabidopsis thaliana
  misc_feature (1)..(1592): Ceres Seq. ID no. 12645549
  misc_feature (1)..(1592): Ortholog of  Ceres SEQ ID NO 13596816 as cited in SEQ ID NO 62287
gaatacaaaaactgaaacctttctctatttatctctctatacacaacaatggcggtcttcgttttatctctactcatactctcttccttctcagccattccattcacttatgcagattctggaatgatcggagttaactacggccgtatagcagacaatcttccggcaccggagaaagtagttgagctactgaaaacacaaggaatcaaccgcatcaagctttacgacaccgagacaactgtactaaccgcactcgcgaactccggaatcaaagtcgttgtctctctccccaacgaaaacctcgcttccgccgccgcagatcagagctacaccgacacttgggttcaggacaacataaagaagtacattccagcgacggatatcgaagcaatcgccgttgggaacgaagtgttcgtcgatccgaggaacacgacgacgtatctcgttccagctatgaagaatgttcaaagctctctcgtcaagttcaatctcgacaaatccattaagatctcgtcgccgattgctttaagcgcgttggcgagttcgtatccaccgtcggctggttcgtttaaaccggagttaatcgaaccggttattaaaccgatgcttgatctcctccgcaaaacgtcgtcgcatcttatggtgaatgcttatcctttctttgcttacgcagctaacgccgataagatctcgttggattacgcgttgtttaaggagaacgccgggaatgttgattccggtaacggtttgaagtataacagtctcttagacgctcagatcgacgccgttttcgccgcaatgtccgccgttggatttaacgacgttaagcttgtggtgacagagacaggctggccttctgccggagacgagaacgagattggtgctggttcggctaacgcggcggcgtataacggcgggttagttaaaagagtgttgacgggaaacggaacgccgttaaaaccgaaggagccactaaacgtttatctgttcgctctgtttaacgagaatcagaaaacgggtccgacttctgagagaaactacgggttgttttacccaaacgagaacaaagtgtatgacgtttcgctcaacggtaagtcaacgccggtcaacgataacaaagagaaggttgttccggtgaaaccgtcgctcgtgggacagacgtggtgtgtggcgaatggtaaaacgacgaaggagaagcttcaggaaggtctcgactacgcttgtggcgaaggaggtgctgattgccgtccgattcaaccgggtgccacgtgttataatcctgaatcgttagaagctcacgcttcctacgcgttcaacagttactatcagaagaacgcacgtggagttggcacgtgtaattttggtggtgcagcgtacgtggtctcgcaacctcctaagtatgggaaatgcgagtttccaacagggcattgaaatggatatagagaagaagaggatcgtgcggatttatttacgttatttattttgatacattgttcttttgtcattcgagtatatgatttgcgtatatttatttttattattgtatatttggttggtttcatcggataaatagtcagattttctttccccct

SEQ ID NO: 78825 - protein, 460 aa, Arabidopsis thaliana
  peptide (1)..(460): Ceres Seq. ID no. 12645550
MAVFVLSLLILSSFSAIPFTYADSGMIGVNYGRIADNLPAPEKVVELLKTQGINRIKLYDTETTVLTALANSGIKVVVSLPNENLASAAADQSYTDTWVQDNIKKYIPATDIEAIAVGNEVFVDPRNTTTYLVPAMKNVQSSLVKFNLDKSIKISSPIALSALASSYPPSAGSFKPELIEPVIKPMLDLLRKTSSHLMVNAYPFFAYAANADKISLDYALFKENAGNVDSGNGLKYNSLLDAQIDAVFAAMSAVGFNDVKLVVTETGWPSAGDENEIGAGSANAAAYNGGLVKRVLTGNGTPLKPKEPLNVYLFALFNENQKTGPTSERNYGLFYPNENKVYDVSLNGKSTPVNDNKEKVVPVKPSLVGQTWCVANGKTTKEKLQEGLDYACGEGGADCRPIQPGATCYNPESLEAHASYAFNSYYQKNARGVGTCNFGGAAYVVSQPPKYGKCEFPTGH

SEQ ID NO: 78826 - protein, 435 aa, Arabidopsis thaliana
  peptide (1)..(435): Ceres Seq. ID no. 12645551
MIGVNYGRIADNLPAPEKVVELLKTQGINRIKLYDTETTVLTALANSGIKVVVSLPNENLASAAADQSYTDTWVQDNIKKYIPATDIEAIAVGNEVFVDPRNTTTYLVPAMKNVQSSLVKFNLDKSIKISSPIALSALASSYPPSAGSFKPELIEPVIKPMLDLLRKTSSHLMVNAYPFFAYAANADKISLDYALFKENAGNVDSGNGLKYNSLLDAQIDAVFAAMSAVGFNDVKLVVTETGWPSAGDENEIGAGSANAAAYNGGLVKRVLTGNGTPLKPKEPLNVYLFALFNENQKTGPTSERNYGLFYPNENKVYDVSLNGKSTPVNDNKEKVVPVKPSLVGQTWCVANGKTTKEKLQEGLDYACGEGGADCRPIQPGATCYNPESLEAHASYAFNSYYQKNARGVGTCNFGGAAYVVSQPPKYGKCEFPTGH

SEQ ID NO: 78827 - protein, 325 aa, Arabidopsis thaliana; identical to SEQ ID NO: 27713
  peptide (1)..(325): Ceres Seq. ID no. 12645552

SEQ ID NO: 78828 - DNA, 2307 bp, Arabidopsis thaliana
  misc_feature (1)..(2307): Ceres Seq. ID no. 12645616
  misc_feature (1)..(2307): Ortholog of  Ceres SEQ ID NO 13654989 as cited in SEQ ID NO 63117
  misc_feature (1)..(2307): Ortholog of  Ceres SEQ ID NO 13584744 as cited in SEQ ID NO 69137
atggactcttttttcaaaaactcatatctggacccaaaggctgtgcgtgcccagcttcctaagagggctgatcttgcggctccttctgaaccgatgaccgttgcgttagctattagtgggagcattaaaagcaagaatgtaattaagtgggcgctcaacaagtttggttctgacaaaaatgtcactttcaagctgattcacatccatccaaagattactactctacctacagcttcggggaacatagtctctatatccgaggaactagaggaagtagcggctgcttatagacaaaaagtgatgcaggagacaaaagaaactcttcttaaacctttcaagaaaatgtgcgagcggaaaaagctaaagatcgatgaaactcgttttgaatcttctttgacaaaggttgcagtagaacttcaagtgcttgaatcaaatagtgttgcagtggcgataaccaaagaggttaatcagcatttgatcagcaatcttatcattggacgctcatctcaagctgcctcctcgaggaattatgatattacagcgtcgatatcagcatctgtgtcaaacttgtgcacagtctatgttgtctcaaacggaggagtccatattcttgcaaaagacacgtcagacacggagaggaatgacacttcaatagaatctggttttgagagaacttcctccagctgttcttctggttcaggagctaactcagaggaagcaagcaagagaagtagccctgaaacatcacgtagtgtttcttggaatcctcagtttagagattttgacgagagaaaagacgctatgagttccatgtctagcaactttgaatacggaaatgttgttactccccttggacactatttcacagacaaccaggacacgcttaatgaaatttcgaagttgagagctgagcttagacacgctcatgaaatgtatgcagtggctcaagttgaaacgttggatgcttctcgtaagctaaacgagcttaagtttgaagagctaacgcttctggagcacgaaacgaaggggatagcaaaaaaggaaacagagaagtttgagcagaagagaagggaagagagagaagctgcacaaagaagagaagctgagatgaaagcaacccatgaagccaaagagaaggagaagcttgaagaaagttcccttgtggctcctaagctgcaataccaagagttcacgtgggaagaaattattaacgcaacttcatcattctctgaagatttaaagatcggaatgggagcttacggggatgtttacaaatgcaatctgcatcatacaatcgccgctgtcaaagttttgcattctgctgaaagtagtctatccaagcaattcgatcaagagctcgaaatcttgagcaagatcaggcacccgcacttggttcttcttctaggagcatgtcctgatcatggcgctctagtgtatgagtacatggaaaacggtagcttggaagatagactgttccaagtcaacgatagtcaaccaatcccgtggttcgtgcggttaagaatcgcttgggaagtcgcatcagcgcttgttttcctccacaaatcaaaaccgacaccaatcatccaccgcgatcttaagcctgctaacatcttgcttaatcacaactttgtcagcaaagtaggagatgttggtctttccacaatgatccaagctgccgacccattgtcaaccaaattcacaatgtacaagcagacaagccccgtgggaacgttatgctatatcgatcccgaatatcaacgaaccggaaggatatctccaaaatcagacgtgtatgctttcggaatgatcattctgcagcttctcactggtcaacaggctatggcactgacatatacagtagaaacagccatggagaacaacaacgacgatgagttaatacagattcttgatgaaaaagcaggtaactggccaatcgaagaaactaggcaattagctgctttagcactccagtgtacagagctccgttctaaagacaggcctgatttggaagatcagattcttccagtattggaaagcttgaagaaagtagctgataaagcaagaaactcgctttccgctgcgccaagtcaacctccaagccatttcttctgtccattacttaaggatgtgatgaaggagccatgtattgcggctgatgggtacacttatgaccggagagccatagaggagtggatggagaaccaccggacgtctccggttactaattcgccgttacaaaacgtgaaccttttgcccaatcacactctttacgcagccatcgtcgaatggagaaatagaaatcagtga

SEQ ID NO: 78829 - protein, 768 aa, Arabidopsis thaliana
  peptide (1)..(768): Ceres Seq. ID no. 12645617
MDSFFKNSYLDPKAVRAQLPKRADLAAPSEPMTVALAISGSIKSKNVIKWALNKFGSDKNVTFKLIHIHPKITTLPTASGNIVSISEELEEVAAAYRQKVMQETKETLLKPFKKMCERKKLKIDETRFESSLTKVAVELQVLESNSVAVAITKEVNQHLISNLIIGRSSQAASSRNYDITASISASVSNLCTVYVVSNGGVHILAKDTSDTERNDTSIESGFERTSSSCSSGSGANSEEASKRSSPETSRSVSWNPQFRDFDERKDAMSSMSSNFEYGNVVTPLGHYFTDNQDTLNEISKLRAELRHAHEMYAVAQVETLDASRKLNELKFEELTLLEHETKGIAKKETEKFEQKRREEREAAQRREAEMKATHEAKEKEKLEESSLVAPKLQYQEFTWEEIINATSSFSEDLKIGMGAYGDVYKCNLHHTIAAVKVLHSAESSLSKQFDQELEILSKIRHPHLVLLLGACPDHGALVYEYMENGSLEDRLFQVNDSQPIPWFVRLRIAWEVASALVFLHKSKPTPIIHRDLKPANILLNHNFVSKVGDVGLSTMIQAADPLSTKFTMYKQTSPVGTLCYIDPEYQRTGRISPKSDVYAFGMIILQLLTGQQAMALTYTVETAMENNNDDELIQILDEKAGNWPIEETRQLAALALQCTELRSKDRPDLEDQILPVLESLKKVADKARNSLSAAPSQPPSHFFCPLLKDVMKEPCIAADGYTYDRRAIEEWMENHRTSPVTNSPLQNVNLLPNHTLYAAIVEWRNRNQ

SEQ ID NO: 78830 - protein, 737 aa, Arabidopsis thaliana
  peptide (1)..(737): Ceres Seq. ID no. 12645618
MTVALAISGSIKSKNVIKWALNKFGSDKNVTFKLIHIHPKITTLPTASGNIVSISEELEEVAAAYRQKVMQETKETLLKPFKKMCERKKLKIDETRFESSLTKVAVELQVLESNSVAVAITKEVNQHLISNLIIGRSSQAASSRNYDITASISASVSNLCTVYVVSNGGVHILAKDTSDTERNDTSIESGFERTSSSCSSGSGANSEEASKRSSPETSRSVSWNPQFRDFDERKDAMSSMSSNFEYGNVVTPLGHYFTDNQDTLNEISKLRAELRHAHEMYAVAQVETLDASRKLNELKFEELTLLEHETKGIAKKETEKFEQKRREEREAAQRREAEMKATHEAKEKEKLEESSLVAPKLQYQEFTWEEIINATSSFSEDLKIGMGAYGDVYKCNLHHTIAAVKVLHSAESSLSKQFDQELEILSKIRHPHLVLLLGACPDHGALVYEYMENGSLEDRLFQVNDSQPIPWFVRLRIAWEVASALVFLHKSKPTPIIHRDLKPANILLNHNFVSKVGDVGLSTMIQAADPLSTKFTMYKQTSPVGTLCYIDPEYQRTGRISPKSDVYAFGMIILQLLTGQQAMALTYTVETAMENNNDDELIQILDEKAGNWPIEETRQLAALALQCTELRSKDRPDLEDQILPVLESLKKVADKARNSLSAAPSQPPSHFFCPLLKDVMKEPCIAADGYTYDRRAIEEWMENHRTSPVTNSPLQNVNLLPNHTLYAAIVEWRNRNQ

SEQ ID NO: 78831 - protein, 668 aa, Arabidopsis thaliana
  peptide (1)..(668): Ceres Seq. ID no. 12645619
MQETKETLLKPFKKMCERKKLKIDETRFESSLTKVAVELQVLESNSVAVAITKEVNQHLISNLIIGRSSQAASSRNYDITASISASVSNLCTVYVVSNGGVHILAKDTSDTERNDTSIESGFERTSSSCSSGSGANSEEASKRSSPETSRSVSWNPQFRDFDERKDAMSSMSSNFEYGNVVTPLGHYFTDNQDTLNEISKLRAELRHAHEMYAVAQVETLDASRKLNELKFEELTLLEHETKGIAKKETEKFEQKRREEREAAQRREAEMKATHEAKEKEKLEESSLVAPKLQYQEFTWEEIINATSSFSEDLKIGMGAYGDVYKCNLHHTIAAVKVLHSAESSLSKQFDQELEILSKIRHPHLVLLLGACPDHGALVYEYMENGSLEDRLFQVNDSQPIPWFVRLRIAWEVASALVFLHKSKPTPIIHRDLKPANILLNHNFVSKVGDVGLSTMIQAADPLSTKFTMYKQTSPVGTLCYIDPEYQRTGRISPKSDVYAFGMIILQLLTGQQAMALTYTVETAMENNNDDELIQILDEKAGNWPIEETRQLAALALQCTELRSKDRPDLEDQILPVLESLKKVADKARNSLSAAPSQPPSHFFCPLLKDVMKEPCIAADGYTYDRRAIEEWMENHRTSPVTNSPLQNVNLLPNHTLYAAIVEWRNRNQ

SEQ ID NO: 78832 - DNA, 985 bp, Arabidopsis thaliana
  misc_feature (1)..(985): Ceres Seq. ID no. 12645726
  misc_feature (1)..(985): Ortholog of  Ceres SEQ ID NO 14306809 as cited in SEQ ID NO 57963
agaacacaaacaaaaacacattgtaacattagtttaagcattaagcttctttatgtcgaataataataattctccgaccaccgtgaatcaagaaacgacgacgtctcgtgaagtctcaatcacattgcctactgatcaatctcctcaaacctcaccaggatcatcttcttctccttcaccgagaccttccggtggatcaccggcgagaagaacggcgactggattatccggcaagcactctattttcagggggattcgactacgtaacggaaaatgggtatcggagattagagagccacgtaaaacgacaagaatttggctcgggacttatccggtaccggagatggctgccgccgcttacgacgtggctgcgttagctttaaaaggacccgacgccgttttgaattttcctggtttagctttgacttacgtggctccggtttcaaactctgctgcggatataagagcggctgctagtagagcagcggagatgaagcaaccggatcagggtggggatgagaaggtattggaaccggttcaacccggcaaagaggaagaattagaagaagtgtcgtgtaactcgtgttcgttggagtttatggatgaggaagcgatgttgaatatgccgactttgttgacggagatggctgaagggatgttgatgagtccaccgagaatgatgatacatccgacgatggaagatgattcgccggagaatcatgaaggagataatctttggagttataaatgaatccattgaagctgctctcttttttattgttttccggtcgaatgagattttccccctttttttttttctttttgggtcgctgttatggaaagtcaaataggttattaatatgatatattaatatttttgaaacataatgagtttgaatttgaatttttccatttttatataaatatggtttatatgagggaaaaatagatacatatcgaagatataagaattgtttttctgctt

SEQ ID NO: 78833 - protein, 232 aa, Arabidopsis thaliana
  peptide (1)..(232): Ceres Seq. ID no. 12645727
MSNNNNSPTTVNQETTTSREVSITLPTDQSPQTSPGSSSSPSPRPSGGSPARRTATGLSGKHSIFRGIRLRNGKWVSEIREPRKTTRIWLGTYPVPEMAAAAYDVAALALKGPDAVLNFPGLALTYVAPVSNSAADIRAAASRAAEMKQPDQGGDEKVLEPVQPGKEEELEEVSCNSCSLEFMDEEAMLNMPTLLTEMAEGMLMSPPRMMIHPTMEDDSPENHEGDNLWSYK

SEQ ID NO: 78834 - protein, 135 aa, Arabidopsis thaliana
  peptide (1)..(135): Ceres Seq. ID no. 12645728
MAAAAYDVAALALKGPDAVLNFPGLALTYVAPVSNSAADIRAAASRAAEMKQPDQGGDEKVLEPVQPGKEEELEEVSCNSCSLEFMDEEAMLNMPTLLTEMAEGMLMSPPRMMIHPTMEDDSPENHEGDNLWSYK

SEQ ID NO: 78835 - DNA, 1923 bp, Arabidopsis thaliana
  misc_feature (1)..(1923): Ceres Seq. ID no. 12645774
  misc_feature (1)..(1923): Ortholog of  Ceres SEQ ID NO 13598865 as cited in SEQ ID NO 0
atgggggtggctcaagcaatggaagccctaaccgagcgagcaagtttgatgaaagagtctttgcataagagccagaccatcaccgataacatggtcggaatcttaggttctttcgatcatcgtctctcggctcttgaaaccgcaatgcgtcccacacagagtctcaaggttgtggaatttgagatctatcttctgttgaaattgaaatgtgattctggatttggtgataaaatgataagaacacattctataaggagagctcatgagaatattgacaaggcattgaaagcagctgaggttatattggatcaatttgatatctctagaaaggcggaagctaaaatattgagaggaccacatgaggatcttgaaagctatctggaagcaattgatcaactaagaggcactatcaaattcttcagcaacaacaaaatgttcaaaagtgctagtggagttattagtcatgctcacggtttactttctaaagctctatcaaagctagaagatgagttcagacagatactgcaaaactacagtaagccaatggaacctgatcgccttttcgaatgtcttccgagtaatcttcgaccatcatcagaaggtgaaggtggtggtggaaagactcatgatccccatcacaagagcttagaaaacgctatttttactgtcccaactgtcattcctccaagggttctgcctctgcttcatgacttagctcaacaaatggttcaagctggtcatcagcaacaacttttcaaatcttacagggatactcgagctgcggtgttggaacagagtttgaggaaattaggagtggagaggcttagcaaagatgatgttcagagaatgcaatgggaggtgaaactgttattcgccgcggaaaagaaaatctgcgaccaaattcttgatggtgttgagtctctcagagatcaatgttttggtgaggtcactgtaaatagtgtagctgtgctgcttagtttcggggaggctattgctaaaagcaagagatcacctgaaaaactgtttgttctgttagatatgtatgaaataatgagagagcttcagcctgagattgagttgctctttggaagcaaaccatgtgctgagatgaaagaatccgcgctgaatctgacaaagcggttagctcagacagctcaagaaacttttgctgattttgaagaagcggttgaaaaggatgctacgaaaaccgcggttatggatggaaccgttcatccacttactagctacgttataaattatgtcaagttcttgttcgattaccaaacgacgttgaggctactttttcaagagtttgatagtaaagatcctgatagcgagcttggagctgtaacaacgaggatcatgcacgctttacagaataatctggatggtaaatcgaagcagtacaaagatgtagcattaactcaacttttcctaatgaacaatgttcactatatagtgagatctgttaggaggtcagaagcaaaagatttattaggtgatgattgggttcaaatacatcgaagaattgtacaacaacatgcaaatcagtacaagagagtttcttgggcaaagattttgcagtgtctcacggttcagtcgagtgggagcggtccgatagaaaactcaaatatatcaagagcatcagtaaaagacagattcaagactttcaattctcagtttgaagagcttcaccaaagacaatgccaatggacagttccggacagcgagttgcgtgaatctcttagacttgctgttgcggaagttcttttacctgctttcagatcgtttcttaaacgttttgggccgatgatagagagtggtaagaacccccagaagtatataaggtttagtcctgaagatcttgagagaatgcttaacgagttctttgaaggcaagacatggagtgagccaaagagataa

SEQ ID NO: 78836 - protein, 640 aa, Arabidopsis thaliana
  peptide (1)..(640): Ceres Seq. ID no. 12645775
MGVAQAMEALTERASLMKESLHKSQTITDNMVGILGSFDHRLSALETAMRPTQSLKVVEFEIYLLLKLKCDSGFGDKMIRTHSIRRAHENIDKALKAAEVILDQFDISRKAEAKILRGPHEDLESYLEAIDQLRGTIKFFSNNKMFKSASGVISHAHGLLSKALSKLEDEFRQILQNYSKPMEPDRLFECLPSNLRPSSEGEGGGGKTHDPHHKSLENAIFTVPTVIPPRVLPLLHDLAQQMVQAGHQQQLFKSYRDTRAAVLEQSLRKLGVERLSKDDVQRMQWEVKLLFAAEKKICDQILDGVESLRDQCFGEVTVNSVAVLLSFGEAIAKSKRSPEKLFVLLDMYEIMRELQPEIELLFGSKPCAEMKESALNLTKRLAQTAQETFADFEEAVEKDATKTAVMDGTVHPLTSYVINYVKFLFDYQTTLRLLFQEFDSKDPDSELGAVTTRIMHALQNNLDGKSKQYKDVALTQLFLMNNVHYIVRSVRRSEAKDLLGDDWVQIHRRIVQQHANQYKRVSWAKILQCLTVQSSGSGPIENSNISRASVKDRFKTFNSQFEELHQRQCQWTVPDSELRESLRLAVAEVLLPAFRSFLKRFGPMIESGKNPQKYIRFSPEDLERMLNEFFEGKTWSEPKR

SEQ ID NO: 78837 - protein, 634 aa, Arabidopsis thaliana
  peptide (1)..(634): Ceres Seq. ID no. 12645776
MEALTERASLMKESLHKSQTITDNMVGILGSFDHRLSALETAMRPTQSLKVVEFEIYLLLKLKCDSGFGDKMIRTHSIRRAHENIDKALKAAEVILDQFDISRKAEAKILRGPHEDLESYLEAIDQLRGTIKFFSNNKMFKSASGVISHAHGLLSKALSKLEDEFRQILQNYSKPMEPDRLFECLPSNLRPSSEGEGGGGKTHDPHHKSLENAIFTVPTVIPPRVLPLLHDLAQQMVQAGHQQQLFKSYRDTRAAVLEQSLRKLGVERLSKDDVQRMQWEVKLLFAAEKKICDQILDGVESLRDQCFGEVTVNSVAVLLSFGEAIAKSKRSPEKLFVLLDMYEIMRELQPEIELLFGSKPCAEMKESALNLTKRLAQTAQETFADFEEAVEKDATKTAVMDGTVHPLTSYVINYVKFLFDYQTTLRLLFQEFDSKDPDSELGAVTTRIMHALQNNLDGKSKQYKDVALTQLFLMNNVHYIVRSVRRSEAKDLLGDDWVQIHRRIVQQHANQYKRVSWAKILQCLTVQSSGSGPIENSNISRASVKDRFKTFNSQFEELHQRQCQWTVPDSELRESLRLAVAEVLLPAFRSFLKRFGPMIESGKNPQKYIRFSPEDLERMLNEFFEGKTWSEPKR

SEQ ID NO: 78838 - protein, 624 aa, Arabidopsis thaliana
  peptide (1)..(624): Ceres Seq. ID no. 12645777
MKESLHKSQTITDNMVGILGSFDHRLSALETAMRPTQSLKVVEFEIYLLLKLKCDSGFGDKMIRTHSIRRAHENIDKALKAAEVILDQFDISRKAEAKILRGPHEDLESYLEAIDQLRGTIKFFSNNKMFKSASGVISHAHGLLSKALSKLEDEFRQILQNYSKPMEPDRLFECLPSNLRPSSEGEGGGGKTHDPHHKSLENAIFTVPTVIPPRVLPLLHDLAQQMVQAGHQQQLFKSYRDTRAAVLEQSLRKLGVERLSKDDVQRMQWEVKLLFAAEKKICDQILDGVESLRDQCFGEVTVNSVAVLLSFGEAIAKSKRSPEKLFVLLDMYEIMRELQPEIELLFGSKPCAEMKESALNLTKRLAQTAQETFADFEEAVEKDATKTAVMDGTVHPLTSYVINYVKFLFDYQTTLRLLFQEFDSKDPDSELGAVTTRIMHALQNNLDGKSKQYKDVALTQLFLMNNVHYIVRSVRRSEAKDLLGDDWVQIHRRIVQQHANQYKRVSWAKILQCLTVQSSGSGPIENSNISRASVKDRFKTFNSQFEELHQRQCQWTVPDSELRESLRLAVAEVLLPAFRSFLKRFGPMIESGKNPQKYIRFSPEDLERMLNEFFEGKTWSEPKR

SEQ ID NO: 78839 - DNA, 1224 bp, Arabidopsis thaliana
  misc_feature (1)..(1224): Ceres Seq. ID no. 12646268
  misc_feature (1)..(1224): Ortholog of  Ceres SEQ ID NO 13597376 as cited in SEQ ID NO 64002
  misc_feature (1)..(1224): Ortholog of  Ceres SEQ ID NO 13503573 as cited in SEQ ID NO 65402
  misc_feature (1)..(1224): Ortholog of  Ceres SEQ ID NO 13659615 as cited in SEQ ID NO 67248
atgctgaatttaggcagagctagaaccgggaggcaaaacagatctatgtcttttgaaggattggattttgcagacccaaagaagaacaacaattacatggggaagattgttttggtcatgacacttacagcaatgtgcattctcttgctcaaccaatccccaaccttcaataccccaagcgtgttttctcgaagtgaaccaggagttacacatgttctagtcactggtggtgcagggtatatcgggtcacatgcagctttacgccttctaaaagattcataccgtgtcaccattgtggacaatctatctcgagggaacctcggtgcagtcaagatcttgcaacaactgtttccggaacctggaaagcttcaattcatttatgctgatcttggagatgcaaatgctgttaacaaaatattttctgaaaacgcatttgacgctgtgatgcattttgctgctgttgcttattattatcacaatatcacatcgaacacattggtagttttagagacaatggctgctcatggtgtgaagactttgatatattcaagcacatgtgctacttatggagagcctgagaaaatgccaataacagaggaaactccacaggttccaatcaatccatatggaaaggctaaaaagatggcagaagatatcatcttggatttctccaagaattctattatggcagttatgatcctaagatatttcaatgtgattgggtctgatcctgagggtagactaggtgaagctccaagacctgaactcagtgagcatggacggatctctggtgcttgctttgatgctgcacgaggcatcattcccgggctgcagattaaaggaacagactacaagactgttgatgggacttgtgtacgtgattacattgatgtcaccgacttggttgatgctcatgttaaagctcttgaaaaggcgaaaccccgcaaagttggtatcttcaatgttggtaccgggaaaggtagctcggtgaaggagtttgtggaagcgtgcaaaaaggcgaccggcgttgatataaaagtcgattacttggaaagacgggcaggagattacgcagaggtttacagcgatccaagaaaaatcaaagaagagctgaattggacagctaagcacaccaatcttcaagaaagtttaaagatggcatggagatggcaaaagcttcatcgcagtggctatggatcttcttccttggtttctgcatactga

SEQ ID NO: 78840 - protein, 407 aa, Arabidopsis thaliana
  peptide (1)..(407): Ceres Seq. ID no. 12646269
MLNLGRARTGRQNRSMSFEGLDFADPKKNNNYMGKIVLVMTLTAMCILLLNQSPTFNTPSVFSRSEPGVTHVLVTGGAGYIGSHAALRLLKDSYRVTIVDNLSRGNLGAVKILQQLFPEPGKLQFIYADLGDANAVNKIFSENAFDAVMHFAAVAYYYHNITSNTLVVLETMAAHGVKTLIYSSTCATYGEPEKMPITEETPQVPINPYGKAKKMAEDIILDFSKNSIMAVMILRYFNVIGSDPEGRLGEAPRPELSEHGRISGACFDAARGIIPGLQIKGTDYKTVDGTCVRDYIDVTDLVDAHVKALEKAKPRKVGIFNVGTGKGSSVKEFVEACKKATGVDIKVDYLERRAGDYAEVYSDPRKIKEELNWTAKHTNLQESLKMAWRWQKLHRSGYGSSSLVSAY

SEQ ID NO: 78841 - protein, 392 aa, Arabidopsis thaliana
  peptide (1)..(392): Ceres Seq. ID no. 12646270
MSFEGLDFADPKKNNNYMGKIVLVMTLTAMCILLLNQSPTFNTPSVFSRSEPGVTHVLVTGGAGYIGSHAALRLLKDSYRVTIVDNLSRGNLGAVKILQQLFPEPGKLQFIYADLGDANAVNKIFSENAFDAVMHFAAVAYYYHNITSNTLVVLETMAAHGVKTLIYSSTCATYGEPEKMPITEETPQVPINPYGKAKKMAEDIILDFSKNSIMAVMILRYFNVIGSDPEGRLGEAPRPELSEHGRISGACFDAARGIIPGLQIKGTDYKTVDGTCVRDYIDVTDLVDAHVKALEKAKPRKVGIFNVGTGKGSSVKEFVEACKKATGVDIKVDYLERRAGDYAEVYSDPRKIKEELNWTAKHTNLQESLKMAWRWQKLHRSGYGSSSLVSAY

SEQ ID NO: 78842 - protein, 375 aa, Arabidopsis thaliana
  peptide (1)..(375): Ceres Seq. ID no. 12646271
MGKIVLVMTLTAMCILLLNQSPTFNTPSVFSRSEPGVTHVLVTGGAGYIGSHAALRLLKDSYRVTIVDNLSRGNLGAVKILQQLFPEPGKLQFIYADLGDANAVNKIFSENAFDAVMHFAAVAYYYHNITSNTLVVLETMAAHGVKTLIYSSTCATYGEPEKMPITEETPQVPINPYGKAKKMAEDIILDFSKNSIMAVMILRYFNVIGSDPEGRLGEAPRPELSEHGRISGACFDAARGIIPGLQIKGTDYKTVDGTCVRDYIDVTDLVDAHVKALEKAKPRKVGIFNVGTGKGSSVKEFVEACKKATGVDIKVDYLERRAGDYAEVYSDPRKIKEELNWTAKHTNLQESLKMAWRWQKLHRSGYGSSSLVSAY

SEQ ID NO: 78843 - DNA, 1329 bp, Arabidopsis thaliana
  misc_feature (1)..(1329): Ceres Seq. ID no. 12646291
  misc_feature (1)..(1329): Ortholog of  Ceres SEQ ID NO 15224517 as cited in SEQ ID NO 64862
atggaaggcgaagagaagaatgattatagaaacgaggaagaagatttcaatacaccacaacaactacaaaagaagcaaaggaaagggaaaaaaatagcaacggaaacagaggatgaaaacgaagaagacaagagagttactctcaaagtcacgcaagtcgccgagagacccgatagaatctctccgatcgtcgcctatttctctacaggatacgatccttgtaaagtagatccaaaaacaggcaagagagttcatgaaactcccaaggttactgtttacaagcataaggatgattctaagaagaggattcaggttgttgtaagtcctccaggcgcaagagttgagttcgtcggaactaattacacaggcgagcaagctgctatgcagacgaatacttatagagttggtgtttttaatagagaggctaaaactttgaggattcttcctgttgctcacaataagataatcagattggagcctagagttaaagctcaagaaacaaatgaggaagaagcttcaggaagtgctgtcgtcaaagaacttgaagaactaaaaacaggagaacgcgatcgttataatacaaaaaaagctgttactcgggataagaagaagcgtgccttatatatgggagatgatgctgcgactcagaaggtccttgatgggaaactaagtgagttaggtgttaacacagctgctcttgaaggcaccagttctactgttgcacgcaacattcctccttacaataccgctgcaacgactgcaaatgaagcttatcccttagaaaagatcattgaaaagggggattggagttttcttgaagatatttactggcttctgcaacaggaaactgaagcagcaactgaggcttaccctgtatttgtccgcaacagattgtacagattgcgagatatcaaggacgatatgaaaaagcagacggtttgtggtgctgcaacgcttctcacccatctggttaagttcaaggacagaaactcaatgaatggttacgattccgctaaagaccacaagatgccagacatcttccgtcaaaaattcaacagcatgttcaaggattctgaatcagataggatacctgttgacaagatcaaccttctgataagctacgttcttgtgctatcccttcacgtggataatttcatgaccgatccagaagacatagcaaaagatctgaggataagcacagttgagctgaggaaacattttctacagcttggctgcaaattcctgaagcagaattctactacggttgctaccttaccgacccctctcaatttcccggaggttaaccggaggcgcagggcacgaaagtga

SEQ ID NO: 78844 - protein, 442 aa, Arabidopsis thaliana; identical to SEQ ID NO: 77499
  peptide (1)..(442): Ceres Seq. ID no. 12646292

SEQ ID NO: 78845 - protein, 315 aa, Arabidopsis thaliana; identical to SEQ ID NO: 77500
  peptide (1)..(315): Ceres Seq. ID no. 12646293

SEQ ID NO: 78846 - protein, 234 aa, Arabidopsis thaliana; identical to SEQ ID NO: 77501
  peptide (1)..(234): Ceres Seq. ID no. 12646294

SEQ ID NO: 78847 - DNA, 1092 bp, Arabidopsis thaliana
  misc_feature (1)..(1092): Ceres Seq. ID no. 12646330
  misc_feature (1)..(1092): Ortholog of  Ceres SEQ ID NO 15171293 as cited in SEQ ID NO 51744
atggatcaaatcgttaacgtggatgagtttcaagagctggccaaacaggccctccctaagatgtactatgatttctacaatggaggagcagaggatcaacacactctcaatgaaaatgtccaagctttccgtagaatcatgtttaggcctagggttcttgttgatgtgagcaacatagatatgtctacaagtatgttgggttacccaatctcagctcccatcatgattgctccaacagcaatgcataagttggctcatcctaaaggagaaatcgccacagcgaaagctgcagctgcgtgtaacactatcatgatagtatcattcatgtctacttgcactattgaggaggttgcttccagttgtaacgctgttcggtttcttcaaatatatgtgtacaagagacgtgatgtaacagctcagattgtgaaaagagctgaaaaagctggattcaaggctatagttctaactgttgatgttcccagacttggtagaagggaagcagatataaagaacaaaatgatatccccacagctgaagaattttgaaggcttagtttcaaccgaagtccgacctaatgaaggttcaggggttgaagcctttgcctctagtgcatttgatgcttcgttaagctggaaggatatcgaatggttaagatctattacaaagttgccaattctggtcaaagggttactcacacgtgaagacgctcttaaggctgttgaagccggtgtagatggaatagtggtatccaaccacggggctcgccagctcgactattccccggctacgataactgttttagaagaggttgttcatgctgtgaaaggtaggattccggttttgcttgatggaggagtaagacgaggaacagatgttttcaaagcgctggcgctcggagcacaagctgttcttatagggaggcctatagtctatgggcttgcagctaagggtgaagatggagtgaaaaaagtgattgatatgctgaaaaatgagtttgagattactatggccctttctggctgtccaaccattgatgacgtaaccagaaaccatgttaggacagagaatgagagaattaaatctatgctctga

SEQ ID NO: 78848 - protein, 363 aa, Arabidopsis thaliana; identical to SEQ ID NO: 41959
  peptide (1)..(363): Ceres Seq. ID no. 12646331

SEQ ID NO: 78849 - protein, 343 aa, Arabidopsis thaliana; identical to SEQ ID NO: 41960
  peptide (1)..(343): Ceres Seq. ID no. 12646332

SEQ ID NO: 78850 - protein, 317 aa, Arabidopsis thaliana; identical to SEQ ID NO: 41961
  peptide (1)..(317): Ceres Seq. ID no. 12646333

SEQ ID NO: 78851 - DNA, 1152 bp, Arabidopsis thaliana
  misc_feature (1)..(1152): Ceres Seq. ID no. 12646348
  misc_feature (1)..(1152): Ortholog of  Ceres SEQ ID NO 14314312 as cited in SEQ ID NO 57283
atggaggacgatgaagacatccgatctcagggttccgattcacctgatccgtcttcctccccgccggcgggacgaatcacggttacggtggcttcggcaggtccgccttcttattctctgactcctccgggtaattcgtcgcagaaggatccggatgcgttggctctggcgctgcttccgattcaggccagcggtggagggaataacagcagtgggagaccaaccggcggcggcgggagggaggattgttggagcgaagcagctacggctgtgttgattgatgcgtggggtgagagatacttggagcttagcagagggaatctgaagcagaagcactggaaagaggtggctgagattgtgagcagcagagaggattacggtaaaattcccaaaactgatatacagtgtaagaataggatcgatacggtgaagaagaagtataaacaagagaaggtgagaatcgctaacggcggtggccgtagcagatgggtgttcttcgacaagcttgaccgtctgattggatcaacggcgaagatcccgacggcaacttctggagtcagcggtcctgtcggaggattgcataagattcctatgggtattccaatgggaagtcgttcgaatctgtaccatcagcaagctaagcaaggtaggacactgccacagcaacagcagcaagggatgatggtgaaaaggtgtagtgagtcgaaacgctggcgtttcaggaagaggaacgcttctgattcagactcggaatctgaagcagcaatgtcagatgattccggtgacagtttaccacctcctcctctgtcgaagaggatgaagacggaggagaagaagaagcaagatggtgatggagtggggaacaaatggagggagctgactcgggcaatcatgagattcggtgaagcttatgagcaaacagagaatgcgaaactgcaacaggtggttgagatggagaaagagaggatgaagttcttgaaggagcttgagttgcagagaatgcagttctttgtgaagactcaattggagatatcacaacttaagcagcaacatgggaggagaatgggaaacaccagtaatgatcatcatcacagccgcaagaacaacatcaatgcgattgtcaacaacaacaacgatttgggtaataactag

SEQ ID NO: 78852 - protein, 383 aa, Arabidopsis thaliana
  peptide (1)..(383): Ceres Seq. ID no. 12646349
MEDDEDIRSQGSDSPDPSSSPPAGRITVTVASAGPPSYSLTPPGNSSQKDPDALALALLPIQASGGGNNSSGRPTGGGGREDCWSEAATAVLIDAWGERYLELSRGNLKQKHWKEVAEIVSSREDYGKIPKTDIQCKNRIDTVKKKYKQEKVRIANGGGRSRWVFFDKLDRLIGSTAKIPTATSGVSGPVGGLHKIPMGIPMGSRSNLYHQQAKQGRTLPQQQQQGMMVKRCSESKRWRFRKRNASDSDSESEAAMSDDSGDSLPPPPLSKRMKTEEKKKQDGDGVGNKWRELTRAIMRFGEAYEQTENAKLQQVVEMEKERMKFLKELELQRMQFFVKTQLEISQLKQQHGRRMGNTSNDHHHSRKNNINAIVNNNNDLGNN

SEQ ID NO: 78853 - DNA, 1122 bp, Arabidopsis thaliana
  misc_feature (1)..(1122): Ceres Seq. ID no. 12646354
  misc_feature (1)..(1122): Ortholog of  Ceres SEQ ID NO 13582301 as cited in SEQ ID NO 56509
  misc_feature (1)..(1122): Ortholog of  Ceres SEQ ID NO 13597380 as cited in SEQ ID NO 64054
  misc_feature (1)..(1122): Ortholog of  Ceres SEQ ID NO 12625474 as cited in SEQ ID NO 64169
  misc_feature (1)..(1122): Ortholog of  Ceres SEQ ID NO 13597502 as cited in SEQ ID NO 64681
atggcaagtcctagatttaattccatcatcatcatcttattcatctgcactataagcttatcgatcgtctcgatttcttgcaaagaagatcttaaaacgaaccaagccgccttgtttgcgtttggagattctctgtttgaagccggaaacaataattacttcgactctatctcaagtttccgatcaaatttctggccgtatggtaaaacaacgttcaagtttccaacgggacgggtctctgatggacgaataatgatagattttattgctgaatacgcatggttaccgttgatcccgccaaatctacaacctggttacagtaacagtcaactaacctatggacttaatttcgctactacagccgccggagttttcgccggaacttttcccggatcgtcgaaagatttgggaacacagttaaacaacttcaagaacgtggagaaaacgttgaggtctaatttaggagatgcagaggcgaggagagtaatctcgaaagctgtttatctttttcacataggagcaaatgactatcaatacccattctttgcaaatacctcaacttttagtaacactaccaaagaaagattcatcgatttcgtcatcggtaacacaacgactgtaatcgaggagttgtataaattaggagcaaggaaattcggattcttgagcttgggtccatttggttgtacaccaagcgcattgataataaacagtacaaagataggatcttgtttcgagccagtcacagagctgatcaatctccataaccaagaatttccaaaagtcttgaggcgtctagagcgccggttatccggattcaaatacgctcttcatgactttcacacttctctatcccaaagaatcaacaatccttctcgttacggttttaaggaaggggagatggcatgttgcgggagtgggccgttgaggggaatcaatacatgtggattccgaaatggaccatcgcaaggttacaagctatgcgaaaacgctgatgattacgtcttctttgatccttctcatttgacggaaacggctcatcaacagatcgctgagctgatttggagcggaccacctaatgtcactgcaccttacaatcttaaaacattgttcagactctag

SEQ ID NO: 78854 - protein, 373 aa, Arabidopsis thaliana
  peptide (1)..(373): Ceres Seq. ID no. 12646355
MASPRFNSIIIILFICTISLSIVSISCKEDLKTNQAALFAFGDSLFEAGNNNYFDSISSFRSNFWPYGKTTFKFPTGRVSDGRIMIDFIAEYAWLPLIPPNLQPGYSNSQLTYGLNFATTAAGVFAGTFPGSSKDLGTQLNNFKNVEKTLRSNLGDAEARRVISKAVYLFHIGANDYQYPFFANTSTFSNTTKERFIDFVIGNTTTVIEELYKLGARKFGFLSLGPFGCTPSALIINSTKIGSCFEPVTELINLHNQEFPKVLRRLERRLSGFKYALHDFHTSLSQRINNPSRYGFKEGEMACCGSGPLRGINTCGFRNGPSQGYKLCENADDYVFFDPSHLTETAHQQIAELIWSGPPNVTAPYNLKTLFRL

SEQ ID NO: 78855 - protein, 289 aa, Arabidopsis thaliana
  peptide (1)..(289): Ceres Seq. ID no. 12646356
MIDFIAEYAWLPLIPPNLQPGYSNSQLTYGLNFATTAAGVFAGTFPGSSKDLGTQLNNFKNVEKTLRSNLGDAEARRVISKAVYLFHIGANDYQYPFFANTSTFSNTTKERFIDFVIGNTTTVIEELYKLGARKFGFLSLGPFGCTPSALIINSTKIGSCFEPVTELINLHNQEFPKVLRRLERRLSGFKYALHDFHTSLSQRINNPSRYGFKEGEMACCGSGPLRGINTCGFRNGPSQGYKLCENADDYVFFDPSHLTETAHQQIAELIWSGPPNVTAPYNLKTLFRL

SEQ ID NO: 78856 - DNA, 2645 bp, Arabidopsis thaliana
  misc_feature (1)..(2645): Ceres Seq. ID no. 12646359
  misc_feature (1)..(2645): Ortholog of  Ceres SEQ ID NO 15176095 as cited in SEQ ID NO 59699
acacactagggaaaccacagttctcttctatcctctctttctccgcttctgtagcaatgtcaatgtggtaccctctaccttcttcttcttcctccactcactaaccaaatccagaatcaacaataatagaaaaagccctaactttctccgtcgatggctttcttcttctactttttcttcctcttgactctttcttctccttcttcttctgcttcctcttcaaactccttgacttacatcgtccacgtcgaccacgaagctaaaccctcaatcttccccactcattttcactggtacacttcctctcttgcctcactcacctcttctcctccctccattatccacacatacgacaccgttttccatggcttctccgctagactcacttcacaagacgctagtcaactcttagaccatcctcatgtcatctctgttatcccggaacaagtccgtcacttgcacaccactcgttcccctgagtttcttggtcttaggtccaccgacaaagcgggtctactcgaagagtctgatttcgggtcggatctagttatcggagttatcgatactggtgtttggcccgaaagacctagctttgatgaccgtggtcttggtcctgttcccattaaatggaaaggccaatgtatcgcttcccaagattttccggagtctgcttgtaaccgtaaactcgtcggagctagattcttctgcggtgggtatgaagcaaccaacgggaaaatgaatgaaacgactgagtttcgctctccgcgtgactccgatggacatgggactcacacagcttcaatctccgccggccgttacgtttttccggcgtcaactctcggctacgctcacggcgtcgctgctgggatggctccaaaagctagactcgccgcttacaaagtctgttggaactccggttgttacgactccgatatcttagccgctttcgacaccgccgttgccgacggtgtcgatgtcatctctctctccgttggaggcgtcgtggttccttattacctagacgctatcgctattggagcttttggagctattgacagaggcatattcgtctctgcttccgccggtaacggaggtcccggtgctttaacggtgacaaatgttgctccgtggatgacaacagtcggagctggaacaatcgatagggattttccggccaatgtgaaactcggtaacgggaagatgatttctggtgttagtgtatacggtggaccgggtctggatccgggtcgaatgtacccgcttgtttacggtggtagtttactaggcggcgatggttactcatcgtctctgtgtcttgaaggctcgttggatccgaatttagtgaagggaaagatcgttctttgtgatagaggaatcaattctagagcaaccaaaggtgagatcgtacggaaaaatggaggcttggggatgattatagcgaatggtgtgtttgacggtgaaggtttagtagctgattgccacgtgttaccggcgacatctgttggtgcttctggaggagatgagattcgtaggtatatctctgaatcatccaaatctcgttcatcgaaacatccaacggctacgattgttttcaaaggtacccgacttgggatccgacctgcaccggttgttgcatctttctctgctcgtggtcctaatccagagacgccggagattcttaaaccggatgtaatcgcacctggtttgaatattctagctgcttggcctgaccggattggtccatctggtgttacttctgataaccggagaactgagttcaacattttatcaggcacttcgatggcgtgcccgcacgtgtctggtctagctgctttgcttaaggcggctcatccggattggagtccggcggcgataagatcagcattgataaccacggcttacacggttgataacagcggtgagccgatgatggatgagtccactggcaatacatcttcggttatggattatggttcgggtcatgttcacccaaccaaagctatggatccgggattagtctatgatataacatcttatgattatatcaacttcttgtgtaattctaactacactagaaccaacattgtgacaataacccgtcgccaagcggactgtgacggtgcaagacgagcgggacacgtcgggaatttaaactacccgtcgttctctgtcgtgtttcagcagtatggagagagtaaaatgtcgacacatttcattaggactgtgacaaatgtaggcgattcggattcggtttacgagattaagattaggccgcctagagggactacggtgacggttgagccggagaagctatcgttcagacgggtggggcagaaactgagttttgttgttagggttaagaccacagaggtgaagttgtcaccaggagcgacaaatgtggagactggtcatatagtttggtcagatgggaaacggaatgtgacaagtcccttggtggtcactcttcaacaacctctttgaaggggtttaggatctggtgaccgggaaaattctggtctctgtttgttgtactagtgaaaaagaaagatcataagttgttgttgttgtcgtctatgatctttgttggtgtaatataaatatgtatcttttgttttgttgttaagaaagatagagcgtctaaagaa

SEQ ID NO: 78857 - protein, 775 aa, Arabidopsis thaliana
  peptide (1)..(775): Ceres Seq. ID no. 12646360
MAFFFYFFFLLTLSSPSSSASSSNSLTYIVHVDHEAKPSIFPTHFHWYTSSLASLTSSPPSIIHTYDTVFHGFSARLTSQDASQLLDHPHVISVIPEQVRHLHTTRSPEFLGLRSTDKAGLLEESDFGSDLVIGVIDTGVWPERPSFDDRGLGPVPIKWKGQCIASQDFPESACNRKLVGARFFCGGYEATNGKMNETTEFRSPRDSDGHGTHTASISAGRYVFPASTLGYAHGVAAGMAPKARLAAYKVCWNSGCYDSDILAAFDTAVADGVDVISLSVGGVVVPYYLDAIAIGAFGAIDRGIFVSASAGNGGPGALTVTNVAPWMTTVGAGTIDRDFPANVKLGNGKMISGVSVYGGPGLDPGRMYPLVYGGSLLGGDGYSSSLCLEGSLDPNLVKGKIVLCDRGINSRATKGEIVRKNGGLGMIIANGVFDGEGLVADCHVLPATSVGASGGDEIRRYISESSKSRSSKHPTATIVFKGTRLGIRPAPVVASFSARGPNPETPEILKPDVIAPGLNILAAWPDRIGPSGVTSDNRRTEFNILSGTSMACPHVSGLAALLKAAHPDWSPAAIRSALITTAYTVDNSGEPMMDESTGNTSSVMDYGSGHVHPTKAMDPGLVYDITSYDYINFLCNSNYTRTNIVTITRRQADCDGARRAGHVGNLNYPSFSVVFQQYGESKMSTHFIRTVTNVGDSDSVYEIKIRPPRGTTVTVEPEKLSFRRVGQKLSFVVRVKTTEVKLSPGATNVETGHIVWSDGKRNVTSPLVVTLQQPL

SEQ ID NO: 78858 - protein, 581 aa, Arabidopsis thaliana
  peptide (1)..(581): Ceres Seq. ID no. 12646361
MNETTEFRSPRDSDGHGTHTASISAGRYVFPASTLGYAHGVAAGMAPKARLAAYKVCWNSGCYDSDILAAFDTAVADGVDVISLSVGGVVVPYYLDAIAIGAFGAIDRGIFVSASAGNGGPGALTVTNVAPWMTTVGAGTIDRDFPANVKLGNGKMISGVSVYGGPGLDPGRMYPLVYGGSLLGGDGYSSSLCLEGSLDPNLVKGKIVLCDRGINSRATKGEIVRKNGGLGMIIANGVFDGEGLVADCHVLPATSVGASGGDEIRRYISESSKSRSSKHPTATIVFKGTRLGIRPAPVVASFSARGPNPETPEILKPDVIAPGLNILAAWPDRIGPSGVTSDNRRTEFNILSGTSMACPHVSGLAALLKAAHPDWSPAAIRSALITTAYTVDNSGEPMMDESTGNTSSVMDYGSGHVHPTKAMDPGLVYDITSYDYINFLCNSNYTRTNIVTITRRQADCDGARRAGHVGNLNYPSFSVVFQQYGESKMSTHFIRTVTNVGDSDSVYEIKIRPPRGTTVTVEPEKLSFRRVGQKLSFVVRVKTTEVKLSPGATNVETGHIVWSDGKRNVTSPLVVTLQQPL

SEQ ID NO: 78859 - protein, 537 aa, Arabidopsis thaliana
  peptide (1)..(537): Ceres Seq. ID no. 12646362
MAPKARLAAYKVCWNSGCYDSDILAAFDTAVADGVDVISLSVGGVVVPYYLDAIAIGAFGAIDRGIFVSASAGNGGPGALTVTNVAPWMTTVGAGTIDRDFPANVKLGNGKMISGVSVYGGPGLDPGRMYPLVYGGSLLGGDGYSSSLCLEGSLDPNLVKGKIVLCDRGINSRATKGEIVRKNGGLGMIIANGVFDGEGLVADCHVLPATSVGASGGDEIRRYISESSKSRSSKHPTATIVFKGTRLGIRPAPVVASFSARGPNPETPEILKPDVIAPGLNILAAWPDRIGPSGVTSDNRRTEFNILSGTSMACPHVSGLAALLKAAHPDWSPAAIRSALITTAYTVDNSGEPMMDESTGNTSSVMDYGSGHVHPTKAMDPGLVYDITSYDYINFLCNSNYTRTNIVTITRRQADCDGARRAGHVGNLNYPSFSVVFQQYGESKMSTHFIRTVTNVGDSDSVYEIKIRPPRGTTVTVEPEKLSFRRVGQKLSFVVRVKTTEVKLSPGATNVETGHIVWSDGKRNVTSPLVVTLQQPL

SEQ ID NO: 78860 - DNA, 1529 bp, Arabidopsis thaliana
  misc_feature (1)..(1529): Ceres Seq. ID no. 12646380
  misc_feature (1)..(1529): Ortholog of  Ceres SEQ ID NO 15171293 as cited in SEQ ID NO 51744
aacttgccaataattttttcaactgttacagattactacatcaacgaaatattaaacatttaaccatatataaaagttggagatatatgatataagcttttcttagcagtcccacccttcctctctcgagagagctccattccaatcaaagctgtaaacacacttcagaagatggagatcactaacgttaccgagtatgatgcaatcgcaaaggcgaagttgcctaagatggtatatgactactatgcatctggtgcagaagatcaatggactcttcaagagaacagaaacgcttttgcaagaatcctcttccggcctcggattttgattgatgtgaacaaaattgatatggcgactaccgtcttggggttcaagatctcgatgccgatcatggttgctcctactgcctttcaaaagatggctcaccctgatggggaatatgctacggctagagctgcgtctgctgctggaaccatcatgacactatcttcatgggctacttcaagtgttgaagaagttgcttccacagggccaggaatccgattcttccagctctatgtatacaagaacaggaaggtggttgagcagctcgtgagaagagccgagaaagctgggttcaaagccattgctctcactgtagacaccccaaggctaggtcgcagagagtctgatatcaagaacagattcactttgcctccaaacctgacattgaagaactttgaaggtcttgaccttggaaagatggacgaggccaatgactctggcttggcttcgtatgttgctggtcaaattgaccgtaccttgagctggaaggatatccagtggctccaaacaatcaccaacatgccaattcttgtcaagggtgttcttacaggagaggatgcaaggatagcgattcaagctggagcagcagggatcattgtgtcaaatcatggagctcgccagcttgattatgtcccagcaacaatctcagcccttgaagaggttgtcaaagcaacacaaggacgagttcctgtcttcttggatggtggtgttcgacgtggcactgatgtcttcaaggcacttgcacttggagcctctggaatatttattggaagaccagtggtttttgcactagctgctgaaggagaagccggagtcaaaaaggtgcttcaaatgttgcgtgatgagttcgagctaaccatggcactaagtgggtgccggtcactcagtgaaatcacccgtaaccacattgtcacggaatgggacactccacgccatttgcccaggttatagagaagaaaaaaaaaacagagaacagaaacaacacggcaccaaaacgtattcatattctgattgatcactttgcttctactctgctatatttatatctcgaaaaacttgtttctccctatatcggatcacaaaaacgtgcgtagagattctctgtaatgctatttggctacattttacctttccgtttattcttattgcttgtacaatagatgttgattcctacaataccaatgaatactaaaatctgttcccgg

SEQ ID NO: 78861 - protein, 367 aa, Arabidopsis thaliana; identical to SEQ ID NO: 35825
  peptide (1)..(367): Ceres Seq. ID no. 12646381

SEQ ID NO: 78862 - protein, 348 aa, Arabidopsis thaliana; identical to SEQ ID NO: 35826
  peptide (1)..(348): Ceres Seq. ID no. 12646382

SEQ ID NO: 78863 - protein, 308 aa, Arabidopsis thaliana; identical to SEQ ID NO: 35827
  peptide (1)..(308): Ceres Seq. ID no. 12646383

SEQ ID NO: 78864 - DNA, 1986 bp, Arabidopsis thaliana
  misc_feature (1)..(1986): Ceres Seq. ID no. 12646418
  misc_feature (1)..(1986): Ortholog of  Ceres SEQ ID NO 15226209 as cited in SEQ ID NO 0
atggatgaatcaaatgagataatcttgcagaaatcaaagaggttgacatctgttgtctggaattactttgagagagtgagaaaggctgatgtgtgctatgctgtttgcattcagtgtaataaaaaactcagtggttcgagcaacagcggaacaactcatcttcggaaccatcttatgcggtgtctcaaaagaactaatcacgacatgtctcagttgctgacacctaaaagaaggaaaaaagagaatccagttactgttgctactatcaattttgatgacggtcaagcgaaagaagagtatcttagacctaagtttgatcaggaccaacgaagggacgaggtggttctaagccgaggaagtggtggaaggtttagtcaagaaaggagtcaggttgatcttgcacgtatgattattttgcacaattatccgttagccatggttgatcatgttggattcaaagtttttgctaggaatcttcagccgttgtttgaagctgtgccaaatagcacaattgaggattcatgtatggagatttacattagggagaagcagagagtgcagcacactttgaatcatttatacggtaaagtcaatctttcggtggagatgtggtcttcccgggataattctaactatgtgtgtttggcctctaattatatcgatgaggagtggaggctacataggaatgttctaaactttatcaccttggatccttctcatactgaagatatgctctcggaagtgatcatcagatgtttgattgaatggagtcttgagaacaagcttttcgctgttacgttcgacagtgtttctgttaatgaagagattgtcctgcgaattaaagaccatatgtctcagagcagccagatattaatcaacgggcagttatttgagttgaaatctgccgctcatcttctgaattctcttgtcgaagattgcttggaggctatgagagatgtgatccaaaagattcgaggaagtgtgagatatgtcaagagctcgcaatcaacacaagtaaggttcaacgaaattgctcaactcgccggaatcaactcccagaagatcttggttcttgattctattgttaactcgaactctacgttcgtgatgcttgaaaccgtattggagtacaagggtgcgttttgccatctgcgtgatcacgatcacagctttgattcatctctaaccgacgaggagtgggaatggacaagatacgttactggttatcttaaacttgtattcgatattgcctctgacttttcagcaaacaaatgtcctacagcaaatgtatactttgctgagatgtgtgatatccacatccagttggtcgagtggtgcaagaaccaggacaacttcttgagttctctcgcagcaaatatgaaggctaaattcgatgagtattggaacaaatgcagccttgttttagcaatcgctgcgatattggatccgcgattcaagatgaagttggtagagtattactactctaagatctatggcagtaccgctctggatcgtatcaaggaagtgtcgaatggtgtcaaggagcttcttgatgcatattcgatgtgctcagccattgtcggtgaagattccttctctggatccggtttaggtagagctagtatggacactagagacagactgaaagggttcgacaagtttcttcacgagacttctcagaaccaaaacacaacaacggatttggacaagtacttgtctgaaccgatctttccccgtagtggcgagttcaacattctgaattactggaaggtccatacaccaagataccctatcctctctttgttggcccgtgacattttgggtacgccgatgtcaatctgtgcgcctgattcaaccttcaactctgggacaccggtgatctctgatagtcagagttccttgaaccctgatatcagacaggctttgttctgtgcacatgactggttgtctacagaaacagagggtacaatctcaaactctatttaa

SEQ ID NO: 78865 - protein, 661 aa, Arabidopsis thaliana
  peptide (1)..(661): Ceres Seq. ID no. 12646419
MDESNEIILQKSKRLTSVVWNYFERVRKADVCYAVCIQCNKKLSGSSNSGTTHLRNHLMRCLKRTNHDMSQLLTPKRRKKENPVTVATINFDDGQAKEEYLRPKFDQDQRRDEVVLSRGSGGRFSQERSQVDLARMIILHNYPLAMVDHVGFKVFARNLQPLFEAVPNSTIEDSCMEIYIREKQRVQHTLNHLYGKVNLSVEMWSSRDNSNYVCLASNYIDEEWRLHRNVLNFITLDPSHTEDMLSEVIIRCLIEWSLENKLFAVTFDSVSVNEEIVLRIKDHMSQSSQILINGQLFELKSAAHLLNSLVEDCLEAMRDVIQKIRGSVRYVKSSQSTQVRFNEIAQLAGINSQKILVLDSIVNSNSTFVMLETVLEYKGAFCHLRDHDHSFDSSLTDEEWEWTRYVTGYLKLVFDIASDFSANKCPTANVYFAEMCDIHIQLVEWCKNQDNFLSSLAANMKAKFDEYWNKCSLVLAIAAILDPRFKMKLVEYYYSKIYGSTALDRIKEVSNGVKELLDAYSMCSAIVGEDSFSGSGLGRASMDTRDRLKGFDKFLHETSQNQNTTTDLDKYLSEPIFPRSGEFNILNYWKVHTPRYPILSLLARDILGTPMSICAPDSTFNSGTPVISDSQSSLNPDIRQALFCAHDWLSTETEGTISNSI

SEQ ID NO: 78866 - protein, 603 aa, Arabidopsis thaliana
  peptide (1)..(603): Ceres Seq. ID no. 12646420
MRCLKRTNHDMSQLLTPKRRKKENPVTVATINFDDGQAKEEYLRPKFDQDQRRDEVVLSRGSGGRFSQERSQVDLARMIILHNYPLAMVDHVGFKVFARNLQPLFEAVPNSTIEDSCMEIYIREKQRVQHTLNHLYGKVNLSVEMWSSRDNSNYVCLASNYIDEEWRLHRNVLNFITLDPSHTEDMLSEVIIRCLIEWSLENKLFAVTFDSVSVNEEIVLRIKDHMSQSSQILINGQLFELKSAAHLLNSLVEDCLEAMRDVIQKIRGSVRYVKSSQSTQVRFNEIAQLAGINSQKILVLDSIVNSNSTFVMLETVLEYKGAFCHLRDHDHSFDSSLTDEEWEWTRYVTGYLKLVFDIASDFSANKCPTANVYFAEMCDIHIQLVEWCKNQDNFLSSLAANMKAKFDEYWNKCSLVLAIAAILDPRFKMKLVEYYYSKIYGSTALDRIKEVSNGVKELLDAYSMCSAIVGEDSFSGSGLGRASMDTRDRLKGFDKFLHETSQNQNTTTDLDKYLSEPIFPRSGEFNILNYWKVHTPRYPILSLLARDILGTPMSICAPDSTFNSGTPVISDSQSSLNPDIRQALFCAHDWLSTETEGTISNSI

SEQ ID NO: 78867 - protein, 593 aa, Arabidopsis thaliana
  peptide (1)..(593): Ceres Seq. ID no. 12646421
MSQLLTPKRRKKENPVTVATINFDDGQAKEEYLRPKFDQDQRRDEVVLSRGSGGRFSQERSQVDLARMIILHNYPLAMVDHVGFKVFARNLQPLFEAVPNSTIEDSCMEIYIREKQRVQHTLNHLYGKVNLSVEMWSSRDNSNYVCLASNYIDEEWRLHRNVLNFITLDPSHTEDMLSEVIIRCLIEWSLENKLFAVTFDSVSVNEEIVLRIKDHMSQSSQILINGQLFELKSAAHLLNSLVEDCLEAMRDVIQKIRGSVRYVKSSQSTQVRFNEIAQLAGINSQKILVLDSIVNSNSTFVMLETVLEYKGAFCHLRDHDHSFDSSLTDEEWEWTRYVTGYLKLVFDIASDFSANKCPTANVYFAEMCDIHIQLVEWCKNQDNFLSSLAANMKAKFDEYWNKCSLVLAIAAILDPRFKMKLVEYYYSKIYGSTALDRIKEVSNGVKELLDAYSMCSAIVGEDSFSGSGLGRASMDTRDRLKGFDKFLHETSQNQNTTTDLDKYLSEPIFPRSGEFNILNYWKVHTPRYPILSLLARDILGTPMSICAPDSTFNSGTPVISDSQSSLNPDIRQALFCAHDWLSTETEGTISNSI

SEQ ID NO: 78868 - DNA, 1071 bp, Arabidopsis thaliana
  misc_feature (1)..(1071): Ceres Seq. ID no. 12646430
  misc_feature (1)..(1071): Ortholog of  Ceres SEQ ID NO 15171556 as cited in SEQ ID NO 59687
  misc_feature (1)..(1071): Ortholog of  Ceres SEQ ID NO 15177935 as cited in SEQ ID NO 60258
  misc_feature (1)..(1071): Ortholog of  Ceres SEQ ID NO 12625899 as cited in SEQ ID NO 69079
  misc_feature (1)..(1071): Ortholog of  Ceres SEQ ID NO 15180051 as cited in SEQ ID NO 0
atgggttcaaaggataacgccatttctaatgactctgcattagttttatcgcttcttcttcttcttcttcttcccctgcttcacgaagcagcagaaggatgtgacatgttcacggggcggtgggtgaaggacgattcttaccctctctacaattcctccacgtgtccgttcataagacatgagttctcttgccagagaaatggacggccagatctcgattactctaccttcagatggcagcctctttcctgcaaattagcaaggttcaatggattgcagtttttgaagaaaaacaaagggaagaagattatgtttgttggtgattctcttagtctaaatcaatggcaatcgttggcatgtatgcttcattcctctgttccaaattctacgtatactttaaccacacaaggtagtatatcaacctacacattcaaggagtatggactggaattgaagcttgataggaatgtttatctagtagatatagttagggagaagattgggagagttttgaagcttgattcgatcaatgatggaaaaaattgggtagagatggatacattgatttttaatacttggcattggtggagtcggagaggtcctgcacaaccatgggatttgattcaaatagggactaacgttacaaaagacatggaccgtgtggccgcgtttgaaattgcgcttgggacttgggggaaatgggtcgataccgtcttaaatactaagaaaactagagtcttttttcaaggaatttctccatctcattacaaaggagttctgtggggcgaaccagcggcaaagagttgcgtgggacagaaggaaccacttttggggacaaaatatccaggaggattgccagcagaagtgggagttttgaagagagcactcgggaaaatatcgaaaccggtgacattgctagacattacgatgctttcgttgcttcgcaaagatgctcatccttcggtttacggtctaggcgggcgaaactcctccggtgactgcagccactggtgtctctctggggtaccggatacttggaatgagattctttacaattatatggttgagtaa

SEQ ID NO: 78869 - protein, 356 aa, Arabidopsis thaliana
  peptide (1)..(356): Ceres Seq. ID no. 12646431
MGSKDNAISNDSALVLSLLLLLLLPLLHEAAEGCDMFTGRWVKDDSYPLYNSSTCPFIRHEFSCQRNGRPDLDYSTFRWQPLSCKLARFNGLQFLKKNKGKKIMFVGDSLSLNQWQSLACMLHSSVPNSTYTLTTQGSISTYTFKEYGLELKLDRNVYLVDIVREKIGRVLKLDSINDGKNWVEMDTLIFNTWHWWSRRGPAQPWDLIQIGTNVTKDMDRVAAFEIALGTWGKWVDTVLNTKKTRVFFQGISPSHYKGVLWGEPAAKSCVGQKEPLLGTKYPGGLPAEVGVLKRALGKISKPVTLLDITMLSLLRKDAHPSVYGLGGRNSSGDCSHWCLSGVPDTWNEILYNYMVE

SEQ ID NO: 78870 - protein, 321 aa, Arabidopsis thaliana
  peptide (1)..(321): Ceres Seq. ID no. 12646432
MFTGRWVKDDSYPLYNSSTCPFIRHEFSCQRNGRPDLDYSTFRWQPLSCKLARFNGLQFLKKNKGKKIMFVGDSLSLNQWQSLACMLHSSVPNSTYTLTTQGSISTYTFKEYGLELKLDRNVYLVDIVREKIGRVLKLDSINDGKNWVEMDTLIFNTWHWWSRRGPAQPWDLIQIGTNVTKDMDRVAAFEIALGTWGKWVDTVLNTKKTRVFFQGISPSHYKGVLWGEPAAKSCVGQKEPLLGTKYPGGLPAEVGVLKRALGKISKPVTLLDITMLSLLRKDAHPSVYGLGGRNSSGDCSHWCLSGVPDTWNEILYNYMVE

SEQ ID NO: 78871 - protein, 253 aa, Arabidopsis thaliana
  peptide (1)..(253): Ceres Seq. ID no. 12646433
MFVGDSLSLNQWQSLACMLHSSVPNSTYTLTTQGSISTYTFKEYGLELKLDRNVYLVDIVREKIGRVLKLDSINDGKNWVEMDTLIFNTWHWWSRRGPAQPWDLIQIGTNVTKDMDRVAAFEIALGTWGKWVDTVLNTKKTRVFFQGISPSHYKGVLWGEPAAKSCVGQKEPLLGTKYPGGLPAEVGVLKRALGKISKPVTLLDITMLSLLRKDAHPSVYGLGGRNSSGDCSHWCLSGVPDTWNEILYNYMVE

SEQ ID NO: 78872 - DNA, 738 bp, Arabidopsis thaliana
  misc_feature (1)..(738): Ceres Seq. ID no. 12646457
  misc_feature (1)..(738): Ortholog of  Ceres SEQ ID NO 14301822 as cited in SEQ ID NO 66211
atggcgtcggcgtcctcgtctgacggagttgccggaaggattcagaacgcttctttggttcttgtctccgataacagttccacgcttgctgatatccgcaaagctgtggcaatgatgaagaacattgcagttcaattggagaaagaaaatcaaacggacaaggttaaggaccttgaaaattctgtggctgagttattggatttgcatagtgattgtaatcaccgttcgacagcaattcaatccgttgcaaatcggtaccaacccgtggaacaattaacggactttaaaaagttgcttgatgatgaattcacaaagctcaaggctacaccttcctcagtgccacaaaatgatcatttgatgcgccagttcagggaagcagtttggaatgttcatcatgcaggtgaaccaatgcctggtgacgatgatgaggacattgttatgaccagtactcagtgccctcttctaaacatgacatgtcccttgagcgggaagcctgtcactgaattagcagatccagttcgcaggcacgtctatgaaaaatctgtaatcctgcattacatagtcaacaatccaaatgcgaattgtcctgtagcagggtgccgaggtaaactgcagaatagcaaagtgatttgtgatgcaatgttgaagtttgaaatagaggagatgcgctcgttgaacaaacaatctaatagggctgaagtgattgaagacttcacagaagatgtggatgaagattag

SEQ ID NO: 78873 - protein, 245 aa, Arabidopsis thaliana
  peptide (1)..(245): Ceres Seq. ID no. 12646458
MASASSSDGVAGRIQNASLVLVSDNSSTLADIRKAVAMMKNIAVQLEKENQTDKVKDLENSVAELLDLHSDCNHRSTAIQSVANRYQPVEQLTDFKKLLDDEFTKLKATPSSVPQNDHLMRQFREAVWNVHHAGEPMPGDDDEDIVMTSTQCPLLNMTCPLSGKPVTELADPVRRHVYEKSVILHYIVNNPNANCPVAGCRGKLQNSKVICDAMLKFEIEEMRSLNKQSNRAEVIEDFTEDVDED

SEQ ID NO: 78874 - protein, 208 aa, Arabidopsis thaliana
  peptide (1)..(208): Ceres Seq. ID no. 12646459
MMKNIAVQLEKENQTDKVKDLENSVAELLDLHSDCNHRSTAIQSVANRYQPVEQLTDFKKLLDDEFTKLKATPSSVPQNDHLMRQFREAVWNVHHAGEPMPGDDDEDIVMTSTQCPLLNMTCPLSGKPVTELADPVRRHVYEKSVILHYIVNNPNANCPVAGCRGKLQNSKVICDAMLKFEIEEMRSLNKQSNRAEVIEDFTEDVDED

SEQ ID NO: 78875 - protein, 207 aa, Arabidopsis thaliana
  peptide (1)..(207): Ceres Seq. ID no. 12646460
MKNIAVQLEKENQTDKVKDLENSVAELLDLHSDCNHRSTAIQSVANRYQPVEQLTDFKKLLDDEFTKLKATPSSVPQNDHLMRQFREAVWNVHHAGEPMPGDDDEDIVMTSTQCPLLNMTCPLSGKPVTELADPVRRHVYEKSVILHYIVNNPNANCPVAGCRGKLQNSKVICDAMLKFEIEEMRSLNKQSNRAEVIEDFTEDVDED

SEQ ID NO: 78876 - DNA, 4617 bp, Arabidopsis thaliana
  misc_feature (1)..(4617): Ceres Seq. ID no. 12646476
  misc_feature (1)..(4617): Ortholog of  Ceres SEQ ID NO 15170434 as cited in SEQ ID NO 52810
  misc_feature (1)..(4617): Ortholog of  Ceres SEQ ID NO 14307069 as cited in SEQ ID NO 54322
atggactggatacacaaatctactccttttatggaaccttcgaatttggcaaaactggttcaaggaaatgttcctcttcagccacatgacagccattcttcgctaactgatctagatatggaccttagagaagtctatttcctgattttacattttctttctattggcccctgcgaacgaacctttggccacttgagagacgaaattttggaaaaagggcttttaccccgtagatatcattcctggtggtcaagaagtggcatttatagcgggcgtgctgatgatgatggcatctccctccccttgagttatgataatttgatagagaggtatcctcatatcgaaaaggatcacttggtgaagcttctcaaacaactaattttaaacccgtctttcccttcacacatgagagttgaaggaaatgctcctaatgctgctgatgttccaacactattgggatctggcaccttttcacttgtggatcgtagtaacaatatagagtctcagaaagctaggcatgttgcgtcatacttacgctggccgcatatgcatgccgatcaagtgcgtggcctaagtctcagagaaattggaggaggtttcaggaaacaccaccgtgctccgtccattctttcagcatgtcatgctattgcaaaaccatcaacaatggttcaaaagatgcaaaatataaagaagctcagaggacatcgtaatgctgtctactgcgctatatttgatcgttctggaagatatgttatcactggctccgatgaccggcttgtcaaaatttggtcaatggaaactgcgctttgcttggctagctgccgtgggcatgaaggtgacattacagacttggccgttagttcaaacaatgctttggttgcttcagcttcaaacgattttgtgattcgagtgtggcggttgcctgatggaatgccaatttctgtattgcggggacacactggagctgttaccgcaattgcattcagtcccagacaggcgtctgtttaccaacttttatcgtcatcagatgatggaacctgtcgtatctgggatgctaggtattctcagtggctcccacgaatctatgttccaagtccttcagatgctaacactggctcattggaagtttctctcttaggcgaaagcacttttacatcttccaacacaggatccacgagcaatgcatctcagagtcatcaaatattatgttgtgcatacaatgctaatggaaccattttcgtcacgggtagctctgacagcaatgcaagggtttggagtgcctcaaaacctaacttggatgatgctgaacagccgactcatgagctggatgttctacggggccatgagaatgatgtcaactatgtgcaatttagtggttgtgctgtggctccaaaatcttcaacagctgatgctctgaaggaagatagctacccaaagtttaagaattcctggttttgtcatgacaatatagtaacctgctctcgcgatggtagtgcaattatatggactccaagatcacgtaaattccatgggaaatctggacgctggatgaaaggatatcatctgaaggttccacctcctccacttcctccacaacctcctcgaggaggcccacgtcaaaggtttcttccaacaccacggggtgttaatatgattatatggagcttggataatcgttttgtacttgccgctatcatggattgcaggatttgtgtttggaatgctgctgatggtagcttagtgcattgtttaactggtcacagtgaatcgtcttatgtcttggatgtccatcctttcaatcctcggattgctatgagcgctggctatgatgggaaaacaatcatctgggatatatgggagggtataccaatcaaagtgtacgaaatcgggagatttaagttggttgatggaaagttttcacaagatgggacatctattgtgctttcagatgatgttggccagatatattttctaaacacaggacaaggagagtctcaaaagaatgcaaaatacgaccagttcttccttggtgattatcgtcctcttattcgagataccaatggacatgttcttgatcaggagacgcagctacttcctcatcggaggaaccttcaggatcttctttgtgattcaagtatgattccgtatccagaacctgaccagacaatgtttcagcaacgcagacttggtgcattaggagttgaatggcgtccttcctcgataaagttttctgttggccctgattttagtttaggtcaagattatataatgcctcctttggctgatctggatagactgattgagccattgcctgagtttatagatgctatgtactgggaaccagaacacgaagttctgagtgacgacaatgattcagagtataatgctgaagtttcctctgatggggctagggcaagcccatgttccaactcttcaaatgaacttgagtgcagctccgaggacagtgacgttgaaaatattcacgaaagtagctatcattggaaaagaagaagaaaacatcctaaggtcaacgtctctacttcatctggaagacgtgataagaggattttggatgagaatgatagctcgaattctggaattaagagaaccaagaaccgaagaattgtcgtgaaggcttcaaaaagaaaacattctgatgtcaaagcatcacggccgcagagagcagcagctcaaaatgctcgatccttgctttctaaaatttctggaagctcttcggatgaagttgatgatgataatgattcatccaacagtgaatctgatagaagcatacccactttgcgacagttggacaaaccatctcagatgctggaatctctttcaaatgacaaacagaagaaaagattgattgtaaagatctctgttaagaagccagcagagtctatgggaagcaagggagatgtgataaatcaggctgatttagagcaactatcttccaaacctttggaggagaatcacagagtgattggtatatattccagagaacccgggtcaagttctgtagatgcaaaaggtgattcagggtgtcagagtattccctactctatgaatacgccacagagagaaaaggccgataatcagttgataagatcttcagatcaagaccagaatatgtgcaagtggagggaagagattcctgtttgtgaacctaccgaattaactgcgcctgagaacatagaagaagcccaaccattttatggggatgaagctgatgagattcttccaaagaaagttcgacgactgaggttaaagcttcggcatcccaacagtcctcgaaaactagaacctgatgaggtggcagatgatttggcagatggtggagatgggtttgcatccatagctccctctttcatgaatccgattatggattctgaacctgtgatagatagcgttagagattcttctgcacataactttgagtttggagaagctacagctgatgtgatacgtaggaaaagatccataagaagtgaatctagtacaagaaatagcgcattacgcataaggttgggctctggatctgtagacaaaataaagaaacaagggattccttccacaagcgtgtatgatgatgcatcacttgaagaatggccttctacctcaaaagctgggtccaggtctagatctgcaagcgtcagcaaaccaagtcttcatactgggataaggttgaatagtgtctcaggaaaaatctcatggttattgttgtctgaacacgaggaaggctgccgttatatacctcagctaggggatgaagttatttacttcaagcagggtcatcaagagttccttaaaactaaagaattaaatgacagggaccgatcaaggtaccttccccgaaacctaggagcagtagagatttgcaaagtcgagaaacttaactatgatacatatcctggttctggagatagctgctgcaaaatgaccctcagggttctggattcttcttcatcacatgcctcccgcaaagagtttcaactgacacttcctgagctcattaatttccctgattttattgtggagaagactcgatacgacgctgcaattcaaacaaactggaaaattggtaatgagtgccgtgtgtggtggagagacgcaaccggtgaaggcggggcttggtgggaaggtaggattgagtcttcacaagtaaaatccactgacttcccagagagtccatgggaaagatacagagttgtctatgaaacaggggaaacgagtcttcacagcccgtgggagtttgacaatcccgagtttccctgggaaaaatctaccatcgaagatgagagaagagagaaactgctttcattatttgctggactagtaaaatcaatcagcaagcatcaggatagttacgggatccaaaagctaaacgaagcagctcaaaagatggatttctgcaataggttcccggttccattataccctgagctgattcacgaaagactagagaatcagtactacagaagtattgaatcgtttaaacacgacgtggatgcaatgctctcaaatgcggagttgtatttcgttagaagtgcacatatgctttcgaagataaagcgactgcgagataaattgacaaaaacgttaagaaagctgatctga

SEQ ID NO: 78877 - protein, 1538 aa, Arabidopsis thaliana
  peptide (1)..(1538): Ceres Seq. ID no. 12646477
MDWIHKSTPFMEPSNLAKLVQGNVPLQPHDSHSSLTDLDMDLREVYFLILHFLSIGPCERTFGHLRDEILEKGLLPRRYHSWWSRSGIYSGRADDDGISLPLSYDNLIERYPHIEKDHLVKLLKQLILNPSFPSHMRVEGNAPNAADVPTLLGSGTFSLVDRSNNIESQKARHVASYLRWPHMHADQVRGLSLREIGGGFRKHHRAPSILSACHAIAKPSTMVQKMQNIKKLRGHRNAVYCAIFDRSGRYVITGSDDRLVKIWSMETALCLASCRGHEGDITDLAVSSNNALVASASNDFVIRVWRLPDGMPISVLRGHTGAVTAIAFSPRQASVYQLLSSSDDGTCRIWDARYSQWLPRIYVPSPSDANTGSLEVSLLGESTFTSSNTGSTSNASQSHQILCCAYNANGTIFVTGSSDSNARVWSASKPNLDDAEQPTHELDVLRGHENDVNYVQFSGCAVAPKSSTADALKEDSYPKFKNSWFCHDNIVTCSRDGSAIIWTPRSRKFHGKSGRWMKGYHLKVPPPPLPPQPPRGGPRQRFLPTPRGVNMIIWSLDNRFVLAAIMDCRICVWNAADGSLVHCLTGHSESSYVLDVHPFNPRIAMSAGYDGKTIIWDIWEGIPIKVYEIGRFKLVDGKFSQDGTSIVLSDDVGQIYFLNTGQGESQKNAKYDQFFLGDYRPLIRDTNGHVLDQETQLLPHRRNLQDLLCDSSMIPYPEPDQTMFQQRRLGALGVEWRPSSIKFSVGPDFSLGQDYIMPPLADLDRLIEPLPEFIDAMYWEPEHEVLSDDNDSEYNAEVSSDGARASPCSNSSNELECSSEDSDVENIHESSYHWKRRRKHPKVNVSTSSGRRDKRILDENDSSNSGIKRTKNRRIVVKASKRKHSDVKASRPQRAAAQNARSLLSKISGSSSDEVDDDNDSSNSESDRSIPTLRQLDKPSQMLESLSNDKQKKRLIVKISVKKPAESMGSKGDVINQADLEQLSSKPLEENHRVIGIYSREPGSSSVDAKGDSGCQSIPYSMNTPQREKADNQLIRSSDQDQNMCKWREEIPVCEPTELTAPENIEEAQPFYGDEADEILPKKVRRLRLKLRHPNSPRKLEPDEVADDLADGGDGFASIAPSFMNPIMDSEPVIDSVRDSSAHNFEFGEATADVIRRKRSIRSESSTRNSALRIRLGSGSVDKIKKQGIPSTSVYDDASLEEWPSTSKAGSRSRSASVSKPSLHTGIRLNSVSGKISWLLLSEHEEGCRYIPQLGDEVIYFKQGHQEFLKTKELNDRDRSRYLPRNLGAVEICKVEKLNYDTYPGSGDSCCKMTLRVLDSSSSHASRKEFQLTLPELINFPDFIVEKTRYDAAIQTNWKIGNECRVWWRDATGEGGAWWEGRIESSQVKSTDFPESPWERYRVVYETGETSLHSPWEFDNPEFPWEKSTIEDERREKLLSLFAGLVKSISKHQDSYGIQKLNEAAQKMDFCNRFPVPLYPELIHERLENQYYRSIESFKHDVDAMLSNAELYFVRSAHMLSKIKRLRDKLTKTLRKLI

SEQ ID NO: 78878 - protein, 1528 aa, Arabidopsis thaliana
  peptide (1)..(1528): Ceres Seq. ID no. 12646478
MEPSNLAKLVQGNVPLQPHDSHSSLTDLDMDLREVYFLILHFLSIGPCERTFGHLRDEILEKGLLPRRYHSWWSRSGIYSGRADDDGISLPLSYDNLIERYPHIEKDHLVKLLKQLILNPSFPSHMRVEGNAPNAADVPTLLGSGTFSLVDRSNNIESQKARHVASYLRWPHMHADQVRGLSLREIGGGFRKHHRAPSILSACHAIAKPSTMVQKMQNIKKLRGHRNAVYCAIFDRSGRYVITGSDDRLVKIWSMETALCLASCRGHEGDITDLAVSSNNALVASASNDFVIRVWRLPDGMPISVLRGHTGAVTAIAFSPRQASVYQLLSSSDDGTCRIWDARYSQWLPRIYVPSPSDANTGSLEVSLLGESTFTSSNTGSTSNASQSHQILCCAYNANGTIFVTGSSDSNARVWSASKPNLDDAEQPTHELDVLRGHENDVNYVQFSGCAVAPKSSTADALKEDSYPKFKNSWFCHDNIVTCSRDGSAIIWTPRSRKFHGKSGRWMKGYHLKVPPPPLPPQPPRGGPRQRFLPTPRGVNMIIWSLDNRFVLAAIMDCRICVWNAADGSLVHCLTGHSESSYVLDVHPFNPRIAMSAGYDGKTIIWDIWEGIPIKVYEIGRFKLVDGKFSQDGTSIVLSDDVGQIYFLNTGQGESQKNAKYDQFFLGDYRPLIRDTNGHVLDQETQLLPHRRNLQDLLCDSSMIPYPEPDQTMFQQRRLGALGVEWRPSSIKFSVGPDFSLGQDYIMPPLADLDRLIEPLPEFIDAMYWEPEHEVLSDDNDSEYNAEVSSDGARASPCSNSSNELECSSEDSDVENIHESSYHWKRRRKHPKVNVSTSSGRRDKRILDENDSSNSGIKRTKNRRIVVKASKRKHSDVKASRPQRAAAQNARSLLSKISGSSSDEVDDDNDSSNSESDRSIPTLRQLDKPSQMLESLSNDKQKKRLIVKISVKKPAESMGSKGDVINQADLEQLSSKPLEENHRVIGIYSREPGSSSVDAKGDSGCQSIPYSMNTPQREKADNQLIRSSDQDQNMCKWREEIPVCEPTELTAPENIEEAQPFYGDEADEILPKKVRRLRLKLRHPNSPRKLEPDEVADDLADGGDGFASIAPSFMNPIMDSEPVIDSVRDSSAHNFEFGEATADVIRRKRSIRSESSTRNSALRIRLGSGSVDKIKKQGIPSTSVYDDASLEEWPSTSKAGSRSRSASVSKPSLHTGIRLNSVSGKISWLLLSEHEEGCRYIPQLGDEVIYFKQGHQEFLKTKELNDRDRSRYLPRNLGAVEICKVEKLNYDTYPGSGDSCCKMTLRVLDSSSSHASRKEFQLTLPELINFPDFIVEKTRYDAAIQTNWKIGNECRVWWRDATGEGGAWWEGRIESSQVKSTDFPESPWERYRVVYETGETSLHSPWEFDNPEFPWEKSTIEDERREKLLSLFAGLVKSISKHQDSYGIQKLNEAAQKMDFCNRFPVPLYPELIHERLENQYYRSIESFKHDVDAMLSNAELYFVRSAHMLSKIKRLRDKLTKTLRKLI

SEQ ID NO: 78879 - protein, 1499 aa, Arabidopsis thaliana
  peptide (1)..(1499): Ceres Seq. ID no. 12646479
MDLREVYFLILHFLSIGPCERTFGHLRDEILEKGLLPRRYHSWWSRSGIYSGRADDDGISLPLSYDNLIERYPHIEKDHLVKLLKQLILNPSFPSHMRVEGNAPNAADVPTLLGSGTFSLVDRSNNIESQKARHVASYLRWPHMHADQVRGLSLREIGGGFRKHHRAPSILSACHAIAKPSTMVQKMQNIKKLRGHRNAVYCAIFDRSGRYVITGSDDRLVKIWSMETALCLASCRGHEGDITDLAVSSNNALVASASNDFVIRVWRLPDGMPISVLRGHTGAVTAIAFSPRQASVYQLLSSSDDGTCRIWDARYSQWLPRIYVPSPSDANTGSLEVSLLGESTFTSSNTGSTSNASQSHQILCCAYNANGTIFVTGSSDSNARVWSASKPNLDDAEQPTHELDVLRGHENDVNYVQFSGCAVAPKSSTADALKEDSYPKFKNSWFCHDNIVTCSRDGSAIIWTPRSRKFHGKSGRWMKGYHLKVPPPPLPPQPPRGGPRQRFLPTPRGVNMIIWSLDNRFVLAAIMDCRICVWNAADGSLVHCLTGHSESSYVLDVHPFNPRIAMSAGYDGKTIIWDIWEGIPIKVYEIGRFKLVDGKFSQDGTSIVLSDDVGQIYFLNTGQGESQKNAKYDQFFLGDYRPLIRDTNGHVLDQETQLLPHRRNLQDLLCDSSMIPYPEPDQTMFQQRRLGALGVEWRPSSIKFSVGPDFSLGQDYIMPPLADLDRLIEPLPEFIDAMYWEPEHEVLSDDNDSEYNAEVSSDGARASPCSNSSNELECSSEDSDVENIHESSYHWKRRRKHPKVNVSTSSGRRDKRILDENDSSNSGIKRTKNRRIVVKASKRKHSDVKASRPQRAAAQNARSLLSKISGSSSDEVDDDNDSSNSESDRSIPTLRQLDKPSQMLESLSNDKQKKRLIVKISVKKPAESMGSKGDVINQADLEQLSSKPLEENHRVIGIYSREPGSSSVDAKGDSGCQSIPYSMNTPQREKADNQLIRSSDQDQNMCKWREEIPVCEPTELTAPENIEEAQPFYGDEADEILPKKVRRLRLKLRHPNSPRKLEPDEVADDLADGGDGFASIAPSFMNPIMDSEPVIDSVRDSSAHNFEFGEATADVIRRKRSIRSESSTRNSALRIRLGSGSVDKIKKQGIPSTSVYDDASLEEWPSTSKAGSRSRSASVSKPSLHTGIRLNSVSGKISWLLLSEHEEGCRYIPQLGDEVIYFKQGHQEFLKTKELNDRDRSRYLPRNLGAVEICKVEKLNYDTYPGSGDSCCKMTLRVLDSSSSHASRKEFQLTLPELINFPDFIVEKTRYDAAIQTNWKIGNECRVWWRDATGEGGAWWEGRIESSQVKSTDFPESPWERYRVVYETGETSLHSPWEFDNPEFPWEKSTIEDERREKLLSLFAGLVKSISKHQDSYGIQKLNEAAQKMDFCNRFPVPLYPELIHERLENQYYRSIESFKHDVDAMLSNAELYFVRSAHMLSKIKRLRDKLTKTLRKLI

SEQ ID NO: 78880 - DNA, 918 bp, Arabidopsis thaliana
  misc_feature (1)..(918): Ceres Seq. ID no. 12646597
  misc_feature (1)..(918): Ortholog of  Ceres SEQ ID NO 13595164 as cited in SEQ ID NO 56222
  misc_feature (1)..(918): Ortholog of  Ceres SEQ ID NO 13591068 as cited in SEQ ID NO 69043
  misc_feature (1)..(918): Ortholog of  Ceres SEQ ID NO 13623041 as cited in SEQ ID NO 0
atggcttcagtggctcctaaaatcgctaaagatgtaactgaactaatagggaacactccattagtgtatctaaacaaagtagctaaagattgtgttggtcatgttgctgctaagcttgagatgatggaaccatgttctagcgtcaaagacaggattggttatagtatgattgctgatgcagaagctaaaggacttattaaaccgggagagagtgtgttgattgagccaacaagtgggaacactggagttggtttagcatttactgcagctgcaaagggctataagcttgttataacaatgccagcttcaatgagtatagagagaagaatcattctcttagcttttggagctgagttgattcttactgatccggctaaaggtatgaaaggtgctgttgcaaaggcggaggagattttggcgaaaacacctaatggttatatgcttcaacagtttgagaatcctgctaatccaaagatccattatgagactactggacctgagatatggaaaggtgctgggaagtatctcaaggaacagaacacaaacataaagctgtatggtgtcgagcctgttgaaagccctattctgtccggtggaaagccaggtccccacaaaattcaaggtataggtgctggttttattccaggcattttggatgttgatcttatagatgaagttgttcaggtttcaagtgaagaatccattgacatggcaaggcttcttgctagggaagagggtctgttagtgggaatctcatctggagcagcagctactgcagcaatcaaacttgcaaagaggccagaaaatgctgggaagcttatagtggcggtgtttccgagtttcggggaaagatatctatcgactgtactgtttgatgcagcaaggaaagaggcagagactatgacctttgagccctga

SEQ ID NO: 78881 - protein, 305 aa, Arabidopsis thaliana
  peptide (1)..(305): Ceres Seq. ID no. 12646598
MASVAPKIAKDVTELIGNTPLVYLNKVAKDCVGHVAAKLEMMEPCSSVKDRIGYSMIADAEAKGLIKPGESVLIEPTSGNTGVGLAFTAAAKGYKLVITMPASMSIERRIILLAFGAELILTDPAKGMKGAVAKAEEILAKTPNGYMLQQFENPANPKIHYETTGPEIWKGAGKYLKEQNTNIKLYGVEPVESPILSGGKPGPHKIQGIGAGFIPGILDVDLIDEVVQVSSEESIDMARLLAREEGLLVGISSGAAATAAIKLAKRPENAGKLIVAVFPSFGERYLSTVLFDAARKEAETMTFEP

SEQ ID NO: 78882 - protein, 265 aa, Arabidopsis thaliana
  peptide (1)..(265): Ceres Seq. ID no. 12646599
MMEPCSSVKDRIGYSMIADAEAKGLIKPGESVLIEPTSGNTGVGLAFTAAAKGYKLVITMPASMSIERRIILLAFGAELILTDPAKGMKGAVAKAEEILAKTPNGYMLQQFENPANPKIHYETTGPEIWKGAGKYLKEQNTNIKLYGVEPVESPILSGGKPGPHKIQGIGAGFIPGILDVDLIDEVVQVSSEESIDMARLLAREEGLLVGISSGAAATAAIKLAKRPENAGKLIVAVFPSFGERYLSTVLFDAARKEAETMTFEP

SEQ ID NO: 78883 - protein, 264 aa, Arabidopsis thaliana
  peptide (1)..(264): Ceres Seq. ID no. 12646600
MEPCSSVKDRIGYSMIADAEAKGLIKPGESVLIEPTSGNTGVGLAFTAAAKGYKLVITMPASMSIERRIILLAFGAELILTDPAKGMKGAVAKAEEILAKTPNGYMLQQFENPANPKIHYETTGPEIWKGAGKYLKEQNTNIKLYGVEPVESPILSGGKPGPHKIQGIGAGFIPGILDVDLIDEVVQVSSEESIDMARLLAREEGLLVGISSGAAATAAIKLAKRPENAGKLIVAVFPSFGERYLSTVLFDAARKEAETMTFEP

SEQ ID NO: 78884 - DNA, 787 bp, Arabidopsis thaliana
  misc_feature (1)..(787): Ceres Seq. ID no. 12646618
  misc_feature (1)..(787): Ortholog of  Ceres SEQ ID NO 15168553 as cited in SEQ ID NO 57750
aaatcaaacataacaaaaaccaacaaaacaaactcaaaaggattcttcttcaaacacaacatcttcaagaaaacatgaaaatggaaatgggtttagtgttccttacagtttttatggctgtgatgtcttctacaatggtctctgctcagtcaagctgcacaaacgcgttgattagcatgtcgccgtgtctcaactacataactggaaactctacctctcctaatcagcaatgctgtaatcagttgagtagagtagtccagtcttctcctgactgtttgtgtcaagtccttaacggtggaggctctcagcttgggatcaatgttaaccaaacacaagctcttggtctgcctagggcttgtaatgttcagactcctcctgtcagtcgctgtaataccggtggtggtggtggtggttctacttctgactctcctgcagaatcaccaaactcttcaggaccaggtaatggatcgaaaaccgtaccagtaggagaaggagacggacccccatcgtctgatggaagctctatcaagttctcatttcctcttattgccttcttctccgcggtttcctacatggcaatcttctgagttactattttcccatacgcttttgtgccactcagattgcattctttatttgtccctatttattcacatttcgttgtgattttgtgtgatgtattttatgctctgtaaatccctactctccgggtgatattgctttgttgtaccaacggagagcattttggatctctttaccttttataataaacattactttccagaac

SEQ ID NO: 78885 - protein, 194 aa, Arabidopsis thaliana; identical to SEQ ID NO: 30839
  peptide (1)..(194): Ceres Seq. ID no. 12646619

SEQ ID NO: 78886 - protein, 170 aa, Arabidopsis thaliana; identical to SEQ ID NO: 30840
  peptide (1)..(170): Ceres Seq. ID no. 12646620

SEQ ID NO: 78887 - protein, 168 aa, Arabidopsis thaliana; identical to SEQ ID NO: 30841
  peptide (1)..(168): Ceres Seq. ID no. 12646621

SEQ ID NO: 78888 - DNA, 1342 bp, Arabidopsis thaliana
  misc_feature (1)..(1342): Ceres Seq. ID no. 12646638
  misc_feature (1)..(1342): Ortholog of  Ceres SEQ ID NO 15170595 as cited in SEQ ID NO 57510
  misc_feature (1)..(1342): Ortholog of  Ceres SEQ ID NO 13655218 as cited in SEQ ID NO 68872
aaccatatgaatctcacgatcaaagataatatctcatcatctatatagtatttgtctcgatattagagacgtacacactttgtttatactcaaatcaatatgggatctttcgtgaaagaagaaacgtcgtcgttgatgacagattttttggagaagtgcggtggttatgcggtggtggatggagggtttgcgacggagctacagcgccacggagctgatatcaatgatccactttggagtgctaagtgccttattacttctcctcaccttgttacaaaggtgcacttggattaccttgaatctggagcaaatatcatcataacagcatcttaccaggcgacgatacaaggttttgtggcaaaaggtctatcggtgggagaagcagaaaatttacttagaaggagcgttgaaatcacgtacgaggcacgtgagattttctacaacagatgcaccaagggttcatgggatttcgcctacgctggaaaagcttcccggagaccaattcttgtcgcagcttccgttggtagctatggagcttatctcgctgacggctccgaatacagtgggatatatggagattctgtgagtaaggagacattaaaggatttccatagaagaagagttcaaatcttagcaaaatctggagccgacctaatagcattcgagactattccaaataagctcgaagcagaggcttatgcggatcttcttgaggaggaagatatcgatattccggcatggttctcgttcacttccaaggacggagtcagtgtgccacgaggagattcagttgtagaatgtgcgaaagtggcagattcatgcaagaacgtggtggccattggaatcaattgtactgcaccaagatacattcatgctttaattatctccttgcgccagatgacacgcaaaccaatcgttgtatacccaaacagcggggaagtctacgacggtctgaacaagaaatggattaagtcagagggagagtcagaggaggattttgtgtcgtacgtgagtaaatggagagatgcaggagcttctctgtttggaggatgttgtcggactactccaaacaccatcagagccattgctaaagttctctccgacgaaccttctgcagcatcaaaacccaaattcgggcaatagacttgtcaacggtgaatttctatgcttgtgatgtcaggaaggagtttaaaatgtacaataacgcaagcgtagttctgtaatctactaatatgttgaaactataaataatggtaaactatgttagagacaactgtgtaattagcgtatgataataatggagtttaaacgataatttgatgttatagtaagcatattttta

SEQ ID NO: 78889 - protein, 347 aa, Arabidopsis thaliana; identical to SEQ ID NO: 39499
  peptide (1)..(347): Ceres Seq. ID no. 12646639

SEQ ID NO: 78890 - protein, 335 aa, Arabidopsis thaliana; identical to SEQ ID NO: 39500
  peptide (1)..(335): Ceres Seq. ID no. 12646640

SEQ ID NO: 78891 - DNA, 708 bp, Arabidopsis thaliana
  misc_feature (1)..(708): Ceres Seq. ID no. 12646665
  misc_feature (1)..(708): Ortholog of  Ceres SEQ ID NO 13654980 as cited in SEQ ID NO 63094
  misc_feature (1)..(708): Ortholog of  Ceres SEQ ID NO 12635657 as cited in SEQ ID NO 0
  misc_feature (1)..(708): Ortholog of  Ceres SEQ ID NO 12635879 as cited in SEQ ID NO 0
  misc_feature (1)..(708): Ortholog of  Ceres SEQ ID NO 13599649 as cited in SEQ ID NO 0
atggctaaccctaaagttttctttgatttgaccgtggatggcaaacccgctggtcggatcgtgatagagctcttcgctgacttgactccacggacggcggagaacttcaggggtctgtgtaccggcgagagaggcatcggaaagtgtggtaaaccaatccactacaaaggatcaaccttcgaccatattgttcccgatctcatgtggtgtggaggagatatcatcttcgaaaacgaacccatccacagcgaagaattagacgacgagtactttatcttgaaccacgaagacggtccaggtatcatctccatggccgactccaacggatctcagttccaaatccacatgaaggactatggcttgcaagtggacggtgatcacgttgtgatcggcaaagttgttgaaggattggatcttatgaggaacattgagaaggaggtcataactacgacaacaaggacgccttcaaagcctgtggtgatcgcggactgcggtgagctttcagattataggtcagaaagatgttatcttatgaagaacattgagaaggaggtcataattaaaacagcaaaggataacaagcccgtggtgattgcggactgcggtgggctttcagatgatagatctgaaagatattatcttataaatatagttgttgcttgcatggttttgatgtgtttttggtcttgttggtgttcctttagttag

SEQ ID NO: 78892 - protein, 235 aa, Arabidopsis thaliana
  peptide (1)..(235): Ceres Seq. ID no. 12646666
MANPKVFFDLTVDGKPAGRIVIELFADLTPRTAENFRGLCTGERGIGKCGKPIHYKGSTFDHIVPDLMWCGGDIIFENEPIHSEELDDEYFILNHEDGPGIISMADSNGSQFQIHMKDYGLQVDGDHVVIGKVVEGLDLMRNIEKEVITTTTRTPSKPVVIADCGELSDYRSERCYLMKNIEKEVIIKTAKDNKPVVIADCGGLSDDRSERYYLINIVVACMVLMCFWSCWCSFS

SEQ ID NO: 78893 - protein, 168 aa, Arabidopsis thaliana
  peptide (1)..(168): Ceres Seq. ID no. 12646667
MWCGGDIIFENEPIHSEELDDEYFILNHEDGPGIISMADSNGSQFQIHMKDYGLQVDGDHVVIGKVVEGLDLMRNIEKEVITTTTRTPSKPVVIADCGELSDYRSERCYLMKNIEKEVIIKTAKDNKPVVIADCGGLSDDRSERYYLINIVVACMVLMCFWSCWCSFS

SEQ ID NO: 78894 - protein, 132 aa, Arabidopsis thaliana
  peptide (1)..(132): Ceres Seq. ID no. 12646668
MADSNGSQFQIHMKDYGLQVDGDHVVIGKVVEGLDLMRNIEKEVITTTTRTPSKPVVIADCGELSDYRSERCYLMKNIEKEVIIKTAKDNKPVVIADCGGLSDDRSERYYLINIVVACMVLMCFWSCWCSFS

SEQ ID NO: 78895 - DNA, 888 bp, Arabidopsis thaliana
  misc_feature (1)..(888): Ceres Seq. ID no. 12646673
  misc_feature (1)..(888): Ortholog of  Ceres SEQ ID NO 13654980 as cited in SEQ ID NO 63094
  misc_feature (1)..(888): Ortholog of  Ceres SEQ ID NO 12635657 as cited in SEQ ID NO 0
  misc_feature (1)..(888): Ortholog of  Ceres SEQ ID NO 12635879 as cited in SEQ ID NO 0
  misc_feature (1)..(888): Ortholog of  Ceres SEQ ID NO 13599649 as cited in SEQ ID NO 0
atggctaaccctaaagttttctttgatttgaccgtggatggcaaacccgctggtcggatcgtgatagagctcttcgctgacttgactccacggacggcggagaacttcaggggtctgtgtaccggcgagagaggcatcggaaagtgtggtaaaccaatccactacaaaggatcaaccttcgaccatattgttcccgatctcatgtggtgtggaggagatatcatcttcgaaaacgaacccatccacagcgaagaattagacgacgagtactttatcttgaaccacgaagacggtccaggtatcatctccatggccgactccaacggatctcagttccaaatccacatgaaggactatggcttgcaagtggacggtgatcacgttgtgatcggcaaagttgttgaaggattggatcttatgaggaacattgagaaggaggtcataactacgacaacaaggacgccttcaaagcctgtggtgatcgcggactgcggtgagctttcagattataggtcagaaagatgttatcttatgaagaacattgagaaggaggtcataattaaaacagcaaaggataacaagcccgtggtgattgcggactgcggtgggctttcagatgatagatctgaaagatattatcttataaatatagttgttgcttgcatggttttgatgtgtttttggtcttgtagcgtactatcgaagaaaagttatatgaacgacggaagtctcaattataaacaaaaaaaaagaacagaattttttgggccccataaaatgtttatgatatgtatttttagggacttcttttttatcaagaagttttcgatttcgatttcacaaatgtccaagacaagttttcgatttcacaaatgtccaacagcctaa

SEQ ID NO: 78896 - protein, 295 aa, Arabidopsis thaliana
  peptide (1)..(295): Ceres Seq. ID no. 12646674
MANPKVFFDLTVDGKPAGRIVIELFADLTPRTAENFRGLCTGERGIGKCGKPIHYKGSTFDHIVPDLMWCGGDIIFENEPIHSEELDDEYFILNHEDGPGIISMADSNGSQFQIHMKDYGLQVDGDHVVIGKVVEGLDLMRNIEKEVITTTTRTPSKPVVIADCGELSDYRSERCYLMKNIEKEVIIKTAKDNKPVVIADCGGLSDDRSERYYLINIVVACMVLMCFWSCSVLSKKSYMNDGSLNYKQKKRTEFFGPHKMFMICIFRDFFFIKKFSISISQMSKTSFRFHKCPTA

SEQ ID NO: 78897 - protein, 228 aa, Arabidopsis thaliana
  peptide (1)..(228): Ceres Seq. ID no. 12646675
MWCGGDIIFENEPIHSEELDDEYFILNHEDGPGIISMADSNGSQFQIHMKDYGLQVDGDHVVIGKVVEGLDLMRNIEKEVITTTTRTPSKPVVIADCGELSDYRSERCYLMKNIEKEVIIKTAKDNKPVVIADCGGLSDDRSERYYLINIVVACMVLMCFWSCSVLSKKSYMNDGSLNYKQKKRTEFFGPHKMFMICIFRDFFFIKKFSISISQMSKTSFRFHKCPTA

SEQ ID NO: 78898 - protein, 192 aa, Arabidopsis thaliana
  peptide (1)..(192): Ceres Seq. ID no. 12646676
MADSNGSQFQIHMKDYGLQVDGDHVVIGKVVEGLDLMRNIEKEVITTTTRTPSKPVVIADCGELSDYRSERCYLMKNIEKEVIIKTAKDNKPVVIADCGGLSDDRSERYYLINIVVACMVLMCFWSCSVLSKKSYMNDGSLNYKQKKRTEFFGPHKMFMICIFRDFFFIKKFSISISQMSKTSFRFHKCPTA

SEQ ID NO: 78899 - DNA, 1988 bp, Arabidopsis thaliana
  misc_feature (1)..(1988): Ceres Seq. ID no. 12646688
  misc_feature (1)..(1988): Ortholog of  Ceres SEQ ID NO 12556893 as cited in SEQ ID NO 30
  misc_feature (1)..(1988): Ortholog of  Ceres SEQ ID NO 13584538 as cited in SEQ ID NO 64739
atgtctcagtctattcaattctccactccttcacacactcctcaccttctccatctccctcactcacaattcaaccgtcctctctcctctatctccttccgtcgcttccctctaacaaccatcaaatacacttccatcagagcctcctcgtcatcatctccttcaccggatctcgattcatcgtcctcatcatcatcctcgcaagtacttctctcacctaacggtactggtgctgtgaagtctgatgagagatccgttgtcgctacggcggttacgactgatacgtctgggattgaggttgatactgtgacggaagctgagcttaaggagaatggatttagaagtacgaggaggacgaagctgatctgtacgatcggaccggcgacttgtggatttgagcagcttgaggcgcttgctgtgggaggtatgaatgtggcaaggcttaatatgtgtcacggtacgcgtgattggcaccgcggtgtgattcgtagtgttcggaggcttaatgaggagaaaggctttgcggttgctattatgatggatactgaaggtagtgagattcatatgggagatcttggtggtgaagcttcagctaaagcagaggatggtgaggtttggactttcactgttagagcttttgattcttctcgtcctgaacgtaccattagtgttagctacgatggtttcgctgaagatgtaagagttggggatgaacttttggttgatggtgggatggtgagatttgaagtgattgagaagattggtcctgatgttaagtgtctatgtaccgatcctggattgttgcttcctcgagctaacttgacgttttggagagatggaagtcttgtacgagagcgtaatgccatgcttccaacaatttcttccaaggactggttggatattgattttggaattgctgaaggtgtggatttcattgctgtatcgtttgtcaagtcggctgaagtcattaatcaccttaaaagttatcttgctgctcgttcccgtggaggggaaattggagtgattgcaaagatcgagagtatcgattcactgaccaatttggaagaaattattctagcatcagatggggccatggttgcaagaggagatctgggagctcagatacctcttgagcaagttccagcagctcaacagagaatcgtccaagtatgcagagctcttaacaaacccgtcattgtcgcttcacagctattggagtccatgattgagtacccaactccaaccagagcagaagttgccgacgtgtctgaagcagtaagacaaagatcagatgcattgatgctctctggagaatcagctatgggacaattcccagacaaggcgctcacggttctaaggactgtcagtttaagaatcgagagatggtggagggaagagaaacgccatgagtctgtaccgcttcaagccataggctcttcattttcagacaaaatctcagaagagatctgtaactcagctgctaaaatggctaacaatcttggagtggacgcggttttcgtttacacaacgagcggacacatggcatcactggtctcccgatgtcgcccggactgcccgatctttgctttcacaaccacaacctcagtgagaagacgcttaaacctacaatggggacttatcccattccgtctcagcttctcagacgacatggaaagcaacttgaacaaaacattctcgttactgaaatcaagaggtatgatcaaatctggtgacctcgtgatcgcagtctcggacatgctgcaatcaatccaggtaatgaacgtcccgtaattctctctctttatacaatttcgcaatcccgcaaaagagtgttttgtttcctacttttgttactgtttttagactactcttacattagattccagaggcatcatcatcttcggtttgttaacaacagtaatgtgtaagctttgtttgtagtgtgtactgtttgtttttggttttcaataatatcagtaatcttattc

SEQ ID NO: 78900 - protein, 596 aa, Arabidopsis thaliana; identical to SEQ ID NO: 29225
  peptide (1)..(596): Ceres Seq. ID no. 12646689

SEQ ID NO: 78901 - protein, 454 aa, Arabidopsis thaliana; identical to SEQ ID NO: 29226
  peptide (1)..(454): Ceres Seq. ID no. 12646690

SEQ ID NO: 78902 - protein, 447 aa, Arabidopsis thaliana; identical to SEQ ID NO: 29227
  peptide (1)..(447): Ceres Seq. ID no. 12646691

SEQ ID NO: 78903 - DNA, 1380 bp, Arabidopsis thaliana
  misc_feature (1)..(1380): Ceres Seq. ID no. 12646714
  misc_feature (1)..(1380): Ortholog of  Ceres SEQ ID NO 13598865 as cited in SEQ ID NO 0
atggaacctgatcgccttttcgaatgtcttccgagtaatcttcgaccatcatcagaaggtgaaggtggtggtggaaagactcatgatccccatcacaagagcttagaaaacgctatttttactgtcccaactgtcattcctccaagggttctgcctctgcttcatgacttagctcaacaaatggttcaagctggtcatcagcaacaacttttcaaatcttacagggatactcgagctgcggtgttggaacagagtttgaggaaattaggagtggagaggcttagcaaagatgatgttcagagaatgcaatgggaggtgaaactgttattcgccgcggaaaagaaaatctgcgaccaaattcttgatggtgttgagtctctcagagatcaatgttttggtgaggtcactgtaaatagtgtagctgtgctgcttagtttcggggaggctattgctaaaagcaagagatcacctgaaaaactgtttgttctgttagatatgtatgaaataatgagagagcttcagcctgagattgagttgctctttggaagcaaaccatgtgctgagatgaaagaatccgcgctgaatctgacaaagcggttagctcagacagctcaagaaacttttgctgattttgaagaagcggttgaaaaggatgctacgaaaaccgcggttatggatggaaccgttcatccacttactagctacgttataaattatgtcaagttcttgttcgattaccaaacgacgttgaggctactttttcaagagtttgatagtaaagatcctgatagcgagcttggagctgtaacaacgaggatcatgcacgctttacagaataatctggatggtaaatcgaagcagtacaaagatgtagcattaactcaacttttcctaatgaacaatgttcactatatagtgagatctgttaggaggtcagaagcaaaagatttattaggtgatgattgggttcaaatacatcgaagaattgtacaacaacatgcaaatcagtacaagagagtttcttgggcaaagattttgcagtgtctcacggttcagtcgagtgggagcggtccgatagaaaactcaaatatatcaagagcatcagtaaaagacagattcaagactttcaattctcagtttgaagagcttcaccaaagacaatgccaatggacagttccggacagcgagttgcgtgaatctcttagacttgctgttgcggaagttcttttacctgctttcagatcgtttcttaaacgttttgggccgatgatagagagtggtaagaacccccagaagtatataaggtttagtcctgaagatcttgagagaatgcttaacgagttctttgaaggcaagacatggagtgagccaaagagataa

SEQ ID NO: 78904 - protein, 459 aa, Arabidopsis thaliana
  peptide (1)..(459): Ceres Seq. ID no. 12646715
MEPDRLFECLPSNLRPSSEGEGGGGKTHDPHHKSLENAIFTVPTVIPPRVLPLLHDLAQQMVQAGHQQQLFKSYRDTRAAVLEQSLRKLGVERLSKDDVQRMQWEVKLLFAAEKKICDQILDGVESLRDQCFGEVTVNSVAVLLSFGEAIAKSKRSPEKLFVLLDMYEIMRELQPEIELLFGSKPCAEMKESALNLTKRLAQTAQETFADFEEAVEKDATKTAVMDGTVHPLTSYVINYVKFLFDYQTTLRLLFQEFDSKDPDSELGAVTTRIMHALQNNLDGKSKQYKDVALTQLFLMNNVHYIVRSVRRSEAKDLLGDDWVQIHRRIVQQHANQYKRVSWAKILQCLTVQSSGSGPIENSNISRASVKDRFKTFNSQFEELHQRQCQWTVPDSELRESLRLAVAEVLLPAFRSFLKRFGPMIESGKNPQKYIRFSPEDLERMLNEFFEGKTWSEPKR

SEQ ID NO: 78905 - protein, 399 aa, Arabidopsis thaliana
  peptide (1)..(399): Ceres Seq. ID no. 12646716
MVQAGHQQQLFKSYRDTRAAVLEQSLRKLGVERLSKDDVQRMQWEVKLLFAAEKKICDQILDGVESLRDQCFGEVTVNSVAVLLSFGEAIAKSKRSPEKLFVLLDMYEIMRELQPEIELLFGSKPCAEMKESALNLTKRLAQTAQETFADFEEAVEKDATKTAVMDGTVHPLTSYVINYVKFLFDYQTTLRLLFQEFDSKDPDSELGAVTTRIMHALQNNLDGKSKQYKDVALTQLFLMNNVHYIVRSVRRSEAKDLLGDDWVQIHRRIVQQHANQYKRVSWAKILQCLTVQSSGSGPIENSNISRASVKDRFKTFNSQFEELHQRQCQWTVPDSELRESLRLAVAEVLLPAFRSFLKRFGPMIESGKNPQKYIRFSPEDLERMLNEFFEGKTWSEPKR

SEQ ID NO: 78906 - protein, 358 aa, Arabidopsis thaliana
  peptide (1)..(358): Ceres Seq. ID no. 12646717
MQWEVKLLFAAEKKICDQILDGVESLRDQCFGEVTVNSVAVLLSFGEAIAKSKRSPEKLFVLLDMYEIMRELQPEIELLFGSKPCAEMKESALNLTKRLAQTAQETFADFEEAVEKDATKTAVMDGTVHPLTSYVINYVKFLFDYQTTLRLLFQEFDSKDPDSELGAVTTRIMHALQNNLDGKSKQYKDVALTQLFLMNNVHYIVRSVRRSEAKDLLGDDWVQIHRRIVQQHANQYKRVSWAKILQCLTVQSSGSGPIENSNISRASVKDRFKTFNSQFEELHQRQCQWTVPDSELRESLRLAVAEVLLPAFRSFLKRFGPMIESGKNPQKYIRFSPEDLERMLNEFFEGKTWSEPKR

SEQ ID NO: 78907 - DNA, 658 bp, Arabidopsis thaliana
  misc_feature (1)..(658): Ceres Seq. ID no. 12646722
  misc_feature (1)..(658): Ortholog of  Ceres SEQ ID NO 13495070 as cited in SEQ ID NO 53216
  misc_feature (1)..(658): Ortholog of  Ceres SEQ ID NO 13661333 as cited in SEQ ID NO 61620
  misc_feature (1)..(658): Ortholog of  Ceres SEQ ID NO 13596812 as cited in SEQ ID NO 62283
  misc_feature (1)..(658): Ortholog of  Ceres SEQ ID NO 13623021 as cited in SEQ ID NO 0
  misc_feature (1)..(658): Ortholog of  Ceres SEQ ID NO 14302179 as cited in SEQ ID NO 0
ctctttttcttcattcttcatctctcgtcccacaaaagaggacaaaaaaccaaataacgagaagtcccatttctctttgttgtcttaggtgttaccttcatcaaccaaacgcaatggcgaacgcggcgtcggggatggcggtggaggacgagtgtaagctgaagtttttggagctaaaagcgaagagaaactataggttcataatattcaggatagatggacaacaagtggtggtagaaaagctgggaagcccccaagagaactacgacgatttcaccaattacctaccgccaaatgaatgccgctacgccgtttatgacttcgacttcaccactgctgagaatatccagaagagcaagatcttcttcatagcatggtcaccggattcatctagagtaaggatgaagatggtgtatgcgagctcaaaggacaggttcaagagggaattggatggtattcaggtggagttacaagccactgacccgagcgagatgagtctcgacatcatcaaaagtcgagctctctagatctccttgcttttctaattatatatccataatcattgtcattcaaacaatttcctcatcttatgtaactttcgatcttggtttcattcattcttgttcttgactgtttttttctattttatttacatttt

SEQ ID NO: 78908 - protein, 174 aa, Arabidopsis thaliana
  peptide (1)..(174): Ceres Seq. ID no. 12646723
LFLHSSSLVPQKRTKNQITRSPISLCCLRCYLHQPNAMANAASGMAVEDECKLKFLELKAKRNYRFIIFRIDGQQVVVEKLGSPQENYDDFTNYLPPNECRYAVYDFDFTTAENIQKSKIFFIAWSPDSSRVRMKMVYASSKDRFKRELDGIQVELQATDPSEMSLDIIKSRAL

SEQ ID NO: 78909 - protein, 137 aa, Arabidopsis thaliana
  peptide (1)..(137): Ceres Seq. ID no. 12646724
MANAASGMAVEDECKLKFLELKAKRNYRFIIFRIDGQQVVVEKLGSPQENYDDFTNYLPPNECRYAVYDFDFTTAENIQKSKIFFIAWSPDSSRVRMKMVYASSKDRFKRELDGIQVELQATDPSEMSLDIIKSRAL

SEQ ID NO: 78910 - protein, 130 aa, Arabidopsis thaliana
  peptide (1)..(130): Ceres Seq. ID no. 12646725
MAVEDECKLKFLELKAKRNYRFIIFRIDGQQVVVEKLGSPQENYDDFTNYLPPNECRYAVYDFDFTTAENIQKSKIFFIAWSPDSSRVRMKMVYASSKDRFKRELDGIQVELQATDPSEMSLDIIKSRAL

SEQ ID NO: 78911 - DNA, 949 bp, Arabidopsis thaliana
  misc_feature (1)..(949): Ceres Seq. ID no. 12646726
  misc_feature (1)..(949): Ortholog of  Ceres SEQ ID NO 14306349 as cited in SEQ ID NO 59320
actacacccaaaagaacatctttccttcgaattttctttcaattaacatttcttttacttgtctccttgtgtcttcacttcacatcacaacatggctttgaagacagttttcgtagcttttatgattctccttgccatctattcgcaaacgacgtttggggacgatgtgaagtgcgagaatctggatgaaaacacgtgtgccttcgcggtctcgtccactggaaaacgttgcgttttggagaagagcatgaagaggagcgggatcgaggtgtacacatgtcgatcatcggagatagaagctaacaaggtcacaaacattattgaatcggacgagtgcattaaagcgtgtggtctagaccggaaagctttaggtatatcttcggacgcattgttggaatctcagttcacacataaactctgctcggttaaatgcttaaaccaatgtcctaacgtagtcgatctctacttcaaccttgctgctggtgaaggagtgtatttaccaaagctatgtgaatcacaagaagggaagtcaagaagagcaatgtcggaaattaggagctcgggaattgcaatggacactcttgcaccggttggaccagtcatgttgggcgagatagcacctgagccggctacttcaatggacaacatgccttacgtgccggcaccttcaccgtattaattaaggcaagggaaaatggagaggacacgtatgatatcatgagttttcgacgagaataattaagagatttatgtttagttcgacggttttagtattacatcgtttattgcgtccttatatatatgtacttcataaaaacacaccacgacacattaagagatggtgaaagtaggctgcgttctggtgtaacttttacacaagtaacgtcttataatatatatgattcgaataaaatgttgagttttggtgaaaatatataatatgtttctg

SEQ ID NO: 78912 - protein, 195 aa, Arabidopsis thaliana; identical to SEQ ID NO: 30470
  peptide (1)..(195): Ceres Seq. ID no. 12646727

SEQ ID NO: 78913 - protein, 185 aa, Arabidopsis thaliana; identical to SEQ ID NO: 30471
  peptide (1)..(185): Ceres Seq. ID no. 12646728

SEQ ID NO: 78914 - protein, 143 aa, Arabidopsis thaliana; identical to SEQ ID NO: 30472
  peptide (1)..(143): Ceres Seq. ID no. 12646729

SEQ ID NO: 78915 - DNA, 1176 bp, Arabidopsis thaliana
  misc_feature (1)..(1176): Ceres Seq. ID no. 12646738
  misc_feature (1)..(1176): Ortholog of  Ceres SEQ ID NO 12582736 as cited in SEQ ID NO 51489
  misc_feature (1)..(1176): Ortholog of  Ceres SEQ ID NO 13658622 as cited in SEQ ID NO 60780
agccaccaccgcacatctctctcctttgccctcgttttttttcggttctcgtctttcgttcttcacttttagacaagcaaatatgagacccccagttacaggaggacgtggtggtggaggattcagaggtggaagagatggtggtggaagaggttttggaggtggaagaagctttggaggaggccgtagtggtgacagaggccgtagtgggcctcgcggcagaggacgtggtgcgcctcgtggtcgtggaggaccacctcgtggaggaatgaaaggaggaagcaaagtgattgttgagcctcacagacatgcgggagtgtttattgctaagggtaaagaagatgctcttgtcactaagaatttggttcctggtgaagctgtttacaatgagaagagaatctctgttcagaatgaagatggaactaaggttgaatacagagtttggaatccgtttagatctaagttagctgctgcaattcttggtggtgtcgacaacatttggatcaaacctggtgccaaagttctttacttgggtgctgcttctgggaccactgtctctcatgtttctgacctcgttggccctgagggatgtgtttatgctgttgagttttctcatagaagtggtagagatttggtgaacatggccaagaagagaactaacgttattccaatcattgaagatgctagacatccggctaagtacagaatgctcgtgggcatggttgatgtcatattctctgatgttgctcagccagatcaggcaagaatcttggccctgaatgcctcatttttcctcaaaactggtggacactttgttatctcaatcaaggccaactgtatcgactctacagttgcagcagaagcagtcttccagagcgaggtgaagaagctgcaacaagagcagtttaagccagcagaacaggtgactctcgagccgtttgagcgtgaccatgcctgtgttgttggtggttaccgcatgccgaagaaacaaaagaccccagcctcatagaggaactgtggacagtagtgcctgtgtattaagacttatttactgggttttgtttttatctccttgcttgttgtattaagctagagatggataatgcttttatgtctcatttggaaaattttatcctcgttttagaactaatatatattgatgcaacattttcgtcc

SEQ ID NO: 78916 - protein, 335 aa, Arabidopsis thaliana
  peptide (1)..(335): Ceres Seq. ID no. 12646739
ATTAHLSPLPSFFFGSRLSFFTFRQANMRPPVTGGRGGGGFRGGRDGGGRGFGGGRSFGGGRSGDRGRSGPRGRGRGAPRGRGGPPRGGMKGGSKVIVEPHRHAGVFIAKGKEDALVTKNLVPGEAVYNEKRISVQNEDGTKVEYRVWNPFRSKLAAAILGGVDNIWIKPGAKVLYLGAASGTTVSHVSDLVGPEGCVYAVEFSHRSGRDLVNMAKKRTNVIPIIEDARHPAKYRMLVGMVDVIFSDVAQPDQARILALNASFFLKTGGHFVISIKANCIDSTVAAEAVFQSEVKKLQQEQFKPAEQVTLEPFERDHACVVGGYRMPKKQKTPAS

SEQ ID NO: 78917 - protein, 308 aa, Arabidopsis thaliana; identical to SEQ ID NO: 76710
  peptide (1)..(308): Ceres Seq. ID no. 12646740

SEQ ID NO: 78918 - protein, 246 aa, Arabidopsis thaliana; identical to SEQ ID NO: 76711
  peptide (1)..(246): Ceres Seq. ID no. 12646741

SEQ ID NO: 78919 - DNA, 1566 bp, Arabidopsis thaliana
  misc_feature (1)..(1566): Ceres Seq. ID no. 12646782
  misc_feature (1)..(1566): Ortholog of  Ceres SEQ ID NO 15169651 as cited in SEQ ID NO 64156
atggctgcaaatgatgtcccttgctgtgagactatgttctgggtgtacctactcgtatgtgttgctctagtggttttcgcaggtttgatgtcaggactgactcttgggctcatgtcccttagtattgtcgagctcgaggtcatgatcaaagccggtgaaccccatgaccgcaaaaatgcagagaagattctgcccctcgttaaaaaccagcaccttctcttgtgtacactccttataggcaatgctttggcaatggaggctctaccgatctttgtcgattccctgcttccagcctggggtgctattctgatatccgtcactctcatacttgcctttggcgagattatacctcaagctgtatgctctagatacggactgagcatcggggcaaagctatcatttttggttcggttgattattatagtcttcttcccattatcttatccaatcagcaagctactcgatttgttgcttggaaaaagacattccacactcttaggacgagcagagctcaagtcacttgtgtatatgcacggaaacgaggcaggaaaaggcggggaactaactcacgatgaaacaacaatcatatcaggagctctggacatgtcacagaaaagtgctaaagacgcaatgacaccagtctctcagatcttttcactcgatataaattttaagctcgacgagtatgttcttctcttggaattcctctttcttcttcttttagacaatatccagttagttattcttatcatcctctttgggcttcacagaaagacaatgggattaatagcaagtgcaggccatagccgaatacctatatactctgtaaatcctaatgttatcattggatttattctggtaaagaacttgatcaaagtccgtcctgaagatgagacatcgatcagagatctccctatcagaagaatgcccaaggtcgatttgaatttacctctctacgacatcctcaacatcttccaaacaggtcgaagccacatggctgctgtcgttgggaccaagaaccacactaataccaacactccagtccatgaaaagagcatcaatggatcgcctaataaagacgccaacgtttttctgagtattcccgcgttgaactccagcgaaactagtcatcaaagtccaatccgatacattgatagtatttctgatgaagatgaagaagtcattgggattataactctggaagatgttatggaggaacttatacaggaagaaatatatgatgagacggaccagtacgtcgaacttcataaaaggataacaataaacatgccaatgtcgggaaattcgccggaaactgccacttgggcttcggagctggcatctcctatctcgccgtatcgctcaagtcttctgtcgccgagcatcatgatctctacgctgctgcggtcaccaataaattcaccttaccgtcactctctgttactccgaccaacactccacgcttctccaccagcgcaatctccttccatactctctccggacagtaataatgagcgttattattacttgtctcctagtaggtatctttcttgcgctggaagttaa

SEQ ID NO: 78920 - protein, 521 aa, Arabidopsis thaliana
  peptide (1)..(521): Ceres Seq. ID no. 12646783
MAANDVPCCETMFWVYLLVCVALVVFAGLMSGLTLGLMSLSIVELEVMIKAGEPHDRKNAEKILPLVKNQHLLLCTLLIGNALAMEALPIFVDSLLPAWGAILISVTLILAFGEIIPQAVCSRYGLSIGAKLSFLVRLIIIVFFPLSYPISKLLDLLLGKRHSTLLGRAELKSLVYMHGNEAGKGGELTHDETTIISGALDMSQKSAKDAMTPVSQIFSLDINFKLDEYVLLLEFLFLLLLDNIQLVILIILFGLHRKTMGLIASAGHSRIPIYSVNPNVIIGFILVKNLIKVRPEDETSIRDLPIRRMPKVDLNLPLYDILNIFQTGRSHMAAVVGTKNHTNTNTPVHEKSINGSPNKDANVFLSIPALNSSETSHQSPIRYIDSISDEDEEVIGIITLEDVMEELIQEEIYDETDQYVELHKRITINMPMSGNSPETATWASELASPISPYRSSLLSPSIMISTLLRSPINSPYRHSLLLRPTLHASPPAQSPSILSPDSNNERYYYLSPSRYLSCAGS

SEQ ID NO: 78921 - protein, 510 aa, Arabidopsis thaliana
  peptide (1)..(510): Ceres Seq. ID no. 12646784
MFWVYLLVCVALVVFAGLMSGLTLGLMSLSIVELEVMIKAGEPHDRKNAEKILPLVKNQHLLLCTLLIGNALAMEALPIFVDSLLPAWGAILISVTLILAFGEIIPQAVCSRYGLSIGAKLSFLVRLIIIVFFPLSYPISKLLDLLLGKRHSTLLGRAELKSLVYMHGNEAGKGGELTHDETTIISGALDMSQKSAKDAMTPVSQIFSLDINFKLDEYVLLLEFLFLLLLDNIQLVILIILFGLHRKTMGLIASAGHSRIPIYSVNPNVIIGFILVKNLIKVRPEDETSIRDLPIRRMPKVDLNLPLYDILNIFQTGRSHMAAVVGTKNHTNTNTPVHEKSINGSPNKDANVFLSIPALNSSETSHQSPIRYIDSISDEDEEVIGIITLEDVMEELIQEEIYDETDQYVELHKRITINMPMSGNSPETATWASELASPISPYRSSLLSPSIMISTLLRSPINSPYRHSLLLRPTLHASPPAQSPSILSPDSNNERYYYLSPSRYLSCAGS

SEQ ID NO: 78922 - protein, 492 aa, Arabidopsis thaliana
  peptide (1)..(492): Ceres Seq. ID no. 12646785
MSGLTLGLMSLSIVELEVMIKAGEPHDRKNAEKILPLVKNQHLLLCTLLIGNALAMEALPIFVDSLLPAWGAILISVTLILAFGEIIPQAVCSRYGLSIGAKLSFLVRLIIIVFFPLSYPISKLLDLLLGKRHSTLLGRAELKSLVYMHGNEAGKGGELTHDETTIISGALDMSQKSAKDAMTPVSQIFSLDINFKLDEYVLLLEFLFLLLLDNIQLVILIILFGLHRKTMGLIASAGHSRIPIYSVNPNVIIGFILVKNLIKVRPEDETSIRDLPIRRMPKVDLNLPLYDILNIFQTGRSHMAAVVGTKNHTNTNTPVHEKSINGSPNKDANVFLSIPALNSSETSHQSPIRYIDSISDEDEEVIGIITLEDVMEELIQEEIYDETDQYVELHKRITINMPMSGNSPETATWASELASPISPYRSSLLSPSIMISTLLRSPINSPYRHSLLLRPTLHASPPAQSPSILSPDSNNERYYYLSPSRYLSCAGS

SEQ ID NO: 78923 - DNA, 2082 bp, Arabidopsis thaliana
  misc_feature (1)..(2082): Ceres Seq. ID no. 12646813
  misc_feature (1)..(2082): Ortholog of  Ceres SEQ ID NO 13584538 as cited in SEQ ID NO 64739
aagcacttcttctccgccttcgtaagttccgccgaaaagaaccaaatccttcactactctgtctcagctttcgacctctctcttctcattcctttgcaacttctcacttctcgaattccttctcttcaaaatcagaaatggctcaagtggttgctaccaggtcaattcaaggctcgatgttatctcccaacggtggatctgtgtctacaagatccgagaagctattgaaaccagcgagttttgcagtgaaggttcttggcaacgaagcaaagagaagtggaagagtctctgtaagaagcagaagagtggttgatactactgtgagatccgctcgtgttgagactgaagtcattcctgtttctcctgaagatgtgcctaacagagaggagcagcttgagaggttgttggaaatgcagcagtttggtgatacatcggtagggatgtggtcgaagccgacagtgaggaggaagacaaagattgtttgcaccgttggtccgtcgaccaacacacgagaaatgatatggaaattggctgaagctgggatgaatgttgctaggatgaatatgtctcatggagatcatgcttcacataagaaggttattgatttggttaaagaatacaatgcacaaactaaagacaacactattgctatcatgcttgacaccaagggtccggaagttaggagtggagatttacctcagccaattatgttagatcctggtcaagagtttacctttacaattgagagaggagtcagcacaccaagttgtgtcagtgttaactatgatgatttcgttaatgacgtggaagcgggtgacatgcttcttgttgatggtggtatgatgtcgtttatggtgaagtcaaagaccaaagactctgtcaaatgtgaagttgttgatggtggagaacttaagtcaaggagacacctgaatgtccgaggaaagagtgcaactttaccttcaatcactgagaaggactgggaggatattaaatttggagtggagaacaaagttgacttttatgcagtttcctttgtcaaagatgctcaagttgtacacgagttgaagaaataccttcaaaatagtggtgctgatatacacgtgatagtgaaaattgagagtgcagactccatacctaacttgcactccattatcacagcatcagatggggcaatggttgcaagaggtgatcttggtgcagagcttccaattgaagaagtccccattcttcaggaggagatcattaacctgtgccgtagtatgggaaaagctgttattgttgcgactaacatgcttgagagtatgatagttcatccaactccaacccgggcagaggtctcagacattgctatcgctgttagagaaggtgctgatgcggtaatgctttcaggagaaactgctcacggaaagttcccattgaaagctgctggagtgatgcacactgttgcattgcgaacagaagcaaccattactagcggtgaaatgccacctaatcttggtcaagccttcaagaaccatatgagtgagatgtttgcataccatgcaaccatgatgtcaaacacacttggaacttcaactgttgtcttcaccagaaccggtttcatggccatattgttaagtcactatcgtccttccggcacaatctatgccttcacaaatgagaaaaaaatacaacaaagattagctttgtatcaaggtgtatgccccatatatatggagttcacagatgatgcagaagaaacttttgctaatgctttggctacattactgaaacaaggaatggtgaagaagggagaggaaatagcaatcgtacagagcggtacacagccaatctggcgatctcaatcgacacataacatccaagtccgcaaggtttaaagcttcttttaagatgggatgtctttaatatgtagaacctcgtttttggttataattttcgttgcatgtctctcttctcttgtactattcacacttgttgtttgctgtatcttcttcttcagtttgctttgctacgattgtggtttttggagacattatagctcattaactgtttgtgagaccaaatgtgtcagaatccgctatt

SEQ ID NO: 78924 - protein, 624 aa, Arabidopsis thaliana
  peptide (1)..(624): Ceres Seq. ID no. 12646814
ALLLRLRKFRRKEPNPSLLCLSFRPLSSHSFATSHFSNSFSSKSEMAQVVATRSIQGSMLSPNGGSVSTRSEKLLKPASFAVKVLGNEAKRSGRVSVRSRRVVDTTVRSARVETEVIPVSPEDVPNREEQLERLLEMQQFGDTSVGMWSKPTVRRKTKIVCTVGPSTNTREMIWKLAEAGMNVARMNMSHGDHASHKKVIDLVKEYNAQTKDNTIAIMLDTKGPEVRSGDLPQPIMLDPGQEFTFTIERGVSTPSCVSVNYDDFVNDVEAGDMLLVDGGMMSFMVKSKTKDSVKCEVVDGGELKSRRHLNVRGKSATLPSITEKDWEDIKFGVENKVDFYAVSFVKDAQVVHELKKYLQNSGADIHVIVKIESADSIPNLHSIITASDGAMVARGDLGAELPIEEVPILQEEIINLCRSMGKAVIVATNMLESMIVHPTPTRAEVSDIAIAVREGADAVMLSGETAHGKFPLKAAGVMHTVALRTEATITSGEMPPNLGQAFKNHMSEMFAYHATMMSNTLGTSTVVFTRTGFMAILLSHYRPSGTIYAFTNEKKIQQRLALYQGVCPIYMEFTDDAEETFANALATLLKQGMVKKGEEIAIVQSGTQPIWRSQSTHNIQVRKV

SEQ ID NO: 78925 - protein, 579 aa, Arabidopsis thaliana
  peptide (1)..(579): Ceres Seq. ID no. 12646815
MAQVVATRSIQGSMLSPNGGSVSTRSEKLLKPASFAVKVLGNEAKRSGRVSVRSRRVVDTTVRSARVETEVIPVSPEDVPNREEQLERLLEMQQFGDTSVGMWSKPTVRRKTKIVCTVGPSTNTREMIWKLAEAGMNVARMNMSHGDHASHKKVIDLVKEYNAQTKDNTIAIMLDTKGPEVRSGDLPQPIMLDPGQEFTFTIERGVSTPSCVSVNYDDFVNDVEAGDMLLVDGGMMSFMVKSKTKDSVKCEVVDGGELKSRRHLNVRGKSATLPSITEKDWEDIKFGVENKVDFYAVSFVKDAQVVHELKKYLQNSGADIHVIVKIESADSIPNLHSIITASDGAMVARGDLGAELPIEEVPILQEEIINLCRSMGKAVIVATNMLESMIVHPTPTRAEVSDIAIAVREGADAVMLSGETAHGKFPLKAAGVMHTVALRTEATITSGEMPPNLGQAFKNHMSEMFAYHATMMSNTLGTSTVVFTRTGFMAILLSHYRPSGTIYAFTNEKKIQQRLALYQGVCPIYMEFTDDAEETFANALATLLKQGMVKKGEEIAIVQSGTQPIWRSQSTHNIQVRKV

SEQ ID NO: 78926 - protein, 566 aa, Arabidopsis thaliana
  peptide (1)..(566): Ceres Seq. ID no. 12646816
MLSPNGGSVSTRSEKLLKPASFAVKVLGNEAKRSGRVSVRSRRVVDTTVRSARVETEVIPVSPEDVPNREEQLERLLEMQQFGDTSVGMWSKPTVRRKTKIVCTVGPSTNTREMIWKLAEAGMNVARMNMSHGDHASHKKVIDLVKEYNAQTKDNTIAIMLDTKGPEVRSGDLPQPIMLDPGQEFTFTIERGVSTPSCVSVNYDDFVNDVEAGDMLLVDGGMMSFMVKSKTKDSVKCEVVDGGELKSRRHLNVRGKSATLPSITEKDWEDIKFGVENKVDFYAVSFVKDAQVVHELKKYLQNSGADIHVIVKIESADSIPNLHSIITASDGAMVARGDLGAELPIEEVPILQEEIINLCRSMGKAVIVATNMLESMIVHPTPTRAEVSDIAIAVREGADAVMLSGETAHGKFPLKAAGVMHTVALRTEATITSGEMPPNLGQAFKNHMSEMFAYHATMMSNTLGTSTVVFTRTGFMAILLSHYRPSGTIYAFTNEKKIQQRLALYQGVCPIYMEFTDDAEETFANALATLLKQGMVKKGEEIAIVQSGTQPIWRSQSTHNIQVRKV

SEQ ID NO: 78927 - DNA, 792 bp, Arabidopsis thaliana
  misc_feature (1)..(792): Ceres Seq. ID no. 12646871
  misc_feature (1)..(792): Ortholog of  Ceres SEQ ID NO 15169248 as cited in SEQ ID NO 55022
  misc_feature (1)..(792): Ortholog of  Ceres SEQ ID NO 14315042 as cited in SEQ ID NO 56959
  misc_feature (1)..(792): Ortholog of  Ceres SEQ ID NO 12608620 as cited in SEQ ID NO 60192
  misc_feature (1)..(792): Ortholog of  Ceres SEQ ID NO 13662898 as cited in SEQ ID NO 66199
  misc_feature (1)..(792): Ortholog of  Ceres SEQ ID NO 13654314 as cited in SEQ ID NO 67914
atgggtgataaacttcgattatccatcggaattttgggaaacggagcttctctgttgctatatacagctccaatagtaacattttcaagggtgtttaagaagaaaagcacagaggaattctcatgttttccttacgttatgacactctttaactgtttgatatatacttggtacggtttaccgattgtgagtcatctttgggagaatcttcctctcgtcaccattaatggagtcggcatccttctcgaatctatcttcattttcatatatttctactacgcatcaccaaaagaaaagattaaggttggtgttacatttgttccggtgatcgttgggttcggcttaacgacagcaatctcagccttggtatttgacgaccatcgtcaccgaaaatcattcgtcggaagtgttggcctcgtggcttccatctctatgtatggttctcctctcgtcgttatgaagaaagtgatagagacaagaagtgtggaatacatgccgttttacttgtccttcttctcatttctggctagttccctttggttggcatatggcttactcagccatgatctctttcttgcgtcacctaatatggttgcgactccattgggaattctccaacttatcctctacttcaagtacaagaataagaaggatttagcaccaacaacaatggtgatcaccaaacgaaatgatcatgatgacaagaacaaagccacacttgagtttgttgttgacgttgatcgtaatagtgataccaatgagaagaattctaacaatgcctcatcgatctaa

SEQ ID NO: 78928 - protein, 263 aa, Arabidopsis thaliana
  peptide (1)..(263): Ceres Seq. ID no. 12646872
MGDKLRLSIGILGNGASLLLYTAPIVTFSRVFKKKSTEEFSCFPYVMTLFNCLIYTWYGLPIVSHLWENLPLVTINGVGILLESIFIFIYFYYASPKEKIKVGVTFVPVIVGFGLTTAISALVFDDHRHRKSFVGSVGLVASISMYGSPLVVMKKVIETRSVEYMPFYLSFFSFLASSLWLAYGLLSHDLFLASPNMVATPLGILQLILYFKYKNKKDLAPTTMVITKRNDHDDKNKATLEFVVDVDRNSDTNEKNSNNASSI

SEQ ID NO: 78929 - protein, 217 aa, Arabidopsis thaliana
  peptide (1)..(217): Ceres Seq. ID no. 12646873
MTLFNCLIYTWYGLPIVSHLWENLPLVTINGVGILLESIFIFIYFYYASPKEKIKVGVTFVPVIVGFGLTTAISALVFDDHRHRKSFVGSVGLVASISMYGSPLVVMKKVIETRSVEYMPFYLSFFSFLASSLWLAYGLLSHDLFLASPNMVATPLGILQLILYFKYKNKKDLAPTTMVITKRNDHDDKNKATLEFVVDVDRNSDTNEKNSNNASSI

SEQ ID NO: 78930 - DNA, 1095 bp, Arabidopsis thaliana
  misc_feature (1)..(1095): Ceres Seq. ID no. 12646876
  misc_feature (1)..(1095): Ortholog of  Ceres SEQ ID NO 13584275 as cited in SEQ ID NO 63905
atgcaggagataataccggattttcttgaagagtgtgaatttgtcgacacttcactagccggagatgatctatttgccatcttagagagtcttgaaggtgccggagagatatctccgacagctgcatctacacctaaagatggaaccacaagttccaaggagttagttaaggatcaagattatgaaaactcatctcctaagaggaaaaagcaaagactagaaaccaggaaagaagaggacgaagaagaagaagacggagacggagaagcagaagaagataataagcaagatgggcaacaaaagatgtctcatgtaaccgtggaacgtaaccggagaaagcaaatgaacgagcacttaaccgttttgcgttctcttatgccttgtttctacgtcaaacggggggaccaagcatcgatcataggaggagttgtggagtacataagcgagttacaacaagttctccaatctttggaagccaagaaacaacgtaaaacctacgccgaagtcctaagcccgagagttgtcccgagccctcgtccttcaccgcctgttctaagcccaagaaaaccgcctcttagcccgcgcatcaaccaccaccagattcaccaccacctacttctccctcccataagtcctcgaacacctcagccaacaagcccataccgggccattccaccgcaactaccactcatcccacagcctccgcttcgctcttacagctcattggccagttgcagcagcttaggagatccacctccatactctcctgcttcatcttcttcatctccttcagttagtagtaaccatgagagtagtgtgatcaatgagcttgttgctaactcaaaatcggctttggctgatgtggaagtgaagttttcaggagctaacgtgctgctcaaaacggtgtcgcataagatcccgggacaagttatgaagataattgctgctcttgaagatttggctcttgagattcttcaggttaatattaacaccgtcgacgaaaccatgcttaattctttcaccatcaagattggaattgagtgccaactaagtgcagaagaactggctcaacaaattcagcaaacattctgctag

SEQ ID NO: 78931 - protein, 364 aa, Arabidopsis thaliana
  peptide (1)..(364): Ceres Seq. ID no. 12646877
MQEIIPDFLEECEFVDTSLAGDDLFAILESLEGAGEISPTAASTPKDGTTSSKELVKDQDYENSSPKRKKQRLETRKEEDEEEEDGDGEAEEDNKQDGQQKMSHVTVERNRRKQMNEHLTVLRSLMPCFYVKRGDQASIIGGVVEYISELQQVLQSLEAKKQRKTYAEVLSPRVVPSPRPSPPVLSPRKPPLSPRINHHQIHHHLLLPPISPRTPQPTSPYRAIPPQLPLIPQPPLRSYSSLASCSSLGDPPPYSPASSSSSPSVSSNHESSVINELVANSKSALADVEVKFSGANVLLKTVSHKIPGQVMKIIAALEDLALEILQVNINTVDETMLNSFTIKIGIECQLSAEELAQQIQQTFC

SEQ ID NO: 78932 - protein, 263 aa, Arabidopsis thaliana
  peptide (1)..(263): Ceres Seq. ID no. 12646878
MSHVTVERNRRKQMNEHLTVLRSLMPCFYVKRGDQASIIGGVVEYISELQQVLQSLEAKKQRKTYAEVLSPRVVPSPRPSPPVLSPRKPPLSPRINHHQIHHHLLLPPISPRTPQPTSPYRAIPPQLPLIPQPPLRSYSSLASCSSLGDPPPYSPASSSSSPSVSSNHESSVINELVANSKSALADVEVKFSGANVLLKTVSHKIPGQVMKIIAALEDLALEILQVNINTVDETMLNSFTIKIGIECQLSAEELAQQIQQTFC

SEQ ID NO: 78933 - protein, 250 aa, Arabidopsis thaliana
  peptide (1)..(250): Ceres Seq. ID no. 12646879
MNEHLTVLRSLMPCFYVKRGDQASIIGGVVEYISELQQVLQSLEAKKQRKTYAEVLSPRVVPSPRPSPPVLSPRKPPLSPRINHHQIHHHLLLPPISPRTPQPTSPYRAIPPQLPLIPQPPLRSYSSLASCSSLGDPPPYSPASSSSSPSVSSNHESSVINELVANSKSALADVEVKFSGANVLLKTVSHKIPGQVMKIIAALEDLALEILQVNINTVDETMLNSFTIKIGIECQLSAEELAQQIQQTFC

SEQ ID NO: 78934 - DNA, 1350 bp, Arabidopsis thaliana
  misc_feature (1)..(1350): Ceres Seq. ID no. 12646880
  misc_feature (1)..(1350): Ortholog of  Ceres SEQ ID NO 13663734 as cited in SEQ ID NO 67061
atggaggtgaattcgatgggactaaattgtcggtgtcttgagttagaagaaagggttttaaaaggtgaagaaaggtacactcacttagaaacagagttgcagaaacgaaacaatgagtttgaatcacttgaattgaagtttaaagaattggaatcagagaagttagtagttgaagaagagtcaaggaatcttaaagaatctgaggaagatgatggtgaacagagcattggaggctcaccttgtatgaccacaccggttaaagactatatattagggagagacagagatagagacagagacaccatgtcttctcggagacgagtgaataagatgttgtcgtttgaagatgatggtcacaaattgactgatgtagttgatttatgtgatagtgaaacagagcagagaagtgaggaggaggaatttgctgatgttatggatactatagaggaggcaaatattggtgagaattatgaagatgaagatgtggaagcttgtgatgctaacacaagtagtcctctttctaggcgtaagaggaagcgggttattgccagcgatgatgatgatgatgctgatgatgatgatgaagataatataccgatttcaatactcaagaatttgaaaccaactaaccaagagatgtcagatttgtttgatacacctaacaaaggagagagtgagtctagaagattgagtggacaacgtcgagtgtcgtcaagactgaataaaaagagagtttctgaagaggtatctgcttcaacagagagacttgtgggaatcccaacaaccgataatgccgaggatgatgagacagaagaagaaggttcagagagtgagggtgagagtttagatgggtttattatcgatgatgatgatagtcaggagtctgtcagtgaaaagtctgatgaaatcggggtagaggaatccgatggagaagttggttatgctgatgttatgtcaaggttaaggagggagaagaaacccgagaagcgtaaatgggagtatgaggcagatatgttggcagatttcggtaaagatcctgagctttgtatgagagcggtttgtgttctgtttaggtttcaaacagaagatgaaaaagtggaaagatcaagtcatgtctctaatggtcgcggtttcagcaaggttgacgctgtaaggggcactagcattgcactgtttctgacggatggagattccgcaggcgatatgaagaaatccgttgaggaattgaaagtttttgactttaaaggcgtagagaaatgcgaagaattagcacgcaaatactctaaacaactcttccagatctataacaacagagaagatccattctttactcttcctccatctccatga

SEQ ID NO: 78935 - protein, 449 aa, Arabidopsis thaliana
  peptide (1)..(449): Ceres Seq. ID no. 12646881
MEVNSMGLNCRCLELEERVLKGEERYTHLETELQKRNNEFESLELKFKELESEKLVVEEESRNLKESEEDDGEQSIGGSPCMTTPVKDYILGRDRDRDRDTMSSRRRVNKMLSFEDDGHKLTDVVDLCDSETEQRSEEEEFADVMDTIEEANIGENYEDEDVEACDANTSSPLSRRKRKRVIASDDDDDADDDDEDNIPISILKNLKPTNQEMSDLFDTPNKGESESRRLSGQRRVSSRLNKKRVSEEVSASTERLVGIPTTDNAEDDETEEEGSESEGESLDGFIIDDDDSQESVSEKSDEIGVEESDGEVGYADVMSRLRREKKPEKRKWEYEADMLADFGKDPELCMRAVCVLFRFQTEDEKVERSSHVSNGRGFSKVDAVRGTSIALFLTDGDSAGDMKKSVEELKVFDFKGVEKCEELARKYSKQLFQIYNNREDPFFTLPPSP

SEQ ID NO: 78936 - protein, 444 aa, Arabidopsis thaliana
  peptide (1)..(444): Ceres Seq. ID no. 12646882
MGLNCRCLELEERVLKGEERYTHLETELQKRNNEFESLELKFKELESEKLVVEEESRNLKESEEDDGEQSIGGSPCMTTPVKDYILGRDRDRDRDTMSSRRRVNKMLSFEDDGHKLTDVVDLCDSETEQRSEEEEFADVMDTIEEANIGENYEDEDVEACDANTSSPLSRRKRKRVIASDDDDDADDDDEDNIPISILKNLKPTNQEMSDLFDTPNKGESESRRLSGQRRVSSRLNKKRVSEEVSASTERLVGIPTTDNAEDDETEEEGSESEGESLDGFIIDDDDSQESVSEKSDEIGVEESDGEVGYADVMSRLRREKKPEKRKWEYEADMLADFGKDPELCMRAVCVLFRFQTEDEKVERSSHVSNGRGFSKVDAVRGTSIALFLTDGDSAGDMKKSVEELKVFDFKGVEKCEELARKYSKQLFQIYNNREDPFFTLPPSP

SEQ ID NO: 78937 - protein, 368 aa, Arabidopsis thaliana; identical to SEQ ID NO: 72933
  peptide (1)..(368): Ceres Seq. ID no. 12646883

SEQ ID NO: 78938 - DNA, 1365 bp, Arabidopsis thaliana
  misc_feature (1)..(1365): Ceres Seq. ID no. 12646921
  misc_feature (1)..(1365): Ortholog of  Ceres SEQ ID NO 14302875 as cited in SEQ ID NO 66242
  misc_feature (1)..(1365): Ortholog of  Ceres SEQ ID NO 13660287 as cited in SEQ ID NO 67316
atgacatccgtcgtgtgtatgggacgactcggtagccttgagctcgcaggaggagccttagccatcggtttcaccaacatcaccggttactccgtcctctctggtttagccaccggtatggaaccattatgtggtcaagccatcggttctaaaaacccttcactcgcttccttaaccctcaagcgaaccatcttcctccttctcttagcttctcttcccatatcactcctttggctaaacctcgcgcctctaatgctgatgctccgccaacaacatgatatcactcgtgtcgcatctctctattgttccttctctttgcctgatcttctcgctaatagtttccttcatcctttacgtatttacttacgttgtaaaggcaccacttggcctttgatgtggtgcacgttagtctccgtccttcttcatcttcccattactgctttcttcacgttttacatctctctcggagttcccggagtcgccgtctcttcttttcttaccaacttcatctctttgtcgcttctcctttgctacatctacttggaaaacaacaacaacgacaaaaccacttccaagtctctttgtcttgatacgccgttgatgctgtatggttcgagagactccggtgaaaatgatgtgtggtcaacgctggttaaattcgctgttccgagctgtatagcggtttgcttggagtggtggtggtacgagttcatgacggtcctcgctggatatctccccgagccgaaggtggcgctagcagcagccgccatcgtgatacaaacaacctcattgatgtatacaatcccaacggccctctcggccgcggtatccacgagggtaagcaacgagttaggagcaggacggccagagaaagcaaaaacagcggcgactgtggctgtcggagccgccgtggcagtgtcagtgtttggacttgtggggaccaccgtggggagagaagcttggggaaaagttttcaccgccgacaaagttgtcctcgagctgacggcggcggttattccggtgattggagcttgtgagcttgccaactgtcctcagaccattagctgtggaatcttacgtggcagtgcgaggccaggtataggggccaagattaatttctacgccttctatgtagttggagcaccagtggcggttgttttagcgtttgtgtggggtttaggcttcatgggcctatgctatggcttgcttggggcacagctagcttgtgcaatctccattttgaccgttgtttataacacagattggaacaaagagtccttgaaggctcatgacttggtgggcaagaacgtcatttcacctaatgtcgatcaaattattgtcaaatgcgaagaaggcctacactaa

SEQ ID NO: 78939 - protein, 454 aa, Arabidopsis thaliana
  peptide (1)..(454): Ceres Seq. ID no. 12646922
MTSVVCMGRLGSLELAGGALAIGFTNITGYSVLSGLATGMEPLCGQAIGSKNPSLASLTLKRTIFLLLLASLPISLLWLNLAPLMLMLRQQHDITRVASLYCSFSLPDLLANSFLHPLRIYLRCKGTTWPLMWCTLVSVLLHLPITAFFTFYISLGVPGVAVSSFLTNFISLSLLLCYIYLENNNNDKTTSKSLCLDTPLMLYGSRDSGENDVWSTLVKFAVPSCIAVCLEWWWYEFMTVLAGYLPEPKVALAAAAIVIQTTSLMYTIPTALSAAVSTRVSNELGAGRPEKAKTAATVAVGAAVAVSVFGLVGTTVGREAWGKVFTADKVVLELTAAVIPVIGACELANCPQTISCGILRGSARPGIGAKINFYAFYVVGAPVAVVLAFVWGLGFMGLCYGLLGAQLACAISILTVVYNTDWNKESLKAHDLVGKNVISPNVDQIIVKCEEGLH

SEQ ID NO: 78940 - protein, 448 aa, Arabidopsis thaliana
  peptide (1)..(448): Ceres Seq. ID no. 12646923
MGRLGSLELAGGALAIGFTNITGYSVLSGLATGMEPLCGQAIGSKNPSLASLTLKRTIFLLLLASLPISLLWLNLAPLMLMLRQQHDITRVASLYCSFSLPDLLANSFLHPLRIYLRCKGTTWPLMWCTLVSVLLHLPITAFFTFYISLGVPGVAVSSFLTNFISLSLLLCYIYLENNNNDKTTSKSLCLDTPLMLYGSRDSGENDVWSTLVKFAVPSCIAVCLEWWWYEFMTVLAGYLPEPKVALAAAAIVIQTTSLMYTIPTALSAAVSTRVSNELGAGRPEKAKTAATVAVGAAVAVSVFGLVGTTVGREAWGKVFTADKVVLELTAAVIPVIGACELANCPQTISCGILRGSARPGIGAKINFYAFYVVGAPVAVVLAFVWGLGFMGLCYGLLGAQLACAISILTVVYNTDWNKESLKAHDLVGKNVISPNVDQIIVKCEEGLH

SEQ ID NO: 78941 - protein, 415 aa, Arabidopsis thaliana
  peptide (1)..(415): Ceres Seq. ID no. 12646924
MEPLCGQAIGSKNPSLASLTLKRTIFLLLLASLPISLLWLNLAPLMLMLRQQHDITRVASLYCSFSLPDLLANSFLHPLRIYLRCKGTTWPLMWCTLVSVLLHLPITAFFTFYISLGVPGVAVSSFLTNFISLSLLLCYIYLENNNNDKTTSKSLCLDTPLMLYGSRDSGENDVWSTLVKFAVPSCIAVCLEWWWYEFMTVLAGYLPEPKVALAAAAIVIQTTSLMYTIPTALSAAVSTRVSNELGAGRPEKAKTAATVAVGAAVAVSVFGLVGTTVGREAWGKVFTADKVVLELTAAVIPVIGACELANCPQTISCGILRGSARPGIGAKINFYAFYVVGAPVAVVLAFVWGLGFMGLCYGLLGAQLACAISILTVVYNTDWNKESLKAHDLVGKNVISPNVDQIIVKCEEGLH

SEQ ID NO: 78942 - DNA, 1950 bp, Arabidopsis thaliana
  misc_feature (1)..(1950): Ceres Seq. ID no. 12646933
  misc_feature (1)..(1950): Ortholog of  Ceres SEQ ID NO 13594037 as cited in SEQ ID NO 55666
  misc_feature (1)..(1950): Ortholog of  Ceres SEQ ID NO 13657707 as cited in SEQ ID NO 66407
attatattttgttaagtccactcttctctctcatatcttctaaccaaaacagagtcacaaggggctcttaagcccttccaactaaattcttttcttttgttctcttgaaactgaatccaccagacaaaaaaatgggggttgatggtgaactgaaaaagaagaaatgcatcattgctggggttatcacagccttgctcgttctcatggttgtcgctgttggcatcacaacatcaagaaacaccagtcattcagaaaaaatcgtccctgtgcagattaaaacagccaccacggcagttgaagcagtttgtgcacctactgattacaaagagacttgtgtcaatagtctcatgaaagcttctcctgactctactcagcctcttgatctcattaagcttggcttcaacgtcaccattcgatccatagaagatagcatcaagaaagcttccgtggagctgacagccaaggcagctaatgacaaggataccaaaggggctttggagttgtgtgagaagcttatgaatgatgctacagatgatctgaagaagtgtcttgataactttgatgggttctcaattcctcagattgaggactttgtcgaagatcttcgtgtttggcttagtggctccattgcttatcaacaaacatgtatggatacgtttgaagaaactaactcgaaactttcacaagacatgcagaaaatctttaaaacatctagagaactcactagtaatggccttgccatgattactaacatctctaaccttctcggagagttcaacgtcacaggagtaaccggggatctcggtaaatacgcaagaaaacttttgtcggcggaagacggtataccaagttgggttggaccaaacactagacggctcatggcaacgaaaggaggtgtgaaagctaacgtggtggttgcacacgacggaagtggtcagtacaagactatcaatgaagccttgaatgcagtgcctaaagccaaccaaaagccatttgttatctacattaagcaaggtgtctataacgagaaagttgacgtcaccaagaaaatgactcatgtcactttcatcggtgatggaccaaccaaaactaagatcactggtagtctcaactattacattggcaaggtcaagacataccttactgccactgttgcgatcaatggtgataacttcacggcgaagaacatcgggtttgaaaacactgcaggtcccgaaggacatcaagctgtggccctaagagtctcggcggatttggccgtcttctacaactgccaaatcgatggttaccaagacacactctacgtccattctcatcgtcaattcttccgtgactgcacagtctcgggcaccgttgacttcattttcggcgatggtatagtagtcttacaaaactgtaacattgttgtgagaaaacccatgaaaagtcagtcttgcatgatcacagcccaaggccgctccgataaacgtgaatccaccggactcgtgctacaaaactgccatattaccggagaaccagcgtatattcccgtaaaatctataaacaaagcatatcttggaaggccatggaaagagttttcaagaaccattataatgggaacaaccatagacgacgttattgatccagcgggatggcttccttggaatggtgattttgcacttaatacgctttactatgctgagtatgagaataatgggcctgggtcaaaccaagcccaacgtgttaagtggcctggaattaagaaactatcgcccaagcaagctcttcgatttactcctgctaggtttttacgtggtaacttgtggattccaccaaatcgtgtgccttacatggggaattttcagtagattccaattggtgaattttccactttctgtgtgctctttaaaaaaaaaaatgaaggtgaataatttatatgcgtgtcttgtcttaaagtcctgacttgccgaa

SEQ ID NO: 78943 - protein, 571 aa, Arabidopsis thaliana; identical to SEQ ID NO: 27572
  peptide (1)..(571): Ceres Seq. ID no. 12646934

SEQ ID NO: 78944 - protein, 547 aa, Arabidopsis thaliana; identical to SEQ ID NO: 27573
  peptide (1)..(547): Ceres Seq. ID no. 12646935

SEQ ID NO: 78945 - protein, 499 aa, Arabidopsis thaliana; identical to SEQ ID NO: 27574
  peptide (1)..(499): Ceres Seq. ID no. 12646936

SEQ ID NO: 78946 - DNA, 5076 bp, Arabidopsis thaliana
  misc_feature (1)..(5076): Ceres Seq. ID no. 12646984
  misc_feature (1)..(5076): Ortholog of  Ceres SEQ ID NO 15170434 as cited in SEQ ID NO 52810
  misc_feature (1)..(5076): Ortholog of  Ceres SEQ ID NO 14307069 as cited in SEQ ID NO 54322
atggcacgtgacccattgaatgaaatcagcaaaacgcagcgttttagagacaatgtgttatggttttggacttctttcgaaacaatcgtttgctctgtgatcgtagttctccttagctcacgcggcatcaccgagattccagaccctgatattgttcaaagtgttgcgcctaacattgatctagacctccgggaagtttactttttgatgctccacttactttcatctgggccgtgccagaaaacttatgcactgttgcggcatgaacttcttgaacatgagcttcttcctagaagatatcatgcttggtactcgaggagtggattgcctagtggggatgagaatgatgatggcaattcctttcctttgaactatactgagttggctaagaggtattctcatgtaaaaaaagatcacctggtggagcttctaaagcaattggtctttgtttcaaataggcctaatccctcacgagggatcggtgatggaaataaaatgattggagctggggttccaacacttttaggcactggctcgttctcccttttgagctctgacaaggaaatagttggaagtgatctcaaaccaccacctattggcatgcgttggcctcatatgcatgctgatcaggttcgtggtattagtttgagggaaattggtggtggttttgccagacatcatcgtgccccatcaattcgagcagcatgttacgtcattgcaaaaccatcgtcaatggtacaaaagatgcagaacatcaagaggctacgtggacacagaaatgctgtgtactgtgctatattagatcgctcaggaaggtatgtaatcactggttcagatgaccgccttgtaaaagtatggtcgatggatactgcatactgcctggccagctgtcgagggcatgaaggtgacataactgatcttgctgtgagttcgaacaacattttcatagcatccgcatcaaatgattgtgtgatccgcgtttggcgattgccagatggcttaccagtttctgttctccgtggacatactggagctgttactgctattgcctttagtcccagacctggatccccgtaccagcttctctcatcgtctgatgatggtacatgtaggatatgggatgcccggggagcccaatttgctccccggatatatgtccctaggcctcctagtcctgatggaaagaacagtggcccttcttctagtaatgctcagcagagtcaccaaatcttttgctgtgcattcaatgctagtggatctgtctttgtcactggcagttctgacactcttgctagagtatactcggtttggagtgctaataagaccaatactgatgatccagagcagccaaatcatgagatggatgttctggctggacatgagaatgatgttaattatgttcagttcagtggttgtgctgcggggtctaaattttctgtaactgactactcaaaagacgagaatgttccaaaatttaagaattcctggttttgtcatgataacatagttacatgctctcgtgatggtagtgcaatcatttggatcccaagattacggagatctcatggaaaaagctgccgatggacacgagcatatcatctcaaggttccacctccgcccatgccccctcaacctcctagaggggggccacgtcaaaggatcctacctacaccccgtggggttaacatgattgcttggagtctggataatcgttttgtccttgccgctattatggattgtagaatatgcgtgtggaatgcctctgatggtagcttggtacattctttgactggtcatacagcatctacatatgttatggacgtccatccattcaatcctcgtatagctatgagtgctggctatgatggaaaaacaatagtgtgggatatatgggaaggcatacctatacaaatatacgacatttcacactacaagttggttgatgggaagttttcaccggatggaacttcaattatactttcagatgatgtgggccaattgtacatattaagtactggccaaggggattctcaaaaagacgctaaatatgatcagttcttcctgggggattatcgtccattaattcaggacacatatggtaatgtccttgaccaggaatctcagcttcaaccttatcgccgaaatatggaggatcctctttgtgattcagggatgattccatatgaagagccatatcagaccacgtttcagaaacggcgactcggcgccttaggcaaagaatggcgaccatcttctttgaagcttgctgtcgggccagatatcactttagatcgagattaccaaatgccacctctggcagatctagacttagccgaaccgttgccagagtttatagatgtaatggagtgggaaccagaagttgatatcttaagtgatgaaaacgactctgaatacaatgtgccagaggagtattcgtctggaaaagagcaagaatgtttaaattcttcaacctctggtgagtcaggttccagttctggtgaaagctatgaggatgatgatcatcagaatagccttagaagatccaaaaggaaaaaacataagaaagaagctgggatcatgacttcttcgggtaggcgtgtcaaaaagaggaactttgatgagcttgagggagctccaagcaacaaaaaacgtaccagaaaatctaggagtggtcgtaaagaatcgaagaggaaatcttcaaaatctaaatcgtctagacctaggcgagcagctgcacgaaatgctctctcttggttttctaagattacaggtacatctaaagatgcagaagaggaggaagtctctgaattgagtgattcatcagaaagtgaatcgacaacacaagactcaggtactggggatagtgaacttgaagtagctttgttaaatgggcatgggaagcaatcgaaggggaaaactatcctcgtatgtgattctgatgatggggctcaacaatgtgatatcagagaaactcatactgctgaaaggaggagattggttcttagatttcctgttaggaattcagataagcttaccttactggagaacctacctggatcatcttgtgatgttccaagtccaactttagggaacggctgtactgaagactcgaggattcctgggaaccaatttgaagggctagatgtaagtaaagtcaaatggggaatggttaaggctcgtacaacaaagcgaataagaggtgaagcaatatcatcgcatgaacttatgggctctgacccggagggaaaggaaaataatgttaaggaagactcaaatcaccgtggaaatggtgttacagcacctagttgtttggaattgaaaacagatatagatgacatggcagttgacactgacacggtgatctctaatggtttgccaaatggtgggaagcgatatccagaactggatgggtcaccaagtcgagtggctgatgacaaggcctctaatagttctcaaaatgtaacccaccggcacgatctaatagatagccttccaccaatctcaacgacattgaagatacgctccaagagagtttcaagggctccggatacatctttgaggcaagaaggaaaatccttatcaatagatcaagagactggtggctctgatgcattaaatgatggttttgaagatgctaaatgtgatttgacattggactgtcaaaaggatggtgtggttgggacagagatatctctgcgaaatgattgtgttctggaattaaatcctcagatctgtgatgcgctctcaattgctaatgatgttcctgtgtcacactcacatcctaaacggatgtttgattttgtctatagacgaaagtcacggaagcataagaacaacttagacagggatgctgctcttactaaagaagtcagtccaggttcttgtagtcaggatcatggtagtggctctaagtcccatgaaggtgcctctaatgggttccatgggactgagttgaatggattagagaagtcggaaggcagtttgacccacatccaagataaaataagtgattcacgtggaaaccaaaactctcaggaagaattgagatccgcttctggagcaacacttcggttgagatccacaagaaatagaaagtctacttatccctttagtgaaactaaacctattgaaacaaagaagcctcagcagttaatagaaaatgtatcctggttgacattatcgatacatgaagagggttctcgttatattccacaaatgggggatgaagttgcgtatttgcgacaggggcatcaagaatacttaaactttagctccctgagggaagtggctccttggacatcaataaaaggaggaaatataaaggctgtagaaatttgtaaagtggaaagtcttgaatatgcaactctgcctggttctggggatagctgctgcaaaatgatacttaaggtcatcgatccaaactccgaagtgttcaacaaagctttcaaacttacgttgcctgaagtggtgacgtttccagattttcttgtggaaagaagtcggtatgaagcagcaatacagaggaactggacttgcagggacaagtgtaaagtttggtggagagacgaaggcgaagaagatggtagttggtgggaaggacggattctagctgtgaaacccaaatcacctgattttcctgatagtccgtgggagaggtacacagttaagtacaagagtgaccctgccgagacacatcttcacagtccctgggagctttttgatgcagataccaagtgggagcagcctcacattgatgatgagcaacgaaaccgtttgctctcggccttaacaaagttagagacttcagacaagagaacccaggattcttttggcctccgaaaactgaaccagaccgtgggaaattccagctactccaacaggttcccagttcctttgtctcttgaagtaatcagatcaaggcttgagaacaactattaccgaagtgtggaagcattacgacacgacgtatcagttatgttgtccaatgcagagactttctttggtcgaaataaaagtgtagcagccaaaatctcaaatctctctaactggttcgaccggacgctaccttcttcgtag

SEQ ID NO: 78947 - protein, 1691 aa, Arabidopsis thaliana
  peptide (1)..(1691): Ceres Seq. ID no. 12646985
MARDPLNEISKTQRFRDNVLWFWTSFETIVCSVIVVLLSSRGITEIPDPDIVQSVAPNIDLDLREVYFLMLHLLSSGPCQKTYALLRHELLEHELLPRRYHAWYSRSGLPSGDENDDGNSFPLNYTELAKRYSHVKKDHLVELLKQLVFVSNRPNPSRGIGDGNKMIGAGVPTLLGTGSFSLLSSDKEIVGSDLKPPPIGMRWPHMHADQVRGISLREIGGGFARHHRAPSIRAACYVIAKPSSMVQKMQNIKRLRGHRNAVYCAILDRSGRYVITGSDDRLVKVWSMDTAYCLASCRGHEGDITDLAVSSNNIFIASASNDCVIRVWRLPDGLPVSVLRGHTGAVTAIAFSPRPGSPYQLLSSSDDGTCRIWDARGAQFAPRIYVPRPPSPDGKNSGPSSSNAQQSHQIFCCAFNASGSVFVTGSSDTLARVYSVWSANKTNTDDPEQPNHEMDVLAGHENDVNYVQFSGCAAGSKFSVTDYSKDENVPKFKNSWFCHDNIVTCSRDGSAIIWIPRLRRSHGKSCRWTRAYHLKVPPPPMPPQPPRGGPRQRILPTPRGVNMIAWSLDNRFVLAAIMDCRICVWNASDGSLVHSLTGHTASTYVMDVHPFNPRIAMSAGYDGKTIVWDIWEGIPIQIYDISHYKLVDGKFSPDGTSIILSDDVGQLYILSTGQGDSQKDAKYDQFFLGDYRPLIQDTYGNVLDQESQLQPYRRNMEDPLCDSGMIPYEEPYQTTFQKRRLGALGKEWRPSSLKLAVGPDITLDRDYQMPPLADLDLAEPLPEFIDVMEWEPEVDILSDENDSEYNVPEEYSSGKEQECLNSSTSGESGSSSGESYEDDDHQNSLRRSKRKKHKKEAGIMTSSGRRVKKRNFDELEGAPSNKKRTRKSRSGRKESKRKSSKSKSSRPRRAAARNALSWFSKITGTSKDAEEEEVSELSDSSESESTTQDSGTGDSELEVALLNGHGKQSKGKTILVCDSDDGAQQCDIRETHTAERRRLVLRFPVRNSDKLTLLENLPGSSCDVPSPTLGNGCTEDSRIPGNQFEGLDVSKVKWGMVKARTTKRIRGEAISSHELMGSDPEGKENNVKEDSNHRGNGVTAPSCLELKTDIDDMAVDTDTVISNGLPNGGKRYPELDGSPSRVADDKASNSSQNVTHRHDLIDSLPPISTTLKIRSKRVSRAPDTSLRQEGKSLSIDQETGGSDALNDGFEDAKCDLTLDCQKDGVVGTEISLRNDCVLELNPQICDALSIANDVPVSHSHPKRMFDFVYRRKSRKHKNNLDRDAALTKEVSPGSCSQDHGSGSKSHEGASNGFHGTELNGLEKSEGSLTHIQDKISDSRGNQNSQEELRSASGATLRLRSTRNRKSTYPFSETKPIETKKPQQLIENVSWLTLSIHEEGSRYIPQMGDEVAYLRQGHQEYLNFSSLREVAPWTSIKGGNIKAVEICKVESLEYATLPGSGDSCCKMILKVIDPNSEVFNKAFKLTLPEVVTFPDFLVERSRYEAAIQRNWTCRDKCKVWWRDEGEEDGSWWEGRILAVKPKSPDFPDSPWERYTVKYKSDPAETHLHSPWELFDADTKWEQPHIDDEQRNRLLSALTKLETSDKRTQDSFGLRKLNQTVGNSSYSNRFPVPLSLEVIRSRLENNYYRSVEALRHDVSVMLSNAETFFGRNKSVAAKISNLSNWFDRTLPSS

SEQ ID NO: 78948 - protein, 1622 aa, Arabidopsis thaliana
  peptide (1)..(1622): Ceres Seq. ID no. 12646986
MLHLLSSGPCQKTYALLRHELLEHELLPRRYHAWYSRSGLPSGDENDDGNSFPLNYTELAKRYSHVKKDHLVELLKQLVFVSNRPNPSRGIGDGNKMIGAGVPTLLGTGSFSLLSSDKEIVGSDLKPPPIGMRWPHMHADQVRGISLREIGGGFARHHRAPSIRAACYVIAKPSSMVQKMQNIKRLRGHRNAVYCAILDRSGRYVITGSDDRLVKVWSMDTAYCLASCRGHEGDITDLAVSSNNIFIASASNDCVIRVWRLPDGLPVSVLRGHTGAVTAIAFSPRPGSPYQLLSSSDDGTCRIWDARGAQFAPRIYVPRPPSPDGKNSGPSSSNAQQSHQIFCCAFNASGSVFVTGSSDTLARVYSVWSANKTNTDDPEQPNHEMDVLAGHENDVNYVQFSGCAAGSKFSVTDYSKDENVPKFKNSWFCHDNIVTCSRDGSAIIWIPRLRRSHGKSCRWTRAYHLKVPPPPMPPQPPRGGPRQRILPTPRGVNMIAWSLDNRFVLAAIMDCRICVWNASDGSLVHSLTGHTASTYVMDVHPFNPRIAMSAGYDGKTIVWDIWEGIPIQIYDISHYKLVDGKFSPDGTSIILSDDVGQLYILSTGQGDSQKDAKYDQFFLGDYRPLIQDTYGNVLDQESQLQPYRRNMEDPLCDSGMIPYEEPYQTTFQKRRLGALGKEWRPSSLKLAVGPDITLDRDYQMPPLADLDLAEPLPEFIDVMEWEPEVDILSDENDSEYNVPEEYSSGKEQECLNSSTSGESGSSSGESYEDDDHQNSLRRSKRKKHKKEAGIMTSSGRRVKKRNFDELEGAPSNKKRTRKSRSGRKESKRKSSKSKSSRPRRAAARNALSWFSKITGTSKDAEEEEVSELSDSSESESTTQDSGTGDSELEVALLNGHGKQSKGKTILVCDSDDGAQQCDIRETHTAERRRLVLRFPVRNSDKLTLLENLPGSSCDVPSPTLGNGCTEDSRIPGNQFEGLDVSKVKWGMVKARTTKRIRGEAISSHELMGSDPEGKENNVKEDSNHRGNGVTAPSCLELKTDIDDMAVDTDTVISNGLPNGGKRYPELDGSPSRVADDKASNSSQNVTHRHDLIDSLPPISTTLKIRSKRVSRAPDTSLRQEGKSLSIDQETGGSDALNDGFEDAKCDLTLDCQKDGVVGTEISLRNDCVLELNPQICDALSIANDVPVSHSHPKRMFDFVYRRKSRKHKNNLDRDAALTKEVSPGSCSQDHGSGSKSHEGASNGFHGTELNGLEKSEGSLTHIQDKISDSRGNQNSQEELRSASGATLRLRSTRNRKSTYPFSETKPIETKKPQQLIENVSWLTLSIHEEGSRYIPQMGDEVAYLRQGHQEYLNFSSLREVAPWTSIKGGNIKAVEICKVESLEYATLPGSGDSCCKMILKVIDPNSEVFNKAFKLTLPEVVTFPDFLVERSRYEAAIQRNWTCRDKCKVWWRDEGEEDGSWWEGRILAVKPKSPDFPDSPWERYTVKYKSDPAETHLHSPWELFDADTKWEQPHIDDEQRNRLLSALTKLETSDKRTQDSFGLRKLNQTVGNSSYSNRFPVPLSLEVIRSRLENNYYRSVEALRHDVSVMLSNAETFFGRNKSVAAKISNLSNWFDRTLPSS

SEQ ID NO: 78949 - protein, 1526 aa, Arabidopsis thaliana
  peptide (1)..(1526): Ceres Seq. ID no. 12646987
MIGAGVPTLLGTGSFSLLSSDKEIVGSDLKPPPIGMRWPHMHADQVRGISLREIGGGFARHHRAPSIRAACYVIAKPSSMVQKMQNIKRLRGHRNAVYCAILDRSGRYVITGSDDRLVKVWSMDTAYCLASCRGHEGDITDLAVSSNNIFIASASNDCVIRVWRLPDGLPVSVLRGHTGAVTAIAFSPRPGSPYQLLSSSDDGTCRIWDARGAQFAPRIYVPRPPSPDGKNSGPSSSNAQQSHQIFCCAFNASGSVFVTGSSDTLARVYSVWSANKTNTDDPEQPNHEMDVLAGHENDVNYVQFSGCAAGSKFSVTDYSKDENVPKFKNSWFCHDNIVTCSRDGSAIIWIPRLRRSHGKSCRWTRAYHLKVPPPPMPPQPPRGGPRQRILPTPRGVNMIAWSLDNRFVLAAIMDCRICVWNASDGSLVHSLTGHTASTYVMDVHPFNPRIAMSAGYDGKTIVWDIWEGIPIQIYDISHYKLVDGKFSPDGTSIILSDDVGQLYILSTGQGDSQKDAKYDQFFLGDYRPLIQDTYGNVLDQESQLQPYRRNMEDPLCDSGMIPYEEPYQTTFQKRRLGALGKEWRPSSLKLAVGPDITLDRDYQMPPLADLDLAEPLPEFIDVMEWEPEVDILSDENDSEYNVPEEYSSGKEQECLNSSTSGESGSSSGESYEDDDHQNSLRRSKRKKHKKEAGIMTSSGRRVKKRNFDELEGAPSNKKRTRKSRSGRKESKRKSSKSKSSRPRRAAARNALSWFSKITGTSKDAEEEEVSELSDSSESESTTQDSGTGDSELEVALLNGHGKQSKGKTILVCDSDDGAQQCDIRETHTAERRRLVLRFPVRNSDKLTLLENLPGSSCDVPSPTLGNGCTEDSRIPGNQFEGLDVSKVKWGMVKARTTKRIRGEAISSHELMGSDPEGKENNVKEDSNHRGNGVTAPSCLELKTDIDDMAVDTDTVISNGLPNGGKRYPELDGSPSRVADDKASNSSQNVTHRHDLIDSLPPISTTLKIRSKRVSRAPDTSLRQEGKSLSIDQETGGSDALNDGFEDAKCDLTLDCQKDGVVGTEISLRNDCVLELNPQICDALSIANDVPVSHSHPKRMFDFVYRRKSRKHKNNLDRDAALTKEVSPGSCSQDHGSGSKSHEGASNGFHGTELNGLEKSEGSLTHIQDKISDSRGNQNSQEELRSASGATLRLRSTRNRKSTYPFSETKPIETKKPQQLIENVSWLTLSIHEEGSRYIPQMGDEVAYLRQGHQEYLNFSSLREVAPWTSIKGGNIKAVEICKVESLEYATLPGSGDSCCKMILKVIDPNSEVFNKAFKLTLPEVVTFPDFLVERSRYEAAIQRNWTCRDKCKVWWRDEGEEDGSWWEGRILAVKPKSPDFPDSPWERYTVKYKSDPAETHLHSPWELFDADTKWEQPHIDDEQRNRLLSALTKLETSDKRTQDSFGLRKLNQTVGNSSYSNRFPVPLSLEVIRSRLENNYYRSVEALRHDVSVMLSNAETFFGRNKSVAAKISNLSNWFDRTLPSS

SEQ ID NO: 78950 - DNA, 2070 bp, Arabidopsis thaliana
  misc_feature (1)..(2070): Ceres Seq. ID no. 12647000
  misc_feature (1)..(2070): Ortholog of  Ceres SEQ ID NO 13595723 as cited in SEQ ID NO 58408
atggactttgatgatgatgacaaaccaaaagaggttaccaaaacccgtagattcgctcctggccgtgccggaaagtctaaacccaaacctaaaccggaacccactgctgataaaccggtacagccgccgccgcagtcacaaactgagtccgtgagcaagactgagcatgacgttgatgctaaattcgttggcactaaggttgaaactgaggtttgtaatggctctgtgaagatggagatcgattcaaaagtcgataaagagcctgagatcatggaaactgagttgatggaggaagatcagcagcttccattgcaggaggagaaggaggaagaagaagaagaagacgacgttgttgttcgtgaaattgatgttttctttaagccgtctattgatgctaatactcagctttatgttttacaatatcctctaagaccatcttggcgtccatacgaaatggatgaacgttgcgaagaagttagagtgaatccttctacatcgcaagtggaaattgatttgtctatggatgttcattcgaagaactatgactccaattttggactaaatatgactaagcagaccttgaaaacaacatggaagcagcctcctactttggattatgctgttggggttctttcaggtgataagttacacttgaatcctgttcatgctgttgcccagctccggccgtctatgcagtctctttcatccgacaaaaaaaagaaacaagaagaatccactgaagaatctgtgggaacatccaaaaagcagaacaagggagtgcagcaggcttcgacggatcagaaaccaattaatgaagaaacttgggtttcactcaagtatcatggacttcaatccgaatattgctccagatatcttaacgggatgatggcgaatgggaactcttcgatagatttcaacatgagcccgggcacttatatcaacgaactatgccgtgggggaagcagcagaaactctgaatcgaaagaaacattaaaaagggtcttgctctccctaccacttaaagaacgtgtgcaaaagttgctctgcgagggatctccgttgattcgatacagtgttcttaaacactatgctcctgagttctcagacgaggatttcttaggggccctccaagaatatggcaggttagttcaaggtttatggactcctaaaactaggctactaaaactagacgggcctgtagaagctgccagggattatgtcctgtctctgttcagccagaatacaactataaagtactctgaagttgaagcaacgggtgacaagatgaaacctttgatggaaagaatgttgactgaatttgccaaagaaaggcatgtgctaaaagattggaagttcaaagagcccactgatgtctcattcataaaatcctacccggagattgttaaggagcaagatattttttggacggataagagagagaatctaaagtcgagaataaccgcccaaggaggaaaaagtagagctgataaaaggaggaatgttgttggcacaagttcttcagttacagttaaaccggaggttccaacaaccctctctgacaaaggaggaagttcaaaaaatacgatacatcgtgttgttacacaagaaatgccagaagaacttaagaaggcgttaccaaaggctttgaaaaaggtgtttcaaactcacaaagtttgccgctatgagacgatctgccaaggacttagggatcttgcagtttcgacatcgaataatccaaaagctgattcaggaatggcggtgaatgtggcgctagccgtggatgcttaccagggcgagctcgaagacgttataaatggagtggctactaacattcacgggtcttatgtctccatatcgtctccagaccatcctgaatatgattctttgagggaagtggtcattagcctcttaaccggatctccacctggaacaaagcttatgaaggctgaggtatttgcagcaggcaggaccaaacttgaacgtgaaatcaccaacaacgaatatataaaggtgatgcacgagatctgtgaaaccaactcttcaggatgggttttacagaaagctcgatga

SEQ ID NO: 78951 - protein, 689 aa, Arabidopsis thaliana
  peptide (1)..(689): Ceres Seq. ID no. 12647001
MDFDDDDKPKEVTKTRRFAPGRAGKSKPKPKPEPTADKPVQPPPQSQTESVSKTEHDVDAKFVGTKVETEVCNGSVKMEIDSKVDKEPEIMETELMEEDQQLPLQEEKEEEEEEDDVVVREIDVFFKPSIDANTQLYVLQYPLRPSWRPYEMDERCEEVRVNPSTSQVEIDLSMDVHSKNYDSNFGLNMTKQTLKTTWKQPPTLDYAVGVLSGDKLHLNPVHAVAQLRPSMQSLSSDKKKKQEESTEESVGTSKKQNKGVQQASTDQKPINEETWVSLKYHGLQSEYCSRYLNGMMANGNSSIDFNMSPGTYINELCRGGSSRNSESKETLKRVLLSLPLKERVQKLLCEGSPLIRYSVLKHYAPEFSDEDFLGALQEYGRLVQGLWTPKTRLLKLDGPVEAARDYVLSLFSQNTTIKYSEVEATGDKMKPLMERMLTEFAKERHVLKDWKFKEPTDVSFIKSYPEIVKEQDIFWTDKRENLKSRITAQGGKSRADKRRNVVGTSSSVTVKPEVPTTLSDKGGSSKNTIHRVVTQEMPEELKKALPKALKKVFQTHKVCRYETICQGLRDLAVSTSNNPKADSGMAVNVALAVDAYQGELEDVINGVATNIHGSYVSISSPDHPEYDSLREVVISLLTGSPPGTKLMKAEVFAAGRTKLEREITNNEYIKVMHEICETNSSGWVLQKAR

SEQ ID NO: 78952 - protein, 612 aa, Arabidopsis thaliana
  peptide (1)..(612): Ceres Seq. ID no. 12647002
MEIDSKVDKEPEIMETELMEEDQQLPLQEEKEEEEEEDDVVVREIDVFFKPSIDANTQLYVLQYPLRPSWRPYEMDERCEEVRVNPSTSQVEIDLSMDVHSKNYDSNFGLNMTKQTLKTTWKQPPTLDYAVGVLSGDKLHLNPVHAVAQLRPSMQSLSSDKKKKQEESTEESVGTSKKQNKGVQQASTDQKPINEETWVSLKYHGLQSEYCSRYLNGMMANGNSSIDFNMSPGTYINELCRGGSSRNSESKETLKRVLLSLPLKERVQKLLCEGSPLIRYSVLKHYAPEFSDEDFLGALQEYGRLVQGLWTPKTRLLKLDGPVEAARDYVLSLFSQNTTIKYSEVEATGDKMKPLMERMLTEFAKERHVLKDWKFKEPTDVSFIKSYPEIVKEQDIFWTDKRENLKSRITAQGGKSRADKRRNVVGTSSSVTVKPEVPTTLSDKGGSSKNTIHRVVTQEMPEELKKALPKALKKVFQTHKVCRYETICQGLRDLAVSTSNNPKADSGMAVNVALAVDAYQGELEDVINGVATNIHGSYVSISSPDHPEYDSLREVVISLLTGSPPGTKLMKAEVFAAGRTKLEREITNNEYIKVMHEICETNSSGWVLQKAR

SEQ ID NO: 78953 - protein, 599 aa, Arabidopsis thaliana
  peptide (1)..(599): Ceres Seq. ID no. 12647003
METELMEEDQQLPLQEEKEEEEEEDDVVVREIDVFFKPSIDANTQLYVLQYPLRPSWRPYEMDERCEEVRVNPSTSQVEIDLSMDVHSKNYDSNFGLNMTKQTLKTTWKQPPTLDYAVGVLSGDKLHLNPVHAVAQLRPSMQSLSSDKKKKQEESTEESVGTSKKQNKGVQQASTDQKPINEETWVSLKYHGLQSEYCSRYLNGMMANGNSSIDFNMSPGTYINELCRGGSSRNSESKETLKRVLLSLPLKERVQKLLCEGSPLIRYSVLKHYAPEFSDEDFLGALQEYGRLVQGLWTPKTRLLKLDGPVEAARDYVLSLFSQNTTIKYSEVEATGDKMKPLMERMLTEFAKERHVLKDWKFKEPTDVSFIKSYPEIVKEQDIFWTDKRENLKSRITAQGGKSRADKRRNVVGTSSSVTVKPEVPTTLSDKGGSSKNTIHRVVTQEMPEELKKALPKALKKVFQTHKVCRYETICQGLRDLAVSTSNNPKADSGMAVNVALAVDAYQGELEDVINGVATNIHGSYVSISSPDHPEYDSLREVVISLLTGSPPGTKLMKAEVFAAGRTKLEREITNNEYIKVMHEICETNSSGWVLQKAR

SEQ ID NO: 78954 - DNA, 603 bp, Arabidopsis thaliana
  misc_feature (1)..(603): Ceres Seq. ID no. 12647173
  misc_feature (1)..(603): Ortholog of  Ceres SEQ ID NO 14310358 as cited in SEQ ID NO 54582
  misc_feature (1)..(603): Ortholog of  Ceres SEQ ID NO 15176085 as cited in SEQ ID NO 69305
atgtcgcaaatactgccatcggtttacttatcgacgttttccgtcgcatctctgctaccagtcgttcttgtattgttggactactttgtgaatcagtcagcgtctacttcaggatatgacgatcctgatttgaatcagtatcagagcaaaaagcgaatcggaatcgtgggactaggaagcattggctcgaaggtagctacgaggctcaaggcctttggttgccaaatttcatatagctcaagaaacagaaaaccatatgctgttccatatcattattacatggatatagaggagatggtagctaactgtaatgcactcataatctgttgtgaattgaatgagaatacattgcgtttgattaataaagatgttttttctgctctgggaaagcatggagtgatcgttaacgtggctcttggggctataatcgatgaggaagagatgtctaatgttcctaaggagctttttgaattggataatgttgttttctctccacattgtgcttttatgacattggaaggtcttgaagaacttgggaaagttgtagtagggaatattgaagctttcttctccaataaacctcttttaactcctgttctttga

SEQ ID NO: 78955 - protein, 200 aa, Arabidopsis thaliana
  peptide (1)..(200): Ceres Seq. ID no. 12647174
MSQILPSVYLSTFSVASLLPVVLVLLDYFVNQSASTSGYDDPDLNQYQSKKRIGIVGLGSIGSKVATRLKAFGCQISYSSRNRKPYAVPYHYYMDIEEMVANCNALIICCELNENTLRLINKDVFSALGKHGVIVNVALGAIIDEEEMSNVPKELFELDNVVFSPHCAFMTLEGLEELGKVVVGNIEAFFSNKPLLTPVL

SEQ ID NO: 78956 - protein, 107 aa, Arabidopsis thaliana
  peptide (1)..(107): Ceres Seq. ID no. 12647175
MDIEEMVANCNALIICCELNENTLRLINKDVFSALGKHGVIVNVALGAIIDEEEMSNVPKELFELDNVVFSPHCAFMTLEGLEELGKVVVGNIEAFFSNKPLLTPVL

SEQ ID NO: 78957 - protein, 102 aa, Arabidopsis thaliana
  peptide (1)..(102): Ceres Seq. ID no. 12647176
MVANCNALIICCELNENTLRLINKDVFSALGKHGVIVNVALGAIIDEEEMSNVPKELFELDNVVFSPHCAFMTLEGLEELGKVVVGNIEAFFSNKPLLTPVL

SEQ ID NO: 78958 - DNA, 1596 bp, Arabidopsis thaliana
  misc_feature (1)..(1596): Ceres Seq. ID no. 12647478
  misc_feature (1)..(1596): Ortholog of  Ceres SEQ ID NO 15168429 as cited in SEQ ID NO 57818
  misc_feature (1)..(1596): Ortholog of  Ceres SEQ ID NO 15176685 as cited in SEQ ID NO 58334
atggtttcagaagcttggattgtgaaaatgagaaaccaagtaagttctaatctcaagcacgctcttcttcttgaatcttcttccactaagaaaacccctaaaccagtctctcttcctaaacaaacaattggaatcttatctttcgaagtagctaacgttatgtctaaaaccattcaccttcaccgttctctgtccgatacagagatctctaagcttaaagccgaggtttttcactcggaaggagttagaaagcttgtatcttccgatgagaatcatcttttagatctctctgtctctgagaagcttgatgatttgagccgtgtagctagtgttgtgtctaggttaggtaagaaatgtaacgaacctgctttacaaggatttgagcatgtttatgaagatatagtgaatggtgcgattgattttaggaagttagggttcttggttaaagatatggaatctatggttaagaagatggagagatttgtgaatgctacttgtagtttgtattgtgaaatggaagtgatgaatgagcttgaacaagctatagtgaagcttcagagaagtcagcagcatcaagagagtgttaaagcttttgaacagaagcttatgtggcagagacaggacgtgaagagtcttagagatggttcgttgtggaaccaaacttatgataaggttgttgagatgttggctaggactgtttgtactatttatggtaggattgaaactgtttttggtgggttgggtttgagagggaaaaaggatgtgactttgaagagagatcgtagcaagaatgaagcgagtaaggctgttaactcaaggtctgttgcgggttttaaggattcgaggagaagcgaagcggatgagtttacgcgtgcaggggatttcaatttcccttgtgggactaatcctggtaggatgttcatggaatgtcttgctatgaataggactattggtgatgatgatgatgatgatgatgaagatgggggtcggattacatttcctttgagtacagctaggatgattcggagtaataagtttggttttaagagcaggttaactcaacatgcttcagcttcaactattggaggatctgctttatctttgcactatgcaaatgttgtgattgtggtagaaaagcttcttaagtaccctcatctaataggcgaagaagcaagagatgatctttaccaaatgttaccaacgagtttgaagacaacgcttaaggctagtctaagatcatacttgaagaacatttcgatctacgacgctcctctagctcacgactggaaagaaaccatagacggtatactttcttggcttgctcctttagctcacaacatgatccggtggcagagcgaacgcaacttcgagcagcagaatcagattgtgaagcgaactaacgttcttctacttcagactctttactttgctgatagagagaagacagaagctgcgatttgtaagcttcttgtcgggttaaactacatttgccattacgaacaacaacaaaacgcgttgttggattgcgcgagtagctttgattatgaagattgttttgagtggcagagccaatgccgtgcagcttacttggactaa

SEQ ID NO: 78959 - protein, 531 aa, Arabidopsis thaliana
  peptide (1)..(531): Ceres Seq. ID no. 12647479
MVSEAWIVKMRNQVSSNLKHALLLESSSTKKTPKPVSLPKQTIGILSFEVANVMSKTIHLHRSLSDTEISKLKAEVFHSEGVRKLVSSDENHLLDLSVSEKLDDLSRVASVVSRLGKKCNEPALQGFEHVYEDIVNGAIDFRKLGFLVKDMESMVKKMERFVNATCSLYCEMEVMNELEQAIVKLQRSQQHQESVKAFEQKLMWQRQDVKSLRDGSLWNQTYDKVVEMLARTVCTIYGRIETVFGGLGLRGKKDVTLKRDRSKNEASKAVNSRSVAGFKDSRRSEADEFTRAGDFNFPCGTNPGRMFMECLAMNRTIGDDDDDDDEDGGRITFPLSTARMIRSNKFGFKSRLTQHASASTIGGSALSLHYANVVIVVEKLLKYPHLIGEEARDDLYQMLPTSLKTTLKASLRSYLKNISIYDAPLAHDWKETIDGILSWLAPLAHNMIRWQSERNFEQQNQIVKRTNVLLLQTLYFADREKTEAAICKLLVGLNYICHYEQQQNALLDCASSFDYEDCFEWQSQCRAAYLD

SEQ ID NO: 78960 - protein, 522 aa, Arabidopsis thaliana
  peptide (1)..(522): Ceres Seq. ID no. 12647480
MRNQVSSNLKHALLLESSSTKKTPKPVSLPKQTIGILSFEVANVMSKTIHLHRSLSDTEISKLKAEVFHSEGVRKLVSSDENHLLDLSVSEKLDDLSRVASVVSRLGKKCNEPALQGFEHVYEDIVNGAIDFRKLGFLVKDMESMVKKMERFVNATCSLYCEMEVMNELEQAIVKLQRSQQHQESVKAFEQKLMWQRQDVKSLRDGSLWNQTYDKVVEMLARTVCTIYGRIETVFGGLGLRGKKDVTLKRDRSKNEASKAVNSRSVAGFKDSRRSEADEFTRAGDFNFPCGTNPGRMFMECLAMNRTIGDDDDDDDEDGGRITFPLSTARMIRSNKFGFKSRLTQHASASTIGGSALSLHYANVVIVVEKLLKYPHLIGEEARDDLYQMLPTSLKTTLKASLRSYLKNISIYDAPLAHDWKETIDGILSWLAPLAHNMIRWQSERNFEQQNQIVKRTNVLLLQTLYFADREKTEAAICKLLVGLNYICHYEQQQNALLDCASSFDYEDCFEWQSQCRAAYLD

SEQ ID NO: 78961 - protein, 478 aa, Arabidopsis thaliana
  peptide (1)..(478): Ceres Seq. ID no. 12647481
MSKTIHLHRSLSDTEISKLKAEVFHSEGVRKLVSSDENHLLDLSVSEKLDDLSRVASVVSRLGKKCNEPALQGFEHVYEDIVNGAIDFRKLGFLVKDMESMVKKMERFVNATCSLYCEMEVMNELEQAIVKLQRSQQHQESVKAFEQKLMWQRQDVKSLRDGSLWNQTYDKVVEMLARTVCTIYGRIETVFGGLGLRGKKDVTLKRDRSKNEASKAVNSRSVAGFKDSRRSEADEFTRAGDFNFPCGTNPGRMFMECLAMNRTIGDDDDDDDEDGGRITFPLSTARMIRSNKFGFKSRLTQHASASTIGGSALSLHYANVVIVVEKLLKYPHLIGEEARDDLYQMLPTSLKTTLKASLRSYLKNISIYDAPLAHDWKETIDGILSWLAPLAHNMIRWQSERNFEQQNQIVKRTNVLLLQTLYFADREKTEAAICKLLVGLNYICHYEQQQNALLDCASSFDYEDCFEWQSQCRAAYLD

SEQ ID NO: 78962 - DNA, 3825 bp, Arabidopsis thaliana
  misc_feature (1)..(3825): Ceres Seq. ID no. 12647536
  misc_feature (1)..(3825): Ortholog of  Ceres SEQ ID NO 13666169 as cited in SEQ ID NO 0
atggtggttcctggacggagaaccgtctgggattgtgtgattgagctgacaaagatggctcaagagaactgtgtcgatcctcgtctttgggcttctcagttatcatcgaatttgaaattcttcgccgtggagttaccgtcgacggagcttgcggaggttattgtttcgtacatttgttgggataataacgttcctattgtttggaagtttcttgaaagagctatggctttgaagcttgtttctcctctcgttgttcttgctcttctcgctgacagagttgttccaacccggtctacgcaacaagcagcttatagaatttacttggagctgctcaagagaaatatgttcaccattaaagatcatattagtggacctcactaccagaaggtcatgatttcagtatccaatattcttcgtctttcagagttatttgatctggacacaagcaaacctggtgtgcttttagtagagtttgtttttaagatggtgtcacaattgctagatgcagcgttaagtgatgaaggtttgctagagctaagccaagactcgagctcccagtggctagttaagtctcaagatatggaaattgatgctcctgagagatataatgaaaagactggatcactagagaagttacagagtttgaataccatcatggctattgagttgatagcggaattcctcagaaatacagtgattgcgagattgctatacttggtatcttccaacagggcttcgaagtggcatgaatttgtccagaaagtgcagcttcttggagaaaattcatcggctttaaaacactcaaaggttctaaattctggggatctattacaattgatttcgaatagacgatttgggtattcttatgatagcaaagtaacttcagcacggaaatccaatgcaattgtggattttggatctctctcttcctatgctggcttatgccatggagcaagtctctcttcactttggcttcctcttgatctagtatttgaagatgcaatggatggatatcaagtaaacccaactagtgcgattgaaatcattaccggtctagctaaaacacttaaagaaattaatgggagcacttggcatgacactttcttggggctttggatagcagctctccgacttgttcaaagggtcctcggtgatttccctggattgctggctcctcccaaatgcgttgtttctgctgccaacaaggctgccacaaaggcaatcttgtttttgtctggtggcaatgttggaaagtcatgttttgatgtcataaacatgaaggacatgcctgtcaactgctctggaaacatgcgccacctgatagtcgaggcttgtattgcaagaaacatactggatatgtcggcttattcgtggcctggctatgttaatggccgaatcaaccaaatacctcagagtctgccgaatgaagtaccctgctggtcatcatttgtgaaaggggctccactaaatgccgcaatggtgaatacattagtttcagttcctgcttcaagctccacactacttcatccacatagtcttccctccaaatcatacagtcagtgcttagcagagctcgagaaactatttgaggttgcagtcaaaggatcggatgacgagaagatatctgctgctacagttctttgcggggcatctctcacacggggttggaacatacaggaacacactgttgaatatcttacaagattactatccccacccgttccagcagattattccagggctgaaaatcatttgattggttatgcctgcatgttgaatgttgttattgttgggataggatctgttgacagcattcaaattttctctttacatggcatggttccgcaacttgcttgctcactaatgccaatttgtgaagagtttggatcttacaccccgagtgtatcatggactcttccttctggagaagcaatatcagcatattctgttttctcaaatgcattcactcttcttttaaagctatggagattcaatcatcctcctattgagcatggtgtgggagatgttcccacagttggctcccaactcactcctgaacatcttctttcagtgcgtaattcttatcttgtttcgtcggagatccttgatagagaccgaaacagaaagagactttcagaagttgcaagggcagcatcttgccagcccgtgtttgtggactcgttccccaagctgaaagtctggtataggcagcaccaaagatgcatagcagccacattatctggacttacacatggatctcccgttcatcagacagttgaagcacttctcaacatgacgttcggaaaggtcagaggcagtcagactttaaatccagtaaattcgggcacaagcagttcatcaggagctgcaagtgaagatagcaatattagacctgagtttcctgcttgggatatcctcaaagccgttccatatgttgtcgatgctgctttaaccgcttgtactcatggaaggctttcgcctcgtcagttagctacagggctgaaagacttagcagattttctcccggcatcattagcaacgatagtaagctatttctcagctgaggtgagtagaggtgtttggaagccagtattcatgaacggcgtggattggccaagtccagctacaaatctatccactgttgaggaatatataacgaaaattcttgcaacaacaggcgtcgatatccctagccttgctccaggagggagttctccggcaacgcttcctttacctctagccgcatttgttagtctaaccattacttacaaaattgacaaagcctcagagcggtttctcaacctggctggcccagctctggagtgcttggctgcaggctgcccttggccttgcatgcccattgtagcttcattatggacccaaaaggcgaaacgttggtttgacttccttgttttctctgcctctcgcaccgtcttccttcacaaccaagacgctgtgattcagctcctcagaaactgcttcagtgccactctgggtttgaatgctgcccccatgtcaaatgatggtggcgttggagctcttcttggccatggattcggctctcatttctatggagggatctctcctgtagcaccagggattctttatctccgtatgtatcgtgctctcagagatactgtctccgtatcggaagagattctctctctgctgatacattcggtggaggatatagcccagaacaggctctcaaaggagaagctggaaaagctgaagacagtgaagaacggatcaagatacggccaaagttctctagcaacagcaatgactcaagtgaagcttgctgcttcgctgagtgcctcgttggtatggctaaccggtggcttaggtgtggtccacgttctcatcaaagaaacgatcccatcttggtttctatcaactgacaaatcagaccgagaacaaggaccatcggatctagttgcagagctaagaggtcatgcccttgcctactttgtggtcctatgtggagcacttacttggggcgtggattcaagatcatctgcatccaaacgccgccgccaagcaatcttgggaagccacttggagttcatcgcgagtgccttagatgggaaaatatcagtgggatgtgaaacagcaacttggcgaacatatatttccggtttggtgagtctaatggtgagctgtttgccgctctgggtgacagagatcgatacagaagtgttaaagagtctaagcaatggactaagaaaatggggaaaagacgagctagcgattgtattactctccttgggaggtctcaaaacaatggattacgcagctgatttcatcattcatttgcgttcatag

SEQ ID NO: 78963 - protein, 1274 aa, Arabidopsis thaliana
  peptide (1)..(1274): Ceres Seq. ID no. 12647537
MVVPGRRTVWDCVIELTKMAQENCVDPRLWASQLSSNLKFFAVELPSTELAEVIVSYICWDNNVPIVWKFLERAMALKLVSPLVVLALLADRVVPTRSTQQAAYRIYLELLKRNMFTIKDHISGPHYQKVMISVSNILRLSELFDLDTSKPGVLLVEFVFKMVSQLLDAALSDEGLLELSQDSSSQWLVKSQDMEIDAPERYNEKTGSLEKLQSLNTIMAIELIAEFLRNTVIARLLYLVSSNRASKWHEFVQKVQLLGENSSALKHSKVLNSGDLLQLISNRRFGYSYDSKVTSARKSNAIVDFGSLSSYAGLCHGASLSSLWLPLDLVFEDAMDGYQVNPTSAIEIITGLAKTLKEINGSTWHDTFLGLWIAALRLVQRVLGDFPGLLAPPKCVVSAANKAATKAILFLSGGNVGKSCFDVINMKDMPVNCSGNMRHLIVEACIARNILDMSAYSWPGYVNGRINQIPQSLPNEVPCWSSFVKGAPLNAAMVNTLVSVPASSSTLLHPHSLPSKSYSQCLAELEKLFEVAVKGSDDEKISAATVLCGASLTRGWNIQEHTVEYLTRLLSPPVPADYSRAENHLIGYACMLNVVIVGIGSVDSIQIFSLHGMVPQLACSLMPICEEFGSYTPSVSWTLPSGEAISAYSVFSNAFTLLLKLWRFNHPPIEHGVGDVPTVGSQLTPEHLLSVRNSYLVSSEILDRDRNRKRLSEVARAASCQPVFVDSFPKLKVWYRQHQRCIAATLSGLTHGSPVHQTVEALLNMTFGKVRGSQTLNPVNSGTSSSSGAASEDSNIRPEFPAWDILKAVPYVVDAALTACTHGRLSPRQLATGLKDLADFLPASLATIVSYFSAEVSRGVWKPVFMNGVDWPSPATNLSTVEEYITKILATTGVDIPSLAPGGSSPATLPLPLAAFVSLTITYKIDKASERFLNLAGPALECLAAGCPWPCMPIVASLWTQKAKRWFDFLVFSASRTVFLHNQDAVIQLLRNCFSATLGLNAAPMSNDGGVGALLGHGFGSHFYGGISPVAPGILYLRMYRALRDTVSVSEEILSLLIHSVEDIAQNRLSKEKLEKLKTVKNGSRYGQSSLATAMTQVKLAASLSASLVWLTGGLGVVHVLIKETIPSWFLSTDKSDREQGPSDLVAELRGHALAYFVVLCGALTWGVDSRSSASKRRRQAILGSHLEFIASALDGKISVGCETATWRTYISGLVSLMVSCLPLWVTEIDTEVLKSLSNGLRKWGKDELAIVLLSLGGLKTMDYAADFIIHLRS

SEQ ID NO: 78964 - protein, 1256 aa, Arabidopsis thaliana
  peptide (1)..(1256): Ceres Seq. ID no. 12647538
MAQENCVDPRLWASQLSSNLKFFAVELPSTELAEVIVSYICWDNNVPIVWKFLERAMALKLVSPLVVLALLADRVVPTRSTQQAAYRIYLELLKRNMFTIKDHISGPHYQKVMISVSNILRLSELFDLDTSKPGVLLVEFVFKMVSQLLDAALSDEGLLELSQDSSSQWLVKSQDMEIDAPERYNEKTGSLEKLQSLNTIMAIELIAEFLRNTVIARLLYLVSSNRASKWHEFVQKVQLLGENSSALKHSKVLNSGDLLQLISNRRFGYSYDSKVTSARKSNAIVDFGSLSSYAGLCHGASLSSLWLPLDLVFEDAMDGYQVNPTSAIEIITGLAKTLKEINGSTWHDTFLGLWIAALRLVQRVLGDFPGLLAPPKCVVSAANKAATKAILFLSGGNVGKSCFDVINMKDMPVNCSGNMRHLIVEACIARNILDMSAYSWPGYVNGRINQIPQSLPNEVPCWSSFVKGAPLNAAMVNTLVSVPASSSTLLHPHSLPSKSYSQCLAELEKLFEVAVKGSDDEKISAATVLCGASLTRGWNIQEHTVEYLTRLLSPPVPADYSRAENHLIGYACMLNVVIVGIGSVDSIQIFSLHGMVPQLACSLMPICEEFGSYTPSVSWTLPSGEAISAYSVFSNAFTLLLKLWRFNHPPIEHGVGDVPTVGSQLTPEHLLSVRNSYLVSSEILDRDRNRKRLSEVARAASCQPVFVDSFPKLKVWYRQHQRCIAATLSGLTHGSPVHQTVEALLNMTFGKVRGSQTLNPVNSGTSSSSGAASEDSNIRPEFPAWDILKAVPYVVDAALTACTHGRLSPRQLATGLKDLADFLPASLATIVSYFSAEVSRGVWKPVFMNGVDWPSPATNLSTVEEYITKILATTGVDIPSLAPGGSSPATLPLPLAAFVSLTITYKIDKASERFLNLAGPALECLAAGCPWPCMPIVASLWTQKAKRWFDFLVFSASRTVFLHNQDAVIQLLRNCFSATLGLNAAPMSNDGGVGALLGHGFGSHFYGGISPVAPGILYLRMYRALRDTVSVSEEILSLLIHSVEDIAQNRLSKEKLEKLKTVKNGSRYGQSSLATAMTQVKLAASLSASLVWLTGGLGVVHVLIKETIPSWFLSTDKSDREQGPSDLVAELRGHALAYFVVLCGALTWGVDSRSSASKRRRQAILGSHLEFIASALDGKISVGCETATWRTYISGLVSLMVSCLPLWVTEIDTEVLKSLSNGLRKWGKDELAIVLLSLGGLKTMDYAADFIIHLRS

SEQ ID NO: 78965 - protein, 1200 aa, Arabidopsis thaliana
  peptide (1)..(1200): Ceres Seq. ID no. 12647539
MALKLVSPLVVLALLADRVVPTRSTQQAAYRIYLELLKRNMFTIKDHISGPHYQKVMISVSNILRLSELFDLDTSKPGVLLVEFVFKMVSQLLDAALSDEGLLELSQDSSSQWLVKSQDMEIDAPERYNEKTGSLEKLQSLNTIMAIELIAEFLRNTVIARLLYLVSSNRASKWHEFVQKVQLLGENSSALKHSKVLNSGDLLQLISNRRFGYSYDSKVTSARKSNAIVDFGSLSSYAGLCHGASLSSLWLPLDLVFEDAMDGYQVNPTSAIEIITGLAKTLKEINGSTWHDTFLGLWIAALRLVQRVLGDFPGLLAPPKCVVSAANKAATKAILFLSGGNVGKSCFDVINMKDMPVNCSGNMRHLIVEACIARNILDMSAYSWPGYVNGRINQIPQSLPNEVPCWSSFVKGAPLNAAMVNTLVSVPASSSTLLHPHSLPSKSYSQCLAELEKLFEVAVKGSDDEKISAATVLCGASLTRGWNIQEHTVEYLTRLLSPPVPADYSRAENHLIGYACMLNVVIVGIGSVDSIQIFSLHGMVPQLACSLMPICEEFGSYTPSVSWTLPSGEAISAYSVFSNAFTLLLKLWRFNHPPIEHGVGDVPTVGSQLTPEHLLSVRNSYLVSSEILDRDRNRKRLSEVARAASCQPVFVDSFPKLKVWYRQHQRCIAATLSGLTHGSPVHQTVEALLNMTFGKVRGSQTLNPVNSGTSSSSGAASEDSNIRPEFPAWDILKAVPYVVDAALTACTHGRLSPRQLATGLKDLADFLPASLATIVSYFSAEVSRGVWKPVFMNGVDWPSPATNLSTVEEYITKILATTGVDIPSLAPGGSSPATLPLPLAAFVSLTITYKIDKASERFLNLAGPALECLAAGCPWPCMPIVASLWTQKAKRWFDFLVFSASRTVFLHNQDAVIQLLRNCFSATLGLNAAPMSNDGGVGALLGHGFGSHFYGGISPVAPGILYLRMYRALRDTVSVSEEILSLLIHSVEDIAQNRLSKEKLEKLKTVKNGSRYGQSSLATAMTQVKLAASLSASLVWLTGGLGVVHVLIKETIPSWFLSTDKSDREQGPSDLVAELRGHALAYFVVLCGALTWGVDSRSSASKRRRQAILGSHLEFIASALDGKISVGCETATWRTYISGLVSLMVSCLPLWVTEIDTEVLKSLSNGLRKWGKDELAIVLLSLGGLKTMDYAADFIIHLRS

SEQ ID NO: 78966 - DNA, 1074 bp, Arabidopsis thaliana
  misc_feature (1)..(1074): Ceres Seq. ID no. 12647555
  misc_feature (1)..(1074): Ortholog of  Ceres SEQ ID NO 14304791 as cited in SEQ ID NO 53562
  misc_feature (1)..(1074): Ortholog of  Ceres SEQ ID NO 13594298 as cited in SEQ ID NO 57803
  misc_feature (1)..(1074): Ortholog of  Ceres SEQ ID NO 14301894 as cited in SEQ ID NO 61677
  misc_feature (1)..(1074): Ortholog of  Ceres SEQ ID NO 13503476 as cited in SEQ ID NO 61978
  misc_feature (1)..(1074): Ortholog of  Ceres SEQ ID NO 12578438 as cited in SEQ ID NO 62201
  misc_feature (1)..(1074): Ortholog of  Ceres SEQ ID NO 12617675 as cited in SEQ ID NO 64656
atctcacatcacaattcacatctcctcgaacaaacaaattataaacccattttccttcataaatttctaaaataaaaccccttaaactttcattcacatcatccaacccccaatgggtcgaatcttgaaccgtaccgtgttaatgactcttctagtcgtaacaatggccggaacagcattctccggtagcttcaacgaagagtttgacttaacttggggtgaacacagaggcaaaatcttcagtggaggaaaaatgttgtcactctcactagaccgggtttccgggtcgggttttaaatccaagaaagaatatttgttcggaagaatcgacatgcagcttaaactcgtcgccggtaactccgctggaaccgtcactgcctactacttgtcatcggaaggaccaacacacgacgagatagactttgagtttcttggtaatgaaacagggaagccttatgttcttcacactaatgtatttgctcaaggcaaaggaaacagagaacaacagttttatctctggtttgatccaaccaagaacttccacacttattctcttgtctggagaccacaacacatcatatttatggtagataatgttccaatcagagtattcaacaatgcagagcaacttggtgttccatttcccaagaaccaaccaatgaagatatactcgagtttatggaatgcagatgattgggctacaagaggtggtttggttaagacagattggtctaaagctcctttcacagcttactacagaggctttaacgctgcagcttgtactgtttcttcagggtcatctttctgtgatcctaagtttaagagttcttttactaatggtgaatctcaagtggctaatgagcttaatgcttatgggagaagaagattaagatgggttcagaagtattttatgatttatgattattgttctgatttaaaaaggtttcctcaaggattcccaccagagtgtaggaagtctagagtctaaaaaccaatgattctctctttgttgttgtttagtgcaaattaaattctctttgttgtttctttaataaattgatttgatttttcttc

SEQ ID NO: 78967 - protein, 291 aa, Arabidopsis thaliana
  peptide (1)..(291): Ceres Seq. ID no. 12647556
MGRILNRTVLMTLLVVTMAGTAFSGSFNEEFDLTWGEHRGKIFSGGKMLSLSLDRVSGSGFKSKKEYLFGRIDMQLKLVAGNSAGTVTAYYLSSEGPTHDEIDFEFLGNETGKPYVLHTNVFAQGKGNREQQFYLWFDPTKNFHTYSLVWRPQHIIFMVDNVPIRVFNNAEQLGVPFPKNQPMKIYSSLWNADDWATRGGLVKTDWSKAPFTAYYRGFNAAACTVSSGSSFCDPKFKSSFTNGESQVANELNAYGRRRLRWVQKYFMIYDYCSDLKRFPQGFPPECRKSRV

SEQ ID NO: 78968 - protein, 281 aa, Arabidopsis thaliana
  peptide (1)..(281): Ceres Seq. ID no. 12647557
MTLLVVTMAGTAFSGSFNEEFDLTWGEHRGKIFSGGKMLSLSLDRVSGSGFKSKKEYLFGRIDMQLKLVAGNSAGTVTAYYLSSEGPTHDEIDFEFLGNETGKPYVLHTNVFAQGKGNREQQFYLWFDPTKNFHTYSLVWRPQHIIFMVDNVPIRVFNNAEQLGVPFPKNQPMKIYSSLWNADDWATRGGLVKTDWSKAPFTAYYRGFNAAACTVSSGSSFCDPKFKSSFTNGESQVANELNAYGRRRLRWVQKYFMIYDYCSDLKRFPQGFPPECRKSRV

SEQ ID NO: 78969 - protein, 274 aa, Arabidopsis thaliana
  peptide (1)..(274): Ceres Seq. ID no. 12647558
MAGTAFSGSFNEEFDLTWGEHRGKIFSGGKMLSLSLDRVSGSGFKSKKEYLFGRIDMQLKLVAGNSAGTVTAYYLSSEGPTHDEIDFEFLGNETGKPYVLHTNVFAQGKGNREQQFYLWFDPTKNFHTYSLVWRPQHIIFMVDNVPIRVFNNAEQLGVPFPKNQPMKIYSSLWNADDWATRGGLVKTDWSKAPFTAYYRGFNAAACTVSSGSSFCDPKFKSSFTNGESQVANELNAYGRRRLRWVQKYFMIYDYCSDLKRFPQGFPPECRKSRV

SEQ ID NO: 78970 - DNA, 1175 bp, Arabidopsis thaliana
  misc_feature (1)..(1175): Ceres Seq. ID no. 12647593
  misc_feature (1)..(1175): Ortholog of  Ceres SEQ ID NO 15179015 as cited in SEQ ID NO 0
  misc_feature (1)..(1175): Ortholog of  Ceres SEQ ID NO 15179613 as cited in SEQ ID NO 0
ttttcgaaattaaagaaaaccctaaacgccgttgtctgatattgagagagagagagagattaaaaacttcttctggttccttttatcaacattttttctctctcttaaaacttcgaagcgatttttgatttacagactatggaaatggaatcattcatggacgaccttttgaacttctctgtaccggaagaggaagaagacgacgacgaacatacgcaaccaccgaggaatattactcgccggaaaactggattacggccaacagactccttcggtctctttaataccgacgaccttggagtggttgaagaagaggatttggaatggatttcaaacaaaaatgcttttccggtgattgaaacattcgtcggtgtattaccgtcggagcattttcctataacgtctcttctggaaagagaagcgactgaggtaaaacagctgagtccggtttcagtacttgagacgagtagccatagctccacaacgactacctcaaacagtagcggcggaagtaacggaagcacggccgtggctacgaccaccaccactccaacaataatgagctgttgcgttggttttaaagcgccggctaaagcgagaagcaagcgtcgtcgtacaggacgccgtgatttacgagttttgtggacaggaaacgagcaaggaggaatacagaagaagaagacgatgactgtggcggcggctgcgttgattatgggaaggaagtgtcaacactgtggagcggagaagactccgcaatggagggcaggaccagcggggcctaagactctgtgtaacgcttgtggcgtgaggtataagtccgggaggctagttccggagtatcgtccagcgaacagtccaactttcacggcggagttacattcgaattctcaccggaagattgtagagatgaggaagcagtatcagtccggtgacggtgacggtgatcggaaagattgtggataaaaagtgattaggattaatttttattttttcggagaaactttttttttttttttttcgtttaatttctctttatttgtttttaaagtctgttttagggttttgcagttggaatttaggtttttaattttttgcttatcttttttatttgtgaaattagtggtaattacttatttagggaatattatggtcatggaatggaagataactttctc

SEQ ID NO: 78971 - protein, 274 aa, Arabidopsis thaliana; identical to SEQ ID NO: 23687
  peptide (1)..(274): Ceres Seq. ID no. 12647594

SEQ ID NO: 78972 - protein, 272 aa, Arabidopsis thaliana; identical to SEQ ID NO: 23688
  peptide (1)..(272): Ceres Seq. ID no. 12647595

SEQ ID NO: 78973 - protein, 268 aa, Arabidopsis thaliana; identical to SEQ ID NO: 23689
  peptide (1)..(268): Ceres Seq. ID no. 12647596

SEQ ID NO: 78974 - DNA, 1482 bp, Arabidopsis thaliana
  misc_feature (1)..(1482): Ceres Seq. ID no. 12647645
  misc_feature (1)..(1482): Ortholog of  Ceres SEQ ID NO 15176822 as cited in SEQ ID NO 1160
  misc_feature (1)..(1482): Ortholog of  Ceres SEQ ID NO 13593889 as cited in SEQ ID NO 53305
atggagaacataaccgcgcagctcaaacgaggtatctcaagacaattctcaactggttcgattcgtcgaacattgagccgacagttcacgcgtcagtcatctcttgaccctcgtaggaccaacatgaggtttagtttcggtcgtcagtcttctctcgatccgatcaggaggagtcctgattcttccaagagtgatgacgagccacatatgtcggtaccggagaatctcgattcgacgatgcagcttctctttatggctagcaaaggtgatgtcagaggaatcgaggagcttcttgacgaaggaattgatgttaatagcatcgatcttgatggccggacggcgcttcacatcgccgcttgtgagggacatcttggtgtcgttaaggctcttcttagccggagagctaacattgatgctcgtgatcgatggggaagtacggcggctgctgatgcaaagtactatgggaatttagatgtttacaatctcttgaaggctcgaggagctaaagttccgaaaactaggaagactccgatgactgtgtcgaatccacgagaagttcctgagtatgagcttaatccacttgaggttcaagtcaggaaatctgatggcatctcaaagggagcatatcaagtagctaaatggaatggcacgcgggtttcagtcaaaatacttgataaagatagttactcagacccggaacgcataaacgcatttagacatgaattgacgttgctagaaaaagtccggcatccaaatgttatccagtttgttggagctgtcactcagaatataccgatgatgattgtagtcgagtataatccgaaaggagatttaagtgtatatctccaaaagaaaggacgtctttctccatccaaggcacttagatttgctcttgatattgccagaggcatgaactacctccatgaatgtaaaccagatccaatcattcactgtgatctaaagccaaaaaatattttgctggatagaggagggcaattaaagatctcaggatttggtatgataagattgtcgaaaatttcacaagacaaggcgaaagtagcaaaccacaaagcacatatagatctctctagtaaggagaatgcttcattcacatgcatgaaaactgaatctcttgattactacattgcaccagaggtttataaagacgaaatattcgacctaagggttgatgcacactcctttggtgtcattttatacgagataacagagggagtaccagttttccatccgagacctcctgaagaagttgcgagaatgatgtgcttagaaggaaagagacctgtattcaaaactaagtcaagaagttaccctccagatataaaagagttgatcgagaaatgttggcatccagaagcgggtattagaccgacattctctgaaattattattcgacttgacaaaatagtagcaaattgctctaaacaaggatggtggaaagacacattcaagttcccttggtaa

SEQ ID NO: 78975 - protein, 493 aa, Arabidopsis thaliana
  peptide (1)..(493): Ceres Seq. ID no. 12647646
MENITAQLKRGISRQFSTGSIRRTLSRQFTRQSSLDPRRTNMRFSFGRQSSLDPIRRSPDSSKSDDEPHMSVPENLDSTMQLLFMASKGDVRGIEELLDEGIDVNSIDLDGRTALHIAACEGHLGVVKALLSRRANIDARDRWGSTAAADAKYYGNLDVYNLLKARGAKVPKTRKTPMTVSNPREVPEYELNPLEVQVRKSDGISKGAYQVAKWNGTRVSVKILDKDSYSDPERINAFRHELTLLEKVRHPNVIQFVGAVTQNIPMMIVVEYNPKGDLSVYLQKKGRLSPSKALRFALDIARGMNYLHECKPDPIIHCDLKPKNILLDRGGQLKISGFGMIRLSKISQDKAKVANHKAHIDLSSKENASFTCMKTESLDYYIAPEVYKDEIFDLRVDAHSFGVILYEITEGVPVFHPRPPEEVARMMCLEGKRPVFKTKSRSYPPDIKELIEKCWHPEAGIRPTFSEIIIRLDKIVANCSKQGWWKDTFKFPW

SEQ ID NO: 78976 - protein, 452 aa, Arabidopsis thaliana
  peptide (1)..(452): Ceres Seq. ID no. 12647647
MRFSFGRQSSLDPIRRSPDSSKSDDEPHMSVPENLDSTMQLLFMASKGDVRGIEELLDEGIDVNSIDLDGRTALHIAACEGHLGVVKALLSRRANIDARDRWGSTAAADAKYYGNLDVYNLLKARGAKVPKTRKTPMTVSNPREVPEYELNPLEVQVRKSDGISKGAYQVAKWNGTRVSVKILDKDSYSDPERINAFRHELTLLEKVRHPNVIQFVGAVTQNIPMMIVVEYNPKGDLSVYLQKKGRLSPSKALRFALDIARGMNYLHECKPDPIIHCDLKPKNILLDRGGQLKISGFGMIRLSKISQDKAKVANHKAHIDLSSKENASFTCMKTESLDYYIAPEVYKDEIFDLRVDAHSFGVILYEITEGVPVFHPRPPEEVARMMCLEGKRPVFKTKSRSYPPDIKELIEKCWHPEAGIRPTFSEIIIRLDKIVANCSKQGWWKDTFKFPW

SEQ ID NO: 78977 - protein, 424 aa, Arabidopsis thaliana
  peptide (1)..(424): Ceres Seq. ID no. 12647648
MSVPENLDSTMQLLFMASKGDVRGIEELLDEGIDVNSIDLDGRTALHIAACEGHLGVVKALLSRRANIDARDRWGSTAAADAKYYGNLDVYNLLKARGAKVPKTRKTPMTVSNPREVPEYELNPLEVQVRKSDGISKGAYQVAKWNGTRVSVKILDKDSYSDPERINAFRHELTLLEKVRHPNVIQFVGAVTQNIPMMIVVEYNPKGDLSVYLQKKGRLSPSKALRFALDIARGMNYLHECKPDPIIHCDLKPKNILLDRGGQLKISGFGMIRLSKISQDKAKVANHKAHIDLSSKENASFTCMKTESLDYYIAPEVYKDEIFDLRVDAHSFGVILYEITEGVPVFHPRPPEEVARMMCLEGKRPVFKTKSRSYPPDIKELIEKCWHPEAGIRPTFSEIIIRLDKIVANCSKQGWWKDTFKFPW

SEQ ID NO: 78978 - DNA, 1002 bp, Arabidopsis thaliana
  misc_feature (1)..(1002): Ceres Seq. ID no. 12647669
  misc_feature (1)..(1002): Ortholog of  Ceres SEQ ID NO 14313644 as cited in SEQ ID NO 54334
acacacccatagtcgtcttcctcgatcagtctctctctcaaattgcaaaggtttcttcgaggactttggcatactgcaggttttctgattcggaattttaaataaaaatcggtcgtgacgatttaggttgttggagctgtagtgcttaaaaaccctacctttatactgtttagagcagcagtccctccatgtcaggtcttgtggcgttatgcagagctcgagcttctgcttcgtcttctttattcaacagcgttattcgtccagcatttcgcaatttctctacaggttttgctgatacacagaacaaatcattggtagcacaaatgaaagaagagatgctccacatggacatcaactcaatgataggaagttccatgccactaggtatgatgcgtatcggaacaatcatccacaacatcgagatgaacccagggcaaggcgcaaagatggtccgagctgcaggaaccaacgccaagatcctaaaggagcctgctaaagggaaatgcttgataaagcttccgtcaggggacaccaagtggatcaatgccaaatgtcgtgctacgattggcacagtgtcgaacccgtctcatggaacgaagaagctatataaagcaggacagagtaggtggttagggataaggcccaaagttagaggagtggcgatgaatccgtgtgatcatccacacggtggaggtgaaggaaaaagcaaaagtagtggaagcagaggaaggacatcggttagtccgtggggaaaaccgtgtaaaggcggttacaaatcagctagtgtcaagaagaagaagaagcgtttggcagaagcagcagccaaaatgtgatatgggtgaacaagtttcgattttcttcaaacgtttctttcttttaaaaagcctccaatgttatttggttacgttattgaatctgttttttgagagttttttaggcttcatgaaactagaagatctttgatcagttgagaataaatatggttacgtgtttacttttatt

SEQ ID NO: 78979 - protein, 214 aa, Arabidopsis thaliana; identical to SEQ ID NO: 35519
  peptide (1)..(214): Ceres Seq. ID no. 12647670

SEQ ID NO: 78980 - protein, 169 aa, Arabidopsis thaliana; identical to SEQ ID NO: 35520
  peptide (1)..(169): Ceres Seq. ID no. 12647671

SEQ ID NO: 78981 - protein, 165 aa, Arabidopsis thaliana; identical to SEQ ID NO: 35521
  peptide (1)..(165): Ceres Seq. ID no. 12647672

SEQ ID NO: 78982 - DNA, 1217 bp, Arabidopsis thaliana
  misc_feature (1)..(1217): Ceres Seq. ID no. 12647675
  misc_feature (1)..(1217): Ortholog of  Ceres SEQ ID NO 13599631 as cited in SEQ ID NO 0
aatctataatcattttgtgactcttggagcactctcttctctttgtctctgtgactcacattcatccaatccaggaggcatgtcgacatctgaggataaaccggaaatcatcagtagagtagttcatcaggagggtgacgtggaaatcgtcgatagaagtcagaaggataaggacgaggaaaaagaagaagggaaaggtggattcctcgataaggtgaaagatttcattcatgacattggtgagaaactcgagggaaccattggctttgggaagccaactgctgatgtctctgcgattcatatccctaagatcaatcttgagagggcagatattgttgtggatgtgcttgtcaagaacccgaatccagttcctatccctctcatcgatgtcaactacctggtcgagagcgatgggaggaaactggtttctggtttgatcccggatgctggaacactcaaggctcatggagaagaaactgtgaagataccattgacgttgatctatgatgacatcaagagcacttacaacgatatcaaccccgggatgatcataccttacagaatcaaggttgatctgattgtggatgtgccagtattgggaagactgacattgccgctggagaaatgtggagagatcccaattccaaagaaacctgatgttgatatcgagaagattaagttccagaagttctctttggaggaaaccgtggcgattctccatgtgaggcttcagaacatgaatgatttcgacttggggctcaatgacttggactgtgaagtttggctgtgtgatgtaagcattgggaaagcagagatcgcggactcgatcaagcttgacaaaaacggaagcggattgattaatgtgccgatgacattccgaccaaaggactttggttctgcgctttgggatatgattcgtggtaaaggaacagggtacacaatcaaaggtaatattgatgttgatacaccatttggagctatgaagcttcctattatcaaggaaggtggagagacccgtctgaagaaggaagatgatgatgacgacgatgaggaataaggaaacaaagtgctgcagagacagaatggtcatagttactaaatctccgatcttgaaatgtctatttaaaattaaaaaaaaagaaagacttgttttgtgtgctttttgataactgatggatcagacttttgaatagagccgtctttttattggacttctt

SEQ ID NO: 78983 - protein, 351 aa, Arabidopsis thaliana
  peptide (1)..(351): Ceres Seq. ID no. 12647676
IYNHFVTLGALSSLCLCDSHSSNPGGMSTSEDKPEIISRVVHQEGDVEIVDRSQKDKDEEKEEGKGGFLDKVKDFIHDIGEKLEGTIGFGKPTADVSAIHIPKINLERADIVVDVLVKNPNPVPIPLIDVNYLVESDGRKLVSGLIPDAGTLKAHGEETVKIPLTLIYDDIKSTYNDINPGMIIPYRIKVDLIVDVPVLGRLTLPLEKCGEIPIPKKPDVDIEKIKFQKFSLEETVAILHVRLQNMNDFDLGLNDLDCEVWLCDVSIGKAEIADSIKLDKNGSGLINVPMTFRPKDFGSALWDMIRGKGTGYTIKGNIDVDTPFGAMKLPIIKEGGETRLKKEDDDDDDEE

SEQ ID NO: 78984 - protein, 325 aa, Arabidopsis thaliana
  peptide (1)..(325): Ceres Seq. ID no. 12647677
MSTSEDKPEIISRVVHQEGDVEIVDRSQKDKDEEKEEGKGGFLDKVKDFIHDIGEKLEGTIGFGKPTADVSAIHIPKINLERADIVVDVLVKNPNPVPIPLIDVNYLVESDGRKLVSGLIPDAGTLKAHGEETVKIPLTLIYDDIKSTYNDINPGMIIPYRIKVDLIVDVPVLGRLTLPLEKCGEIPIPKKPDVDIEKIKFQKFSLEETVAILHVRLQNMNDFDLGLNDLDCEVWLCDVSIGKAEIADSIKLDKNGSGLINVPMTFRPKDFGSALWDMIRGKGTGYTIKGNIDVDTPFGAMKLPIIKEGGETRLKKEDDDDDDEE

SEQ ID NO: 78985 - DNA, 1326 bp, Arabidopsis thaliana
  misc_feature (1)..(1326): Ceres Seq. ID no. 12647678
  misc_feature (1)..(1326): Ortholog of  Ceres SEQ ID NO 13654409 as cited in SEQ ID NO 68534
atggatgaagagtacgaagtcatagttctgggtactggtctcaaggagtgcatccttagtggtcttctctccgtcgatggtcttaaggtacttcacatggacaggaatgactactacggtggagagtcaacttctcttaatctcaatcagctgtggaagaagttcaggggagaagagaaggctcctgctcatttaggttctagcagagactacaatgttgacatgatgccaaagtttatgatggctaacggaaagcttgttcgtgtccttattcatacggatgtgaccaagtacttgtcttttaaagctgttgatggaagctatgtttttgtccaaggcaaggtccaaaaagtgccagcaactcccatggaggccctcaaatctcctcttatgggtatttttgagaaacgtcgagctggaaagtttttcagctatgttcaagaatacgacgagaaggacccaaaaacacatgatggaatggatttgaggagagttacaactaaggatttgattgcgaaattcggtcttaaagaagatactattgactttattggtcatgcagtggcacttcactgtaatgacaatcatctccatcaacctgcctatgatactgtaatgagaatgaagctctacgcagagtcccttgcacgttttcaaggaggttcaccatatatctatcctctctatgggttgggagaattgcctcaggcatttgcacgacttagtgctgtctatggtgggacgtatatgttgaacaaacctgagtgcaaggtagagtttgacgaggagggtaaggtttctggtgttacatctgagggagagactgccaaatgcaagaaagttgtctgcgatccttcttacctaaccaacaaggtcaggaagattggcagggttgctcgggcgattgccattatgagccaccctattccaaacaccaatgattctcagtcggtgcaagtcattctaccccaaaaacaattgggccagtatgtcttctgttgttcatattcacacaacgttgctcccaagggaaagttcatagcatttgtgtcaacagacgctgaaactgataaccctcaaaccgagctccagcctggaatcgaccttcttggtcctgttgatgagctgttcttcgacatctatgatagatatgagcctgtcaacgaacccactttggacaactgcttcatatcaacgagttatgatgctacaacacactttgacacaactgttgttgatgtgttgaacatgtataaattgatcaccggaaaggaactggatctaagtgtggatcttaacgcagctagtgctgcagaggaggaatga

SEQ ID NO: 78986 - protein, 441 aa, Arabidopsis thaliana
  peptide (1)..(441): Ceres Seq. ID no. 12647679
MDEEYEVIVLGTGLKECILSGLLSVDGLKVLHMDRNDYYGGESTSLNLNQLWKKFRGEEKAPAHLGSSRDYNVDMMPKFMMANGKLVRVLIHTDVTKYLSFKAVDGSYVFVQGKVQKVPATPMEALKSPLMGIFEKRRAGKFFSYVQEYDEKDPKTHDGMDLRRVTTKDLIAKFGLKEDTIDFIGHAVALHCNDNHLHQPAYDTVMRMKLYAESLARFQGGSPYIYPLYGLGELPQAFARLSAVYGGTYMLNKPECKVEFDEEGKVSGVTSEGETAKCKKVVCDPSYLTNKVRKIGRVARAIAIMSHPIPNTNDSQSVQVILPQKQLGQYVFCCSYSHNVAPKGKFIAFVSTDAETDNPQTELQPGIDLLGPVDELFFDIYDRYEPVNEPTLDNCFISTSYDATTHFDTTVVDVLNMYKLITGKELDLSVDLNAASAAEEE

SEQ ID NO: 78987 - protein, 409 aa, Arabidopsis thaliana
  peptide (1)..(409): Ceres Seq. ID no. 12647680
MDRNDYYGGESTSLNLNQLWKKFRGEEKAPAHLGSSRDYNVDMMPKFMMANGKLVRVLIHTDVTKYLSFKAVDGSYVFVQGKVQKVPATPMEALKSPLMGIFEKRRAGKFFSYVQEYDEKDPKTHDGMDLRRVTTKDLIAKFGLKEDTIDFIGHAVALHCNDNHLHQPAYDTVMRMKLYAESLARFQGGSPYIYPLYGLGELPQAFARLSAVYGGTYMLNKPECKVEFDEEGKVSGVTSEGETAKCKKVVCDPSYLTNKVRKIGRVARAIAIMSHPIPNTNDSQSVQVILPQKQLGQYVFCCSYSHNVAPKGKFIAFVSTDAETDNPQTELQPGIDLLGPVDELFFDIYDRYEPVNEPTLDNCFISTSYDATTHFDTTVVDVLNMYKLITGKELDLSVDLNAASAAEEE

SEQ ID NO: 78988 - protein, 367 aa, Arabidopsis thaliana
  peptide (1)..(367): Ceres Seq. ID no. 12647681
MMPKFMMANGKLVRVLIHTDVTKYLSFKAVDGSYVFVQGKVQKVPATPMEALKSPLMGIFEKRRAGKFFSYVQEYDEKDPKTHDGMDLRRVTTKDLIAKFGLKEDTIDFIGHAVALHCNDNHLHQPAYDTVMRMKLYAESLARFQGGSPYIYPLYGLGELPQAFARLSAVYGGTYMLNKPECKVEFDEEGKVSGVTSEGETAKCKKVVCDPSYLTNKVRKIGRVARAIAIMSHPIPNTNDSQSVQVILPQKQLGQYVFCCSYSHNVAPKGKFIAFVSTDAETDNPQTELQPGIDLLGPVDELFFDIYDRYEPVNEPTLDNCFISTSYDATTHFDTTVVDVLNMYKLITGKELDLSVDLNAASAAEEE

SEQ ID NO: 78989 - DNA, 2445 bp, Arabidopsis thaliana
  misc_feature (1)..(2445): Ceres Seq. ID no. 12647710
  misc_feature (1)..(2445): Ortholog of  Ceres SEQ ID NO 15224874 as cited in SEQ ID NO 55015
atggaaggttcttcaaattctaactctaggggattcaatacctctggtgtttcagataggaacactgagttcttacctgttgagagactcactactcgttccaagccttcctctcatgttgatgagtatgtcagaagcttgtttggtagtactagcacacacaagtctggtgaagatgattctttagggattgatccttttgttagatccttggaatggggtgatgttagtttgagacagtggctggataaacctgaacgatctgttgatgttttcgagtgcttgcacgttttcagacaaattgttgagattgtgaatgcggctcactctcaaggcattgttgttcataatgtcaggccatcatgttttgtcatgtcttcgtttaaccatgtttcgttcattgaatctgcttcttgttcggactctggctctgattccttggaggatggtccaattagccagaaggaaatcggtagctcgagaagagaggaagctgtatcgaaagctattgcaatagaagagaaaggagtctacaataagttgttggagagaaaaatcgagaaactagaggaagaaaaaacccaaccttttccgatgaaacatatattagcaatggagacaagttggtacacaagccctgaagaggattttggttcttcaagtacttgtgcttcagatgtttaccgccttggcgttcttcttttcgagctattttgccctgtaccttcaagagaagagaagtctagaactatgtctagtcttagacatcgcgttcttccgcctcagatattgctcaaatgtccaaaagaagcttctttctgcttgtggttactgcatcctgagccaacttgtcgaccatcaatgagtgacttgctgcaaagcgagtttataactgaacctagagataatttggaagaacgtgaagcagcaatcgagcttcgggacagaatcgaggaacaggagtcgttactcgagttcttgttactgattcaacagaggaagcaagaatctgcgtatagattgcaggatactgtttcacttctttcttctgacattgagcaagttgtaaagagacagttaattttgaagaaaaggggaagctcactctctgatttcagtaaagatgatcatcaatatacctctggtcagccattgatgagtttccaggcaaacgaggagccatcagcattcttggcctcaagaaaacgggttagacaagggattctggcattggaaaacggtgttgaagttgatgaagagagtcaaggaagcacacttcttgaaagctcccggttgatgagaaacttcaagaaactagaatcggtctactttctgacaaggcgcaggcaaatgaaggctgctgcttcagggaaatcattaactagacattcgccgttaagtagtgaaaatggaagaggttctatgattgtctcagagaaaaatcctttccttgagggtttgtgcagatatttatcattcagtcagctaagagtgaaagctgatttgaaacaaggagatttgttgaactcttctaacctcgtttgcgctcttgcgtttgaccgagaaggagaattattcgccactgcgggagtcaacaagaaaatcaagatattcgaatgtaactccatagtaaacgataaccgggatattcactatccggtggtggaattggctggtcggtcaaagctaagtagtttatgttggaacagctacataaagagccaaattgcatcaagtaactttgatggtgttgttcagatatgggatgttgcaagaagccagttggttacagagatgaaggagcacaagaagcgagtatggtccatcgatatttcatcagcagacccgactttgctggctagcggaagcgatgatggaaccggagttagcattgggaccatcaagacaaaggccaatgtatgctgtgtccagtttccatcagactccggacggtctctagcatttggttctgcagatcataaagtgtattactacgatcttcgaaaccccaagattcctctgtgcacaatgattggtcatagcaagacagtgagttatgtcaagtttgtagattcatccactcttgtgtcctcttctactgataacacactgaagctttgggacttgtcgatgtctgcttctgggattaatgaatcccctcttcactcattcactggacacactaatttaaagaactttgttggcttatcggtctctgatgggtatatagcaacaggctcagagactaacgaggttttcgtgtaccacaaggcattcccaatgccagtgatgtcgtacatgttcaacaacactgactctatgtctggtctcgaagtggacgatgcatcacagttcatatcttcaatctgctggcgaggacagtcgtctacgttagtcgctgctaactccaatggcaacataaaaattctggagatgatgacttga

SEQ ID NO: 78990 - protein, 814 aa, Arabidopsis thaliana
  peptide (1)..(814): Ceres Seq. ID no. 12647711
MEGSSNSNSRGFNTSGVSDRNTEFLPVERLTTRSKPSSHVDEYVRSLFGSTSTHKSGEDDSLGIDPFVRSLEWGDVSLRQWLDKPERSVDVFECLHVFRQIVEIVNAAHSQGIVVHNVRPSCFVMSSFNHVSFIESASCSDSGSDSLEDGPISQKEIGSSRREEAVSKAIAIEEKGVYNKLLERKIEKLEEEKTQPFPMKHILAMETSWYTSPEEDFGSSSTCASDVYRLGVLLFELFCPVPSREEKSRTMSSLRHRVLPPQILLKCPKEASFCLWLLHPEPTCRPSMSDLLQSEFITEPRDNLEEREAAIELRDRIEEQESLLEFLLLIQQRKQESAYRLQDTVSLLSSDIEQVVKRQLILKKRGSSLSDFSKDDHQYTSGQPLMSFQANEEPSAFLASRKRVRQGILALENGVEVDEESQGSTLLESSRLMRNFKKLESVYFLTRRRQMKAAASGKSLTRHSPLSSENGRGSMIVSEKNPFLEGLCRYLSFSQLRVKADLKQGDLLNSSNLVCALAFDREGELFATAGVNKKIKIFECNSIVNDNRDIHYPVVELAGRSKLSSLCWNSYIKSQIASSNFDGVVQIWDVARSQLVTEMKEHKKRVWSIDISSADPTLLASGSDDGTGVSIGTIKTKANVCCVQFPSDSGRSLAFGSADHKVYYYDLRNPKIPLCTMIGHSKTVSYVKFVDSSTLVSSSTDNTLKLWDLSMSASGINESPLHSFTGHTNLKNFVGLSVSDGYIATGSETNEVFVYHKAFPMPVMSYMFNNTDSMSGLEVDDASQFISSICWRGQSSTLVAANSNGNIKILEMMT

SEQ ID NO: 78991 - protein, 690 aa, Arabidopsis thaliana
  peptide (1)..(690): Ceres Seq. ID no. 12647712
MSSFNHVSFIESASCSDSGSDSLEDGPISQKEIGSSRREEAVSKAIAIEEKGVYNKLLERKIEKLEEEKTQPFPMKHILAMETSWYTSPEEDFGSSSTCASDVYRLGVLLFELFCPVPSREEKSRTMSSLRHRVLPPQILLKCPKEASFCLWLLHPEPTCRPSMSDLLQSEFITEPRDNLEEREAAIELRDRIEEQESLLEFLLLIQQRKQESAYRLQDTVSLLSSDIEQVVKRQLILKKRGSSLSDFSKDDHQYTSGQPLMSFQANEEPSAFLASRKRVRQGILALENGVEVDEESQGSTLLESSRLMRNFKKLESVYFLTRRRQMKAAASGKSLTRHSPLSSENGRGSMIVSEKNPFLEGLCRYLSFSQLRVKADLKQGDLLNSSNLVCALAFDREGELFATAGVNKKIKIFECNSIVNDNRDIHYPVVELAGRSKLSSLCWNSYIKSQIASSNFDGVVQIWDVARSQLVTEMKEHKKRVWSIDISSADPTLLASGSDDGTGVSIGTIKTKANVCCVQFPSDSGRSLAFGSADHKVYYYDLRNPKIPLCTMIGHSKTVSYVKFVDSSTLVSSSTDNTLKLWDLSMSASGINESPLHSFTGHTNLKNFVGLSVSDGYIATGSETNEVFVYHKAFPMPVMSYMFNNTDSMSGLEVDDASQFISSICWRGQSSTLVAANSNGNIKILEMMT

SEQ ID NO: 78992 - protein, 616 aa, Arabidopsis thaliana
  peptide (1)..(616): Ceres Seq. ID no. 12647713
MKHILAMETSWYTSPEEDFGSSSTCASDVYRLGVLLFELFCPVPSREEKSRTMSSLRHRVLPPQILLKCPKEASFCLWLLHPEPTCRPSMSDLLQSEFITEPRDNLEEREAAIELRDRIEEQESLLEFLLLIQQRKQESAYRLQDTVSLLSSDIEQVVKRQLILKKRGSSLSDFSKDDHQYTSGQPLMSFQANEEPSAFLASRKRVRQGILALENGVEVDEESQGSTLLESSRLMRNFKKLESVYFLTRRRQMKAAASGKSLTRHSPLSSENGRGSMIVSEKNPFLEGLCRYLSFSQLRVKADLKQGDLLNSSNLVCALAFDREGELFATAGVNKKIKIFECNSIVNDNRDIHYPVVELAGRSKLSSLCWNSYIKSQIASSNFDGVVQIWDVARSQLVTEMKEHKKRVWSIDISSADPTLLASGSDDGTGVSIGTIKTKANVCCVQFPSDSGRSLAFGSADHKVYYYDLRNPKIPLCTMIGHSKTVSYVKFVDSSTLVSSSTDNTLKLWDLSMSASGINESPLHSFTGHTNLKNFVGLSVSDGYIATGSETNEVFVYHKAFPMPVMSYMFNNTDSMSGLEVDDASQFISSICWRGQSSTLVAANSNGNIKILEMMT

SEQ ID NO: 78993 - DNA, 896 bp, Arabidopsis thaliana
  misc_feature (1)..(896): Ceres Seq. ID no. 12647725
  misc_feature (1)..(896): Ortholog of  Ceres SEQ ID NO 12473409 as cited in SEQ ID NO 104
  misc_feature (1)..(896): Ortholog of  Ceres SEQ ID NO 15170477 as cited in SEQ ID NO 52825
  misc_feature (1)..(896): Ortholog of  Ceres SEQ ID NO 13595055 as cited in SEQ ID NO 55744
  misc_feature (1)..(896): Ortholog of  Ceres SEQ ID NO 13662009 as cited in SEQ ID NO 61951
aagtcattcaaattgtcacccgtatctgccaaaaaccctctaaccactcaaaaaaatatctctgctctgctccaatggcgtcgttactcgattccgtcaccgtgacccgcgtgttttctctgccgattgcggcttcggtctcgtcttcttcagctgctccgtcggtttcacgacgccggatttctcccgccaggtttctggaattcagaggtttgaagtcttcgcggagtttggtgactcagtcggccagtctgggtgcgaatcgtagaaccagaatcgctcgcggtggacgaatcgcctgtgaggctcaggacaccactgccgccgccgtcgaagtaccaaatctgtctgattcagaatggcaaacaaaggttctggaatcagatgtcccagttctggtcgagttctgggcaccatggtgtggaccttgccgtatgattcaccccatagttgaccagctagccaaagatttcgcagggaagttcaaattctacaaaatcaacactgacgagagcccaaatacagcaaaccgttacgggatacgaagcgttccaacagtaatcatcttcaaaggcggtgagaagaaagatagcatcattggagctgtgcctagagagacgttggagaaaactatagaaagattcttggtcgagtaacaaaatttgactcttttgtcactctgaaccattttaccttatcttctctcttgtaatctctgtaaagtcttttaagtttttgactattatgttatcgtgggtcctctttgtcttcttcaataaaaaaaatggaaacaaagtaatccaccgacgcatgagaagcataactccacgttgaaccacatgccattgttcttcctaattcaccgtacaatctatatacatacatatgttttgagt

SEQ ID NO: 78994 - protein, 217 aa, Arabidopsis thaliana
  peptide (1)..(217): Ceres Seq. ID no. 12647726
VIQIVTRICQKPSNHSKKYLCSAPMASLLDSVTVTRVFSLPIAASVSSSSAAPSVSRRRISPARFLEFRGLKSSRSLVTQSASLGANRRTRIARGGRIACEAQDTTAAAVEVPNLSDSEWQTKVLESDVPVLVEFWAPWCGPCRMIHPIVDQLAKDFAGKFKFYKINTDESPNTANRYGIRSVPTVIIFKGGEKKDSIIGAVPRETLEKTIERFLVE

SEQ ID NO: 78995 - protein, 193 aa, Arabidopsis thaliana; identical to SEQ ID NO: 37672
  peptide (1)..(193): Ceres Seq. ID no. 12647727

SEQ ID NO: 78996 - DNA, 818 bp, Arabidopsis thaliana
  misc_feature (1)..(818): Ceres Seq. ID no. 12647785
  misc_feature (1)..(818): Ortholog of  Ceres SEQ ID NO 14301742 as cited in SEQ ID NO 54857
aatcaaatcaaatctgtgtttcattctcttctccactgaaacgcgtttgaaggagaagggtcaaagggatctgatcctatcactttcgctgggaaaaacacgaaatcgaaggaagaatcaatcatgggtttcatcggagaaactgtagattccatcaaatctatcaagatccgtcaagttctcactcaggctatcactctcggtatgatcgttacatctgcattgataatttggaaggcattgatatgtgtcactggcagtgaatcaccagtggttgttgttctctctgaaagtatggaacctggctttcagagaggagatatattgttcttgcggatgactgatgagcctattcgagcaggcgagattgttgtgttcagtgttgatggtcgtgaaattcccattgttcatcgagcaatcaaagttcatgagagaggagatactaaagcagttgatgttctaacaaaaggtgacaacaatgacattgatgacattggtctctatgctgaaggacagctttggcttcacaggcatcatatcatgggcagagctgttggattcttgccttatgttggatgggttactattatcatgacagaaaagcctatcatcaagtatatactcattggtgcattgggtttgctcgttataacatcgaaagactaagactacataacaagctggtcgttggtaaggaggtagcttctgcaacgctcgggtcatcatctttgtagccatcatctttgaaactgtagaatcatataaacctcaacttataattatagacacttttatctttaaatcagctacgttttgtg

SEQ ID NO: 78997 - protein, 180 aa, Arabidopsis thaliana
  peptide (1)..(180): Ceres Seq. ID no. 12647786
MGFIGETVDSIKSIKIRQVLTQAITLGMIVTSALIIWKALICVTGSESPVVVVLSESMEPGFQRGDILFLRMTDEPIRAGEIVVFSVDGREIPIVHRAIKVHERGDTKAVDVLTKGDNNDIDDIGLYAEGQLWLHRHHIMGRAVGFLPYVGWVTIIMTEKPIIKYILIGALGLLVITSKD

SEQ ID NO: 78998 - protein, 153 aa, Arabidopsis thaliana; identical to SEQ ID NO: 35045
  peptide (1)..(153): Ceres Seq. ID no. 12647787

SEQ ID NO: 78999 - protein, 123 aa, Arabidopsis thaliana; identical to SEQ ID NO: 35046
  peptide (1)..(123): Ceres Seq. ID no. 12647788

SEQ ID NO: 79000 - DNA, 3258 bp, Arabidopsis thaliana
  misc_feature (1)..(3258): Ceres Seq. ID no. 12647799
  misc_feature (1)..(3258): Ortholog of  Ceres SEQ ID NO 14311156 as cited in SEQ ID NO 54767
  misc_feature (1)..(3258): Ortholog of  Ceres SEQ ID NO 13658778 as cited in SEQ ID NO 66511
atgaacactggagggagactcattgctgggtctcacaacaggaatgaattcgttctcattaacgccgacgacactgccagaatacgatcagcagaagaactgagtgggcaaacttgtaaaatctgtagagatgagattgagttaacagataatggtgagccatttatcgcttgcaacgaatgtgctttccctacgtgtagaccgtgctatgagtatgaaagaagagaaggaaaccaagcttgtcctcagtgcggaacccgatacaagcgtattaaaggtagtccaagggtcgaaggggatgaagaagatgatgacattgatgatctggagcatgagttttatggaatggatcctgaacatgttactgaagctgcgctctattatatgcgtcttaacactggtcgtggtactgatgaagtgtcacacttgtattcagcttcaccaggctctgaggttcctcttttgacgtattgtgatgaggattctgatatgtattcggatagacatgctcttatcgtgcccccatctacgggtttggggaacagagtccatcatgtgccatttacagattcttttgcatctatacacacaagacccatggttcctcagaaggatcttacagtttatggatatggaagtgttgcatggaaagaccgtatggaagtatggaagaaacaacaaatagaaaagctacaagtcgttaagaatgaaagagtaaatgatggtgatggcgatggattcattgttgacgagctcgatgatcccgggatggatgaaggaagacaacctctgtcacgaaagctacccattcgttcgagcagaataaacccttataggatgttgattttctgtcggctcgccattcttggcttgttcttccattataggattctccatccggtgaatgatgcattcggcttgtggttaacatcggttatatgcgaaatatggttcgctgtgtcttggattcttgatcagttcccaaaatggtatcccatcgaaagagaaacatatctcgacaggctttctctaaggtatgagaaggaagggaagccatcagagttagcgcctgtcgatgtctttgttagtactgtggatccattgaaagagcctccactgattacagcaaatacggttctgtctattctcgctgttgattatccggttgagaaggttgcatgttatgtatcagatgatggtgctgcaatgcttacatttgaagctctctcttacacagccgagtttgcaagaaaatgggttcctttctgtaagaagttcagcatcgagccacgcgctcctgaatggtatttttcacagaagatggattacttgaagcataaagtcgatcccgcttttgttatggaacgccgtgccatgaagagagactatgaggaattcaaagtaaagataaatgcattggtttctgtatcacagaaagttcctgaagatggttggactatgcaagatggaactccttggcctggaaacaatgtccgggaccatccaggaatgattcaggttttcctgggacacagcggagtttgtgatatggatggaaatgagttacctcgtttggtgtatgtttctcgtgagaagcgaccgggatttgatcaccataagaaggctggagctatgaattccttgatccgggtatctgctgttctctcaaatgctccttaccttcttaatgtggactgtgatcattacatcaacaacagcaaggcaattagagaagctatgtgtttcatgatggacccgcagtccggaaagaaaatatgttatgttcagtttcctcagaggtttgatgggattgatagacacgatcgatactcaaatcgcaatgtggttttcttcgatatcaacatgaaaggtttagatggcatacaaggaccgatatatgtggggaccgggtgtgtcttcagaaggcaagcactttatggatttgatgcaccaaagaagaagcaaccaccaggcagaacctgcaactgttggccaaaatggtgctgtttgtgttgcggtatgagaaagaagaagacaggtaaggtcaaagataatcagagaaagaagcctaaagagacttcaaagcagatacatgcccttgagcacatagaagaaggccttcaagtgacaaatgctgagaataactctgagactgcccaactgaagctggagaagaaatttggtcaatcaccggttttagtagcttctactcttctgctaaatggtggagtgcctagcaatgtgaacccagcgtctttattgagggaatccattcaggttattagctgtggctacgaagagaaaaccgaatggggaaaagagattgggtggatttatggctcggtcactgaggatatcttaacgggtttcaagatgcattgccatggatggagatctgtatattgtatgccaaagcgagcggctttcaaaggttctgctcccattaacttgtcggatcgtcttcatcaagttctacgttgggcacttggctctgtcgagattttcttgagtaggcattgccctatttggtacggttatggtggtggtttaaaatggttggaaagattctcttacattaactctgttgtctatccttggacatcccttcctttgcttgtctactgctcacttcccgccatttgtctactcaccggaaaattcatcgtccctgagataagtaactacgcgggtatactcttcctgctaatgtttatgtccattgcggtaacgggtatactagaaatgcaatggggcaaaataggaatcgatgattggtggagaaacgagcagttttgggtcattggaggagtctcttcgcatctatttgctctgtttcaaggtttactcaaagttcttgcaggagtcagcacgaacttcacagtcacatctaaagcagcagatgatggagaattctcagagctttacattttcaaatggacatctttgttgattcctccgactactctgctgatcattaacatcgttggagtcattgtcggagtttcggatgcgataaataacgggtatgactcttggggaccgctttttgggagattgttctttgcgctttgggtgattgttcatttgtatccgttcctcaaagggttacttgggaaacaagatagagtaccaaccattatattggtttggtcgattcttcttgcttccatcttgactctcttgtgggtcagagtcaatccgtttgtgtccaaagatggaccggtcttggagatctgtggtcttgactgtttaaagtga

SEQ ID NO: 79001 - protein, 1085 aa, Arabidopsis thaliana
  peptide (1)..(1085): Ceres Seq. ID no. 12647800
MNTGGRLIAGSHNRNEFVLINADDTARIRSAEELSGQTCKICRDEIELTDNGEPFIACNECAFPTCRPCYEYERREGNQACPQCGTRYKRIKGSPRVEGDEEDDDIDDLEHEFYGMDPEHVTEAALYYMRLNTGRGTDEVSHLYSASPGSEVPLLTYCDEDSDMYSDRHALIVPPSTGLGNRVHHVPFTDSFASIHTRPMVPQKDLTVYGYGSVAWKDRMEVWKKQQIEKLQVVKNERVNDGDGDGFIVDELDDPGMDEGRQPLSRKLPIRSSRINPYRMLIFCRLAILGLFFHYRILHPVNDAFGLWLTSVICEIWFAVSWILDQFPKWYPIERETYLDRLSLRYEKEGKPSELAPVDVFVSTVDPLKEPPLITANTVLSILAVDYPVEKVACYVSDDGAAMLTFEALSYTAEFARKWVPFCKKFSIEPRAPEWYFSQKMDYLKHKVDPAFVMERRAMKRDYEEFKVKINALVSVSQKVPEDGWTMQDGTPWPGNNVRDHPGMIQVFLGHSGVCDMDGNELPRLVYVSREKRPGFDHHKKAGAMNSLIRVSAVLSNAPYLLNVDCDHYINNSKAIREAMCFMMDPQSGKKICYVQFPQRFDGIDRHDRYSNRNVVFFDINMKGLDGIQGPIYVGTGCVFRRQALYGFDAPKKKQPPGRTCNCWPKWCCLCCGMRKKKTGKVKDNQRKKPKETSKQIHALEHIEEGLQVTNAENNSETAQLKLEKKFGQSPVLVASTLLLNGGVPSNVNPASLLRESIQVISCGYEEKTEWGKEIGWIYGSVTEDILTGFKMHCHGWRSVYCMPKRAAFKGSAPINLSDRLHQVLRWALGSVEIFLSRHCPIWYGYGGGLKWLERFSYINSVVYPWTSLPLLVYCSLPAICLLTGKFIVPEISNYAGILFLLMFMSIAVTGILEMQWGKIGIDDWWRNEQFWVIGGVSSHLFALFQGLLKVLAGVSTNFTVTSKAADDGEFSELYIFKWTSLLIPPTTLLIINIVGVIVGVSDAINNGYDSWGPLFGRLFFALWVIVHLYPFLKGLLGKQDRVPTIILVWSILLASILTLLWVRVNPFVSKDGPVLEICGLDCLK

SEQ ID NO: 79002 - protein, 970 aa, Arabidopsis thaliana
  peptide (1)..(970): Ceres Seq. ID no. 12647801
MDPEHVTEAALYYMRLNTGRGTDEVSHLYSASPGSEVPLLTYCDEDSDMYSDRHALIVPPSTGLGNRVHHVPFTDSFASIHTRPMVPQKDLTVYGYGSVAWKDRMEVWKKQQIEKLQVVKNERVNDGDGDGFIVDELDDPGMDEGRQPLSRKLPIRSSRINPYRMLIFCRLAILGLFFHYRILHPVNDAFGLWLTSVICEIWFAVSWILDQFPKWYPIERETYLDRLSLRYEKEGKPSELAPVDVFVSTVDPLKEPPLITANTVLSILAVDYPVEKVACYVSDDGAAMLTFEALSYTAEFARKWVPFCKKFSIEPRAPEWYFSQKMDYLKHKVDPAFVMERRAMKRDYEEFKVKINALVSVSQKVPEDGWTMQDGTPWPGNNVRDHPGMIQVFLGHSGVCDMDGNELPRLVYVSREKRPGFDHHKKAGAMNSLIRVSAVLSNAPYLLNVDCDHYINNSKAIREAMCFMMDPQSGKKICYVQFPQRFDGIDRHDRYSNRNVVFFDINMKGLDGIQGPIYVGTGCVFRRQALYGFDAPKKKQPPGRTCNCWPKWCCLCCGMRKKKTGKVKDNQRKKPKETSKQIHALEHIEEGLQVTNAENNSETAQLKLEKKFGQSPVLVASTLLLNGGVPSNVNPASLLRESIQVISCGYEEKTEWGKEIGWIYGSVTEDILTGFKMHCHGWRSVYCMPKRAAFKGSAPINLSDRLHQVLRWALGSVEIFLSRHCPIWYGYGGGLKWLERFSYINSVVYPWTSLPLLVYCSLPAICLLTGKFIVPEISNYAGILFLLMFMSIAVTGILEMQWGKIGIDDWWRNEQFWVIGGVSSHLFALFQGLLKVLAGVSTNFTVTSKAADDGEFSELYIFKWTSLLIPPTTLLIINIVGVIVGVSDAINNGYDSWGPLFGRLFFALWVIVHLYPFLKGLLGKQDRVPTIILVWSILLASILTLLWVRVNPFVSKDGPVLEICGLDCLK

SEQ ID NO: 79003 - protein, 957 aa, Arabidopsis thaliana
  peptide (1)..(957): Ceres Seq. ID no. 12647802
MRLNTGRGTDEVSHLYSASPGSEVPLLTYCDEDSDMYSDRHALIVPPSTGLGNRVHHVPFTDSFASIHTRPMVPQKDLTVYGYGSVAWKDRMEVWKKQQIEKLQVVKNERVNDGDGDGFIVDELDDPGMDEGRQPLSRKLPIRSSRINPYRMLIFCRLAILGLFFHYRILHPVNDAFGLWLTSVICEIWFAVSWILDQFPKWYPIERETYLDRLSLRYEKEGKPSELAPVDVFVSTVDPLKEPPLITANTVLSILAVDYPVEKVACYVSDDGAAMLTFEALSYTAEFARKWVPFCKKFSIEPRAPEWYFSQKMDYLKHKVDPAFVMERRAMKRDYEEFKVKINALVSVSQKVPEDGWTMQDGTPWPGNNVRDHPGMIQVFLGHSGVCDMDGNELPRLVYVSREKRPGFDHHKKAGAMNSLIRVSAVLSNAPYLLNVDCDHYINNSKAIREAMCFMMDPQSGKKICYVQFPQRFDGIDRHDRYSNRNVVFFDINMKGLDGIQGPIYVGTGCVFRRQALYGFDAPKKKQPPGRTCNCWPKWCCLCCGMRKKKTGKVKDNQRKKPKETSKQIHALEHIEEGLQVTNAENNSETAQLKLEKKFGQSPVLVASTLLLNGGVPSNVNPASLLRESIQVISCGYEEKTEWGKEIGWIYGSVTEDILTGFKMHCHGWRSVYCMPKRAAFKGSAPINLSDRLHQVLRWALGSVEIFLSRHCPIWYGYGGGLKWLERFSYINSVVYPWTSLPLLVYCSLPAICLLTGKFIVPEISNYAGILFLLMFMSIAVTGILEMQWGKIGIDDWWRNEQFWVIGGVSSHLFALFQGLLKVLAGVSTNFTVTSKAADDGEFSELYIFKWTSLLIPPTTLLIINIVGVIVGVSDAINNGYDSWGPLFGRLFFALWVIVHLYPFLKGLLGKQDRVPTIILVWSILLASILTLLWVRVNPFVSKDGPVLEICGLDCLK

SEQ ID NO: 79004 - DNA, 1128 bp, Arabidopsis thaliana
  misc_feature (1)..(1128): Ceres Seq. ID no. 12647826
  misc_feature (1)..(1128): Ortholog of  Ceres SEQ ID NO 13596048 as cited in SEQ ID NO 68476
  misc_feature (1)..(1128): Ortholog of  Ceres SEQ ID NO 12589137 as cited in SEQ ID NO 0
atggtagatcaaaatagagcatttggttgggcggccaacgacgaatcgggcgtcctctctccatttcatttctctagaagagaaaatggtgagaacgatgtaacagtgaagatcttgttctgtggtgtttgtcactctgatcttcataccatcaagaaccattggggattctctcgttaccccattattcccgggcatgaaatcgttggaatagcaacaaaagttgggaagaatgtgacaaagtttaaagaaggagaccgagtaggagtaggcgtaataatcggttcatgccaatcatgtgaatcatgtaaccaagacttagaaaactattgtcctaaagtcgttttcacatacaactctcgttcctctgacggaaccagaaaccaaggtggttattccgacgtaattgttgtcgatcaccgctttgtcctaagcattcccgacggtttaccaagcgattcaggcgcgccgctgctctgtgctggaatcactgtgtacagtcccatgaagtattatggcatgactaaagaatcagggaaacgtttaggtgtgaatggacttggtggacttggtcatatcgctgttaagattggtaaagcctttggtttaagagttactgtgattagtaggtcatcagagaaagagagagaagcaattgatcgactcggtgctgattcgtttcttgttacaacggattctcaaaagatgaaggaagcagttggaactatggatttcattatcgatacggtatcagcagaacatgctctattacctttgtttagtttgcttaaagtgagtggaaagcttgtggctttaggcttgctggagaagccactcgacctgccaattttccctctagttctcggaaggaaaatggtgggaggaagtcagattggagggatgaaggagacacaagagatgcttgagttctgtgccaagcataaaatcgtttcggatattgagctcataaagatgagtgatatcaactctgcgatggaccgtttggttaaatctgatgtcaggtaccggttcgtgatcgatgtggccaactctttactccctgagtcgtcagctgagattttaacggagcatgtcgaccatggagtctcgatcacgtctagattctga

SEQ ID NO: 79005 - protein, 375 aa, Arabidopsis thaliana
  peptide (1)..(375): Ceres Seq. ID no. 12647827
MVDQNRAFGWAANDESGVLSPFHFSRRENGENDVTVKILFCGVCHSDLHTIKNHWGFSRYPIIPGHEIVGIATKVGKNVTKFKEGDRVGVGVIIGSCQSCESCNQDLENYCPKVVFTYNSRSSDGTRNQGGYSDVIVVDHRFVLSIPDGLPSDSGAPLLCAGITVYSPMKYYGMTKESGKRLGVNGLGGLGHIAVKIGKAFGLRVTVISRSSEKEREAIDRLGADSFLVTTDSQKMKEAVGTMDFIIDTVSAEHALLPLFSLLKVSGKLVALGLLEKPLDLPIFPLVLGRKMVGGSQIGGMKETQEMLEFCAKHKIVSDIELIKMSDINSAMDRLVKSDVRYRFVIDVANSLLPESSAEILTEHVDHGVSITSRF

SEQ ID NO: 79006 - protein, 207 aa, Arabidopsis thaliana
  peptide (1)..(207): Ceres Seq. ID no. 12647828
MKYYGMTKESGKRLGVNGLGGLGHIAVKIGKAFGLRVTVISRSSEKEREAIDRLGADSFLVTTDSQKMKEAVGTMDFIIDTVSAEHALLPLFSLLKVSGKLVALGLLEKPLDLPIFPLVLGRKMVGGSQIGGMKETQEMLEFCAKHKIVSDIELIKMSDINSAMDRLVKSDVRYRFVIDVANSLLPESSAEILTEHVDHGVSITSRF

SEQ ID NO: 79007 - protein, 202 aa, Arabidopsis thaliana
  peptide (1)..(202): Ceres Seq. ID no. 12647829
MTKESGKRLGVNGLGGLGHIAVKIGKAFGLRVTVISRSSEKEREAIDRLGADSFLVTTDSQKMKEAVGTMDFIIDTVSAEHALLPLFSLLKVSGKLVALGLLEKPLDLPIFPLVLGRKMVGGSQIGGMKETQEMLEFCAKHKIVSDIELIKMSDINSAMDRLVKSDVRYRFVIDVANSLLPESSAEILTEHVDHGVSITSRF

SEQ ID NO: 79008 - DNA, 2205 bp, Arabidopsis thaliana
  misc_feature (1)..(2205): Ceres Seq. ID no. 12647844
  misc_feature (1)..(2205): Ortholog of  Ceres SEQ ID NO 14312989 as cited in SEQ ID NO 59121
  misc_feature (1)..(2205): Ortholog of  Ceres SEQ ID NO 12586556 as cited in SEQ ID NO 64667
  misc_feature (1)..(2205): Ortholog of  Ceres SEQ ID NO 13660894 as cited in SEQ ID NO 67475
atggatgctccggttccactctctttatctactctgttagaactctgcaccaatctcttgcaaaaatctgtaaacaagtccaatggtcgtttcacagcgcaattggttcattgccgtgttatcaaatcgggtcttatgttcagcgtctacctgatgaataatctcatgaacgtctactcaaaaactggttatgctcttcacgcacgcaagctgttcgacgaaatgcctctaagaacagctttttcatggaacacggttctttcggcttattctaaacgaggagatatggattcgacttgtgagttctttgatcagttgcctcaaagggattcggtttcgtggactacgatgattgttgggtataagaacattggtcaatatcataaggctataagagttatgggggatatggtcaaggaagggattgagccgacgcagtttacgcttacgaatgtgcttgcatcggtggctgcaacgcggtgtatggaaacaggtaaaaaggttcattctttcatcgttaagcttggtcttcgcggtaacgtttctgtgtcgaattcactgcttaatatgtatgcaaaatgtggtgatccaatgatggcaaaatttgttttcgatagaatggttgttagagatatctcaagctggaatgctatgattgcgttacatatgcaggtcggtcaaatggatcttgctatggcgcagttcgagcaaatggctgagcgagatatagtcacttggaattctatgatttctggtttcaatcagagagggtatgatctcagagctctagatatcttttcgaagatgctgagggattctctgttgtcgccggatagattcactctggcgagtgtgttatctgcttgtgccaatcttgagaaactttgtattgggaagcagattcattcgcacattgttactacagggtttgatatttccggaatcgtgttaaatgcattgatctcgatgtattcgaggttcgcatggaccgccatgattgtaggatatgagcaacacggttcgtatggtgaagctataaaccttttcagatcaatggttggaggagggcagagaccaaacagttacactcttgcagcaatgttaagtgtagcttcaagtttggcatcattgagccatggcaagcaaatccatgggagtgctgtaaagtcaggggaaatttattcagtttctgtcagcaatgcattgataacaatgtatgcaaaggcgggtaacattacatcggcaagccgggcatttgatttgatacgctgtgagagggatacagtatcgtggacatccatgattatcgcgttggcacagcacggtcacgcagaagaagcacttgagctttttgagacaatgctgatggaaggactaagacctgatcacataacatatgttggtgttttctctgcctgtactcatgccggtttggtcaaccaaggtcgtcaatacttcgatatgatgaaggacgttgataagattatacctacccttagccactatgcttgtatggtggacctgtttggacgtgctggtttattgcaggaagcacaagagttcatcgaaaagatgcctattgagcctgatgtagtgacatggggttcactgctttctgcttgcagagttcacaagaacatcgatcttgggaaagttgcagcagagagattgcttcttctcgagccagagaacagcggggcatactcagccttggctaacttatactcagcttgtggaaaatgggaagaagctgctaagataagaaaatcaatgaaagatggaagagtaaagaaggaacaagggtttagctggattgaagtgaagcataaagtccatgtctttggagtggaagacgggactcatccagagaagaacgagatctacatgaccatgaagaagatttgggacgagatcaagaaaatgggttatgttcccgacacagcttctgtactacacgacctcgaagaagaggttaaagaacagattctaaggcaccacagcgagaaactagcaatcgcatttggactaattagcactccggataaaaccacattgaggatcatgaagaatctcagagtgtgcaatgattgccacacggctataaagttcatttccaagcttgtgggaagggaaatcatagtgagagatacaacaagatttcaccatttcaaagatgggttttgttcttgccgagattattggtga

SEQ ID NO: 79009 - protein, 734 aa, Arabidopsis thaliana
  peptide (1)..(734): Ceres Seq. ID no. 12647845
MDAPVPLSLSTLLELCTNLLQKSVNKSNGRFTAQLVHCRVIKSGLMFSVYLMNNLMNVYSKTGYALHARKLFDEMPLRTAFSWNTVLSAYSKRGDMDSTCEFFDQLPQRDSVSWTTMIVGYKNIGQYHKAIRVMGDMVKEGIEPTQFTLTNVLASVAATRCMETGKKVHSFIVKLGLRGNVSVSNSLLNMYAKCGDPMMAKFVFDRMVVRDISSWNAMIALHMQVGQMDLAMAQFEQMAERDIVTWNSMISGFNQRGYDLRALDIFSKMLRDSLLSPDRFTLASVLSACANLEKLCIGKQIHSHIVTTGFDISGIVLNALISMYSRFAWTAMIVGYEQHGSYGEAINLFRSMVGGGQRPNSYTLAAMLSVASSLASLSHGKQIHGSAVKSGEIYSVSVSNALITMYAKAGNITSASRAFDLIRCERDTVSWTSMIIALAQHGHAEEALELFETMLMEGLRPDHITYVGVFSACTHAGLVNQGRQYFDMMKDVDKIIPTLSHYACMVDLFGRAGLLQEAQEFIEKMPIEPDVVTWGSLLSACRVHKNIDLGKVAAERLLLLEPENSGAYSALANLYSACGKWEEAAKIRKSMKDGRVKKEQGFSWIEVKHKVHVFGVEDGTHPEKNEIYMTMKKIWDEIKKMGYVPDTASVLHDLEEEVKEQILRHHSEKLAIAFGLISTPDKTTLRIMKNLRVCNDCHTAIKFISKLVGREIIVRDTTRFHHFKDGFCSCRDYW

SEQ ID NO: 79010 - protein, 689 aa, Arabidopsis thaliana
  peptide (1)..(689): Ceres Seq. ID no. 12647846
MFSVYLMNNLMNVYSKTGYALHARKLFDEMPLRTAFSWNTVLSAYSKRGDMDSTCEFFDQLPQRDSVSWTTMIVGYKNIGQYHKAIRVMGDMVKEGIEPTQFTLTNVLASVAATRCMETGKKVHSFIVKLGLRGNVSVSNSLLNMYAKCGDPMMAKFVFDRMVVRDISSWNAMIALHMQVGQMDLAMAQFEQMAERDIVTWNSMISGFNQRGYDLRALDIFSKMLRDSLLSPDRFTLASVLSACANLEKLCIGKQIHSHIVTTGFDISGIVLNALISMYSRFAWTAMIVGYEQHGSYGEAINLFRSMVGGGQRPNSYTLAAMLSVASSLASLSHGKQIHGSAVKSGEIYSVSVSNALITMYAKAGNITSASRAFDLIRCERDTVSWTSMIIALAQHGHAEEALELFETMLMEGLRPDHITYVGVFSACTHAGLVNQGRQYFDMMKDVDKIIPTLSHYACMVDLFGRAGLLQEAQEFIEKMPIEPDVVTWGSLLSACRVHKNIDLGKVAAERLLLLEPENSGAYSALANLYSACGKWEEAAKIRKSMKDGRVKKEQGFSWIEVKHKVHVFGVEDGTHPEKNEIYMTMKKIWDEIKKMGYVPDTASVLHDLEEEVKEQILRHHSEKLAIAFGLISTPDKTTLRIMKNLRVCNDCHTAIKFISKLVGREIIVRDTTRFHHFKDGFCSCRDYW

SEQ ID NO: 79011 - protein, 683 aa, Arabidopsis thaliana
  peptide (1)..(683): Ceres Seq. ID no. 12647847
MNNLMNVYSKTGYALHARKLFDEMPLRTAFSWNTVLSAYSKRGDMDSTCEFFDQLPQRDSVSWTTMIVGYKNIGQYHKAIRVMGDMVKEGIEPTQFTLTNVLASVAATRCMETGKKVHSFIVKLGLRGNVSVSNSLLNMYAKCGDPMMAKFVFDRMVVRDISSWNAMIALHMQVGQMDLAMAQFEQMAERDIVTWNSMISGFNQRGYDLRALDIFSKMLRDSLLSPDRFTLASVLSACANLEKLCIGKQIHSHIVTTGFDISGIVLNALISMYSRFAWTAMIVGYEQHGSYGEAINLFRSMVGGGQRPNSYTLAAMLSVASSLASLSHGKQIHGSAVKSGEIYSVSVSNALITMYAKAGNITSASRAFDLIRCERDTVSWTSMIIALAQHGHAEEALELFETMLMEGLRPDHITYVGVFSACTHAGLVNQGRQYFDMMKDVDKIIPTLSHYACMVDLFGRAGLLQEAQEFIEKMPIEPDVVTWGSLLSACRVHKNIDLGKVAAERLLLLEPENSGAYSALANLYSACGKWEEAAKIRKSMKDGRVKKEQGFSWIEVKHKVHVFGVEDGTHPEKNEIYMTMKKIWDEIKKMGYVPDTASVLHDLEEEVKEQILRHHSEKLAIAFGLISTPDKTTLRIMKNLRVCNDCHTAIKFISKLVGREIIVRDTTRFHHFKDGFCSCRDYW

SEQ ID NO: 79012 - DNA, 1674 bp, Arabidopsis thaliana
  misc_feature (1)..(1674): Ceres Seq. ID no. 12648005
  misc_feature (1)..(1674): Ortholog of  Ceres SEQ ID NO 13600220 as cited in SEQ ID NO 0
atggcacatcttcaaagaacatttcctactgagatgtcaaaaggtagagctagctttccaaaaggctttctctttggaactgcttcatcttcttatcagtacgaaggagcagtgaatgaaggtgcgagaggacaaagcgtgtgggatcatttctccaacaggtttcctcacagaatcagtgattctagcgacggaaacgttgccgttgatttctaccatcgttacaaggaagatattaagagaatgaaggatataaacatggattcgtttcggctttccattgcttggccacgagttctaccttatggcaaaagggatagaggagttagtgaagaaggaattaagttttacaatgatgttattgatgaactcttagccaatgaaatcactcctcttgttactatctttcattgggacataccacaggatcttgaagatgaatacggcggttttctaagcgaagatgacttcagagactatgcgagtctctgcttcgagagatttggggacagagtgagtctgtggtgcacaatgaatgagccgtgggtctacagtgtcgcgggctatgacacaggaaggaaagcgccaggacggtgctccaagtatgttaatggcgctagtgttgctggaatgtcgggatacgaggcatatattgtgagccataacatgcttctagcgcacgcagaagcagtggaagtgtttagaaaatgtgaccatattaaaaacggacaaattgggattgcgcataatccactttggtacgagccatatgatccgagtgatccagatgatgtcgaaggatgtaatcgagctatggacttcatgcttggttggcatcagcatccgactgcttgtggagactatccagaaacgatgaagaaatcagttggagatagattaccgagttttacaccagaacaatctaagaaacttataggctcttgcgattacgttggtataaactactatagctcgcttttcgtgaagagtatcaaacacgtggatcctacgcaacctacttggagaactgaccaaggcgttgattggatgaaaaccaacatagatgggaaacaaatagcaaaacaaggaggatcagagtggagtttcacatatccaacaggactcagaaacattttgaagtatgtgaaaaaaacttatggcaatcctcccattctcataactgaaaacgggtatggtgaagtagcggaacagagtcagagtctttatatgtacaatccttcaatcgacacagagagattggagtacattgaaggacatatccacgctattcatcaagccatccatgaagatggagtaagagtggaaggttattacgtatggtcattgctagataacttcgagtggaacagtggatatggtgtgagatatggtttatattacattgattacaaagatgggcttagacgatacccgaaaatgtcggcgttatggttgaaagagttcttgaggtttgatcaagaagacgattcttcgacgtctaagaaagaagagaagaaagagagctatggaaaacagttattgcattctgttcaggacagtcaatttgttcattcgattaaagacagtggtgcgttacctgcggttttggggagcttgttcgttgtgtctgcaactgttggtacttctctgttcttcaaaggagctaataattga

SEQ ID NO: 79013 - protein, 557 aa, Arabidopsis thaliana
  peptide (1)..(557): Ceres Seq. ID no. 12648006
MAHLQRTFPTEMSKGRASFPKGFLFGTASSSYQYEGAVNEGARGQSVWDHFSNRFPHRISDSSDGNVAVDFYHRYKEDIKRMKDINMDSFRLSIAWPRVLPYGKRDRGVSEEGIKFYNDVIDELLANEITPLVTIFHWDIPQDLEDEYGGFLSEDDFRDYASLCFERFGDRVSLWCTMNEPWVYSVAGYDTGRKAPGRCSKYVNGASVAGMSGYEAYIVSHNMLLAHAEAVEVFRKCDHIKNGQIGIAHNPLWYEPYDPSDPDDVEGCNRAMDFMLGWHQHPTACGDYPETMKKSVGDRLPSFTPEQSKKLIGSCDYVGINYYSSLFVKSIKHVDPTQPTWRTDQGVDWMKTNIDGKQIAKQGGSEWSFTYPTGLRNILKYVKKTYGNPPILITENGYGEVAEQSQSLYMYNPSIDTERLEYIEGHIHAIHQAIHEDGVRVEGYYVWSLLDNFEWNSGYGVRYGLYYIDYKDGLRRYPKMSALWLKEFLRFDQEDDSSTSKKEEKKESYGKQLLHSVQDSQFVHSIKDSGALPAVLGSLFVVSATVGTSLFFKGANN

SEQ ID NO: 79014 - protein, 546 aa, Arabidopsis thaliana
  peptide (1)..(546): Ceres Seq. ID no. 12648007
MSKGRASFPKGFLFGTASSSYQYEGAVNEGARGQSVWDHFSNRFPHRISDSSDGNVAVDFYHRYKEDIKRMKDINMDSFRLSIAWPRVLPYGKRDRGVSEEGIKFYNDVIDELLANEITPLVTIFHWDIPQDLEDEYGGFLSEDDFRDYASLCFERFGDRVSLWCTMNEPWVYSVAGYDTGRKAPGRCSKYVNGASVAGMSGYEAYIVSHNMLLAHAEAVEVFRKCDHIKNGQIGIAHNPLWYEPYDPSDPDDVEGCNRAMDFMLGWHQHPTACGDYPETMKKSVGDRLPSFTPEQSKKLIGSCDYVGINYYSSLFVKSIKHVDPTQPTWRTDQGVDWMKTNIDGKQIAKQGGSEWSFTYPTGLRNILKYVKKTYGNPPILITENGYGEVAEQSQSLYMYNPSIDTERLEYIEGHIHAIHQAIHEDGVRVEGYYVWSLLDNFEWNSGYGVRYGLYYIDYKDGLRRYPKMSALWLKEFLRFDQEDDSSTSKKEEKKESYGKQLLHSVQDSQFVHSIKDSGALPAVLGSLFVVSATVGTSLFFKGANN

SEQ ID NO: 79015 - protein, 476 aa, Arabidopsis thaliana
  peptide (1)..(476): Ceres Seq. ID no. 12648008
MKDINMDSFRLSIAWPRVLPYGKRDRGVSEEGIKFYNDVIDELLANEITPLVTIFHWDIPQDLEDEYGGFLSEDDFRDYASLCFERFGDRVSLWCTMNEPWVYSVAGYDTGRKAPGRCSKYVNGASVAGMSGYEAYIVSHNMLLAHAEAVEVFRKCDHIKNGQIGIAHNPLWYEPYDPSDPDDVEGCNRAMDFMLGWHQHPTACGDYPETMKKSVGDRLPSFTPEQSKKLIGSCDYVGINYYSSLFVKSIKHVDPTQPTWRTDQGVDWMKTNIDGKQIAKQGGSEWSFTYPTGLRNILKYVKKTYGNPPILITENGYGEVAEQSQSLYMYNPSIDTERLEYIEGHIHAIHQAIHEDGVRVEGYYVWSLLDNFEWNSGYGVRYGLYYIDYKDGLRRYPKMSALWLKEFLRFDQEDDSSTSKKEEKKESYGKQLLHSVQDSQFVHSIKDSGALPAVLGSLFVVSATVGTSLFFKGANN

SEQ ID NO: 79016 - DNA, 913 bp, Arabidopsis thaliana
  misc_feature (1)..(913): Ceres Seq. ID no. 12648035
  misc_feature (1)..(913): Ortholog of  Ceres SEQ ID NO 14302764 as cited in SEQ ID NO 67753
acttcattagtctccaagaagaaaacatctctcactctctaaaatacacactctcatcaaaaaccttctcttcggttcagaagcattcaagaatccattatgagctcatctgattccgttaataacggcgttaactcacggatgtacttccgtaacccgagtttcagcaacgttatcttaaacgataactggagcgacttgccgttaagtgtcgacgattctcaagacatggctatttacaacactctccgtgatgccgttagctccggctggacaccctccgttcctcccgttacctctccggcggaggaaaataagcctccggcgacgaaggcgagtggctcacacgcgccgaggcagaaggggatgcagtacagaggagtgaggaggaggccgtgggggaaattcgcggcggagattagggatccgaagaagaacggagctagggtttggctcgggacttacgagacgccggaggacgcggcggtggcgtacgaccgagcggcgtttcagctcagaggatcgaaagctaagctgaattttccgcatttgattggttcttgtaagtatgagccggttaggattaggcctcgccgtcgctcgccggaaccgtcagtctccgatcagttaacgtcggagcagaagagggaaagccacgtggatgacggcgagtctagtttggttgtaccggagttggatttcacggtggatcagttttacttcgatggtagtttattaatggaccaatcagaatgttcttattctgataatcggatataattagttttaagattaagcaaaatttgtccaacgagttttgctgtatgaaatatctatcgatgactcaacaggttttgatcatgatcatatgtaatgtgatggaaattaaatattgacgtttgtttttttcttc

SEQ ID NO: 79017 - protein, 226 aa, Arabidopsis thaliana; identical to SEQ ID NO: 27387
  peptide (1)..(226): Ceres Seq. ID no. 12648036

SEQ ID NO: 79018 - protein, 212 aa, Arabidopsis thaliana; identical to SEQ ID NO: 27388
  peptide (1)..(212): Ceres Seq. ID no. 12648037

SEQ ID NO: 79019 - protein, 183 aa, Arabidopsis thaliana; identical to SEQ ID NO: 27389
  peptide (1)..(183): Ceres Seq. ID no. 12648038

SEQ ID NO: 79020 - DNA, 1117 bp, Arabidopsis thaliana
  misc_feature (1)..(1117): Ceres Seq. ID no. 12648042
  misc_feature (1)..(1117): Ortholog of  Ceres SEQ ID NO 13594244 as cited in SEQ ID NO 57362
aggatcttcgagctgataattctattttctcaattcatcttctaagacttgtggtttctccttccttggagttcacagagaattgggatttatcctcccttgtccggtttctatgtggccttccacatcacctagattcaccatcaccacaccttatccacacccacgcgccgcctcttctttcttacaggtgaaagctttccaacgcggcgactttgaccgtttggctgataacgttaagtcaggtaaagcatggagagacgcgtggagaagcgctaacgatggattcgagcaattcgtttttgaggctaagaaaaccgctgagcgaattgatcgccaatacgctgtttctcgccgctttagctccgctgctagctcagccgctgaccgtgctcgtgagattgatcgtgagtttgggattactcctcgtgttaggactgtctctgccgatttcagtagaaatttccctaagtacaggaagcaattcagtgcattcttgaatacaccgcttggtggaagttttgctactattttcttcctttggtttgctctctctggatggctgttccgagttataataatcgccacttgggttcttccaattgctggccctcttctcattggtgcagtcgccaacaactttgtcatcaagggagaatgcccagcatgtaagaggcagtttatagggtacaagaaccaaatcatcagatgtgagggatgtgggaacatagtgtggcaaccacaaggcgatttcttctcaaaagatggcaacaacaacaacaacaataataatagcaagggaaactctaaaaagccacctaagtcccaaatcattgatgtcgattttgaggagaaatgattattagagacgagaatgaagcagaaggctctattggtgcactaatattcaagtgaagataaaaatatgtgtttatagctgaatcgtttactgtttttgtctgttttgagctgtagcaatcgtgttgcttgttgtgtacatgataaggtttctttgtagacgaacaaatctagtttccacaagcctagagacttgattgaaactctgaaagttcttacatgttagacaaatcatattatgaaaacaatttacatctcc

SEQ ID NO: 79021 - protein, 248 aa, Arabidopsis thaliana; identical to SEQ ID NO: 22558
  peptide (1)..(248): Ceres Seq. ID no. 12648043

SEQ ID NO: 79022 - DNA, 1197 bp, Arabidopsis thaliana
  misc_feature (1)..(1197): Ceres Seq. ID no. 12648090
  misc_feature (1)..(1197): Ortholog of  Ceres SEQ ID NO 14308107 as cited in SEQ ID NO 59030
atggccagtgaatcagatgcatcgagcattgctactctttcctgtgctcgctgcgagaagcctgcacatcttcagtgtccgaaatgcatagacttaaagcttcctcgtgaacaagcctctttctgcactcaagaatgtttcaaggcagcttggagctcgcacaaatcagtacatgtgaaagctcagctgtcttcaatcggtgatcagaactctgatcttatttctcaaggctggctctattgcgtcaagaaaggccaggctagaacacctaagcttccacactttgattggactgggcctctaaagcaatatcccatatctaccaagcgtgttgtgcctgctgagattgagaaacctgactgggcaattgatgggactcccaaagttgaaccgaatagtgatctacaacatgttgttgagataaaaacgcctgaacaaatccagagaatgcgtgaaacctgtaaaattgccagagaggtcctggatgcagccgctagggtgattcaccccggtgtgactactgatgagattgatcgagtagttcatgaagcaactattgcagcaggaggatatccatcgcccctcaactactatttctttccgaaatcttgctgcacatctgttaatgaagtaatttgtcatggaattccggatgctaggaaactagaagatggtgatatagtaaatgtggatgtaacagtctgttataaaggttgccatggtgaccttaatgagacatactttgttggaaacgttgacgaagcatcacgtcaactggttaagtgcacatacgagtgcctggagaaagctatagcaattgttaaacctggagtaagatttcgtgaaattggagagatagtcaaccgccatgctacaatgtctgggttatcagtggtgagatcttattgtggtcatggtattggagatctcttccattgtgctccaaacattcctcactatgcaagaaacaaagcagttggagtgatgaaagcaggtcagactttcacaatcgagccaatgatcaacgcaggggggtggagggatcgaacatggcctgatggatggactgcagttaccgcagatggaaaacgcagcgctcagtttgagcataccctattggtaacggagactggtgttgaggttttaacagcgaggcttccttcatcgcctgacgtatatccttggcttaccaagtga

SEQ ID NO: 79023 - protein, 398 aa, Arabidopsis thaliana; identical to SEQ ID NO: 24085
  peptide (1)..(398): Ceres Seq. ID no. 12648091

SEQ ID NO: 79024 - protein, 249 aa, Arabidopsis thaliana; identical to SEQ ID NO: 24086
  peptide (1)..(249): Ceres Seq. ID no. 12648092

SEQ ID NO: 79025 - DNA, 1450 bp, Arabidopsis thaliana
  misc_feature (1)..(1450): Ceres Seq. ID no. 12648095
  misc_feature (1)..(1450): Ortholog of  Ceres SEQ ID NO 14308107 as cited in SEQ ID NO 59030
tctctatttctctatcaaaattcacaccggcgattttgagattgttctctgattggcttaatccgagagaatcaaggaattgaatggccagtgaatcagatgcatcgagcattgctactctttcctgtgctcgctgcgagaagcctgcacatcttcagtgtccgaaatgcatagacttaaagcttcctcgtgaacaagcctctttctgcactcaagaatgtttcaaggcagcttggagctcgcacaaatcagtacatgtgaaagctcagctgtcttcaatcggtgatcagaactctgatcttatttctcaaggctggctctattgcgtcaagaaaggccaggctagaacacctaagcttccacactttgattggactgggcctctaaagcaatatcccatatctaccaagcgtgttgtgcctgctgagattgagaaacctgactgggcaattgatgggactcccaaagttgaaccgaatagtgatctacaacatgttgttgagataaaaacgcctgaacaaatccagagaatgcgtgaaacctgtaaaattgccagagaggtcctggatgcagccgctagggtgattcaccccggtgtgactactgatgagattgatcgagtagttcatgaagcaactattgcagcaggaggatatccatcgcccctcaactactatttctttccgaaatcttgctgcacatctgttaatgaagtaatttgtcatggaattccggatgctaggaaactagaagatggtgatatagtaaatgtggatgtaacagtctgttataaaggttgccatggtgaccttaatgagacatactttgttggaaacgttgacgaagcatcacgtcaactggttaagtgcacatacgagtgcctggagaaagctatagcaattgttaaacctggagtaagatttcgtgaaattggagagatagtcaaccgccatgctacaatgtctgggttatcagtggtgagatcttattgtggtcatggtattggagatctcttccattgtgctccaaacattcctcactatgcaagaaacaaagcagttggagtgatgaaagcaggtcagactttcacaatcgagccaatgatcaacgcaggggggtggagggatcgaacatggcctgatggatggactgcagttaccgcagatggaaaacgcagcgctcagtttgagcataccctattggtaacggagactggtgttgaggttttaacagcgaggcttccttcatcgcctgacgtatatccttggcttaccaagtgattaagtgtttggttcctttttggttgtgattcgtaaacttgggaataatagtgtcatctttttgccattatagaccatttgatgttgttaccttgttgtctttgtttatgtaattttattattactatctgaaactgaatcttaaagacagagtcatactgtttcaaacc

SEQ ID NO: 79026 - protein, 398 aa, Arabidopsis thaliana; identical to SEQ ID NO: 24085
  peptide (1)..(398): Ceres Seq. ID no. 12648096

SEQ ID NO: 79027 - protein, 249 aa, Arabidopsis thaliana; identical to SEQ ID NO: 24086
  peptide (1)..(249): Ceres Seq. ID no. 12648097

SEQ ID NO: 79028 - DNA, 1524 bp, Arabidopsis thaliana
  misc_feature (1)..(1524): Ceres Seq. ID no. 12648141
  misc_feature (1)..(1524): Ortholog of  Ceres SEQ ID NO 13502874 as cited in SEQ ID NO 66298
  misc_feature (1)..(1524): Ortholog of  Ceres SEQ ID NO 12614124 as cited in SEQ ID NO 68392
atgtctctgcctctctattttctcttaacattattctttttcttctttgctaccgcaaaaacgcggagaagctctagcaccggcacgcttccaccgggtcctccgatactgccattggtcggaaacatattccaactcggattcaatcctcaccgttcacttgctgccttttcgaaaacgtacggacctataatgagtttgaagcttggaaggttaaccgcagtggttatatcttcaccagaagcagctaaagaggcacttagaacacacgaccatgtcatgtccgctcgaacctttaacgacgctcttcgagcctttgatcaccataaacattctattgtctggattcccccctctgctcgttggaggtttctgaagaaaacaataacaaaatatttgttatcaccgcaaaacttagatgctattcaatctttaagaatgagaaaggtggaggaactagtgagtttagtaaatgaatttcgcgagagaggagaagctattgacctggctcgtgcttccttcgtcacatctttcaatatcatctcaaatgctctgttttcagtagatttagcgacgtatgactctaactcctcgtcttacgaatttcacaacacagtggttcacctgacggatatcgccggtatacccaacgtaggagactatttccagtatatgaggtttcttgatttgcaaggtacccggaaaaaagcggtgctctgcatagagaaattgtttagggtttttcaagaattcattgatgctcgattagccaaaagattttctcggacagagaaagagcctaaagaggcttcaagcatcgatatgctagactcccttctggatctcacacagcaaaacgaagcagaattaacaatgaatgatctcaaacacttgcttctcgatgtgtttgttgcgggcacagacacaaactctagtacaatggaatgggcaatgacggagttattccgtagcacggagaagatggtcaaagcacagagtgagatacggcaagtgattggtcaaaacggtttcgttcaagaatctgatatcccgagtctgccttacttacaagcaattgtgaaagagactcttcgtttgcatcctgcagctcctttgatccctagaaaatcagaatccgatgttcagattatgggtttccttgttcctaaaaacacccaggttgttgtgaacgtatgggcgataggacgagacgcgagcgtgtgggaaaatccaatgaagttcgagccagagaggttcttgttacgagaaaccgatgtaaaaggcagagatttcgagttgataccgtttggatcaggaagaaggatgtgtccgggaatctcgatggctcttaagacaatgcatatggtgcttgcctctcttctctattcctttgactggaagcttcaaaacggtgtcgtccccggaaacattgacatgagcgagactttcggtcttaccttacacaaggccaaatctctttgtgccgtacccgtcaagaaacctacaatatcgtcttcttattaa

SEQ ID NO: 79029 - protein, 507 aa, Arabidopsis thaliana
  peptide (1)..(507): Ceres Seq. ID no. 12648142
MSLPLYFLLTLFFFFFATAKTRRSSSTGTLPPGPPILPLVGNIFQLGFNPHRSLAAFSKTYGPIMSLKLGRLTAVVISSPEAAKEALRTHDHVMSARTFNDALRAFDHHKHSIVWIPPSARWRFLKKTITKYLLSPQNLDAIQSLRMRKVEELVSLVNEFRERGEAIDLARASFVTSFNIISNALFSVDLATYDSNSSSYEFHNTVVHLTDIAGIPNVGDYFQYMRFLDLQGTRKKAVLCIEKLFRVFQEFIDARLAKRFSRTEKEPKEASSIDMLDSLLDLTQQNEAELTMNDLKHLLLDVFVAGTDTNSSTMEWAMTELFRSTEKMVKAQSEIRQVIGQNGFVQESDIPSLPYLQAIVKETLRLHPAAPLIPRKSESDVQIMGFLVPKNTQVVVNVWAIGRDASVWENPMKFEPERFLLRETDVKGRDFELIPFGSGRRMCPGISMALKTMHMVLASLLYSFDWKLQNGVVPGNIDMSETFGLTLHKAKSLCAVPVKKPTISSSY

SEQ ID NO: 79030 - protein, 443 aa, Arabidopsis thaliana
  peptide (1)..(443): Ceres Seq. ID no. 12648143
MSLKLGRLTAVVISSPEAAKEALRTHDHVMSARTFNDALRAFDHHKHSIVWIPPSARWRFLKKTITKYLLSPQNLDAIQSLRMRKVEELVSLVNEFRERGEAIDLARASFVTSFNIISNALFSVDLATYDSNSSSYEFHNTVVHLTDIAGIPNVGDYFQYMRFLDLQGTRKKAVLCIEKLFRVFQEFIDARLAKRFSRTEKEPKEASSIDMLDSLLDLTQQNEAELTMNDLKHLLLDVFVAGTDTNSSTMEWAMTELFRSTEKMVKAQSEIRQVIGQNGFVQESDIPSLPYLQAIVKETLRLHPAAPLIPRKSESDVQIMGFLVPKNTQVVVNVWAIGRDASVWENPMKFEPERFLLRETDVKGRDFELIPFGSGRRMCPGISMALKTMHMVLASLLYSFDWKLQNGVVPGNIDMSETFGLTLHKAKSLCAVPVKKPTISSSY

SEQ ID NO: 79031 - protein, 414 aa, Arabidopsis thaliana
  peptide (1)..(414): Ceres Seq. ID no. 12648144
MSARTFNDALRAFDHHKHSIVWIPPSARWRFLKKTITKYLLSPQNLDAIQSLRMRKVEELVSLVNEFRERGEAIDLARASFVTSFNIISNALFSVDLATYDSNSSSYEFHNTVVHLTDIAGIPNVGDYFQYMRFLDLQGTRKKAVLCIEKLFRVFQEFIDARLAKRFSRTEKEPKEASSIDMLDSLLDLTQQNEAELTMNDLKHLLLDVFVAGTDTNSSTMEWAMTELFRSTEKMVKAQSEIRQVIGQNGFVQESDIPSLPYLQAIVKETLRLHPAAPLIPRKSESDVQIMGFLVPKNTQVVVNVWAIGRDASVWENPMKFEPERFLLRETDVKGRDFELIPFGSGRRMCPGISMALKTMHMVLASLLYSFDWKLQNGVVPGNIDMSETFGLTLHKAKSLCAVPVKKPTISSSY

SEQ ID NO: 79032 - DNA, 969 bp, Arabidopsis thaliana
  misc_feature (1)..(969): Ceres Seq. ID no. 12648145
  misc_feature (1)..(969): Ortholog of  Ceres SEQ ID NO 14310358 as cited in SEQ ID NO 54582
  misc_feature (1)..(969): Ortholog of  Ceres SEQ ID NO 15176085 as cited in SEQ ID NO 69305
atggctgtgttaggcgacggattcgtcgcctccaccaagttcgagatcctcaaagccttcgagtctccgcttcctcttcctgaattcttggcctatcactctgactccatctccgccattatagcccctgtagctgctccggtcacagccgatctgattcgcatcctccctaatcttcgcttggttgttactaccagcgccggcgttgaccatgttgacttagttgagtgtcgtcgtcgaggcatctccgtcgccaacgctggctcaagcttctcggaagatgtcgcagatactgccgtcggtttactcatcgacgtcttccgccgcatctccgccgccaatcggttcgttaagcaacggttttggccactcaaaggcgattatcctctcggttccaaggtttgcaacataacttgtgaaaaaatcaaattagcaacaaaaatgattttggggagaaagcgaatcggaatcgtgggactaggaagcattggctcgaaagtagcgacaaggctcgacgcctttggttgccaaatttcatatagctcaagaaacagaaaaccatatgatgttccatatcactattacatggatatagaggagatggcagctaatagtgatgcactcataatctgttgtgaattgaatgagaagacattgcgtttgattaataaagatgttctttctgctctgggaaagcgaggagtgatcgttaacgtggctcgtggggctataatcgatgaggaagaaatggtgagatgtttgagagaaggtgagattggtggtgctggtttggatgtttttgaagatgagcctaatgttccgaaggagctttttgaattggataatgttgttttctctccacatagtgcttttatgacattggaaggtcttgaagaacttgggaaagttgtagtagggaatattgaagctttcttctccaataaacctcttttaactcctgttctttga

SEQ ID NO: 79033 - protein, 322 aa, Arabidopsis thaliana
  peptide (1)..(322): Ceres Seq. ID no. 12648146
MAVLGDGFVASTKFEILKAFESPLPLPEFLAYHSDSISAIIAPVAAPVTADLIRILPNLRLVVTTSAGVDHVDLVECRRRGISVANAGSSFSEDVADTAVGLLIDVFRRISAANRFVKQRFWPLKGDYPLGSKVCNITCEKIKLATKMILGRKRIGIVGLGSIGSKVATRLDAFGCQISYSSRNRKPYDVPYHYYMDIEEMAANSDALIICCELNEKTLRLINKDVLSALGKRGVIVNVARGAIIDEEEMVRCLREGEIGGAGLDVFEDEPNVPKELFELDNVVFSPHSAFMTLEGLEELGKVVVGNIEAFFSNKPLLTPVL

SEQ ID NO: 79034 - protein, 175 aa, Arabidopsis thaliana
  peptide (1)..(175): Ceres Seq. ID no. 12648147
MILGRKRIGIVGLGSIGSKVATRLDAFGCQISYSSRNRKPYDVPYHYYMDIEEMAANSDALIICCELNEKTLRLINKDVLSALGKRGVIVNVARGAIIDEEEMVRCLREGEIGGAGLDVFEDEPNVPKELFELDNVVFSPHSAFMTLEGLEELGKVVVGNIEAFFSNKPLLTPVL

SEQ ID NO: 79035 - DNA, 990 bp, Arabidopsis thaliana
  misc_feature (1)..(990): Ceres Seq. ID no. 12648163
  misc_feature (1)..(990): Ortholog of  Ceres SEQ ID NO 14308168 as cited in SEQ ID NO 59069
atggaatctgatgttcgtggaaagtctactttcagtgggggtgagaagaggaatgtgatacttccttcgatgattaagaacaaagataagagatcaaaagtgtatgcgaagcagaagcatgagaagaaattggagaagcagaagaagattagagctcgtgatgctgctgagaaacgagctttagagcttggagaagagcctccacaaaagatgattccgaagacgattgagaatacaagagaatctgatgaaactgtttgcagacctgacgatgaagaattgtttgcggatattgatgctgatgagtttaatccagttctgagacgtgagattgcacctaaggtcttgctcacaacatgtcgtttcaattccactagaggacctgctttaatatctgagttgctttcggtgataccaaactctcattatcaaaagagaggaacctatgatttgaagaagattgtagaatacgcaacgaagaaagattttacatctcttattgttgttcatacaaatcgtagagaacctgatgcgcttcttatcatcggtttgccaaatggtcctactgctcatttcaaattgtcaaatcttgttctaaggaaggatattaagaatcacggaaatcctacaagccatcaaccagaactggttttgaataactttacaacgcgtttagggaatcgtgttgggagattttttcaatcactcttccctccggatcctaatttccgtggtaggagagttgtaacattccacaaccagcgtgactttatatttttcagacatcaccgttacatatttgagacaaaggaaagcaagagtgataaaggaaaagaagagacaataaaacctcgtcttcaggaatgcggtcctcgattcacgcttaagctagttactctacagcatggaacttttgacaccaaaggtggagaatttgaatgggttcataagcctgaaatggacacgagcaggagaaggttcttcttataa

SEQ ID NO: 79036 - protein, 329 aa, Arabidopsis thaliana; identical to SEQ ID NO: 35834
  peptide (1)..(329): Ceres Seq. ID no. 12648164

SEQ ID NO: 79037 - protein, 306 aa, Arabidopsis thaliana
  peptide (1)..(306): Ceres Seq. ID no. 12648165
MIKNKDKRSKVYAKQKHEKKLEKQKKIRARDAAEKRALELGEEPPQKMIPKTIENTRESDETVCRPDDEELFADIDADEFNPVLRREIAPKVLLTTCRFNSTRGPALISELLSVIPNSHYQKRGTYDLKKIVEYATKKDFTSLIVVHTNRREPDALLIIGLPNGPTAHFKLSNLVLRKDIKNHGNPTSHQPELVLNNFTTRLGNRVGRFFQSLFPPDPNFRGRRVVTFHNQRDFIFFRHHRYIFETKESKSDKGKEETIKPRLQECGPRFTLKLVTLQHGTFDTKGGEFEWVHKPEMDTSRRRFFL

SEQ ID NO: 79038 - protein, 259 aa, Arabidopsis thaliana
  peptide (1)..(259): Ceres Seq. ID no. 12648166
MIPKTIENTRESDETVCRPDDEELFADIDADEFNPVLRREIAPKVLLTTCRFNSTRGPALISELLSVIPNSHYQKRGTYDLKKIVEYATKKDFTSLIVVHTNRREPDALLIIGLPNGPTAHFKLSNLVLRKDIKNHGNPTSHQPELVLNNFTTRLGNRVGRFFQSLFPPDPNFRGRRVVTFHNQRDFIFFRHHRYIFETKESKSDKGKEETIKPRLQECGPRFTLKLVTLQHGTFDTKGGEFEWVHKPEMDTSRRRFFL

SEQ ID NO: 79039 - DNA, 702 bp, Arabidopsis thaliana
  misc_feature (1)..(702): Ceres Seq. ID no. 12648170
  misc_feature (1)..(702): Ortholog of  Ceres SEQ ID NO 14316091 as cited in SEQ ID NO 57622
  misc_feature (1)..(702): Ortholog of  Ceres SEQ ID NO 13639317 as cited in SEQ ID NO 59781
  misc_feature (1)..(702): Ortholog of  Ceres SEQ ID NO 13654578 as cited in SEQ ID NO 68583
atgcgtccacaatacaaagacgtgaacgataaattagactcgacggccaagcacaaaaccaacagccatggcggtcgttatgataatccttacgtccacattactagtcccacatcagcttctgataagaggtcgaaggataaggttcttgaggtgttgaatcgctgtgggaagaaagtagaggacgctactcgcaaagcggaagcattagtcggaggtttaaaagaccacctgaagtttagtcctagcataagtgatgcagcaatggctaggctttctcaaggcactaagatgatcgttgaaggaggaccagagagagtgtttcaacgagagtttggtgttttagctgtagagaaacttttagattcgtttgtttgctacatatcgactacttcgggaccagtgaccggagtgatatacatttccaacagaagaatcgctttttgtagcgactatgccattcgtcttccttcttctgccggtggaaacggtgttgcggcatattacaaggtggtgatggagtgggagaagataagtagcattagttcatcaacgaacgtgttgaagccaagtgagagatacgtgcatatggtgacacgagatgggtttgagttttggttcatgggctttgtctcctacatcgatgctttcaattgtctcaacaaagctctcctcaattcccgttgtaatcatgccatgtaa

SEQ ID NO: 79040 - protein, 233 aa, Arabidopsis thaliana
  peptide (1)..(233): Ceres Seq. ID no. 12648171
MRPQYKDVNDKLDSTAKHKTNSHGGRYDNPYVHITSPTSASDKRSKDKVLEVLNRCGKKVEDATRKAEALVGGLKDHLKFSPSISDAAMARLSQGTKMIVEGGPERVFQREFGVLAVEKLLDSFVCYISTTSGPVTGVIYISNRRIAFCSDYAIRLPSSAGGNGVAAYYKVVMEWEKISSISSSTNVLKPSERYVHMVTRDGFEFWFMGFVSYIDAFNCLNKALLNSRCNHAM

SEQ ID NO: 79041 - protein, 145 aa, Arabidopsis thaliana
  peptide (1)..(145): Ceres Seq. ID no. 12648172
MARLSQGTKMIVEGGPERVFQREFGVLAVEKLLDSFVCYISTTSGPVTGVIYISNRRIAFCSDYAIRLPSSAGGNGVAAYYKVVMEWEKISSISSSTNVLKPSERYVHMVTRDGFEFWFMGFVSYIDAFNCLNKALLNSRCNHAM

SEQ ID NO: 79042 - protein, 136 aa, Arabidopsis thaliana
  peptide (1)..(136): Ceres Seq. ID no. 12648173
MIVEGGPERVFQREFGVLAVEKLLDSFVCYISTTSGPVTGVIYISNRRIAFCSDYAIRLPSSAGGNGVAAYYKVVMEWEKISSISSSTNVLKPSERYVHMVTRDGFEFWFMGFVSYIDAFNCLNKALLNSRCNHAM

SEQ ID NO: 79043 - DNA, 772 bp, Arabidopsis thaliana
  misc_feature (1)..(772): Ceres Seq. ID no. 12648177
  misc_feature (1)..(772): Ortholog of  Ceres SEQ ID NO 13639102 as cited in SEQ ID NO 56610
atctatactagagtttattactatggcttttgatgaagatatgaaaatggcgtctttcttaagagaagaagaagaacaacactattctttatcaagactctccgtttgttccaactacgacggcgatgaagccgacggtgagtcttctgcttccgacgagaaacgtgttgtccacggcggaggagagaaatccatggaggagctaaatttttcagattctgataaagaatcaaccggttgtcaatctctcccggcgacacctccgagacggagacggcggagaggcggtggaggaggaggatatttagcggtgagttctccggtttccggcgataaagcttacgctagcgagaacgaagtacaaaagacgaataacaatcagaggagaaggaggagattgaaaccggagtgtccaccgtgggttgatagtatgcggaggagctacgtcggagatgaacagagtagtcacggtggttacggaggaggagtggtggttgttacgaggcctataggaggaggaaggccattgtgtatggatttagaagaagtcaaagcttgtaaagatttggggtttgagcttgaaccgggtcgggtttcgtattccgggtcaacggtggatactagtagtggcggcaattctcctatctcttctaaccaccgtatttcgagtcccggggatgatccaaaagacgtgaaagcgaggcttaaggcgtgggctcaagctgtggcttttgtgtccactactcatcatcaacctcctaattctttatga

SEQ ID NO: 79044 - protein, 256 aa, Arabidopsis thaliana
  peptide (1)..(256): Ceres Seq. ID no. 12648178
SILEFITMAFDEDMKMASFLREEEEQHYSLSRLSVCSNYDGDEADGESSASDEKRVVHGGGEKSMEELNFSDSDKESTGCQSLPATPPRRRRRRGGGGGGYLAVSSPVSGDKAYASENEVQKTNNNQRRRRRLKPECPPWVDSMRRSYVGDEQSSHGGYGGGVVVVTRPIGGGRPLCMDLEEVKACKDLGFELEPGRVSYSGSTVDTSSGGNSPISSNHRISSPGDDPKDVKARLKAWAQAVAFVSTTHHQPPNSL

SEQ ID NO: 79045 - protein, 249 aa, Arabidopsis thaliana; identical to SEQ ID NO: 29745
  peptide (1)..(249): Ceres Seq. ID no. 12648179

SEQ ID NO: 79046 - protein, 243 aa, Arabidopsis thaliana; identical to SEQ ID NO: 29746
  peptide (1)..(243): Ceres Seq. ID no. 12648180

SEQ ID NO: 79047 - DNA, 3729 bp, Arabidopsis thaliana
  misc_feature (1)..(3729): Ceres Seq. ID no. 12648194
  misc_feature (1)..(3729): Ortholog of  Ceres SEQ ID NO 15179695 as cited in SEQ ID NO 193
atggtcgttcattcaaacattccaacacataaggagatgaagaaggggaacttggaagcgaacacaaagacagtaccgttctacaaattgtttttcttctcagattctaccgatgtgttgttgatgatcgttggttcgatcggagctatcgcaaacggtgtttgttctccgttaatgacattattgtttggtgaactcattgatgcaatgggtccaaaccagaacaatgaagagattgttgagagagtttccaaggtttgtttgagtttagtctaccttggacttggagccctaggagctgcctttcttcaggtggcttgttggatgattactggggagagacaagctgcaaggataaggagtttgtatctgaaaacgattctaagacaagacattggattcttcgatgtcgaaatgaccacaggagaagttgttggtcgaatgtctggtgatacggttcttatacttgatgctatgggtgagaaggttgggaagtttatacagttgatttcaacatttgtgggtggatttgttatagcgtttttgagaggatggttacttacacttgttatgttgacctcaattcctcttctagctatgtctggtgcagctatagcgattatagttacaagagcttcttctcaagaacaagctgcttatgcaaaagcatcaaatgttgttgaacaaactttggggtccattcgaaccgttgcttctttcacgggagagaagcaagcgatgagtagctacaaagagttgataaatttggcctataaatcgaatgttaagcaaggtttcgttacgggtttaggtcttggagtaatgttcttggtgttcttttccacctatgctttgggtacatggtttggtggtgaaatgatactgagaaaagggtatacaggtggtgcagtgatcaatgttatggtcactgtggtctcgagttcgatagctttagggcaagcatcaccttgtctaactgcatttacggctggtaaagctgcagcttataagatgtttgaaacaatcgaaagagagcctttgattgatacttttgacctaaatgggaaggttttagaagatattcgaggcgaaatcgagctgagagatgtgtgttttagttaccctgcaaggcctaaagaagaggtttttggcggattctctctgttgattccgagtggcacaaccactgctttggtaggagaaagcgggagtgggaagtctactgtgatcagtttgatcgaaaggttttatgatccgaattccggacaagtgcttattgatggtgttgatttaaaggagtttcagttgaaatggattaggggaaagattggattggttagtcaagaacctgttctgttttcttcaagtataatggagaatatcggatacgggaaagagggggcaacggttgaagagatacaagcagcgtcgaagctagcaaacgcggctaaattcatcgataagttgcctctaggtttagagacattggtaggggagcatggaactcaactctcaggaggacagaaacagaggattgctatcgcgagggcgatacttaaagatccgcggatcttgctgttagatgaagcgacaagcgcacttgatgcggaatccgaaagagtggttcaagaggctttagataggataatggtgaaccggactacagtgattgtcgcgcatcggttaagcacggttagaaacgctgatatcatcgctgtgattcatcgtggaaagattgtggaagaaggttcgcattcagagttacttaaagatcatgaaggggcttattcacagcttctaaggttacaagagataaacaaagaatcaaagcgattggagatttctgatggatcaatcagcagtggatcatcaagaggaaacaacagcacaaggcaagatgatgactctttttctgttctgggtttacttgcaggccaagatagtactaaaatgtctcaagaactatcacagaaagtgtcgtttactcgaatcgctgctctaaacaaaccagagattccaattcttatacttggaaccctagtaggtgctgtgaacggcactatattccccatctttggtatcctctttgccaaagtaatcgaagctttcttcaaagcgcctcatgagctgaagagagattcaagattctggtcgatgatattcgtacttcttggtgtagccgctgtgatagtgtatccaacgactaactacttgtttgctatagctggagggagacttattcggaggataagatcaatgtgttttgagaaagttgttcacatggaggttgggtggttcgatgaacctgggaactcgagcggtgcaatgggagcgaggctctctgctgatgcagccttgatccggactcttgtgggagactcgctttgtctatcggttaaaaacgttgcgtctttggtgacaggactaatcatagctttcacggcgagctgggaagtggcgattatcatcttagtaattattccgtttattggaatcaatggatatattcaaattaagttcatgaaaggcttcagtgcagacgcaaaggcaaagtacgaggaggcgagtcaggtggcgaacgatgcagtggggagtataagaacggttgcgtctttctgtgcggaggaaaaagtgatggagatgtataagaaacgatgtgaagatacgattaaatctgggattaagcaaggtttaatcagcggagtagggtttggtatctcctttttcgttctttactctgtctacgctagttgtttctacgtgggagctagactggttaaagccggaaggacaaacttcaacgatgtttttcaggttttcttggccttgacgttaacagcagttgggatttctcaggcgagctcttttgctcctgattcgagtaaaggtaagggtgctgctgtttcgattttcagaattattgataggatatcgaagatagattcgagagacgaatcgggaatggtgttggagaatgtaaaaggagatatcgagctttgccacataagcttcacttaccaaactagacctgatgttcaagtctttcgtgacctctgtttgagcattcgtgccggacagactgttgctttggttggagaaagtgggtcaggaaaatctacggtgatttcactgttacagaggttttatgatccggattcaggtcatataactctagacggagttgagctcaagaagctgcgactaaaatggctaagacaacagatggggcttgtaggacaagagcctgtactattcaacgacacgatacgagccaacattgcttatggaaaaggcggcgaggaagcaaccgaggctgagattatagctgcttccgagctagctaatgcccacaggttcatctctagtatacaaaagggttatgatacggtggtgggagagagagggatacaattgtcaggaggacagaagcagcgcgtggcgattgcacgcgccatcgtgaaagaaccgaagattctgttactcgacgaagcgacgagcgcgttggacgcagaatcggagcgggtggttcaagacgcgcttgatcgggtgatggtgaaccggaccaccatcgtggtggctcacaggctttcaacgatcaagaatgctgacgtcatcgccgtcgtcaagaacggtgtgattgcagagaaagggacgcacgagacgttgatcaatatcgaaggtggagtttatgcctcgctcgttcaactccacatcaatgcttctaattga

SEQ ID NO: 79048 - protein, 1242 aa, Arabidopsis thaliana
  peptide (1)..(1242): Ceres Seq. ID no. 12648195
MVVHSNIPTHKEMKKGNLEANTKTVPFYKLFFFSDSTDVLLMIVGSIGAIANGVCSPLMTLLFGELIDAMGPNQNNEEIVERVSKVCLSLVYLGLGALGAAFLQVACWMITGERQAARIRSLYLKTILRQDIGFFDVEMTTGEVVGRMSGDTVLILDAMGEKVGKFIQLISTFVGGFVIAFLRGWLLTLVMLTSIPLLAMSGAAIAIIVTRASSQEQAAYAKASNVVEQTLGSIRTVASFTGEKQAMSSYKELINLAYKSNVKQGFVTGLGLGVMFLVFFSTYALGTWFGGEMILRKGYTGGAVINVMVTVVSSSIALGQASPCLTAFTAGKAAAYKMFETIEREPLIDTFDLNGKVLEDIRGEIELRDVCFSYPARPKEEVFGGFSLLIPSGTTTALVGESGSGKSTVISLIERFYDPNSGQVLIDGVDLKEFQLKWIRGKIGLVSQEPVLFSSSIMENIGYGKEGATVEEIQAASKLANAAKFIDKLPLGLETLVGEHGTQLSGGQKQRIAIARAILKDPRILLLDEATSALDAESERVVQEALDRIMVNRTTVIVAHRLSTVRNADIIAVIHRGKIVEEGSHSELLKDHEGAYSQLLRLQEINKESKRLEISDGSISSGSSRGNNSTRQDDDSFSVLGLLAGQDSTKMSQELSQKVSFTRIAALNKPEIPILILGTLVGAVNGTIFPIFGILFAKVIEAFFKAPHELKRDSRFWSMIFVLLGVAAVIVYPTTNYLFAIAGGRLIRRIRSMCFEKVVHMEVGWFDEPGNSSGAMGARLSADAALIRTLVGDSLCLSVKNVASLVTGLIIAFTASWEVAIIILVIIPFIGINGYIQIKFMKGFSADAKAKYEEASQVANDAVGSIRTVASFCAEEKVMEMYKKRCEDTIKSGIKQGLISGVGFGISFFVLYSVYASCFYVGARLVKAGRTNFNDVFQVFLALTLTAVGISQASSFAPDSSKGKGAAVSIFRIIDRISKIDSRDESGMVLENVKGDIELCHISFTYQTRPDVQVFRDLCLSIRAGQTVALVGESGSGKSTVISLLQRFYDPDSGHITLDGVELKKLRLKWLRQQMGLVGQEPVLFNDTIRANIAYGKGGEEATEAEIIAASELANAHRFISSIQKGYDTVVGERGIQLSGGQKQRVAIARAIVKEPKILLLDEATSALDAESERVVQDALDRVMVNRTTIVVAHRLSTIKNADVIAVVKNGVIAEKGTHETLINIEGGVYASLVQLHINASN

SEQ ID NO: 79049 - protein, 1230 aa, Arabidopsis thaliana; identical to SEQ ID NO: 73921
  peptide (1)..(1230): Ceres Seq. ID no. 12648196

SEQ ID NO: 79050 - protein, 1201 aa, Arabidopsis thaliana; identical to SEQ ID NO: 73922
  peptide (1)..(1201): Ceres Seq. ID no. 12648197

SEQ ID NO: 79051 - DNA, 2697 bp, Arabidopsis thaliana
  misc_feature (1)..(2697): Ceres Seq. ID no. 12648253
  misc_feature (1)..(2697): Ortholog of  Ceres SEQ ID NO 15168378 as cited in SEQ ID NO 59129
atgagttcaagaactggagcctctttgctcctgatcttgtttttcttccaaatttgttctgtttcggcactcacgaatggtttagacgcttctgctttaaatgctctgaagagtgaatggaccactcctcctgatggttgggaaggctctgatccttgtggaaccaattgggttggaattacatgtcaaaatgaccgtaaccttgacttggaaggaaagcttcctgccgatatatcgttcttgtccgagttgcggatcttggatttgtcatacaatcctaaattgtccggaccgcttccaccaaacatcggtaaccttgggaagttaaggaacttgatccttgtgggatgtagtttcagtggtcaaatccctgagtccattggaactctaaaagaacttatatatctctccctaaatttaaataaatttagtggaacaattccgccttcaattggcctgttatcaaaactatattggtttgatatagctgacaatcagattgaaggagagcttccagtttctaatgggacttctgcacctggacttgacatgcttcttcaaactaagcattttcattttggaaaaaacaagctttcaggcaatatcccaaaagaacttttcagctcaaacatgagtttaatacatgtcctcttcgatggaaaccaattcacgggcgaaattccagagaccctcagtctcgttaaaacgttgacggtgttacgccttgataggaacaaactcattggagatattccttcatatcttaacaatctcacaaatcttaacgaactgtacttggccaacaacagatttactggtactcttccaaatttaaccagcttgaccagtctctacacattggatgtgagcaataacactttggatttctcacccattccatcatggatctcttcattaccctccctatcaacattaaggatggaagggatccaacttaatggtccaataccaatctcatttttcagccctcctcagttgcagactgttatcttaaagcgaaatagtatagtggaaagcttagactttggtacagacgttagcagccagttggagtttgtggatttacaatacaatgaaataactgattataaaccatcagctaataaagtcctccaagtaatgtatgtatccttattggcaaataatccagtgtgtctagaggcgggaaacgggccgagttactgttcagcaatccaacacaatacctcattttctacactcccaacaaactgttctccatgcgaaccgggcatggaagcgagtcccacgtgccgctgtgcgtatccattcatgggaacactctacttccggtctccttctttctcagggttgttcaactccaccaacttctcaattctacagaaggcaatcgcggatttctttaagaagttcaattatcctgtagactccgttggtgttcggaacataagagagaatccaactgatcatcagcttctaatagatctattggtctttccattgggaagagagagttttaatcagacaggaatgtcacttgttggttttgcatttagcaaccagacttataagcctcctccgatatttggcccttatattttcaaagctgatttgtacaaacagttctctgctaaatgggatacaagtaagagtagtattgatgctccgcagctaatgggagcaaaagcgtttacttttgaggagctgaagaaatgcactgacaacttttcagaggcaaatgatgttggcggtggaggttacggcaaggtttatagagggattcttcctaatgggcaactcatagcaatcaaaagggctcaacaaggatctttgcaaggagggttggagttcaaaactgagattgagcttctctcaagggtccatcataagaatgttgtcagactcttgggcttctgctttgaccggaatgaacaaatgctcgtatacgagtacatttcaaatgggtcacttaaagacagtctgtccgggaagagtgggattcgattggattggacaagaagacttaaaatagcacttggttcaggcaagggcttggcttatcttcatgaacttgctgatcctccaattatacatagagacatcaaatcaaataacatattacttgatgaaaatctaaccgcaaaggttgccgacttcggtctctccaaacttgtgggagaccctgagaaaactcatgtcacaacacaagtcaaaggaaccatgggctacttggatccagagtactacatgacgaatcaattaacggagaagagcgatgtgtatgggtttggtgtggttttactcgagctattaaccggtagaagtccgatagagagaggcaaatatgtggtgagagaggtgaagacaaagatgaataaatctcggagtttgtatgacctgcaggagttgttggacacaacgatcatagcaagcagtgggaatctaaaagggttcgagaagtatgtagacttggctttgagatgtgtggaggaggaaggagttaataggccatcaatgggtgaggttgtgaaagagattgagaacataatgcagcttgcgggattaaatcctaactcagattcagcaacgagttcaagaacgtatgaggacgcaatcaaaggatctggtgatccttatggcagtgaatcgtttcagtacagtgggaattttccagcttcaaagcttgagccccaatga

SEQ ID NO: 79052 - protein, 898 aa, Arabidopsis thaliana
  peptide (1)..(898): Ceres Seq. ID no. 12648254
MSSRTGASLLLILFFFQICSVSALTNGLDASALNALKSEWTTPPDGWEGSDPCGTNWVGITCQNDRNLDLEGKLPADISFLSELRILDLSYNPKLSGPLPPNIGNLGKLRNLILVGCSFSGQIPESIGTLKELIYLSLNLNKFSGTIPPSIGLLSKLYWFDIADNQIEGELPVSNGTSAPGLDMLLQTKHFHFGKNKLSGNIPKELFSSNMSLIHVLFDGNQFTGEIPETLSLVKTLTVLRLDRNKLIGDIPSYLNNLTNLNELYLANNRFTGTLPNLTSLTSLYTLDVSNNTLDFSPIPSWISSLPSLSTLRMEGIQLNGPIPISFFSPPQLQTVILKRNSIVESLDFGTDVSSQLEFVDLQYNEITDYKPSANKVLQVMYVSLLANNPVCLEAGNGPSYCSAIQHNTSFSTLPTNCSPCEPGMEASPTCRCAYPFMGTLYFRSPSFSGLFNSTNFSILQKAIADFFKKFNYPVDSVGVRNIRENPTDHQLLIDLLVFPLGRESFNQTGMSLVGFAFSNQTYKPPPIFGPYIFKADLYKQFSAKWDTSKSSIDAPQLMGAKAFTFEELKKCTDNFSEANDVGGGGYGKVYRGILPNGQLIAIKRAQQGSLQGGLEFKTEIELLSRVHHKNVVRLLGFCFDRNEQMLVYEYISNGSLKDSLSGKSGIRLDWTRRLKIALGSGKGLAYLHELADPPIIHRDIKSNNILLDENLTAKVADFGLSKLVGDPEKTHVTTQVKGTMGYLDPEYYMTNQLTEKSDVYGFGVVLLELLTGRSPIERGKYVVREVKTKMNKSRSLYDLQELLDTTIIASSGNLKGFEKYVDLALRCVEEEGVNRPSMGEVVKEIENIMQLAGLNPNSDSATSSRTYEDAIKGSGDPYGSESFQYSGNFPASKLEPQ

SEQ ID NO: 79053 - protein, 715 aa, Arabidopsis thaliana
  peptide (1)..(715): Ceres Seq. ID no. 12648255
MLLQTKHFHFGKNKLSGNIPKELFSSNMSLIHVLFDGNQFTGEIPETLSLVKTLTVLRLDRNKLIGDIPSYLNNLTNLNELYLANNRFTGTLPNLTSLTSLYTLDVSNNTLDFSPIPSWISSLPSLSTLRMEGIQLNGPIPISFFSPPQLQTVILKRNSIVESLDFGTDVSSQLEFVDLQYNEITDYKPSANKVLQVMYVSLLANNPVCLEAGNGPSYCSAIQHNTSFSTLPTNCSPCEPGMEASPTCRCAYPFMGTLYFRSPSFSGLFNSTNFSILQKAIADFFKKFNYPVDSVGVRNIRENPTDHQLLIDLLVFPLGRESFNQTGMSLVGFAFSNQTYKPPPIFGPYIFKADLYKQFSAKWDTSKSSIDAPQLMGAKAFTFEELKKCTDNFSEANDVGGGGYGKVYRGILPNGQLIAIKRAQQGSLQGGLEFKTEIELLSRVHHKNVVRLLGFCFDRNEQMLVYEYISNGSLKDSLSGKSGIRLDWTRRLKIALGSGKGLAYLHELADPPIIHRDIKSNNILLDENLTAKVADFGLSKLVGDPEKTHVTTQVKGTMGYLDPEYYMTNQLTEKSDVYGFGVVLLELLTGRSPIERGKYVVREVKTKMNKSRSLYDLQELLDTTIIASSGNLKGFEKYVDLALRCVEEEGVNRPSMGEVVKEIENIMQLAGLNPNSDSATSSRTYEDAIKGSGDPYGSESFQYSGNFPASKLEPQ

SEQ ID NO: 79054 - protein, 688 aa, Arabidopsis thaliana
  peptide (1)..(688): Ceres Seq. ID no. 12648256
MSLIHVLFDGNQFTGEIPETLSLVKTLTVLRLDRNKLIGDIPSYLNNLTNLNELYLANNRFTGTLPNLTSLTSLYTLDVSNNTLDFSPIPSWISSLPSLSTLRMEGIQLNGPIPISFFSPPQLQTVILKRNSIVESLDFGTDVSSQLEFVDLQYNEITDYKPSANKVLQVMYVSLLANNPVCLEAGNGPSYCSAIQHNTSFSTLPTNCSPCEPGMEASPTCRCAYPFMGTLYFRSPSFSGLFNSTNFSILQKAIADFFKKFNYPVDSVGVRNIRENPTDHQLLIDLLVFPLGRESFNQTGMSLVGFAFSNQTYKPPPIFGPYIFKADLYKQFSAKWDTSKSSIDAPQLMGAKAFTFEELKKCTDNFSEANDVGGGGYGKVYRGILPNGQLIAIKRAQQGSLQGGLEFKTEIELLSRVHHKNVVRLLGFCFDRNEQMLVYEYISNGSLKDSLSGKSGIRLDWTRRLKIALGSGKGLAYLHELADPPIIHRDIKSNNILLDENLTAKVADFGLSKLVGDPEKTHVTTQVKGTMGYLDPEYYMTNQLTEKSDVYGFGVVLLELLTGRSPIERGKYVVREVKTKMNKSRSLYDLQELLDTTIIASSGNLKGFEKYVDLALRCVEEEGVNRPSMGEVVKEIENIMQLAGLNPNSDSATSSRTYEDAIKGSGDPYGSESFQYSGNFPASKLEPQ

SEQ ID NO: 79055 - DNA, 2913 bp, Arabidopsis thaliana
  misc_feature (1)..(2913): Ceres Seq. ID no. 12648257
  misc_feature (1)..(2913): Ortholog of  Ceres SEQ ID NO 15168378 as cited in SEQ ID NO 59129
atgagttcaagaattgaagtctttgtgctcttgatcttgctttcgttccaattttgttctgtatctgcgcagacaaatggtttcgatgctgatgctttacaatacctgaagagtagtttgaccatacctcctcggaattggaaaggctatgatccttgtggaaccaattgggttggaattgcatgtgaatatggccgcgttactataaaatcactaggcaaccttaacttggaaggaaagcttcctgcctttattacgacgttgtctgaattgcataccctggatttgacatctaatcctaatttgaccggaccgcttccactaaatatcggtaaccttaaggagttgacgaacttaaatcttatgggatgtggtttcagtggtcaaatccctgagtccataggatctctagaacaacttgtaacactctccttgaattcaaataaatttaatggaacgattccggcttccattggcctgttatcgaaactatattggtttgatatagctgacaatcagatagaaggaaagcttccagtttctgatggggcttctttacctggacttgatatgcttcttcaaactaagcattttcattttggaaaaaacaagctttctggtgatatccctgaaaagctattcagtgccaacatgactttaaaacatttgctattcgatggaaacctactaaccggtgaaatcccacaaagcctcagccttgttaaaacattgacggtgttacgccttgataggaatagactaagtggagaaattcctccaagtcttaataatctcacaaatcttcaagaactgtacttgtccgacaacaaatttaccggtagtcttccaagtttaaccagcttgaccagtctctccacattagctgtcagcaataaccgattaacttcctcacaaatttcatcatggatctcattattaccgacttccttggcaacattgtatgaacatcatctctctctcgctcttgatctccatgtgtatatacttgctaagaacaaatggtcttctgcttggcagaaggatggcagggctccaacttcaagtatcctaaagcgtaactggctaaacgaaacactagacttcggtaccaacaagagccaaaacctagattttgtggatttacaatataatgacataacagagtatattaaacaaccagctaataaaggaagcagcaggatagtaatgtatgtatgcttggcaaataatccagtgtgccccgaggtagggaacccaccaaatgaatactgcatagaagtcgaacacaattcctcatattcttcccctaagaacacatgtggtcgttgtagtggtgaggacagggaacccattcccaccacgtgccgttgtgtgtatccaatcacaggaacactcacttttaggtcaccttccttctcagggtattccaacaacgatacattcgagaacctcaggctaaacctaactggtttctttgagaatagaaattatacagtggattctgtggccataagaaacataagagaagatgaagatgatcattatcttctaatagatctctctctctttccatataaacaagacagatttaatgagacgggaatggatagtgttatttccaggtttagcacacagacttataagcctcctaatacctttggcccttacatattcaaagccaataagtacaataagttccctgcaggaggttcaaactcgtcacacatcattggagctgtagttggttctactgtttttctgttaattctaatgatagctgggatctatgctcttaagcaaaagagaagagcagagaaagcaaatgatcaaattaatccttttgccaagtgggatgcgaatcagaacagtgtcgatgcaccacagcttatgggaacaaaagcatttacttttgaagagatgaggaaatgtgcaaacaacttttcagtggcaaatgatgtcggtggtggaggttatggccaagtatacaaagggattcttccttctggtcaactcatagcaattaaaagagctcaaccaggatctttgcaaggagcgttggagtttaaaactgagatcgagcttctttcaagggtccatcataaaaatgttgtcaaactcttaggcttttgctttgatcgaggagaacaaatgctcgtctacgagtatattccaaatggttctcttagagatagtctatcagggaaaagtgggattagacttgattggacgagaaggcttagaatagcacttggttcagggaagggtttggcttatcttcatgagcttgcagatcctccaattatacacagagacgttaaatcaagtaatgtattacttgatgaaagtttaactgcaaaagttgctgattttggcttatctcaacttgtggaagatgctgagaaagctaatgtaacggcacaagtgaagggaactatgggctacttggatcctgagtactacatgacgaatcaattgacagagaagagcgatgtatatgggtttggggttatgatgcttgagctactgactggtaagattcctatagagaatggaaaatatgtggtgaaagagatgaagatgaagatgaataaatcgaagaacttgtatgacctacaagattttctggacactacgatcagcgcaacgtccaacaggaatcttaagggatttgaaaagtatgtagatgtggctctaagatgcgtagatccagaaggagtgaagaggccatcaatgaatgaggttgtgaaagagattgagaacataatgcagtatgcaggattaaaccctaacgtagaatcatatgcgagttcaagaacgtatgatgaagcaagcaaagaatctggagatctttatggaaacaactcttttgagtatagtgcaagtttcccaactacaaacctcgaacctcaatga

SEQ ID NO: 79056 - protein, 970 aa, Arabidopsis thaliana
  peptide (1)..(970): Ceres Seq. ID no. 12648258
MSSRIEVFVLLILLSFQFCSVSAQTNGFDADALQYLKSSLTIPPRNWKGYDPCGTNWVGIACEYGRVTIKSLGNLNLEGKLPAFITTLSELHTLDLTSNPNLTGPLPLNIGNLKELTNLNLMGCGFSGQIPESIGSLEQLVTLSLNSNKFNGTIPASIGLLSKLYWFDIADNQIEGKLPVSDGASLPGLDMLLQTKHFHFGKNKLSGDIPEKLFSANMTLKHLLFDGNLLTGEIPQSLSLVKTLTVLRLDRNRLSGEIPPSLNNLTNLQELYLSDNKFTGSLPSLTSLTSLSTLAVSNNRLTSSQISSWISLLPTSLATLYEHHLSLALDLHVYILAKNKWSSAWQKDGRAPTSSILKRNWLNETLDFGTNKSQNLDFVDLQYNDITEYIKQPANKGSSRIVMYVCLANNPVCPEVGNPPNEYCIEVEHNSSYSSPKNTCGRCSGEDREPIPTTCRCVYPITGTLTFRSPSFSGYSNNDTFENLRLNLTGFFENRNYTVDSVAIRNIREDEDDHYLLIDLSLFPYKQDRFNETGMDSVISRFSTQTYKPPNTFGPYIFKANKYNKFPAGGSNSSHIIGAVVGSTVFLLILMIAGIYALKQKRRAEKANDQINPFAKWDANQNSVDAPQLMGTKAFTFEEMRKCANNFSVANDVGGGGYGQVYKGILPSGQLIAIKRAQPGSLQGALEFKTEIELLSRVHHKNVVKLLGFCFDRGEQMLVYEYIPNGSLRDSLSGKSGIRLDWTRRLRIALGSGKGLAYLHELADPPIIHRDVKSSNVLLDESLTAKVADFGLSQLVEDAEKANVTAQVKGTMGYLDPEYYMTNQLTEKSDVYGFGVMMLELLTGKIPIENGKYVVKEMKMKMNKSKNLYDLQDFLDTTISATSNRNLKGFEKYVDVALRCVDPEGVKRPSMNEVVKEIENIMQYAGLNPNVESYASSRTYDEASKESGDLYGNNSFEYSASFPTTNLEPQ

SEQ ID NO: 79057 - protein, 849 aa, Arabidopsis thaliana
  peptide (1)..(849): Ceres Seq. ID no. 12648259
MGCGFSGQIPESIGSLEQLVTLSLNSNKFNGTIPASIGLLSKLYWFDIADNQIEGKLPVSDGASLPGLDMLLQTKHFHFGKNKLSGDIPEKLFSANMTLKHLLFDGNLLTGEIPQSLSLVKTLTVLRLDRNRLSGEIPPSLNNLTNLQELYLSDNKFTGSLPSLTSLTSLSTLAVSNNRLTSSQISSWISLLPTSLATLYEHHLSLALDLHVYILAKNKWSSAWQKDGRAPTSSILKRNWLNETLDFGTNKSQNLDFVDLQYNDITEYIKQPANKGSSRIVMYVCLANNPVCPEVGNPPNEYCIEVEHNSSYSSPKNTCGRCSGEDREPIPTTCRCVYPITGTLTFRSPSFSGYSNNDTFENLRLNLTGFFENRNYTVDSVAIRNIREDEDDHYLLIDLSLFPYKQDRFNETGMDSVISRFSTQTYKPPNTFGPYIFKANKYNKFPAGGSNSSHIIGAVVGSTVFLLILMIAGIYALKQKRRAEKANDQINPFAKWDANQNSVDAPQLMGTKAFTFEEMRKCANNFSVANDVGGGGYGQVYKGILPSGQLIAIKRAQPGSLQGALEFKTEIELLSRVHHKNVVKLLGFCFDRGEQMLVYEYIPNGSLRDSLSGKSGIRLDWTRRLRIALGSGKGLAYLHELADPPIIHRDVKSSNVLLDESLTAKVADFGLSQLVEDAEKANVTAQVKGTMGYLDPEYYMTNQLTEKSDVYGFGVMMLELLTGKIPIENGKYVVKEMKMKMNKSKNLYDLQDFLDTTISATSNRNLKGFEKYVDVALRCVDPEGVKRPSMNEVVKEIENIMQYAGLNPNVESYASSRTYDEASKESGDLYGNNSFEYSASFPTTNLEPQ

SEQ ID NO: 79058 - protein, 780 aa, Arabidopsis thaliana
  peptide (1)..(780): Ceres Seq. ID no. 12648260
MLLQTKHFHFGKNKLSGDIPEKLFSANMTLKHLLFDGNLLTGEIPQSLSLVKTLTVLRLDRNRLSGEIPPSLNNLTNLQELYLSDNKFTGSLPSLTSLTSLSTLAVSNNRLTSSQISSWISLLPTSLATLYEHHLSLALDLHVYILAKNKWSSAWQKDGRAPTSSILKRNWLNETLDFGTNKSQNLDFVDLQYNDITEYIKQPANKGSSRIVMYVCLANNPVCPEVGNPPNEYCIEVEHNSSYSSPKNTCGRCSGEDREPIPTTCRCVYPITGTLTFRSPSFSGYSNNDTFENLRLNLTGFFENRNYTVDSVAIRNIREDEDDHYLLIDLSLFPYKQDRFNETGMDSVISRFSTQTYKPPNTFGPYIFKANKYNKFPAGGSNSSHIIGAVVGSTVFLLILMIAGIYALKQKRRAEKANDQINPFAKWDANQNSVDAPQLMGTKAFTFEEMRKCANNFSVANDVGGGGYGQVYKGILPSGQLIAIKRAQPGSLQGALEFKTEIELLSRVHHKNVVKLLGFCFDRGEQMLVYEYIPNGSLRDSLSGKSGIRLDWTRRLRIALGSGKGLAYLHELADPPIIHRDVKSSNVLLDESLTAKVADFGLSQLVEDAEKANVTAQVKGTMGYLDPEYYMTNQLTEKSDVYGFGVMMLELLTGKIPIENGKYVVKEMKMKMNKSKNLYDLQDFLDTTISATSNRNLKGFEKYVDVALRCVDPEGVKRPSMNEVVKEIENIMQYAGLNPNVESYASSRTYDEASKESGDLYGNNSFEYSASFPTTNLEPQ

SEQ ID NO: 79059 - DNA, 1329 bp, Arabidopsis thaliana
  misc_feature (1)..(1329): Ceres Seq. ID no. 12648299
  misc_feature (1)..(1329): Ortholog of  Ceres SEQ ID NO 15170792 as cited in SEQ ID NO 52707
atgacttcttcttctcattgtttcttgatcgtttcagtggcacttctattgcaagttctcttatcccctgtttcggccttaaccttaacctccacaaaatacattaataaattatgccagatgtcatttgtcgacaataaacccttctgtttgcaaacattgagtgcctatcctcctgcggcttctgccactggcttgctcccacttgcgtcagccgtgatccgcggcattgtcctaccccaagccaagaagtctgcgagttttgcaaatggagcagcgaaaaaggagccgagcttgaagacacagttccagacgtgccaagaggcctttgtaagtattggagattctctcatgagcgcttttgaagaactcaagcgcgatccacatatcgcaacctatgatgttatgacttgtaccgaccatacaacccaagtgaagaatttggtcggaaaaaacacagatgtggcttcgaagactctcatagagatgacaatgcaaatggagaagctcattcctcttgctcttgcatccacacaagtggcaaaccaaggagaacaagaagagtccagggccaatgagcctgagggtatcaaatcagtgattgatgacatctacatttttgaagacgaccctgtggttgataggttcaataggtttggcacggagatgtctgccatggtctcggccttgacacaggtggtttctgctcgctctcagactgaggctgaaggtgctcactcttcttcctcttcggctggacataaaagaggatggcttggaatcgattctgctcctattccctcatcatttgctcgtgtagactcttcacataatccgatcgaagaatccatgagcaaggcatttccagaggaagcaagggagaaaaaaaggaggtacagaggagtaaggcagagaccatggggcaaatgggcagctgagatacgtgatccacatagagccgctagggtttggctcgggacgtttgatacagcggaggccgcggctagagcctacgacgaggctgcactccggttccgtggaaataaagcaaagctaaatttcccagaggatgtaaggattcttcctcctccccctcctcttcttcgttcaccagctgacacggtggcgaataaagcagaagaggatctgataaattattggagttatacaaagttgttgcaaagttcaggccaacggtcatttctcgagcgaggacaagaagagagtagtaacatatttgaacattcaccaatggaacaacctctgcctccttcaagttctggtccaagttcctctaattttcctgcaccttctctacctaatacatag

SEQ ID NO: 79060 - protein, 442 aa, Arabidopsis thaliana
  peptide (1)..(442): Ceres Seq. ID no. 12648300
MTSSSHCFLIVSVALLLQVLLSPVSALTLTSTKYINKLCQMSFVDNKPFCLQTLSAYPPAASATGLLPLASAVIRGIVLPQAKKSASFANGAAKKEPSLKTQFQTCQEAFVSIGDSLMSAFEELKRDPHIATYDVMTCTDHTTQVKNLVGKNTDVASKTLIEMTMQMEKLIPLALASTQVANQGEQEESRANEPEGIKSVIDDIYIFEDDPVVDRFNRFGTEMSAMVSALTQVVSARSQTEAEGAHSSSSSAGHKRGWLGIDSAPIPSSFARVDSSHNPIEESMSKAFPEEAREKKRRYRGVRQRPWGKWAAEIRDPHRAARVWLGTFDTAEAAARAYDEAALRFRGNKAKLNFPEDVRILPPPPPLLRSPADTVANKAEEDLINYWSYTKLLQSSGQRSFLERGQEESSNIFEHSPMEQPLPPSSSGPSSSNFPAPSLPNT

SEQ ID NO: 79061 - protein, 402 aa, Arabidopsis thaliana
  peptide (1)..(402): Ceres Seq. ID no. 12648301
MSFVDNKPFCLQTLSAYPPAASATGLLPLASAVIRGIVLPQAKKSASFANGAAKKEPSLKTQFQTCQEAFVSIGDSLMSAFEELKRDPHIATYDVMTCTDHTTQVKNLVGKNTDVASKTLIEMTMQMEKLIPLALASTQVANQGEQEESRANEPEGIKSVIDDIYIFEDDPVVDRFNRFGTEMSAMVSALTQVVSARSQTEAEGAHSSSSSAGHKRGWLGIDSAPIPSSFARVDSSHNPIEESMSKAFPEEAREKKRRYRGVRQRPWGKWAAEIRDPHRAARVWLGTFDTAEAAARAYDEAALRFRGNKAKLNFPEDVRILPPPPPLLRSPADTVANKAEEDLINYWSYTKLLQSSGQRSFLERGQEESSNIFEHSPMEQPLPPSSSGPSSSNFPAPSLPNT

SEQ ID NO: 79062 - protein, 325 aa, Arabidopsis thaliana
  peptide (1)..(325): Ceres Seq. ID no. 12648302
MSAFEELKRDPHIATYDVMTCTDHTTQVKNLVGKNTDVASKTLIEMTMQMEKLIPLALASTQVANQGEQEESRANEPEGIKSVIDDIYIFEDDPVVDRFNRFGTEMSAMVSALTQVVSARSQTEAEGAHSSSSSAGHKRGWLGIDSAPIPSSFARVDSSHNPIEESMSKAFPEEAREKKRRYRGVRQRPWGKWAAEIRDPHRAARVWLGTFDTAEAAARAYDEAALRFRGNKAKLNFPEDVRILPPPPPLLRSPADTVANKAEEDLINYWSYTKLLQSSGQRSFLERGQEESSNIFEHSPMEQPLPPSSSGPSSSNFPAPSLPNT

SEQ ID NO: 79063 - DNA, 2076 bp, Arabidopsis thaliana
  misc_feature (1)..(2076): Ceres Seq. ID no. 12648364
  misc_feature (1)..(2076): Ortholog of  Ceres SEQ ID NO 12586556 as cited in SEQ ID NO 64667
  misc_feature (1)..(2076): Ortholog of  Ceres SEQ ID NO 13660894 as cited in SEQ ID NO 67475
atggagattccactctcgcgttaccagagcataagattagacgagattcgagactcttcttccaatcccaaggttctcactttcccgcgaaaattctcgttacgaggaagaagatggaagaacccatttggaagactcagttgttcttctgtagttcaaggtctgaaaccaaaaccaaagctgaaaccagaaccaattagaatcgaggttaaggaatcgaaagatcagattttggatgatacccagatcagtaaatctggtgtaacgatttgtagtcagatagagaagttggttttgtgtaatagattcagagaagcttttgaattgtttgagattctggagattcgctgtagttttaaggttggtgttagtacttatgatgctttagtggaagcttgtattcgtttgaaatcgattcggtgtgttaaaagggtttatgggtttatgatgagtaatgggtttgagccggagcagtatatgatgaacagaatcttgttgatgcatgtcaagtgtgggatgattattgatgcacgtaggttgtttgatgaaatccctgagagaaatttgtattcttattactcgattatctctgggtttgttaattttgggaattatgttgaagcttttgagttgtttaagatgatgtgggaggagctttctgattgtgagactcatacgtttgcggtgatgctacgggcctcggctggcttagggtctatttatgtggggaaacagttacacgtttgtgcgttgaagttaggagttgttgataatacctttgtctcgtgtggattgattgatatgtatagcaagtgtggggatattgaagatgctcgatgtgcttttgagtgtatgcccgagaaaactactgttgcttggaacaacgttattgcgggttatgcgcttcatggttatagtgaggaagctctgtgtttgttgtatgacatgcgagactcaggtgtgtctattgatcagttcacactttcgataatgataagaatttctacaaagcttgcaaagcttgagcttactaagcaggcacacgctagtttaattcgaaacggttttgaatcggaaatcgttgcaaacacagctcttgtagacttttatagcaaatggggtagagtagatactgctagatatgtttttgataaattgccgagaaaaaatataatctcatggaacgctttgatgggtggatatgcaaatcatggtagaggaactgatgctgttaagttgtttgagaaaatgattgcagcaaacgtcgctccaaaccatgtcacatttcttgcagttctatcagcttgtgcctattcaggtttatctgagcaaggttgggagatttttctatcgatgagtgaggttcatgggatcaaaccaagggcgatgcattatgcctgcatgattgagctgttgggtagagacggtttattagatgaagccattgcgtttatccgaagagctcctttgaaaaccacggtgaacatgtgggcagcactcttgaatgcctgtaggatgcaggaaaacttagagcttggaagagtggttgctgaaaaactctatggaatgggacccgagaagctcggaaactacgttgtgatgtataatatgtacaacagtatgggaaaaactgcagaagctgcaggggttttggagacattggagagcaaaggattaagcatgatgccggcttgtacttgggttgaggttggagatcagactcacagctttctttcaggagataggcagatataccaaaaagtggatgaactaatggaagagatttccgagtatgggtactcagaggaggagcaacaccttcttccagacgtagatgaaaaggaagaagagcgagtagggcgatatcacagcgagaaactagccatagcttacggattggtgaatacgccggaatggaatccattgcagattactcagaaccataggatatgcaaaaattgccacaaggtggttgagttcatatctttggttacaggacgagagatggtagtgagagacgcgagccggttccatcattttaaagaagggaagtgttcttgtggaggttattggtga

SEQ ID NO: 79064 - protein, 691 aa, Arabidopsis thaliana
  peptide (1)..(691): Ceres Seq. ID no. 12648365
MEIPLSRYQSIRLDEIRDSSSNPKVLTFPRKFSLRGRRWKNPFGRLSCSSVVQGLKPKPKLKPEPIRIEVKESKDQILDDTQISKSGVTICSQIEKLVLCNRFREAFELFEILEIRCSFKVGVSTYDALVEACIRLKSIRCVKRVYGFMMSNGFEPEQYMMNRILLMHVKCGMIIDARRLFDEIPERNLYSYYSIISGFVNFGNYVEAFELFKMMWEELSDCETHTFAVMLRASAGLGSIYVGKQLHVCALKLGVVDNTFVSCGLIDMYSKCGDIEDARCAFECMPEKTTVAWNNVIAGYALHGYSEEALCLLYDMRDSGVSIDQFTLSIMIRISTKLAKLELTKQAHASLIRNGFESEIVANTALVDFYSKWGRVDTARYVFDKLPRKNIISWNALMGGYANHGRGTDAVKLFEKMIAANVAPNHVTFLAVLSACAYSGLSEQGWEIFLSMSEVHGIKPRAMHYACMIELLGRDGLLDEAIAFIRRAPLKTTVNMWAALLNACRMQENLELGRVVAEKLYGMGPEKLGNYVVMYNMYNSMGKTAEAAGVLETLESKGLSMMPACTWVEVGDQTHSFLSGDRQIYQKVDELMEEISEYGYSEEEQHLLPDVDEKEEERVGRYHSEKLAIAYGLVNTPEWNPLQITQNHRICKNCHKVVEFISLVTGREMVVRDASRFHHFKEGKCSCGGYW

SEQ ID NO: 79065 - protein, 543 aa, Arabidopsis thaliana
  peptide (1)..(543): Ceres Seq. ID no. 12648366
MMSNGFEPEQYMMNRILLMHVKCGMIIDARRLFDEIPERNLYSYYSIISGFVNFGNYVEAFELFKMMWEELSDCETHTFAVMLRASAGLGSIYVGKQLHVCALKLGVVDNTFVSCGLIDMYSKCGDIEDARCAFECMPEKTTVAWNNVIAGYALHGYSEEALCLLYDMRDSGVSIDQFTLSIMIRISTKLAKLELTKQAHASLIRNGFESEIVANTALVDFYSKWGRVDTARYVFDKLPRKNIISWNALMGGYANHGRGTDAVKLFEKMIAANVAPNHVTFLAVLSACAYSGLSEQGWEIFLSMSEVHGIKPRAMHYACMIELLGRDGLLDEAIAFIRRAPLKTTVNMWAALLNACRMQENLELGRVVAEKLYGMGPEKLGNYVVMYNMYNSMGKTAEAAGVLETLESKGLSMMPACTWVEVGDQTHSFLSGDRQIYQKVDELMEEISEYGYSEEEQHLLPDVDEKEEERVGRYHSEKLAIAYGLVNTPEWNPLQITQNHRICKNCHKVVEFISLVTGREMVVRDASRFHHFKEGKCSCGGYW

SEQ ID NO: 79066 - protein, 542 aa, Arabidopsis thaliana
  peptide (1)..(542): Ceres Seq. ID no. 12648367
MSNGFEPEQYMMNRILLMHVKCGMIIDARRLFDEIPERNLYSYYSIISGFVNFGNYVEAFELFKMMWEELSDCETHTFAVMLRASAGLGSIYVGKQLHVCALKLGVVDNTFVSCGLIDMYSKCGDIEDARCAFECMPEKTTVAWNNVIAGYALHGYSEEALCLLYDMRDSGVSIDQFTLSIMIRISTKLAKLELTKQAHASLIRNGFESEIVANTALVDFYSKWGRVDTARYVFDKLPRKNIISWNALMGGYANHGRGTDAVKLFEKMIAANVAPNHVTFLAVLSACAYSGLSEQGWEIFLSMSEVHGIKPRAMHYACMIELLGRDGLLDEAIAFIRRAPLKTTVNMWAALLNACRMQENLELGRVVAEKLYGMGPEKLGNYVVMYNMYNSMGKTAEAAGVLETLESKGLSMMPACTWVEVGDQTHSFLSGDRQIYQKVDELMEEISEYGYSEEEQHLLPDVDEKEEERVGRYHSEKLAIAYGLVNTPEWNPLQITQNHRICKNCHKVVEFISLVTGREMVVRDASRFHHFKEGKCSCGGYW

SEQ ID NO: 79067 - DNA, 1526 bp, Arabidopsis thaliana
  misc_feature (1)..(1526): Ceres Seq. ID no. 12648398
  misc_feature (1)..(1526): Ortholog of  Ceres SEQ ID NO 13595525 as cited in SEQ ID NO 56679
  misc_feature (1)..(1526): Ortholog of  Ceres SEQ ID NO 15226984 as cited in SEQ ID NO 62173
  misc_feature (1)..(1526): Ortholog of  Ceres SEQ ID NO 14302236 as cited in SEQ ID NO 68793
atgaaacttcaagggaagtatgaatacacagtaactggtatgtacgatgtgaatgacaaagataatagtattcgcatcaccgagttgactacaaaaatgacggcccatctccgttgtcgtcttcaaggtcacgcttacagacttggctccgccgctccggcattgagctccgtcgagagaatggcgagtaatcaacaaccaccgtcgaatctacagacctacggtgtaccaatttacgccgtcgactggattctagaggaagctgtcagatccaaaatcactaaggatcaggatgatgatgatgatgatggatcgtcgtcgtcgtcgtacatcgttttatccggcggaggaggagaaggacgaagtggaatacctaatgtcatcttaatctgtcgtgttgatctccacaccaattctctctctgaacaacctattggtaggcgtgtgattggcactgatctaccttatcgtatggctattcatcctcgtcaaggtggtcttatttgtgcattgcctaacagttgcagactgtttgattgggaaaacattatagaggatgataatgaggaagagtcagagaaagttgttaaagagttaaaagatgttggacaacagttgtctctctcgtttaatcaggatgggactgttctagctactggtgcagaggatgggactttgagggtttttgaatggccaagcatgaagactttacttaatgagtctaagacacatgcatcagttaaaagcctaactttcagcgaaagtggtaagtttcttgtatctcttggagctccactttgtcgggtttgggatgtgaatgcttctgctgctattgccagtctatcaaaagagaaggacgagatgtttgcctcgtgtagattctctgtagacaattcaggcagtgaagttctttatgttgctgcaaacactcaacgtggtgggagtattataacatgggatacaacatcatggagaagaagaagttcaaagcttattaaaagaaacaactctatatctgcctttaatgtctcagctgatgggaagcttcttgcagtaggaaccctcgaaggagatgttttaataattgattcgacaaagatgcaaactaaccaaatcgtcaagaaagctcatctcggtttggtcaccgcactgactttctcccctgattcaaggtgcttagtgtcagtatcttttgactcaagggcaaggctaaccgtgatcaaacaaaagggtgaaaaacgtcgagtatatctgtgggtggcggcattgttgtttgtgttggtatacgtggttttgtattatttgatggtggcaatggggatcatacattagacatacgtaaagaaagcctctaagtaaatccacacgacaatacatggaatggcttgaagaaaccaacatacagatttataccctcgttaagttttcttagactttgtgttttgagtaggtcgtagagattcttcacagaaactttcatgcttttattagtttacatcatatattcatattctcgtttctatctt

SEQ ID NO: 79068 - protein, 443 aa, Arabidopsis thaliana
  peptide (1)..(443): Ceres Seq. ID no. 12648399
MKLQGKYEYTVTGMYDVNDKDNSIRITELTTKMTAHLRCRLQGHAYRLGSAAPALSSVERMASNQQPPSNLQTYGVPIYAVDWILEEAVRSKITKDQDDDDDDGSSSSSYIVLSGGGGEGRSGIPNVILICRVDLHTNSLSEQPIGRRVIGTDLPYRMAIHPRQGGLICALPNSCRLFDWENIIEDDNEEESEKVVKELKDVGQQLSLSFNQDGTVLATGAEDGTLRVFEWPSMKTLLNESKTHASVKSLTFSESGKFLVSLGAPLCRVWDVNASAAIASLSKEKDEMFASCRFSVDNSGSEVLYVAANTQRGGSIITWDTTSWRRRSSKLIKRNNSISAFNVSADGKLLAVGTLEGDVLIIDSTKMQTNQIVKKAHLGLVTALTFSPDSRCLVSVSFDSRARLTVIKQKGEKRRVYLWVAALLFVLVYVVLYYLMVAMGIIH

SEQ ID NO: 79069 - protein, 430 aa, Arabidopsis thaliana
  peptide (1)..(430): Ceres Seq. ID no. 12648400
MYDVNDKDNSIRITELTTKMTAHLRCRLQGHAYRLGSAAPALSSVERMASNQQPPSNLQTYGVPIYAVDWILEEAVRSKITKDQDDDDDDGSSSSSYIVLSGGGGEGRSGIPNVILICRVDLHTNSLSEQPIGRRVIGTDLPYRMAIHPRQGGLICALPNSCRLFDWENIIEDDNEEESEKVVKELKDVGQQLSLSFNQDGTVLATGAEDGTLRVFEWPSMKTLLNESKTHASVKSLTFSESGKFLVSLGAPLCRVWDVNASAAIASLSKEKDEMFASCRFSVDNSGSEVLYVAANTQRGGSIITWDTTSWRRRSSKLIKRNNSISAFNVSADGKLLAVGTLEGDVLIIDSTKMQTNQIVKKAHLGLVTALTFSPDSRCLVSVSFDSRARLTVIKQKGEKRRVYLWVAALLFVLVYVVLYYLMVAMGIIH

SEQ ID NO: 79070 - protein, 411 aa, Arabidopsis thaliana
  peptide (1)..(411): Ceres Seq. ID no. 12648401
MTAHLRCRLQGHAYRLGSAAPALSSVERMASNQQPPSNLQTYGVPIYAVDWILEEAVRSKITKDQDDDDDDGSSSSSYIVLSGGGGEGRSGIPNVILICRVDLHTNSLSEQPIGRRVIGTDLPYRMAIHPRQGGLICALPNSCRLFDWENIIEDDNEEESEKVVKELKDVGQQLSLSFNQDGTVLATGAEDGTLRVFEWPSMKTLLNESKTHASVKSLTFSESGKFLVSLGAPLCRVWDVNASAAIASLSKEKDEMFASCRFSVDNSGSEVLYVAANTQRGGSIITWDTTSWRRRSSKLIKRNNSISAFNVSADGKLLAVGTLEGDVLIIDSTKMQTNQIVKKAHLGLVTALTFSPDSRCLVSVSFDSRARLTVIKQKGEKRRVYLWVAALLFVLVYVVLYYLMVAMGIIH

SEQ ID NO: 79071 - DNA, 1150 bp, Arabidopsis thaliana
  misc_feature (1)..(1150): Ceres Seq. ID no. 12648687
  misc_feature (1)..(1150): Ortholog of  Ceres SEQ ID NO 14303440 as cited in SEQ ID NO 59496
atgcaaaaataaacatagtaacaatactttaaactatttacaccactttaatcttattctccactctttgaacgtaatggagaagaaccatagtagtggagagtgggagaagatgaagaacgagatcaacgagctaatgatagaaggaagagactatgcacaccagtttggatcagcttcatctcaagaaacacgtgaacatttagccaaaaagattcttcaatcttaccacaagtctctcaccatcatgaactactccggcgaacttgaccaagtttctcagggtggaggaagccccaagagcgatgattccgatcaagaaccacttgtcatcaagagttcgaagaagtcaatgccaaggtggagttcaaaagtcagaattgcccctggagctggtgttgatagaacgctggacgatggattcagttggagaaagtacggccagaaggatattctcggagccaaatttccaagaggatactatagatgcacgtatagaaagtctcaaggatgtgaagccactaaacaagtccaaagatctgatgaaaatcagatgctccttgagatcagttaccgaggaatacattcttgctctcaagctgcaaatgtcggtacaacaatgccgatacaaaacctcgaaccgaaccagacccaagaacacggaaatcttgacatggtaaaggaaagtgtagacaactacaatcaccaagcacatttgcatcacaaccttcactatccattgtcatctaccccaaatctagagaataacaatgcctatatgcttcaaatgcgagatcaaaacatcgaatattttggatctacgagcttctctagtgatctaggaactagtatcaactacaattttccagcatctggctcggcttctcactcagcatcaaactctccgtccaccgtccctttggaatccccgtttgaaagctatgatccaaatcatccatatggaggatttggtgggttctattcttagttatctacttaagggagggacggaactttttacatgacctcttgattaaagagagagttttcataatagctaatcaatttcctattcaaatatccgagttttttttctaatcatgtttatcaattgtcttattacagaaggcttattttcaggtctatgttg

SEQ ID NO: 79072 - protein, 328 aa, Arabidopsis thaliana; identical to SEQ ID NO: 27437
  peptide (1)..(328): Ceres Seq. ID no. 12648688

SEQ ID NO: 79073 - protein, 303 aa, Arabidopsis thaliana; identical to SEQ ID NO: 27438
  peptide (1)..(303): Ceres Seq. ID no. 12648689

SEQ ID NO: 79074 - protein, 291 aa, Arabidopsis thaliana; identical to SEQ ID NO: 27439
  peptide (1)..(291): Ceres Seq. ID no. 12648690

SEQ ID NO: 79075 - DNA, 1461 bp, Arabidopsis thaliana
  misc_feature (1)..(1461): Ceres Seq. ID no. 12648732
  misc_feature (1)..(1461): Ortholog of  Ceres SEQ ID NO 15226175 as cited in SEQ ID NO 0
atgaaagctctacgaagaatacaaacgaagtctacgtttccaaatccttcttctccgtcatctccgtggactcatttgcgttctgctttcgtccttgttacttcttcttctccagcttcttgttcttcttcttctgatccgcatcggcttaaatcgccctggtcccggagaaaagggaaaaaaccactcacacttcgccggtggagaagatgtttcacccctgagggtagaattcggaatgggggagttgatttgttgaagaaagttcggactagaggcattgatcctagcattcggtctgaggtgtggccatttcttcttggagtgtgtgatttcaatagttccgaagaagagagaggtgctacaagaacttggagaagaaaagtgtatgagagactacgcaggcagtgcaaaagcgtccacgagtctcttatcagcgataaagacaacacggaagatattggctacatgagtgatgtctcatgtacgcttgacagagactataatggttcaagacacctgaactctgagtcgtcagactcagattcatctgatgagaatgattatgttcaggtcgctccttcttgtgaagggaaagatgaaaacagtacttctccatccagcatatatatttctcgtaccaaagaggattttgtgacctggcagcgtattatccgtctagacgctctccgtgcagatacagaatggactccatattctcaatcccaagctttggtttcagagaatagggcacgtcgtgctgctgaagcagttggtctaaaggattacagttatttggaaccttcgaaaatctttcacgctgcacggcttgttgctgttcttgaagcctatgccttacatgaccctgaaattggctactgccaaggaatgagtgatcttctctcccctatactctcagtcatacctgatgactacgaggcattttggtgtttcgttgggttcatgaagaaagctcgtcagaatttcagagtcgatgaggttgggatcacaaggcaactgaacatagtctcaaagattatcaaatccaaagactcacaactctacaagcatcttgagaaagtcaaggctgaagactgtttctttgtttacagaatggttcttgttatgtttagaagagagctgactctggagcaaacattgcatctctgggaagtgatttgggcagaccaagctgcaataagagctgggatggggaaatcttcctggagcagacgaataaagcagcgggctcctcccacggaggatttgttgctgtacgtggtagctgcttctgtgttgcaaaggaggaaagtcataatagagaagtacagtagcatggaggagattctccgagagtgccacaatatggtagggaaactagacgtgtggaagctcttagacgatgcacacgaccttattgttaccctccacgccaagatcgaacattctatcccacaataa

SEQ ID NO: 79076 - protein, 486 aa, Arabidopsis thaliana
  peptide (1)..(486): Ceres Seq. ID no. 12648733
MKALRRIQTKSTFPNPSSPSSPWTHLRSAFVLVTSSSPASCSSSSDPHRLKSPWSRRKGKKPLTLRRWRRCFTPEGRIRNGGVDLLKKVRTRGIDPSIRSEVWPFLLGVCDFNSSEEERGATRTWRRKVYERLRRQCKSVHESLISDKDNTEDIGYMSDVSCTLDRDYNGSRHLNSESSDSDSSDENDYVQVAPSCEGKDENSTSPSSIYISRTKEDFVTWQRIIRLDALRADTEWTPYSQSQALVSENRARRAAEAVGLKDYSYLEPSKIFHAARLVAVLEAYALHDPEIGYCQGMSDLLSPILSVIPDDYEAFWCFVGFMKKARQNFRVDEVGITRQLNIVSKIIKSKDSQLYKHLEKVKAEDCFFVYRMVLVMFRRELTLEQTLHLWEVIWADQAAIRAGMGKSSWSRRIKQRAPPTEDLLLYVVAASVLQRRKVIIEKYSSMEEILRECHNMVGKLDVWKLLDDAHDLIVTLHAKIEHSIPQ

SEQ ID NO: 79077 - protein, 330 aa, Arabidopsis thaliana; identical to SEQ ID NO: 70081
  peptide (1)..(330): Ceres Seq. ID no. 12648734

SEQ ID NO: 79078 - DNA, 1154 bp, Arabidopsis thaliana
  misc_feature (1)..(1154): Ceres Seq. ID no. 12648759
  misc_feature (1)..(1154): Ortholog of  Ceres SEQ ID NO 14304983 as cited in SEQ ID NO 53862
  misc_feature (1)..(1154): Ortholog of  Ceres SEQ ID NO 14310483 as cited in SEQ ID NO 58376
  misc_feature (1)..(1154): Ortholog of  Ceres SEQ ID NO 13597528 as cited in SEQ ID NO 64802
ataacatatatttcttcttcgtttcattcataatcgtcttataaccacagattctaaaacatgggagaagaagtaaaaccagaggcaaaggaggcagcctctgctccacaggccgtccccgctgaggaggaggagaagaagaaagatgtagcggaggagaagaaagtggcggctgaggaggagaaaccaaaggaggaagaggagccgcaaccaccaccaccgcctccacccttcatactctacgtcgacttgcattgtgttggatgcgctaagaagattgaaagatctattctaaaaattagaggtgtggaagaagtggtgatggatatgaatgagaaccaagtgacgataaagggagtgttggatccgcaagcagtgtgcaacaaaatcaagaagaagactaaaagaatggccaaagtcctctcgccgcttccggcagctgagggagagcctctgccaccaatcataacctctcaggtctccggcggcctcaccaccgtcgagctcagcgttaacatgcactgccaagcttgtgctgaccagctcaagaagaagattctcaaaatgagaggggtccaaacaactgtgacagagcacaccacgggaaaagtaatagtgactgggacaatggacgctgagaagcttgtggattacgtctaccgtcggaccaaaaagcaagcccgaatcgtaccccaacctgacccggaacctgaagcccccgcggccgcgcaggaagaaaagaaggaggagagcggtgaaggcaatgaaaaaccaccagagaccggagaggaaaaggaagaagagaagaagaaggagggagaggaaaatggagaggaaggtggtggagaagaggcggcggctacggaggaagagagacgagacaatgaaatgacggctatggcccaagaagaagggatgaagaggatgatgtattactatcaaccttcatacgtcatagagaggattcctccgccgcagctttttagcgacgagaaccctaatgcttgttgcatttcttaattaaatttggtttcgtatatgtctatggaaaatataattagaggaattaataattaggtaagaaaagaaagaaaataggtaaagaatttgtaaactatttattttttaatataatgtacgtgtgtttggtatct

SEQ ID NO: 79079 - protein, 319 aa, Arabidopsis thaliana; identical to SEQ ID NO: 27380
  peptide (1)..(319): Ceres Seq. ID no. 12648760

SEQ ID NO: 79080 - protein, 232 aa, Arabidopsis thaliana; identical to SEQ ID NO: 27381
  peptide (1)..(232): Ceres Seq. ID no. 12648761

SEQ ID NO: 79081 - protein, 230 aa, Arabidopsis thaliana; identical to SEQ ID NO: 27382
  peptide (1)..(230): Ceres Seq. ID no. 12648762

SEQ ID NO: 79082 - DNA, 1263 bp, Arabidopsis thaliana
  misc_feature (1)..(1263): Ceres Seq. ID no. 12648778
  misc_feature (1)..(1263): Ortholog of  Ceres SEQ ID NO 13595658 as cited in SEQ ID NO 59888
  misc_feature (1)..(1263): Ortholog of  Ceres SEQ ID NO 13661330 as cited in SEQ ID NO 61614
  misc_feature (1)..(1263): Ortholog of  Ceres SEQ ID NO 13596025 as cited in SEQ ID NO 62024
  misc_feature (1)..(1263): Ortholog of  Ceres SEQ ID NO 13662324 as cited in SEQ ID NO 62162
  misc_feature (1)..(1263): Ortholog of  Ceres SEQ ID NO 12625713 as cited in SEQ ID NO 64160
  misc_feature (1)..(1263): Ortholog of  Ceres SEQ ID NO 14302860 as cited in SEQ ID NO 67667
atgggaagatcaccaatggttcctatggctgttcttgtttatgtttctctactgttctctgtttcttattcctccacgttcgtcatcacaaataactgtccctttactatatggcctggaactcttgcaggctctggcacccagccactacccaccacagggttcaggcttgatgtgggacagtctgttagaattcccacggctctaggctggtcaggtcgtatttgggctaggactggctgcaactttgatgctaacggcgcgggaaaatgtatgactggagactgcggcggaaagctggagtgtgctggtaatggcgctgctccgccgacatctcttttcgagatcacactcggtcacggttctgatgacaaagatttctatgatgtcagtctcgttgatgggtataaccttcccatagttgctctcccgacgggtggtggactggttggcgcttgtaatgctacaggatgtgttgctgatatcaatattagctgtccaaaggagcttcaagtgatgggagaggaagaggctgaaagaggaggggttgttgcatgcaagagcgcttgtgaggcctttgggttggaccagtactgttgcagcggtcagtttgctaacccgaccacatgccgaccgtctttatactcttccatcttcaagagagcttgtcccagagcttatagctatgccttcgatgatggaaccagtactttcacctgcaaggcttctgaatatgcaattatcttctgccctggcagggtaaaaagaccagacagtctgaactcggatcctcccagcccacctcagaatcagttagggcaacctatggctcccccaactcaaaatcagtatggtcaacctatggctcctgcacctcagtatcagtacggtcaacctatggctccaccgactcaaaatcagtatggtcaacctctggctcctccgactcaaaatcaatacgatcaacctctggctcctccgactcaaaatcaatatggtcaacctatggctccaccaactccgcccccacccggaccaaacgaggattcaatgactcccccacctcagaatcagaatggggatgggcagttcatgcctcctcccactttggaccaagatccaaacgaccagtatatgaatcccccaattcaggatcagagtcaaagagagactcaatcttcatccgatcttcttcgaccttaccctgtcttgttgcttcttggctttagtctaactgctttgaggcaatctggcacgacatga

SEQ ID NO: 79083 - protein, 420 aa, Arabidopsis thaliana
  peptide (1)..(420): Ceres Seq. ID no. 12648779
MGRSPMVPMAVLVYVSLLFSVSYSSTFVITNNCPFTIWPGTLAGSGTQPLPTTGFRLDVGQSVRIPTALGWSGRIWARTGCNFDANGAGKCMTGDCGGKLECAGNGAAPPTSLFEITLGHGSDDKDFYDVSLVDGYNLPIVALPTGGGLVGACNATGCVADINISCPKELQVMGEEEAERGGVVACKSACEAFGLDQYCCSGQFANPTTCRPSLYSSIFKRACPRAYSYAFDDGTSTFTCKASEYAIIFCPGRVKRPDSLNSDPPSPPQNQLGQPMAPPTQNQYGQPMAPAPQYQYGQPMAPPTQNQYGQPLAPPTQNQYDQPLAPPTQNQYGQPMAPPTPPPPGPNEDSMTPPPQNQNGDGQFMPPPTLDQDPNDQYMNPPIQDQSQRETQSSSDLLRPYPVLLLLGFSLTALRQSGTT

SEQ ID NO: 79084 - protein, 415 aa, Arabidopsis thaliana
  peptide (1)..(415): Ceres Seq. ID no. 12648780
MVPMAVLVYVSLLFSVSYSSTFVITNNCPFTIWPGTLAGSGTQPLPTTGFRLDVGQSVRIPTALGWSGRIWARTGCNFDANGAGKCMTGDCGGKLECAGNGAAPPTSLFEITLGHGSDDKDFYDVSLVDGYNLPIVALPTGGGLVGACNATGCVADINISCPKELQVMGEEEAERGGVVACKSACEAFGLDQYCCSGQFANPTTCRPSLYSSIFKRACPRAYSYAFDDGTSTFTCKASEYAIIFCPGRVKRPDSLNSDPPSPPQNQLGQPMAPPTQNQYGQPMAPAPQYQYGQPMAPPTQNQYGQPLAPPTQNQYDQPLAPPTQNQYGQPMAPPTPPPPGPNEDSMTPPPQNQNGDGQFMPPPTLDQDPNDQYMNPPIQDQSQRETQSSSDLLRPYPVLLLLGFSLTALRQSGTT

SEQ ID NO: 79085 - protein, 412 aa, Arabidopsis thaliana
  peptide (1)..(412): Ceres Seq. ID no. 12648781
MAVLVYVSLLFSVSYSSTFVITNNCPFTIWPGTLAGSGTQPLPTTGFRLDVGQSVRIPTALGWSGRIWARTGCNFDANGAGKCMTGDCGGKLECAGNGAAPPTSLFEITLGHGSDDKDFYDVSLVDGYNLPIVALPTGGGLVGACNATGCVADINISCPKELQVMGEEEAERGGVVACKSACEAFGLDQYCCSGQFANPTTCRPSLYSSIFKRACPRAYSYAFDDGTSTFTCKASEYAIIFCPGRVKRPDSLNSDPPSPPQNQLGQPMAPPTQNQYGQPMAPAPQYQYGQPMAPPTQNQYGQPLAPPTQNQYDQPLAPPTQNQYGQPMAPPTPPPPGPNEDSMTPPPQNQNGDGQFMPPPTLDQDPNDQYMNPPIQDQSQRETQSSSDLLRPYPVLLLLGFSLTALRQSGTT

SEQ ID NO: 79086 - DNA, 1071 bp, Arabidopsis thaliana
  misc_feature (1)..(1071): Ceres Seq. ID no. 12648789
  misc_feature (1)..(1071): Ortholog of  Ceres SEQ ID NO 14310295 as cited in SEQ ID NO 233
  misc_feature (1)..(1071): Ortholog of  Ceres SEQ ID NO 15179412 as cited in SEQ ID NO 0
atggattcagatgcatgggaaattatccatatacctgaaaagccttcattgtcacctgaccatcagcccactgtgaaggtatatgctagcctaatcaaacccagatttgccaatacgatagtgaggcatttatgtaagattgctcctctagaagatcttcgtcatgttaaaagggtgaagaagaagattctgccagattgcggtgaaactcagttgactgtcatcttatgtctagcacctgagcacaacgatcagttgagtgacatgccacctgatgtgcagagactcgttgatccctatgagttgagtccttttattacacaagtatgcaaatatgctgcggtatccaaagaagagtgggaagaacaaagtaagatatggcctacttcatttcatccaccaacctatgcaacagtcaatgattttttactttttgcatttggcaatgatagcaatatagatggcatcggtgggttcagcgaggaggaaacacaatcaatctgcaagttcatgagagttgttattgatatggcagtatctggtcatacaccacttgtgaatgctgcagtgatagttgatccttcagttaggcgaataatagctagtgaaactgatcaagtatatgcatcatctgctcctcgtgacatgactagcgcagagaccaggcccttcgaggaaacaggggaaatatgtttaaatgacacacttgaaaaacagaatggttcattgtctgctctttcttgtctgaatccctggcaatggagtttgcagccgcatgacactgaaaattgtagccagtggcatcctcttaggcatgcttccatggttgccattgaatcctcttctgccagagatagaaatctgtttcccaatccatccaagatttttgatcaggatcatgttccgccctcaaatacagattctccggctaaaaagcagaaaacaagcagtcagagtccagacgtccaaaatgacagcagagaagagactgttagagatccttcaatggaaaggccgtacctctgcactggttatgacattttcctcctgttggagccttgtacaatgtga

SEQ ID NO: 79087 - protein, 356 aa, Arabidopsis thaliana
  peptide (1)..(356): Ceres Seq. ID no. 12648790
MDSDAWEIIHIPEKPSLSPDHQPTVKVYASLIKPRFANTIVRHLCKIAPLEDLRHVKRVKKKILPDCGETQLTVILCLAPEHNDQLSDMPPDVQRLVDPYELSPFITQVCKYAAVSKEEWEEQSKIWPTSFHPPTYATVNDFLLFAFGNDSNIDGIGGFSEEETQSICKFMRVVIDMAVSGHTPLVNAAVIVDPSVRRIIASETDQVYASSAPRDMTSAETRPFEETGEICLNDTLEKQNGSLSALSCLNPWQWSLQPHDTENCSQWHPLRHASMVAIESSSARDRNLFPNPSKIFDQDHVPPSNTDSPAKKQKTSSQSPDVQNDSREETVRDPSMERPYLCTGYDIFLLLEPCTM

SEQ ID NO: 79088 - protein, 268 aa, Arabidopsis thaliana
  peptide (1)..(268): Ceres Seq. ID no. 12648791
MPPDVQRLVDPYELSPFITQVCKYAAVSKEEWEEQSKIWPTSFHPPTYATVNDFLLFAFGNDSNIDGIGGFSEEETQSICKFMRVVIDMAVSGHTPLVNAAVIVDPSVRRIIASETDQVYASSAPRDMTSAETRPFEETGEICLNDTLEKQNGSLSALSCLNPWQWSLQPHDTENCSQWHPLRHASMVAIESSSARDRNLFPNPSKIFDQDHVPPSNTDSPAKKQKTSSQSPDVQNDSREETVRDPSMERPYLCTGYDIFLLLEPCTM

SEQ ID NO: 79089 - protein, 186 aa, Arabidopsis thaliana
  peptide (1)..(186): Ceres Seq. ID no. 12648792
MRVVIDMAVSGHTPLVNAAVIVDPSVRRIIASETDQVYASSAPRDMTSAETRPFEETGEICLNDTLEKQNGSLSALSCLNPWQWSLQPHDTENCSQWHPLRHASMVAIESSSARDRNLFPNPSKIFDQDHVPPSNTDSPAKKQKTSSQSPDVQNDSREETVRDPSMERPYLCTGYDIFLLLEPCTM

SEQ ID NO: 79090 - DNA, 1563 bp, Arabidopsis thaliana
  misc_feature (1)..(1563): Ceres Seq. ID no. 12648822
  misc_feature (1)..(1563): Ortholog of  Ceres SEQ ID NO 15177343 as cited in SEQ ID NO 51182
atggatggatttaagggtaaaagaacatctagaccgattatgccacggaaagcaagtggtcttgtgttacatgagaatatgaagaagaaagatgataagagtgttgtccctatctgcagtagaattggttgcagttccagggttagttccactaagggagatttgattgatcataaagcaaaagctactgtgtcttcgtttcgatctcctttgagtggaaaggaaaccgttggtagttcatctcgaagtatgagtggatttggtggtacaaaaaaggcttccaaggttattggtaggagacaactctcttctcttttggacatggattcttcagagagcagcagtgttaatgaagactcacccacaagtgagcgttcccttcctcgtggaaagacaaaagaaagcactattagtgttcattctgaaagtagtgtctctggagaagttgtgacagaggcaggaagctcgagtagaggaactggtagaagcattcatcagagacctgatttggtctcccgagatgctcgtgtgagtaatagtgagcaaaatgcaagagctagtgtgaacaagaatggattaagagacttgaggaacaaatctggttctgatgttcttccatctaattcaactccgacaagaaaaagtaacatctttagaaagaaaacctctgatggtgagagcagctcttcgagtagagggaataagacggaaggatcagtggttgggggaaagaatattagttcccctcaggggaatggcatcaccatgtctgaacctaggaggaacagaaacttaccaagtgttagggacaacagtgttgtttcaagtagtactaggagatcaactggttattatggtagaacaggacgtgctggagcggttgcaacactacaagcacctcggcctccaacaagagctgatctcaatccttctagatcggcagaagcttcgcgtagtcctttaaatagttacagtaggccaatcagtagtaatggcaggttacgtagcctgatgatgcctggtagcccctcagaagccggcctttctcgctctttgatgaaccgtgatactttcagacggtataacatgaatggagttgcagaggtattgttggccctggaaaggattgagcaagacgaagagcttacatacgagcaattggctgttttagagaccaatctgttcttaaatggtatgagcagcttccacgatcagcatagagatatgaggcttgacattgacaacatgtcgtatgaggaactgttagcattagaggagaaaatgggtacagtgagcactgctctaagcgaagaagcgcttctgaaaagcctcaagtcaagtatttaccgtccaaacgatgaatccgacgacatttgcctgaacaaagatgatgatgtcaagtgcagcatttgccaggaagagtatgttgatggagatgaagtagggactttgccttgccaacataaataccacgtgagctgcgcgcaacaatggctacggatgaagaattggtgtcctatatgtaaaacctctgcagaatctcagccacatccattttcatga

SEQ ID NO: 79091 - protein, 520 aa, Arabidopsis thaliana; identical to SEQ ID NO: 77854
  peptide (1)..(520): Ceres Seq. ID no. 12648823

SEQ ID NO: 79092 - protein, 507 aa, Arabidopsis thaliana; identical to SEQ ID NO: 77855
  peptide (1)..(507): Ceres Seq. ID no. 12648824

SEQ ID NO: 79093 - protein, 494 aa, Arabidopsis thaliana; identical to SEQ ID NO: 77856
  peptide (1)..(494): Ceres Seq. ID no. 12648825

SEQ ID NO: 79094 - DNA, 2157 bp, Arabidopsis thaliana
  misc_feature (1)..(2157): Ceres Seq. ID no. 12648838
  misc_feature (1)..(2157): Ortholog of  Ceres SEQ ID NO 13598023 as cited in SEQ ID NO 66487
atgccgttgttgcgctccgccatcaccgtcgtgtttcgctgctccggagaaattgaactttatgttgatgaggttgttgttgctatagttgtagcgttccgtgatgacaatactatttgtctgtctccaagcttgaagaataatgaactctcaagacagacaaattcatgggtttcaccattttgcttgcaacgcagagcgtattcgacgggtttcaccagcgtacatggtggaatacctacggcagagtatgcaaagttgcggagagaatcccttgaaactgaatttggacatgctctaggagcatatagctcgaaaagtttttctgcagtgtatcgttttggaccctttttggctttgtatagagctgcaatcatttcgtatcatgtggtgaagcttgccttttggcagctgtttgttcaggatatgaggaaacgggctgtcaagctgggacaggcactgagcacgagaccagacatattaccatctatatactgtcaggaactttcaaaattgcaggaccagattcctccatttccaactactgttgccatgcgatgtattgaagagcaactgggtgctccagtgtcaaaactttttgcagatattagtcttaaacctgttgctgctgcatccctgggtcaggtatacaaagctcatctgcattctggacaattggtagccgttaaggttcagagacctggaatgtcactcattctaacacgtgatgccctcttattcaaaatgattgggggacaactgaaacgatttgctaaagcccgtaaggatcttttggtagcggtgaatgagatggtcaggcatatgtttgacgaaatagattacgttctcgaggcaaaaaatgcagaacgatttgcctctctatacagttttgactcagggaatgagcagattgatgataacgctggacctaggaatatgtccaggaatcacagagcagagaacatcaaagtccctaaaatttactggaattttacacgcacagcagtgctcacaatggaatggatcgatggcataaaattaacagatgaaattaagctgaaaagggcttcccttgatagaagggacttgatcgatcagggcttatcctgttcattaaagcagcttcttgaggttggattctttcatgctgatccgcacccaggaaatcttgtggctactaaagaagggtctcttgtttactttgacttcggaatgatggggaatattccacgccattaccgtgtgggacttattcaaattctggtgcattttgtcaaccgtgattctctaagtttggcaaatgatttcctgtccttgggatttttgcctgaaggggttgatatacaagcagtttcaaatgctttgcgtacttcatttggttctactacgagaatatcacaagatttccagggggtgatggaacaattatatgatgttatgtacgagttcaacttttcgctgcctccagactatgctcttgttataagatctcttggttcactggaaggcacggctaagattcttgatccagagtttaaagtgattgagagtgcatatccatttgttatcgggaggctattagcagatccaagcccagatatgaggaaaatactaagggagcttgtcatttgtaatgatggatcaataaggtggaatcgtcttgaacgcctggtagcagcaatatcagaacaggcttctgcgacttcaggagactctccagaagataaaacgttgaagaaatcatcggaactgaaatcattcgacatgcattcagtagtttccgcaacagaagatctgctactgttcatattatccgagaaagggcagagagttcgggtcttccttcttcaagacataatcagagtggttgatattttcctggaagtagaggctcttgagctcaacaagaccatcaatcttaagacggaagaagggacaatgaaaagagtgagcaatggattcaaaggtctgagtgaggcggtgaagcttgcaccgggaatgtggatatcaatgcttcttcggatgtcaaggaagtctgaggttcatagttatgctttagatattgtttctgcattgtctacacattttggccacaaagtgcctcacacttgttggatccttctctccaaattgctccatcacaataagagccaataa

SEQ ID NO: 79095 - protein, 718 aa, Arabidopsis thaliana
  peptide (1)..(718): Ceres Seq. ID no. 12648839
MPLLRSAITVVFRCSGEIELYVDEVVVAIVVAFRDDNTICLSPSLKNNELSRQTNSWVSPFCLQRRAYSTGFTSVHGGIPTAEYAKLRRESLETEFGHALGAYSSKSFSAVYRFGPFLALYRAAIISYHVVKLAFWQLFVQDMRKRAVKLGQALSTRPDILPSIYCQELSKLQDQIPPFPTTVAMRCIEEQLGAPVSKLFADISLKPVAAASLGQVYKAHLHSGQLVAVKVQRPGMSLILTRDALLFKMIGGQLKRFAKARKDLLVAVNEMVRHMFDEIDYVLEAKNAERFASLYSFDSGNEQIDDNAGPRNMSRNHRAENIKVPKIYWNFTRTAVLTMEWIDGIKLTDEIKLKRASLDRRDLIDQGLSCSLKQLLEVGFFHADPHPGNLVATKEGSLVYFDFGMMGNIPRHYRVGLIQILVHFVNRDSLSLANDFLSLGFLPEGVDIQAVSNALRTSFGSTTRISQDFQGVMEQLYDVMYEFNFSLPPDYALVIRSLGSLEGTAKILDPEFKVIESAYPFVIGRLLADPSPDMRKILRELVICNDGSIRWNRLERLVAAISEQASATSGDSPEDKTLKKSSELKSFDMHSVVSATEDLLLFILSEKGQRVRVFLLQDIIRVVDIFLEVEALELNKTINLKTEEGTMKRVSNGFKGLSEAVKLAPGMWISMLLRMSRKSEVHSYALDIVSALSTHFGHKVPHTCWILLSKLLHHNKSQ

SEQ ID NO: 79096 - protein, 576 aa, Arabidopsis thaliana
  peptide (1)..(576): Ceres Seq. ID no. 12648840
MRKRAVKLGQALSTRPDILPSIYCQELSKLQDQIPPFPTTVAMRCIEEQLGAPVSKLFADISLKPVAAASLGQVYKAHLHSGQLVAVKVQRPGMSLILTRDALLFKMIGGQLKRFAKARKDLLVAVNEMVRHMFDEIDYVLEAKNAERFASLYSFDSGNEQIDDNAGPRNMSRNHRAENIKVPKIYWNFTRTAVLTMEWIDGIKLTDEIKLKRASLDRRDLIDQGLSCSLKQLLEVGFFHADPHPGNLVATKEGSLVYFDFGMMGNIPRHYRVGLIQILVHFVNRDSLSLANDFLSLGFLPEGVDIQAVSNALRTSFGSTTRISQDFQGVMEQLYDVMYEFNFSLPPDYALVIRSLGSLEGTAKILDPEFKVIESAYPFVIGRLLADPSPDMRKILRELVICNDGSIRWNRLERLVAAISEQASATSGDSPEDKTLKKSSELKSFDMHSVVSATEDLLLFILSEKGQRVRVFLLQDIIRVVDIFLEVEALELNKTINLKTEEGTMKRVSNGFKGLSEAVKLAPGMWISMLLRMSRKSEVHSYALDIVSALSTHFGHKVPHTCWILLSKLLHHNKSQ

SEQ ID NO: 79097 - protein, 534 aa, Arabidopsis thaliana; identical to SEQ ID NO: 74171
  peptide (1)..(534): Ceres Seq. ID no. 12648841

SEQ ID NO: 79098 - DNA, 1380 bp, Arabidopsis thaliana
  misc_feature (1)..(1380): Ceres Seq. ID no. 12648871
  misc_feature (1)..(1380): Ortholog of  Ceres SEQ ID NO 13663419 as cited in SEQ ID NO 66561
atgagcttgacactagagtttctgcttcttctgattgtacttatcttgagtcaccatgctcattctggctctattgtcaaattccttcctggttttgaaggcccccttccttttgaactcgaaaccgggtacattggtattggtgaggaagaggaagtgcaattattctactatttcatcaaatctgagaagaatccagaagaagaccctcttcttctatggttaagtggaggacctggatgttcctctcttactggccttctttttgagaatggaccggtggctttgaagttcgaggtttacaatggaagtgttccatctttggtctctactacatattcatggacaaagatggcgaacataatattcttggatcagccagttggatctggcttctcctattcaagaactccacttgttgataaaattagtgacactggtgaagttaagaggatttatgagtttcttcaaaagtggttaagcaaacatcaacaatttttttccaaccctttttacgttggtggagattcttattcaggtatgattgttccacccctagttcaagaaatcggaaaaggaaattatcaaataaatctacagggttatatcctcggaaacccgataacagatactgaatctgaacaaaactatcagattccatatgctcatggaatggcattaatctctgatgaactatacaagtcaatggagagaatctgcaaaggaaattatgtgaaagtggattcacttaacacaaaatgctataaactaatcaaagattatcaaaagtgtattcataaactgaataagtatcatatattattacctgactgcgatataacatctcctgattgctttttatataggtatactctcataaccttttgggccaacaacaagagcgttcgcgaagctctgcaagtcaataagggaagtataggaaaatgggtacaatgtaactataaaaatatttcctacaattacgatatcaagagcagcgtcgcataccatatgaagaatagtattgatggctaccgatctcttatctacaatggtgaccatgatatgatggtgcctttccttgcaactcaagcctggataagatctctcaattattccatcactgatgattggaagccttggatgataaacgatcaaattgctggatacacgagaagttattccaataagatgacatttgctactatcaaaggaagtggacacacagcagagtataaaccaaaagagacctctatcatgttcaaaagatggatcagtgcccagcctttgtaaaagaggatgatggtctttgcgtatgtagaataaaactatgtaacataaaaaatgtttgtatacaatataatcatctacttggtaatt

SEQ ID NO: 79099 - protein, 430 aa, Arabidopsis thaliana
  peptide (1)..(430): Ceres Seq. ID no. 12648872
MSLTLEFLLLLIVLILSHHAHSGSIVKFLPGFEGPLPFELETGYIGIGEEEEVQLFYYFIKSEKNPEEDPLLLWLSGGPGCSSLTGLLFENGPVALKFEVYNGSVPSLVSTTYSWTKMANIIFLDQPVGSGFSYSRTPLVDKISDTGEVKRIYEFLQKWLSKHQQFFSNPFYVGGDSYSGMIVPPLVQEIGKGNYQINLQGYILGNPITDTESEQNYQIPYAHGMALISDELYKSMERICKGNYVKVDSLNTKCYKLIKDYQKCIHKLNKYHILLPDCDITSPDCFLYRYTLITFWANNKSVREALQVNKGSIGKWVQCNYKNISYNYDIKSSVAYHMKNSIDGYRSLIYNGDHDMMVPFLATQAWIRSLNYSITDDWKPWMINDQIAGYTRSYSNKMTFATIKGSGHTAEYKPKETSIMFKRWISAQPL

SEQ ID NO: 79100 - protein, 313 aa, Arabidopsis thaliana; identical to SEQ ID NO: 72663
  peptide (1)..(313): Ceres Seq. ID no. 12648873

SEQ ID NO: 79101 - protein, 250 aa, Arabidopsis thaliana; identical to SEQ ID NO: 29009
  peptide (1)..(250): Ceres Seq. ID no. 12648874

SEQ ID NO: 79102 - DNA, 1303 bp, Arabidopsis thaliana
  misc_feature (1)..(1303): Ceres Seq. ID no. 12648902
  misc_feature (1)..(1303): Ortholog of  Ceres SEQ ID NO 13598532 as cited in SEQ ID NO 65204
  misc_feature (1)..(1303): Ortholog of  Ceres SEQ ID NO 13656849 as cited in SEQ ID NO 65764
  misc_feature (1)..(1303): Ortholog of  Ceres SEQ ID NO 13655298 as cited in SEQ ID NO 68914
acaacgcacttcttctgttgtcatcatcatcgtccacttgaaacaaacctgacgatcaaagagaagattgcgatcgcaaatttctccattttttcagatcgaaattgatgtcgaaagctagggtttatacagatgttaacgttgttcgtcctaaagagtattgggactacgagtctctcgttgttcaatggggtcatcaagatgattatgaggttgtgagaaaagttggtagaggaaaatacagtgaagttttcgaaggcaaaaacgtcaatacgaatgagcgttgcgttatcaagatcctcaaacccgtaaaaaagaagaagataaagagagagatcaaaatacttcagaacctatgtggtggaccaaatattgttaagctgtatgatattgttagagatgagcactccaaaacacctagcttggtatttgagtttgtcaacagtgtggactttaaagtattgtatccaacattgactgattacgatatccggtactatatttatgagcttctgaaggcattggatttctgtcactctcaaggaataatgcatagggatgttaagcctcataatgtcatgatagatcatcagctgcgtaaacttcgtctgatagattggggccttgctgagttttaccatcccggaaaagagtataatgttcgcgtggcctcgagatacttcaagggtcccgagcttttagttgatctacaggattatgactattctttagacatgtggagtcttggttgcatgtttgctggcatgatattccgtaaggaaccgttcttttatggccatgataatcatgatcaacttgtcaaaattgccaaggtgttgggaaccaatgagttagatcattacctaaacaaatatcagctagatcttgaccctcaactggaagcacttgttggaagacatgtccccaaaccatggtccaagtttatcaacgcggacaaccaacatttggtctcacctgaggcaattgattttctcgataagcttcttcagtatgatcatcaagacagattaaccgcaagagaagccatggatcatccatacttcgctcaagttaaagccgcagagagcagcagactacgaactcagtaaaaccgaagcttgattgatgatgcttactactatttttcaaccaaaaactttgtaatgattttgttgtatcaaaattgtggtaatctttactttcatagaaacataatcaacagcgaaaagaagccaacttatattaaaaaaaaaggttccacacaaagcttcattatataatcatagcaagagacttattgttg

SEQ ID NO: 79103 - protein, 333 aa, Arabidopsis thaliana; identical to SEQ ID NO: 24313
  peptide (1)..(333): Ceres Seq. ID no. 12648903

SEQ ID NO: 79104 - protein, 186 aa, Arabidopsis thaliana; identical to SEQ ID NO: 24314
  peptide (1)..(186): Ceres Seq. ID no. 12648904

SEQ ID NO: 79105 - protein, 176 aa, Arabidopsis thaliana; identical to SEQ ID NO: 24315
  peptide (1)..(176): Ceres Seq. ID no. 12648905

SEQ ID NO: 79106 - DNA, 984 bp, Arabidopsis thaliana
  misc_feature (1)..(984): Ceres Seq. ID no. 12648934
  misc_feature (1)..(984): Ortholog of  Ceres SEQ ID NO 14308536 as cited in SEQ ID NO 55469
  misc_feature (1)..(984): Ortholog of  Ceres SEQ ID NO 15179772 as cited in SEQ ID NO 64248
atggcggtggagctcatgactcggaattacatctccggcgtcggagctgatagcttcgccgttcaagaagcagctgcttcaggactcaaaagtatcgaaaatttcatcggtttaatgtctcgtgatagctttaactctgatcagccatcttcttcttccgcctccgcctccgcctccgccgccgcagatcttgaatcagctcgtaacacaacggcggacgcggctgtttcaaagtttaaaagagtcatatctctcttagatcgaactcgaaccggacacgcccggtttagacgtgctccggttcatgttatttctccggttcttttacaagaagaaccaaaaacgacgccgtttcagtctcctcttcctcctccgccgcaaatgatccgaaaaggttcgttttcttcatcgatgaaaacgattgatttctcatctctctcctctgtaacaacggaatcagacaaccagaagaagattcatcatcatcaacgtccctctgaaacggcgccgtttgcgtctcaaactcaaagcctctccacgacggtctcgtctttctcaaaatcaacaaagagaaaatgtaactctgagaatcttctcaccggaaaatgcgcttccgcttcttcctccggtcgttgtcattgctcgaagaaaagaaagataaaacagaggagaataattagggttccggcgataagtgcaaaaatgtccgatgtaccaccggacgattattcatggaggaaatacggacaaaaaccaattaaaggatctccacatccaagaggatattataagtgtagtagcgtaagaggttgtccagcacgtaaacatgttgagagagcagctgatgattcgtccatgttgattgttacttatgaaggagatcataatcattctctctccgccgctgatctcgccggagccgccgttgctgatcttattttggaatcgtcttgaaaagaacaaatctttatttaaggcttttat

SEQ ID NO: 79107 - protein, 317 aa, Arabidopsis thaliana; identical to SEQ ID NO: 24612
  peptide (1)..(317): Ceres Seq. ID no. 12648935

SEQ ID NO: 79108 - protein, 312 aa, Arabidopsis thaliana; identical to SEQ ID NO: 24613
  peptide (1)..(312): Ceres Seq. ID no. 12648936

SEQ ID NO: 79109 - protein, 279 aa, Arabidopsis thaliana; identical to SEQ ID NO: 24614
  peptide (1)..(279): Ceres Seq. ID no. 12648937

SEQ ID NO: 79110 - DNA, 891 bp, Arabidopsis thaliana
  misc_feature (1)..(891): Ceres Seq. ID no. 12648946
  misc_feature (1)..(891): Ortholog of  Ceres SEQ ID NO 15180793 as cited in SEQ ID NO 0
atgttgtctcttctctctactctagtagccctcccctttctgtttctcatcccttgtctctttatcacaagctatatatgtttccctgtgttcttgacaaaactccttggactcatcaaattcaaagccgctcgagacgatgatgacaacgagaaacgtgatgaggcaacttgtgttgtccgagaggaggagctacaaagagagctgatgccgagacacgtgtcattcatactagatgggaaccggagatgggccaaacgagacggattgacgacggcacaaggccacgaggctggaactaaacgaattatagagatagccgaggtctgcttcgagttgggtattcatacagtctcagcttttgctttctccacagagaattggggaagagacaagtttgaggttaagtgcttaatgtctttgttcaaccactacctcaagtccaacattcaatactttcaaagaaaggaagttcgcgtttctgttatcgggaataaaacgaagatccctgaatctctcctcaaagaaatccatgagatagaggaagctaccaaggctacaagaataatagattacagcgggaaatttgatatcatgcatgcttgcaagagtcttgtgaagaaatcagaaaaagggttgatccgagaggaagatgtagacgaggcattgatcgagagagagcttctaacgaattgtagtgacttcccaagtcctgatttaatgattaggacaagtggagaacaaaggattagtaacttcttcttgtggcaacttgcttataccgagcttttctactcgccggtattgtggcctgatttcgataaggataagcttctagaggccctcgcttcgtatcagggcagggaaagacgatttggttgtcgcgtgtga

SEQ ID NO: 79111 - protein, 296 aa, Arabidopsis thaliana
  peptide (1)..(296): Ceres Seq. ID no. 12648947
MLSLLSTLVALPFLFLIPCLFITSYICFPVFLTKLLGLIKFKAARDDDDNEKRDEATCVVREEELQRELMPRHVSFILDGNRRWAKRDGLTTAQGHEAGTKRIIEIAEVCFELGIHTVSAFAFSTENWGRDKFEVKCLMSLFNHYLKSNIQYFQRKEVRVSVIGNKTKIPESLLKEIHEIEEATKATRIIDYSGKFDIMHACKSLVKKSEKGLIREEDVDEALIERELLTNCSDFPSPDLMIRTSGEQRISNFFLWQLAYTELFYSPVLWPDFDKDKLLEALASYQGRERRFGCRV

SEQ ID NO: 79112 - protein, 227 aa, Arabidopsis thaliana
  peptide (1)..(227): Ceres Seq. ID no. 12648948
MPRHVSFILDGNRRWAKRDGLTTAQGHEAGTKRIIEIAEVCFELGIHTVSAFAFSTENWGRDKFEVKCLMSLFNHYLKSNIQYFQRKEVRVSVIGNKTKIPESLLKEIHEIEEATKATRIIDYSGKFDIMHACKSLVKKSEKGLIREEDVDEALIERELLTNCSDFPSPDLMIRTSGEQRISNFFLWQLAYTELFYSPVLWPDFDKDKLLEALASYQGRERRFGCRV

SEQ ID NO: 79113 - protein, 158 aa, Arabidopsis thaliana
  peptide (1)..(158): Ceres Seq. ID no. 12648949
MSLFNHYLKSNIQYFQRKEVRVSVIGNKTKIPESLLKEIHEIEEATKATRIIDYSGKFDIMHACKSLVKKSEKGLIREEDVDEALIERELLTNCSDFPSPDLMIRTSGEQRISNFFLWQLAYTELFYSPVLWPDFDKDKLLEALASYQGRERRFGCRV

SEQ ID NO: 79114 - DNA, 1281 bp, Arabidopsis thaliana
  misc_feature (1)..(1281): Ceres Seq. ID no. 12648960
  misc_feature (1)..(1281): Ortholog of  Ceres SEQ ID NO 15171144 as cited in SEQ ID NO 60227
atgagaactgaagcacaagattcagtacctaaatcaaaccctaatccggaactaatcaaagaaaccccaaaggtctctctttacgaacaatgcagggaagagaggatcaaagagaatcttcagaggatgaacaatctgggtctcttaaatctctctcgcaaactcaaacccaagacccgacccgttaaaagatcttacggtaaccgtaattctgttcagaatccgactcctcctcttcagccttctcgccgatcttctcgattggagaacacaactccagttatctacactgatgggatcaatgagaagggcaagaaagcatctaaacgagagagtgttgtgattggtgaagggataagagctgagatttacacagaggaacatgagaagcttcttgggaatacagaaagaagctggacttgttttgttgatggctatgataagaatgggaaacggatttatgatccgtttaacggtaagacttgtcaccaatgcaggcagaagacgatggggcatcgtacacagtgcagtgaatgcaatttggttcaaggacagttctgtggtgattgtttgttcatgagatatggtgaacatgtgcttgaagctcttgagaatccagactggatttgtcccgcttgtcgcgggatctgcaattgcagtttgtgccggaataataaaggatgggttccaactggcccgatttacagaagggtcttaagttgtcttgtgccaccaaagcaagaacattcatgtgcacacaatggtgatgatcttccagatattcaggaaaggataggacaacactcaaatttggagacgaaaccagatagctacttgcttcatgtggatgagcagattccattggttgatgttcaggtcttgagttatcttgagacgccgaagcaagaacattcatgtgcccacattggtgatggtcttccaaaaattcaagaatggataggacaagacccgacttctgagacaaaaccagttagctacttgattcctatagatgatgatcaaacttcattggtggatgcgcaggtcatgtatcttgagacaccaaagcaagataaacaagaacattcatgtgcccacatcggtgatgatcttccagaaattcaacaagggacaggacaagactcgaatttggagacaagacttggggaaagtcagacccttgtggtcaaagctcgagtaacgagaagtaagaggaaagcggctctagaaccaaatccagatagcattggtggaagactaaggcagcgaagaaggacctaa

SEQ ID NO: 79115 - protein, 426 aa, Arabidopsis thaliana
  peptide (1)..(426): Ceres Seq. ID no. 12648961
MRTEAQDSVPKSNPNPELIKETPKVSLYEQCREERIKENLQRMNNLGLLNLSRKLKPKTRPVKRSYGNRNSVQNPTPPLQPSRRSSRLENTTPVIYTDGINEKGKKASKRESVVIGEGIRAEIYTEEHEKLLGNTERSWTCFVDGYDKNGKRIYDPFNGKTCHQCRQKTMGHRTQCSECNLVQGQFCGDCLFMRYGEHVLEALENPDWICPACRGICNCSLCRNNKGWVPTGPIYRRVLSCLVPPKQEHSCAHNGDDLPDIQERIGQHSNLETKPDSYLLHVDEQIPLVDVQVLSYLETPKQEHSCAHIGDGLPKIQEWIGQDPTSETKPVSYLIPIDDDQTSLVDAQVMYLETPKQDKQEHSCAHIGDDLPEIQQGTGQDSNLETRLGESQTLVVKARVTRSKRKAALEPNPDSIGGRLRQRRRT

SEQ ID NO: 79116 - protein, 384 aa, Arabidopsis thaliana
  peptide (1)..(384): Ceres Seq. ID no. 12648962
MNNLGLLNLSRKLKPKTRPVKRSYGNRNSVQNPTPPLQPSRRSSRLENTTPVIYTDGINEKGKKASKRESVVIGEGIRAEIYTEEHEKLLGNTERSWTCFVDGYDKNGKRIYDPFNGKTCHQCRQKTMGHRTQCSECNLVQGQFCGDCLFMRYGEHVLEALENPDWICPACRGICNCSLCRNNKGWVPTGPIYRRVLSCLVPPKQEHSCAHNGDDLPDIQERIGQHSNLETKPDSYLLHVDEQIPLVDVQVLSYLETPKQEHSCAHIGDGLPKIQEWIGQDPTSETKPVSYLIPIDDDQTSLVDAQVMYLETPKQDKQEHSCAHIGDDLPEIQQGTGQDSNLETRLGESQTLVVKARVTRSKRKAALEPNPDSIGGRLRQRRRT

SEQ ID NO: 79117 - protein, 257 aa, Arabidopsis thaliana
  peptide (1)..(257): Ceres Seq. ID no. 12648963
MGHRTQCSECNLVQGQFCGDCLFMRYGEHVLEALENPDWICPACRGICNCSLCRNNKGWVPTGPIYRRVLSCLVPPKQEHSCAHNGDDLPDIQERIGQHSNLETKPDSYLLHVDEQIPLVDVQVLSYLETPKQEHSCAHIGDGLPKIQEWIGQDPTSETKPVSYLIPIDDDQTSLVDAQVMYLETPKQDKQEHSCAHIGDDLPEIQQGTGQDSNLETRLGESQTLVVKARVTRSKRKAALEPNPDSIGGRLRQRRRT

SEQ ID NO: 79118 - DNA, 735 bp, Arabidopsis thaliana
  misc_feature (1)..(735): Ceres Seq. ID no. 12648971
  misc_feature (1)..(735): Ortholog of  Ceres SEQ ID NO 13638849 as cited in SEQ ID NO 52046
  misc_feature (1)..(735): Ortholog of  Ceres SEQ ID NO 13599613 as cited in SEQ ID NO 0
atgggctgtgccacggtgaaaacgcatctggaggctgtaggtcactgtgtgaccgcggtggatctagctgcatccggtataaatatgactagattggaagagattcagactttgaaggattactgcaaacctttgcttgagttactgaactcacttggctcggatgacgataaggtgattcttgttgcgcatagtatgggaggaatacctgctgctctcgcttctgacatattccctagtaagattgctactattgttttcttgacagcttttatgcccgacacaagaaacctacctgcttatgtttaccaaaagctaatcagaagcgttccacaagaaggatggttggacaccgtgtttggaacgtatgggaaacatgaatgtcctctagagtttgctctttttggaccaaagttcatggccaagaatttgtatcaactctctccggtccaagatcttgaattggcgaaaatgttggtgagagtaaaccccatcattacaaataatctggcagggacaagaagctttagtgaggaagggtacggtaccgttacacgtatatatattgtatgtggagaggacatggcggtacccgaggattaccagtggtggatgatcaagaactttccgccaaaagaagtaatggagatcaaatgtgcagatcatatggcaatgttctccaagcctcacaaactatgtgctcttctcgtggagattgcatgtaaatatgcctaa

SEQ ID NO: 79119 - protein, 244 aa, Arabidopsis thaliana
  peptide (1)..(244): Ceres Seq. ID no. 12648972
MGCATVKTHLEAVGHCVTAVDLAASGINMTRLEEIQTLKDYCKPLLELLNSLGSDDDKVILVAHSMGGIPAALASDIFPSKIATIVFLTAFMPDTRNLPAYVYQKLIRSVPQEGWLDTVFGTYGKHECPLEFALFGPKFMAKNLYQLSPVQDLELAKMLVRVNPIITNNLAGTRSFSEEGYGTVTRIYIVCGEDMAVPEDYQWWMIKNFPPKEVMEIKCADHMAMFSKPHKLCALLVEIACKYA

SEQ ID NO: 79120 - protein, 216 aa, Arabidopsis thaliana; identical to SEQ ID NO: 70428
  peptide (1)..(216): Ceres Seq. ID no. 12648973

SEQ ID NO: 79121 - protein, 179 aa, Arabidopsis thaliana; identical to SEQ ID NO: 70429
  peptide (1)..(179): Ceres Seq. ID no. 12648974

SEQ ID NO: 79122 - DNA, 1623 bp, Arabidopsis thaliana
  misc_feature (1)..(1623): Ceres Seq. ID no. 12649001
  misc_feature (1)..(1623): Ortholog of  Ceres SEQ ID NO 12607856 as cited in SEQ ID NO 55419
atgggatttgaagacaagaaaatgctgagacagagacataagcgttctaagagctgtactgttcctgagaagaaaaagcttgaagatgagaatagcattgattcttctctggatgcttctcaacgcctcaagctcgacttacctcgttgcggcgataaatcttttgaaatgaagaaggatctatcccctgatgtaaaattcaagagctctctgaagcaagagattcaagagcttgagaaaagattacagaaccagtttgatgtccgtggtgcgttagagaaggcattaggctataaaacaccatctcgagacatcaaaggcgactctactccaaagcctccaacagaattgatcaaggaaatcgcggtgttggagttagaagtttctcatttggaacagtaccttctatctttgtatcgtaaagcgtttgatcaacaaacatcttctgaggacatcgattcatgtgttcgtcgttgccagtcctctcttaatcaacgttccaccttcaataaccgaatatctccaccagaagactcggtattcgcgtgccactcccaaccattgtccatacatgaatacatacaaaatggatcaaatgatgcaagccttgcagaacacatgggaactcggatatctgatcacatattcatgactccaaacaagttatcagaggaaatgatcaagtgtgcatcagctatatattccaagctcgctgatccaccatcgataaaccacggtttctcatccccgagttcgtctccatcatcaacaagcgagttttcaccacaagaccagtatgatatgtggagtccaagcttcagaaaaaactcgtctttcgatgaccagtttgaattcagcggaccttatagctcaatgatcgaagtgtcacacattcatcgaaaccgtaaaagacgcgaccttgacctgatgaatcgaaacttcagcttacttcttaagcaactggaaagtgttgatccgagaaaactgactcatcaagagaaactggcgttctggattaacgtacataacgctcttgtgatgcatacatttctggcaaatgggattccacagaacaatgggaagcgatttttactactctccaagccagcttacaagataggaggtcgcatggtaagcttagaagcaatacaaagttatattcttcgtatcaagatgcctcgtcctggccagtggctgaagttattactcatacctaaaaaattcagaaccggagatgaacatcaagaatattccctcgagcattccgagcctctcttatactttgcactttgttcaggcaaccattctgaccctgcgattcgtgtttttacgcccaagggaatataccaagagctagaaaccgcaaaggaagagtacatccgcgcaacgtttggagtaaagaaagaccagaaactagtcttaccaaagatcattgagtcttttagcaaagactcaggtttaggtcaagcagcattgatggagatgattcaagaatgtctcccggaaacaatgaaaaaaaccataaagaaacttaactcagggagatcccgaaagagcattgtcgaatggacgcctcataatttcgtgtttcggtatttgatagccagagaacttgttagatga

SEQ ID NO: 79123 - protein, 540 aa, Arabidopsis thaliana
  peptide (1)..(540): Ceres Seq. ID no. 12649002
MGFEDKKMLRQRHKRSKSCTVPEKKKLEDENSIDSSLDASQRLKLDLPRCGDKSFEMKKDLSPDVKFKSSLKQEIQELEKRLQNQFDVRGALEKALGYKTPSRDIKGDSTPKPPTELIKEIAVLELEVSHLEQYLLSLYRKAFDQQTSSEDIDSCVRRCQSSLNQRSTFNNRISPPEDSVFACHSQPLSIHEYIQNGSNDASLAEHMGTRISDHIFMTPNKLSEEMIKCASAIYSKLADPPSINHGFSSPSSSPSSTSEFSPQDQYDMWSPSFRKNSSFDDQFEFSGPYSSMIEVSHIHRNRKRRDLDLMNRNFSLLLKQLESVDPRKLTHQEKLAFWINVHNALVMHTFLANGIPQNNGKRFLLLSKPAYKIGGRMVSLEAIQSYILRIKMPRPGQWLKLLLIPKKFRTGDEHQEYSLEHSEPLLYFALCSGNHSDPAIRVFTPKGIYQELETAKEEYIRATFGVKKDQKLVLPKIIESFSKDSGLGQAALMEMIQECLPETMKKTIKKLNSGRSRKSIVEWTPHNFVFRYLIARELVR

SEQ ID NO: 79124 - protein, 533 aa, Arabidopsis thaliana
  peptide (1)..(533): Ceres Seq. ID no. 12649003
MLRQRHKRSKSCTVPEKKKLEDENSIDSSLDASQRLKLDLPRCGDKSFEMKKDLSPDVKFKSSLKQEIQELEKRLQNQFDVRGALEKALGYKTPSRDIKGDSTPKPPTELIKEIAVLELEVSHLEQYLLSLYRKAFDQQTSSEDIDSCVRRCQSSLNQRSTFNNRISPPEDSVFACHSQPLSIHEYIQNGSNDASLAEHMGTRISDHIFMTPNKLSEEMIKCASAIYSKLADPPSINHGFSSPSSSPSSTSEFSPQDQYDMWSPSFRKNSSFDDQFEFSGPYSSMIEVSHIHRNRKRRDLDLMNRNFSLLLKQLESVDPRKLTHQEKLAFWINVHNALVMHTFLANGIPQNNGKRFLLLSKPAYKIGGRMVSLEAIQSYILRIKMPRPGQWLKLLLIPKKFRTGDEHQEYSLEHSEPLLYFALCSGNHSDPAIRVFTPKGIYQELETAKEEYIRATFGVKKDQKLVLPKIIESFSKDSGLGQAALMEMIQECLPETMKKTIKKLNSGRSRKSIVEWTPHNFVFRYLIARELVR

SEQ ID NO: 79125 - protein, 484 aa, Arabidopsis thaliana
  peptide (1)..(484): Ceres Seq. ID no. 12649004
MKKDLSPDVKFKSSLKQEIQELEKRLQNQFDVRGALEKALGYKTPSRDIKGDSTPKPPTELIKEIAVLELEVSHLEQYLLSLYRKAFDQQTSSEDIDSCVRRCQSSLNQRSTFNNRISPPEDSVFACHSQPLSIHEYIQNGSNDASLAEHMGTRISDHIFMTPNKLSEEMIKCASAIYSKLADPPSINHGFSSPSSSPSSTSEFSPQDQYDMWSPSFRKNSSFDDQFEFSGPYSSMIEVSHIHRNRKRRDLDLMNRNFSLLLKQLESVDPRKLTHQEKLAFWINVHNALVMHTFLANGIPQNNGKRFLLLSKPAYKIGGRMVSLEAIQSYILRIKMPRPGQWLKLLLIPKKFRTGDEHQEYSLEHSEPLLYFALCSGNHSDPAIRVFTPKGIYQELETAKEEYIRATFGVKKDQKLVLPKIIESFSKDSGLGQAALMEMIQECLPETMKKTIKKLNSGRSRKSIVEWTPHNFVFRYLIARELVR

SEQ ID NO: 79126 - DNA, 1044 bp, Arabidopsis thaliana
  misc_feature (1)..(1044): Ceres Seq. ID no. 12649019
  misc_feature (1)..(1044): Ortholog of  Ceres SEQ ID NO 12336358 as cited in SEQ ID NO 20733
  misc_feature (1)..(1044): Ortholog of  Ceres SEQ ID NO 12623467 as cited in SEQ ID NO 60951
  misc_feature (1)..(1044): Ortholog of  Ceres SEQ ID NO 14309133 as cited in SEQ ID NO 0
atggcgatgaggaagcttttatcgaagaaactcttcaatatcacgaatgttgcttcacagagtcttatgaattgtcgcatttcgtcttcttcgttagccgtacgaaccagagttccgaatgattcaacagatacaaccaaaatcgcaccggagcctggagatttggcgatgtcgcgaaggttcatgcataacagtgctatgattaggccggcggagattatgcagatgccggtgggagagagtttgattgagaaactccgtgagattgatggaagcaaggatcggattcgattagacggactttctccgccggagagggagacgagtttgacggtggcggatacgaagaagctgcttagagcggcgcagatcgagattgtgaaatcgaagctaagagaaacgggaagaagctggatgccgtataaggagtttgttagcgtttgtggtgaagcttcttcagatccagatctcggatctaaaatcgcgaagatgcttgatgattcagcaaacgtcatcgttttgggagattccgtttgtattagacctgatcaggtactttcttcgttcttcttctctagccttttagttaccaaatccattgaaggactgcttcctttgccaaagatccataacccaaatgaccctcggagaatcgagtttaaagagcttgaagctgaaaaggcagtgatcgatgtgaaagctcacactttggtgcggaaagagctttgggctggtctcggttacttgatcctacagactgcggggttcatgaggctaacgttttgggaactctcgtgggacgtgatggagccaatctgtttctatgtcacgtccgtgtactttatggctggttacgcgtttttcctcaggacatcgaaagagccttcttttgaagggttttaccaaagcaggttcgaggcgaaacagagaaagttgatgaatgagtatgagtttgatctggagaggtataatgaactgaagaagctgttttgctctaagccttcggatcatgtttccaagattcttggagctatcaagagttaa

SEQ ID NO: 79127 - protein, 347 aa, Arabidopsis thaliana
  peptide (1)..(347): Ceres Seq. ID no. 12649020
MAMRKLLSKKLFNITNVASQSLMNCRISSSSLAVRTRVPNDSTDTTKIAPEPGDLAMSRRFMHNSAMIRPAEIMQMPVGESLIEKLREIDGSKDRIRLDGLSPPERETSLTVADTKKLLRAAQIEIVKSKLRETGRSWMPYKEFVSVCGEASSDPDLGSKIAKMLDDSANVIVLGDSVCIRPDQVLSSFFFSSLLVTKSIEGLLPLPKIHNPNDPRRIEFKELEAEKAVIDVKAHTLVRKELWAGLGYLILQTAGFMRLTFWELSWDVMEPICFYVTSVYFMAGYAFFLRTSKEPSFEGFYQSRFEAKQRKLMNEYEFDLERYNELKKLFCSKPSDHVSKILGAIKS

SEQ ID NO: 79128 - protein, 345 aa, Arabidopsis thaliana
  peptide (1)..(345): Ceres Seq. ID no. 12649021
MRKLLSKKLFNITNVASQSLMNCRISSSSLAVRTRVPNDSTDTTKIAPEPGDLAMSRRFMHNSAMIRPAEIMQMPVGESLIEKLREIDGSKDRIRLDGLSPPERETSLTVADTKKLLRAAQIEIVKSKLRETGRSWMPYKEFVSVCGEASSDPDLGSKIAKMLDDSANVIVLGDSVCIRPDQVLSSFFFSSLLVTKSIEGLLPLPKIHNPNDPRRIEFKELEAEKAVIDVKAHTLVRKELWAGLGYLILQTAGFMRLTFWELSWDVMEPICFYVTSVYFMAGYAFFLRTSKEPSFEGFYQSRFEAKQRKLMNEYEFDLERYNELKKLFCSKPSDHVSKILGAIKS

SEQ ID NO: 79129 - protein, 325 aa, Arabidopsis thaliana
  peptide (1)..(325): Ceres Seq. ID no. 12649022
MNCRISSSSLAVRTRVPNDSTDTTKIAPEPGDLAMSRRFMHNSAMIRPAEIMQMPVGESLIEKLREIDGSKDRIRLDGLSPPERETSLTVADTKKLLRAAQIEIVKSKLRETGRSWMPYKEFVSVCGEASSDPDLGSKIAKMLDDSANVIVLGDSVCIRPDQVLSSFFFSSLLVTKSIEGLLPLPKIHNPNDPRRIEFKELEAEKAVIDVKAHTLVRKELWAGLGYLILQTAGFMRLTFWELSWDVMEPICFYVTSVYFMAGYAFFLRTSKEPSFEGFYQSRFEAKQRKLMNEYEFDLERYNELKKLFCSKPSDHVSKILGAIKS

SEQ ID NO: 79130 - DNA, 717 bp, Arabidopsis thaliana
  misc_feature (1)..(717): Ceres Seq. ID no. 12649050
  misc_feature (1)..(717): Ortholog of  Ceres SEQ ID NO 12638221 as cited in SEQ ID NO 0
tttcttttttaatccctttgtttctctgtggtattcaacaaatttgtctcgaatttatagagctcgaagcttcaaggaagttataatggctagtgaagatgaatcgattgaacaaaaagctgctgctcgtaaagaggcacttaaagctctaagggcagctcaggaactgtctgagaccaaggaagacggagaggatgaagctgtcgaagaagatggtccagccatgaagtttagaaactatgttccccaagctaaggagcttcaggatggtaaactagcgccaccagagctacccaaattcgaagatccgatcgttgcacttccacctgctgtagagaagaaagaggacccatttgttaacatcgctccaaagaagccaaactgggacctccgaagagatgtgcagaagaagcttgataagctcgaaaggcggactcaaaaggcaatgcataaactcatggaggagcaagagaaagaacgtgagatggctgaagctgatggtaacaccatagaaagttgaaacccaacgacgtcatcaaagaaagccaccactgaacagtatattctactcgattttgtttaactgttaaagcattcgaagtgagtagaccatgtaaaatcctacagccattggcatagacatagtaggtttatcttcttgtgtgaatcaaagaaagtcgcaatttatttccgagtagaattaagtgcggtccggtt

SEQ ID NO: 79131 - protein, 172 aa, Arabidopsis thaliana
  peptide (1)..(172): Ceres Seq. ID no. 12649051
FFFNPFVSLWYSTNLSRIYRARSFKEVIMASEDESIEQKAAARKEALKALRAAQELSETKEDGEDEAVEEDGPAMKFRNYVPQAKELQDGKLAPPELPKFEDPIVALPPAVEKKEDPFVNIAPKKPNWDLRRDVQKKLDKLERRTQKAMHKLMEEQEKEREMAEADGNTIES

SEQ ID NO: 79132 - protein, 144 aa, Arabidopsis thaliana; identical to SEQ ID NO: 42293
  peptide (1)..(144): Ceres Seq. ID no. 12649052

SEQ ID NO: 79133 - protein, 98 aa, Arabidopsis thaliana; identical to SEQ ID NO: 39091
  peptide (1)..(98): Ceres Seq. ID no. 12649053

SEQ ID NO: 79134 - DNA, 1470 bp, Arabidopsis thaliana
  misc_feature (1)..(1470): Ceres Seq. ID no. 12649056
  misc_feature (1)..(1470): Ortholog of  Ceres SEQ ID NO 13597407 as cited in SEQ ID NO 64106
atggagggagagaatagtagcattgagaaaggattattattgataaggaaggaagagagtgcaaatacaactccatttcttgtcttcaccactttcatcattgtctctgcttccttctcctttggcgttgccttaggacatactgctggtacaatggcctccattatggaagatcttgatctttctatcacacaattttctgtatttggttcactattgacatttggaggaatgattggagcactatttagcgccacaattgcagattcatttggttgtaaaatgactttgtggatcactgaggtattctgcataagtggatggcttgcaattgcactagccaagaacattatttggctggacttgggacgattctttgtaggaattggagttggtctccttagttacgtggttcctgtatatatcgcagaaataactcctaaaactgtgcgaggcacttttacatttagtaatcagttattgcaaaattgtggagtcgcaacggcgtattaccttggaaatttcatgtcatggagaataatagccttaataggcatacttccatgcttgatacaacttgttgggttgtttttcgtccccgaatctccaagatggttggcaaaagaaggtcgtgacgaagaatgtgaggttgttcttcagaaactaagaggagatgaagcggatattgtgaaggaaactcaagaaatcttgatttctgttgaggcttctgcgaatatcagcatgcgtagtcttttcaaaaagaaatatactcatcaacttacaattggtataggtttgatgcttctgcaacagttaagtgggagtgcaggattaggttattacactggtagcgtatttgatcttgccggatttccttctcggattgggatgacggtgttgtctattgtcgtggtaccaaaagctatattgggtctgatacttgtggaacgatggggaagaagaccgcttcttatggcatcggcatttggtttatgtttaggttgtatctctcttgcattagcgtttggattgaaaggtgtccctggggttaatgtaaatgttactcccactttggcatttataggaataatggtaagtaagaaccaattcagtaatttatattatcttcaaaataaaaaatcatacttttttgttctttgtaaatgttattttttagtaataacattcgtaatgatgttcgcagctggattaggagccctaccatggatcataatgtctgagatatttccgatggacatgaaagtagtagctgggagtttagtaagcataacaaattggtttactggttggatcgtcagctactgtttcaattttatgcttctttggagcccaaccggaacttttatcatatttgctacgataagtggagcaacggttgtattcgcatggtgtttagtgcctgagactcgaggattgactttagaagaaatccaacgacgtgctaattaa

SEQ ID NO: 79135 - protein, 489 aa, Arabidopsis thaliana
  peptide (1)..(489): Ceres Seq. ID no. 12649057
MEGENSSIEKGLLLIRKEESANTTPFLVFTTFIIVSASFSFGVALGHTAGTMASIMEDLDLSITQFSVFGSLLTFGGMIGALFSATIADSFGCKMTLWITEVFCISGWLAIALAKNIIWLDLGRFFVGIGVGLLSYVVPVYIAEITPKTVRGTFTFSNQLLQNCGVATAYYLGNFMSWRIIALIGILPCLIQLVGLFFVPESPRWLAKEGRDEECEVVLQKLRGDEADIVKETQEILISVEASANISMRSLFKKKYTHQLTIGIGLMLLQQLSGSAGLGYYTGSVFDLAGFPSRIGMTVLSIVVVPKAILGLILVERWGRRPLLMASAFGLCLGCISLALAFGLKGVPGVNVNVTPTLAFIGIMVSKNQFSNLYYLQNKKSYFFVLCKCYFLVITFVMMFAAGLGALPWIIMSEIFPMDMKVVAGSLVSITNWFTGWIVSYCFNFMLLWSPTGTFIIFATISGATVVFAWCLVPETRGLTLEEIQRRAN

SEQ ID NO: 79136 - protein, 438 aa, Arabidopsis thaliana
  peptide (1)..(438): Ceres Seq. ID no. 12649058
MASIMEDLDLSITQFSVFGSLLTFGGMIGALFSATIADSFGCKMTLWITEVFCISGWLAIALAKNIIWLDLGRFFVGIGVGLLSYVVPVYIAEITPKTVRGTFTFSNQLLQNCGVATAYYLGNFMSWRIIALIGILPCLIQLVGLFFVPESPRWLAKEGRDEECEVVLQKLRGDEADIVKETQEILISVEASANISMRSLFKKKYTHQLTIGIGLMLLQQLSGSAGLGYYTGSVFDLAGFPSRIGMTVLSIVVVPKAILGLILVERWGRRPLLMASAFGLCLGCISLALAFGLKGVPGVNVNVTPTLAFIGIMVSKNQFSNLYYLQNKKSYFFVLCKCYFLVITFVMMFAAGLGALPWIIMSEIFPMDMKVVAGSLVSITNWFTGWIVSYCFNFMLLWSPTGTFIIFATISGATVVFAWCLVPETRGLTLEEIQRRAN

SEQ ID NO: 79137 - protein, 434 aa, Arabidopsis thaliana
  peptide (1)..(434): Ceres Seq. ID no. 12649059
MEDLDLSITQFSVFGSLLTFGGMIGALFSATIADSFGCKMTLWITEVFCISGWLAIALAKNIIWLDLGRFFVGIGVGLLSYVVPVYIAEITPKTVRGTFTFSNQLLQNCGVATAYYLGNFMSWRIIALIGILPCLIQLVGLFFVPESPRWLAKEGRDEECEVVLQKLRGDEADIVKETQEILISVEASANISMRSLFKKKYTHQLTIGIGLMLLQQLSGSAGLGYYTGSVFDLAGFPSRIGMTVLSIVVVPKAILGLILVERWGRRPLLMASAFGLCLGCISLALAFGLKGVPGVNVNVTPTLAFIGIMVSKNQFSNLYYLQNKKSYFFVLCKCYFLVITFVMMFAAGLGALPWIIMSEIFPMDMKVVAGSLVSITNWFTGWIVSYCFNFMLLWSPTGTFIIFATISGATVVFAWCLVPETRGLTLEEIQRRAN

SEQ ID NO: 79138 - DNA, 2385 bp, Arabidopsis thaliana
  misc_feature (1)..(2385): Ceres Seq. ID no. 12649092
  misc_feature (1)..(2385): Ortholog of  Ceres SEQ ID NO 14307510 as cited in SEQ ID NO 54687
atgtcgcgaaccagaaaatctcagtctaagcactgtggcagctccattttcgaggagtggatggaaagtagccgagaaaggaaacttgactctgataaagatactaccttgttgatggatatggaaagggctggcgaaatggaggctccgcggaaggggaaaagagtctacaagaaaagagtgaaagtcgaagaagcagaatgtaatgattctgatgacaatggagaagcatgcagtgccacacaagggctcagaagtaaatcacaaagacgaaaggctgctattgaagcctcaagagagaaatactcaccgcgcagcccaaagaaaagagatgacaaacatacttccggagcttttgatgccctgcaagcattggccgaattgtcagcttcaatgcttccagcaaatttgatggagtcagaattatctgctcagttgaaggaagaaagaacagaatacgacatggacgagaaatctagcacaccagaagctacttccacaagcagtcatggggaaaaagcaaatgtagagccagatgatagtctccttcatgcaatttcttctgttgagaatgctaacaagagaaagtcaaaaccttcaaggctggtatccactgattgtgatgatgttcccacagggaagctacaaccacaaactagtggcagtttaagaaaacgtaaaccaaaggtactaggggatgaagctccagcagagtttagtcagaacaaatccataaacaagaaggaattgcctcaagatgagaataatatgaagtctttggttaaaacaaaacgcgctggtcaagttccggctcagtcaaaacagatgaaaactgttaaggcgttggaggaatctgctataacaagtgataagaaaagacctgggatggatatagtagcgtcacctaaacaagtttctgactcgggtccaaccagtttatcgcagaaacctccaaacaggcgaaagaagagtctgcagaaaagcttacaagaaaaggctaaatcttctgaaaccactcataaagctgcacgtagttccagatctctttcagaacaagagttgttgttaaaggataagcttgctacttctctgtcgtttccctttgcacgtcgaaggtgcatatttgaatggttttatagtgctatcgaccatccctggttttcaaagatggagtttgtcgattacctaaatcacgtggggcttggtcacattccaagacttactcgtcttgaatggagcgtcattaaaagttctcttggtagaccacgaagattctctgagagatttttacatgaagagcgggagaaacttaaacagtaccgcgaatctgtgcgaaagcattatacagagcttcgaacgggtgctagggaggggcttcctacagatttggctcggccattagcagttgggaacagagtcattgccatccatcccaaaacacgggagattcatgatggaaaaattctcactgttgatcataacaaatgcaatgttctcttcgatgacttgggcgttgagttggttatggacattgattgcatgcctttaaatccactggaatacatgccagagggtctaaggaggcaaattgataagtgcttgtctatgaagaaagaagcacagctaagcgggaatacaaaccttggtgtgtctgtgctattccctccttgcggacttgaaaatgtcagcttttccatgaatcctcctctgaatcagggtgatatgattgctcccattctgcatggtaaagtatcaagcaacactagtagtccacggcagactaatcattcatatatcacaacttataacaaagcaaaagaagctgagattcaacgggcacaagcgctacagcatgctttagatgaaaaggaaatggagccagagatgctagaaattgtcaagggttcaaaaacaagagcgcaagcaatggtggatgcagctataaaggctgcatcatctgtgaaggaaggggaagatgtgaacacaatgatccaagaagccttagagttggttggcaaaaatcagctattacgcagctctatggtcaaacatcacgagcatgtaaatggcagtatagagcatcatcacaacccatctccttcaaatggatcagagcctgtggctaacaacgatttaaactcacaagatggttcagagaaaaacgctcaaatgccttcagagcttatcacctcctgtgttgccacttggctcatgattcagatgtgcacggagagacagtaccctccagctgatgtcgcacagcttatagacgcagcagtcacaagcttgcagccacgatgcccacagaacctaccgatctacagagaaatccaaacgtgcatgggacggatcaagactcaaatcatgtcccttgtaccaacttga

SEQ ID NO: 79139 - protein, 794 aa, Arabidopsis thaliana
  peptide (1)..(794): Ceres Seq. ID no. 12649093
MSRTRKSQSKHCGSSIFEEWMESSRERKLDSDKDTTLLMDMERAGEMEAPRKGKRVYKKRVKVEEAECNDSDDNGEACSATQGLRSKSQRRKAAIEASREKYSPRSPKKRDDKHTSGAFDALQALAELSASMLPANLMESELSAQLKEERTEYDMDEKSSTPEATSTSSHGEKANVEPDDSLLHAISSVENANKRKSKPSRLVSTDCDDVPTGKLQPQTSGSLRKRKPKVLGDEAPAEFSQNKSINKKELPQDENNMKSLVKTKRAGQVPAQSKQMKTVKALEESAITSDKKRPGMDIVASPKQVSDSGPTSLSQKPPNRRKKSLQKSLQEKAKSSETTHKAARSSRSLSEQELLLKDKLATSLSFPFARRRCIFEWFYSAIDHPWFSKMEFVDYLNHVGLGHIPRLTRLEWSVIKSSLGRPRRFSERFLHEEREKLKQYRESVRKHYTELRTGAREGLPTDLARPLAVGNRVIAIHPKTREIHDGKILTVDHNKCNVLFDDLGVELVMDIDCMPLNPLEYMPEGLRRQIDKCLSMKKEAQLSGNTNLGVSVLFPPCGLENVSFSMNPPLNQGDMIAPILHGKVSSNTSSPRQTNHSYITTYNKAKEAEIQRAQALQHALDEKEMEPEMLEIVKGSKTRAQAMVDAAIKAASSVKEGEDVNTMIQEALELVGKNQLLRSSMVKHHEHVNGSIEHHHNPSPSNGSEPVANNDLNSQDGSEKNAQMPSELITSCVATWLMIQMCTERQYPPADVAQLIDAAVTSLQPRCPQNLPIYREIQTCMGRIKTQIMSLVPT

SEQ ID NO: 79140 - protein, 774 aa, Arabidopsis thaliana
  peptide (1)..(774): Ceres Seq. ID no. 12649094
MESSRERKLDSDKDTTLLMDMERAGEMEAPRKGKRVYKKRVKVEEAECNDSDDNGEACSATQGLRSKSQRRKAAIEASREKYSPRSPKKRDDKHTSGAFDALQALAELSASMLPANLMESELSAQLKEERTEYDMDEKSSTPEATSTSSHGEKANVEPDDSLLHAISSVENANKRKSKPSRLVSTDCDDVPTGKLQPQTSGSLRKRKPKVLGDEAPAEFSQNKSINKKELPQDENNMKSLVKTKRAGQVPAQSKQMKTVKALEESAITSDKKRPGMDIVASPKQVSDSGPTSLSQKPPNRRKKSLQKSLQEKAKSSETTHKAARSSRSLSEQELLLKDKLATSLSFPFARRRCIFEWFYSAIDHPWFSKMEFVDYLNHVGLGHIPRLTRLEWSVIKSSLGRPRRFSERFLHEEREKLKQYRESVRKHYTELRTGAREGLPTDLARPLAVGNRVIAIHPKTREIHDGKILTVDHNKCNVLFDDLGVELVMDIDCMPLNPLEYMPEGLRRQIDKCLSMKKEAQLSGNTNLGVSVLFPPCGLENVSFSMNPPLNQGDMIAPILHGKVSSNTSSPRQTNHSYITTYNKAKEAEIQRAQALQHALDEKEMEPEMLEIVKGSKTRAQAMVDAAIKAASSVKEGEDVNTMIQEALELVGKNQLLRSSMVKHHEHVNGSIEHHHNPSPSNGSEPVANNDLNSQDGSEKNAQMPSELITSCVATWLMIQMCTERQYPPADVAQLIDAAVTSLQPRCPQNLPIYREIQTCMGRIKTQIMSLVPT

SEQ ID NO: 79141 - protein, 756 aa, Arabidopsis thaliana
  peptide (1)..(756): Ceres Seq. ID no. 12649095
MDMERAGEMEAPRKGKRVYKKRVKVEEAECNDSDDNGEACSATQGLRSKSQRRKAAIEASREKYSPRSPKKRDDKHTSGAFDALQALAELSASMLPANLMESELSAQLKEERTEYDMDEKSSTPEATSTSSHGEKANVEPDDSLLHAISSVENANKRKSKPSRLVSTDCDDVPTGKLQPQTSGSLRKRKPKVLGDEAPAEFSQNKSINKKELPQDENNMKSLVKTKRAGQVPAQSKQMKTVKALEESAITSDKKRPGMDIVASPKQVSDSGPTSLSQKPPNRRKKSLQKSLQEKAKSSETTHKAARSSRSLSEQELLLKDKLATSLSFPFARRRCIFEWFYSAIDHPWFSKMEFVDYLNHVGLGHIPRLTRLEWSVIKSSLGRPRRFSERFLHEEREKLKQYRESVRKHYTELRTGAREGLPTDLARPLAVGNRVIAIHPKTREIHDGKILTVDHNKCNVLFDDLGVELVMDIDCMPLNPLEYMPEGLRRQIDKCLSMKKEAQLSGNTNLGVSVLFPPCGLENVSFSMNPPLNQGDMIAPILHGKVSSNTSSPRQTNHSYITTYNKAKEAEIQRAQALQHALDEKEMEPEMLEIVKGSKTRAQAMVDAAIKAASSVKEGEDVNTMIQEALELVGKNQLLRSSMVKHHEHVNGSIEHHHNPSPSNGSEPVANNDLNSQDGSEKNAQMPSELITSCVATWLMIQMCTERQYPPADVAQLIDAAVTSLQPRCPQNLPIYREIQTCMGRIKTQIMSLVPT

SEQ ID NO: 79142 - DNA, 5043 bp, Arabidopsis thaliana
  misc_feature (1)..(5043): Ceres Seq. ID no. 12649238
  misc_feature (1)..(5043): Ortholog of  Ceres SEQ ID NO 12586556 as cited in SEQ ID NO 64667
  misc_feature (1)..(5043): Ortholog of  Ceres SEQ ID NO 13660894 as cited in SEQ ID NO 67475
atggaaataaacaagtttcgtgctctttcgcggcgagctcagcagctacattacacatccttgaatggacttaaacgaagatgcaacaacgcacacggtgcagctaattttcactcgttgaagagagctacacaaacccaaatccagaaatcgcagaccaaacctctccttaaatgtggagactcggatataaaagagtggaacgttgctataagcagctacatgcgtactggaagatgcaacgaagcgcttcgtgtcttcaaacgcatgcctaggtggagttccgtttcttataacggtatgatttctggttatttgagaaacggtgagtttgaactcgcccggaagttgttcgatgaaatgcctgaacgagatttagtttcctggaatgtgatgattaaagggtatgtacggaacaggaatcttgggaaagcgagggaattgtttgagataatgcctgagagagatgtttgttcgtggaataccatgttgtcgggttacgctcagaatggttgtgttgatgatgcaaggagtgtttttgatcgaatgcctgagaagaacgatgtatcgtggaatgcattgctctctgcttatgttcagaatagtaagatggaggaggcttgtattatgaatgtgagggatgtggtctcatggaatacgatcatcactggttatgcacagagcgggaaaatcgatgaggcgcggcagctatttgatgagtctcctgttcaagatgtctttacatggacagcaatggtgtcaggatatatacaaaaccggatggtggaagaagcgagagaattattcgacaaaatgccagagagaaacgaagtgtcatggaatgccatgcttgcaggatatgtgcagggcgagagaatggagatggcaaaggaattgtttgatgttatgccttgtagaaatgttagtacatggaacacgatgataactggatatgctcagtgtgggaaaatttctgaagctaagaacctttttgataaaatgccaaagagagatccggtctcttgggcagctatgattgcagggtattcgcaaagcggacacagctttgaagctcttcgtttgtttgtacaaatggagagggagggaggtagattgaatcggtcttcgttttcatctgctctaagcacatgtgcagacgttgttgctctcgagctcgggaagcaattgcatggacgattagttaaaggtgggtatgagactgggtgctttgttgggaatgcgcttttgttgatgtattgcaaatgtggaagcatagaagaagctaatgacttgtttaaggagatggctgggaaggacattgtctcttggaacacaatgattgcaggttactcaaggcacgggttcggagaagtggctttaaggttcttcgagtcgatgaagagagaaggactgaagccagatgatgctaccatggttgcggtattatctgcatgcagtcacacaggacttgttgacaaaggcaggcaatatttctatacgatgactcaagactatggcgtaatgcctaactcacagcactatgcttgcatggttgatcttcttggtcgagctgggcttctagaagatgctcacaatctaatgaagaacatgccctttgagccagacgctgcaatttggggaactttacttggtgcaagcagagttcatggaaacacagagctagccgaaacagctgcagataagatatttgcaatggagcctgaaaattccggtatgtatgttcttctctctaatctatacgcttcttcgggtcgatggggagatgttggtaaactacgagtgagaatgcgggataaaggggtgaagaaagttccagggtacagttggattgaaattcagaacaagactcatactttctcggttggggatgagtttcatcctgagaaagacgagatctttgcatttttggaggagctggatttgagaatgaagaaagcagggtatgtttcaaagacgagtgtggttcttcatgatgtggaggaagaagagaaggagcgtatggttcggtaccatagcgagagactggctgtagcttatgggataatgcgtgtgtcttcagggagaccgatccgtgtgataaagaatctgcgtgtatgtgaggattgtcacaacgccatcaagtatatggccagaatcacagggagactgattatcttgagggataataacaggtttcaccattttaaggatggttcatgttcttgcggagccatttataaacaacactcgagaaaacgcttgagaagacgtattcaacgttgggttggttccatggatcctcccacccaaagccataactcggtccgtactgttccaggctcgaatcatagccacaccgatttgattatctcatcgttcctttcgtttccagattcctctccgatctccattagcaattccttcgatcgagtccttgatagagctctcgcctccgcttccgctgatgaatccgttcaggatcgtctcgtcgatcgtactctcgaactcgcgtcgcttcttctcgattccactaggcgttgcttccgtaagcgagcttctgttcacaattccaattcctggtccctccctccagaacttaccattaaggtcttttcgatgcttgatacaaagtctatgatgcaagcagctgtgtgctgcaccatgttcaataaatgtgcaatggaccgtttatgttactcccacatcgacctgacaacgtctgctagatatgctgataaaggagttgtgtctactatgatcaatcgggctggtaaagaactcagatccctgaaacttggtcgtgttgttcgtacagctggatctgattctgctgcacctttgcttagcggatcttgtctttccccactagcatataatcatggttttcttgggagtcgcttgagaagcctacggctttacaatctcagacctataaaatacaggtccttatgcgatgcgttgtcagtttgtccaaatatcactgatctgaggattgtgggattgtataacttaaccgaggagctatttaattcattgacaaaaaaatgccgcttaatagagcacctgttcttagagacctacggttatccacgtacgttagagagtaaagcaggatcatccttagtagagtttgtgaccaattgccccaacttaacgtccctgacgctcatacgttttggactaaccgatgactgggcccgaaatcttgctgagagttgtcgtaaactgaagtacctgaatttgtcccgatcacctacaatcaagggtcgttttttgagggagttgggacttagctgcaaagaaaatctactcaagactctaatattgcgcagctgcccaaaactacaggagaaagaagtattggaattctgtaactcactactcacagggaacttcaaatccattcggcaaattgatgtttcaagtaacagtggattagcttcttcagacaggggcaagagatgtaacaaaccaaactttcctctggagaggctgaaagaagaaagatcagatgtcacatttgtggcggattttccatcaacaagttcaggaaagcgttatggtgtgtgcgatgaagaagagctgaggctgatagagatgatggaagctgaggacgatgaagtggacgaagaagatgactcggatgacgacactgacgatgtatcggatgaagatgagtcagaaaatgatgatgacatgggaatgggatttgatgtcgattatttgttaaaattaaaagcaagaccacatataaattactctgcaacacgtcccgaattcgtttccaaaaacgttatggatactccaaaccctaagcgacagtgctgtgatgctttctcctcgatccaaagacctaattctgttactatagctccagatttcaaccagaatgactttgattcgactatctcctcttttcttttgttgcctgattcgccatataattctattggttgctctttcgatagagtgcaaggtcaagttctcgactctgcttccaaagcttccggtgatgattccgtcagggatcgtctcatcgatcgtactggcaaactcgcatttcttcttcttgaatccaccaaacgattctctcgaatgcgcgctactcactacaattacaattcttggtccctccctgatgaactcaccattaaggtgttttcggggcttgatacaaagtctctgatgcaagcttcagcatgttgcaccatgttccgcaaatgttctatagaccctttatgttactctcacattgacttgaaaatgggtggcaaacgcatttttgatgaaattgtgtgtagtatgattcacaaagctggaacagaactcagatcccttaaactcggtcgtgttatatcttcacgcaaaggatcttcgttcacaagcacttgtcttacctcagtaattcgtaatcatgggaaaaaaattctagagcaagtactaaagacgctcactaaaaatcctcgcttgataatagaacgtttaatcttacagaacaatatcgacttaattcctgcatcaggtgtatcttcttcaaccgttgaggcatttgttacctcctgccccagcttaactacgctaaagctcgtaggttttggactaaaggaagaaacagtcagaaatcttgcggagggttttcctaagcttacatacatgaatctgactagaacgcctggaattagtggtcggtttttgagggatttgagaactatcggcagagacagtccaatcaagactctaatattgcgtgactgtcattgtctagataggagagaaatagggtattttttggattcacttctcaatggacacttcaaattcattcgacatattgacgtaacaagtgaagttgctgatgggggtagggaaattatcataggaaagtatattataacgaagctgaaagaacaaagatcagatgtcacaattgtagccaaatctattttaacttgcttttttttaacccatggaatgggattgtcatcaagtgcgcgatactgttcaagaaaaacttataactaccaaacacatttttaccaataa

SEQ ID NO: 79143 - protein, 1680 aa, Arabidopsis thaliana
  peptide (1)..(1680): Ceres Seq. ID no. 12649239
MEINKFRALSRRAQQLHYTSLNGLKRRCNNAHGAANFHSLKRATQTQIQKSQTKPLLKCGDSDIKEWNVAISSYMRTGRCNEALRVFKRMPRWSSVSYNGMISGYLRNGEFELARKLFDEMPERDLVSWNVMIKGYVRNRNLGKARELFEIMPERDVCSWNTMLSGYAQNGCVDDARSVFDRMPEKNDVSWNALLSAYVQNSKMEEACIMNVRDVVSWNTIITGYAQSGKIDEARQLFDESPVQDVFTWTAMVSGYIQNRMVEEARELFDKMPERNEVSWNAMLAGYVQGERMEMAKELFDVMPCRNVSTWNTMITGYAQCGKISEAKNLFDKMPKRDPVSWAAMIAGYSQSGHSFEALRLFVQMEREGGRLNRSSFSSALSTCADVVALELGKQLHGRLVKGGYETGCFVGNALLLMYCKCGSIEEANDLFKEMAGKDIVSWNTMIAGYSRHGFGEVALRFFESMKREGLKPDDATMVAVLSACSHTGLVDKGRQYFYTMTQDYGVMPNSQHYACMVDLLGRAGLLEDAHNLMKNMPFEPDAAIWGTLLGASRVHGNTELAETAADKIFAMEPENSGMYVLLSNLYASSGRWGDVGKLRVRMRDKGVKKVPGYSWIEIQNKTHTFSVGDEFHPEKDEIFAFLEELDLRMKKAGYVSKTSVVLHDVEEEEKERMVRYHSERLAVAYGIMRVSSGRPIRVIKNLRVCEDCHNAIKYMARITGRLIILRDNNRFHHFKDGSCSCGAIYKQHSRKRLRRRIQRWVGSMDPPTQSHNSVRTVPGSNHSHTDLIISSFLSFPDSSPISISNSFDRVLDRALASASADESVQDRLVDRTLELASLLLDSTRRCFRKRASVHNSNSWSLPPELTIKVFSMLDTKSMMQAAVCCTMFNKCAMDRLCYSHIDLTTSARYADKGVVSTMINRAGKELRSLKLGRVVRTAGSDSAAPLLSGSCLSPLAYNHGFLGSRLRSLRLYNLRPIKYRSLCDALSVCPNITDLRIVGLYNLTEELFNSLTKKCRLIEHLFLETYGYPRTLESKAGSSLVEFVTNCPNLTSLTLIRFGLTDDWARNLAESCRKLKYLNLSRSPTIKGRFLRELGLSCKENLLKTLILRSCPKLQEKEVLEFCNSLLTGNFKSIRQIDVSSNSGLASSDRGKRCNKPNFPLERLKEERSDVTFVADFPSTSSGKRYGVCDEEELRLIEMMEAEDDEVDEEDDSDDDTDDVSDEDESENDDDMGMGFDVDYLLKLKARPHINYSATRPEFVSKNVMDTPNPKRQCCDAFSSIQRPNSVTIAPDFNQNDFDSTISSFLLLPDSPYNSIGCSFDRVQGQVLDSASKASGDDSVRDRLIDRTGKLAFLLLESTKRFSRMRATHYNYNSWSLPDELTIKVFSGLDTKSLMQASACCTMFRKCSIDPLCYSHIDLKMGGKRIFDEIVCSMIHKAGTELRSLKLGRVISSRKGSSFTSTCLTSVIRNHGKKILEQVLKTLTKNPRLIIERLILQNNIDLIPASGVSSSTVEAFVTSCPSLTTLKLVGFGLKEETVRNLAEGFPKLTYMNLTRTPGISGRFLRDLRTIGRDSPIKTLILRDCHCLDRREIGYFLDSLLNGHFKFIRHIDVTSEVADGGREIIIGKYIITKLKEQRSDVTIVAKSILTCFFLTHGMGLSSSARYCSRKTYNYQTHFYQ

SEQ ID NO: 79144 - protein, 1606 aa, Arabidopsis thaliana
  peptide (1)..(1606): Ceres Seq. ID no. 12649240
MRTGRCNEALRVFKRMPRWSSVSYNGMISGYLRNGEFELARKLFDEMPERDLVSWNVMIKGYVRNRNLGKARELFEIMPERDVCSWNTMLSGYAQNGCVDDARSVFDRMPEKNDVSWNALLSAYVQNSKMEEACIMNVRDVVSWNTIITGYAQSGKIDEARQLFDESPVQDVFTWTAMVSGYIQNRMVEEARELFDKMPERNEVSWNAMLAGYVQGERMEMAKELFDVMPCRNVSTWNTMITGYAQCGKISEAKNLFDKMPKRDPVSWAAMIAGYSQSGHSFEALRLFVQMEREGGRLNRSSFSSALSTCADVVALELGKQLHGRLVKGGYETGCFVGNALLLMYCKCGSIEEANDLFKEMAGKDIVSWNTMIAGYSRHGFGEVALRFFESMKREGLKPDDATMVAVLSACSHTGLVDKGRQYFYTMTQDYGVMPNSQHYACMVDLLGRAGLLEDAHNLMKNMPFEPDAAIWGTLLGASRVHGNTELAETAADKIFAMEPENSGMYVLLSNLYASSGRWGDVGKLRVRMRDKGVKKVPGYSWIEIQNKTHTFSVGDEFHPEKDEIFAFLEELDLRMKKAGYVSKTSVVLHDVEEEEKERMVRYHSERLAVAYGIMRVSSGRPIRVIKNLRVCEDCHNAIKYMARITGRLIILRDNNRFHHFKDGSCSCGAIYKQHSRKRLRRRIQRWVGSMDPPTQSHNSVRTVPGSNHSHTDLIISSFLSFPDSSPISISNSFDRVLDRALASASADESVQDRLVDRTLELASLLLDSTRRCFRKRASVHNSNSWSLPPELTIKVFSMLDTKSMMQAAVCCTMFNKCAMDRLCYSHIDLTTSARYADKGVVSTMINRAGKELRSLKLGRVVRTAGSDSAAPLLSGSCLSPLAYNHGFLGSRLRSLRLYNLRPIKYRSLCDALSVCPNITDLRIVGLYNLTEELFNSLTKKCRLIEHLFLETYGYPRTLESKAGSSLVEFVTNCPNLTSLTLIRFGLTDDWARNLAESCRKLKYLNLSRSPTIKGRFLRELGLSCKENLLKTLILRSCPKLQEKEVLEFCNSLLTGNFKSIRQIDVSSNSGLASSDRGKRCNKPNFPLERLKEERSDVTFVADFPSTSSGKRYGVCDEEELRLIEMMEAEDDEVDEEDDSDDDTDDVSDEDESENDDDMGMGFDVDYLLKLKARPHINYSATRPEFVSKNVMDTPNPKRQCCDAFSSIQRPNSVTIAPDFNQNDFDSTISSFLLLPDSPYNSIGCSFDRVQGQVLDSASKASGDDSVRDRLIDRTGKLAFLLLESTKRFSRMRATHYNYNSWSLPDELTIKVFSGLDTKSLMQASACCTMFRKCSIDPLCYSHIDLKMGGKRIFDEIVCSMIHKAGTELRSLKLGRVISSRKGSSFTSTCLTSVIRNHGKKILEQVLKTLTKNPRLIIERLILQNNIDLIPASGVSSSTVEAFVTSCPSLTTLKLVGFGLKEETVRNLAEGFPKLTYMNLTRTPGISGRFLRDLRTIGRDSPIKTLILRDCHCLDRREIGYFLDSLLNGHFKFIRHIDVTSEVADGGREIIIGKYIITKLKEQRSDVTIVAKSILTCFFLTHGMGLSSSARYCSRKTYNYQTHFYQ

SEQ ID NO: 79145 - protein, 1591 aa, Arabidopsis thaliana
  peptide (1)..(1591): Ceres Seq. ID no. 12649241
MPRWSSVSYNGMISGYLRNGEFELARKLFDEMPERDLVSWNVMIKGYVRNRNLGKARELFEIMPERDVCSWNTMLSGYAQNGCVDDARSVFDRMPEKNDVSWNALLSAYVQNSKMEEACIMNVRDVVSWNTIITGYAQSGKIDEARQLFDESPVQDVFTWTAMVSGYIQNRMVEEARELFDKMPERNEVSWNAMLAGYVQGERMEMAKELFDVMPCRNVSTWNTMITGYAQCGKISEAKNLFDKMPKRDPVSWAAMIAGYSQSGHSFEALRLFVQMEREGGRLNRSSFSSALSTCADVVALELGKQLHGRLVKGGYETGCFVGNALLLMYCKCGSIEEANDLFKEMAGKDIVSWNTMIAGYSRHGFGEVALRFFESMKREGLKPDDATMVAVLSACSHTGLVDKGRQYFYTMTQDYGVMPNSQHYACMVDLLGRAGLLEDAHNLMKNMPFEPDAAIWGTLLGASRVHGNTELAETAADKIFAMEPENSGMYVLLSNLYASSGRWGDVGKLRVRMRDKGVKKVPGYSWIEIQNKTHTFSVGDEFHPEKDEIFAFLEELDLRMKKAGYVSKTSVVLHDVEEEEKERMVRYHSERLAVAYGIMRVSSGRPIRVIKNLRVCEDCHNAIKYMARITGRLIILRDNNRFHHFKDGSCSCGAIYKQHSRKRLRRRIQRWVGSMDPPTQSHNSVRTVPGSNHSHTDLIISSFLSFPDSSPISISNSFDRVLDRALASASADESVQDRLVDRTLELASLLLDSTRRCFRKRASVHNSNSWSLPPELTIKVFSMLDTKSMMQAAVCCTMFNKCAMDRLCYSHIDLTTSARYADKGVVSTMINRAGKELRSLKLGRVVRTAGSDSAAPLLSGSCLSPLAYNHGFLGSRLRSLRLYNLRPIKYRSLCDALSVCPNITDLRIVGLYNLTEELFNSLTKKCRLIEHLFLETYGYPRTLESKAGSSLVEFVTNCPNLTSLTLIRFGLTDDWARNLAESCRKLKYLNLSRSPTIKGRFLRELGLSCKENLLKTLILRSCPKLQEKEVLEFCNSLLTGNFKSIRQIDVSSNSGLASSDRGKRCNKPNFPLERLKEERSDVTFVADFPSTSSGKRYGVCDEEELRLIEMMEAEDDEVDEEDDSDDDTDDVSDEDESENDDDMGMGFDVDYLLKLKARPHINYSATRPEFVSKNVMDTPNPKRQCCDAFSSIQRPNSVTIAPDFNQNDFDSTISSFLLLPDSPYNSIGCSFDRVQGQVLDSASKASGDDSVRDRLIDRTGKLAFLLLESTKRFSRMRATHYNYNSWSLPDELTIKVFSGLDTKSLMQASACCTMFRKCSIDPLCYSHIDLKMGGKRIFDEIVCSMIHKAGTELRSLKLGRVISSRKGSSFTSTCLTSVIRNHGKKILEQVLKTLTKNPRLIIERLILQNNIDLIPASGVSSSTVEAFVTSCPSLTTLKLVGFGLKEETVRNLAEGFPKLTYMNLTRTPGISGRFLRDLRTIGRDSPIKTLILRDCHCLDRREIGYFLDSLLNGHFKFIRHIDVTSEVADGGREIIIGKYIITKLKEQRSDVTIVAKSILTCFFLTHGMGLSSSARYCSRKTYNYQTHFYQ

SEQ ID NO: 79146 - DNA, 2400 bp, Arabidopsis thaliana
  misc_feature (1)..(2400): Ceres Seq. ID no. 12649324
  misc_feature (1)..(2400): Ortholog of  Ceres SEQ ID NO 13581092 as cited in SEQ ID NO 54771
  misc_feature (1)..(2400): Ortholog of  Ceres SEQ ID NO 13594298 as cited in SEQ ID NO 57803
  misc_feature (1)..(2400): Ortholog of  Ceres SEQ ID NO 13503476 as cited in SEQ ID NO 61978
  misc_feature (1)..(2400): Ortholog of  Ceres SEQ ID NO 12578438 as cited in SEQ ID NO 62201
  misc_feature (1)..(2400): Ortholog of  Ceres SEQ ID NO 12617675 as cited in SEQ ID NO 64656
atggtcggtatggatttgttcaaatgtgtaatgatgataatggtgttggttgtctcttgtggtgaagctgtttctggagctaagttcgatgagctttatcggtcaagctgggctatggatcattgtgtcaacgaaggcgaagtcacaaaactcaagcttgacaattactctggagctgggtttgaatcaagaagcaaatacttgtttggtaaagtctctatccagattaagcttgttgagggtgattcagcaggaacagtcactgctttctacatgtcttcagatggtccgaaccacaacgaattcgattttgagttcttagggaacactaccggcgagccttacatagtccagaccaatatctacgtgaacggagttggaaacagagaacaaagactcaacctttggttcgatcccaccactgagtttcacacttactcaatcctctggagtaaacgcagtgttgtattcatggtagacgaaacaccgattcgagttcagaagaatcttgaagagaaaggtatcccatttgctaaagatcaagcaatgggtgtttacagctccatttggaatgcagatgattgggctacacaaggaggtcttgttaaaactgattggagtcacgctcctttcgttgcttcttacaaagaattccaaatcgatgcatgtgagattccaacaactactgatctaagcaagtgtaatggagaccagaagttttggtgggatgaaccaactgtctctgagcttagccttcatcagaatcatcagcttatttgggttcgagctaatcatatgatttatgattattgttttgatgctactaggtttcctgttactcctcttgagtgccaacatcatcgaaacaaaatagcaaaaaactcgattaagatacttttaacaatggagacaagatctgtgaaacggaagaagaagaagaaagaagaagaagcaaattggtttatcagagtagatagaatcagcaacctccctgattctctaaatcatcagattcttctcttgcttcctcttaaatctgcagcacaagctagcttactttcgaaacgatggagatctctctttctctcattgcctgatcttgatttcacctccatcaacgatctcaagaatccgaaatctttctcttctaactccatttacaaagtgctttctcttcgtagtcatcgtgactccaacaatcttagatcacttcgttttcgcgttcccgtcactttcacaagtctcaattccttgattcgtttagctgttactcatcaggttcaagatcttgacattgaagtcactaccaaagactactttaacttccctcgttggattgtgacctctcaaaatttaagagctctgacgcttaaatcagccaaccttggttttcgattacctccttcatcatcagcacgaggaggtttccaaaagcttacttcactctctttatctcgtgtgatactacacaatcaaccttgtctgtcagatttcttcactgatccgagcttccctcttctggagaaactaaccctagaatgttgctttggactcaaggaacttaaggttagttgccgtcttctccaagagttttctctaaagaactctttacagcttgagggcttagaggtttctggtaataagcttcagaaacttaaggttgagagttgcttctattcatactcagaaaagagctttgtgaagattaacacaccgaatctcaaaactttcctttggaattcaaacgctgtcactactagtgttcatttcttggacaagttagtttgtctgagaaaagcatttgttaaagtgttttggcatcatcaagatctcaattctcagatacaaagcttattcactctcttgtcaggtctctgtcattcctataaactacaacttggaaaccaatccgtagagattttgtcgagtaagaagggactattaaagaatcatcttctaccgtttcacaacatgagattcttggaactgcaaacacgtttgaatagacacaatgttcaaacactgtcatgtctgttcaagagctgtccaatgctaaacatacttaccgtcaaaatcattgatgatcaaacaagtgaaagaaggcaatggaataaggatttgtgggatatgtcaaactcagagattcagtactgggaatctcaagcctatgaattagaatctttcttgaaccacttggaatttgtggagattcacggattcgtagagtgcgagaacgaaatgagcctcgcaatctttttgctgagacatggaaaggctttaatcaagatgacgcttcggtctagtttcctctgtagagactctctccgcagacaaatgataaggtcacagctaacgggattctccatggcttcttccaaagccaaaatctcatttcattga

SEQ ID NO: 79147 - protein, 799 aa, Arabidopsis thaliana
  peptide (1)..(799): Ceres Seq. ID no. 12649325
MVGMDLFKCVMMIMVLVVSCGEAVSGAKFDELYRSSWAMDHCVNEGEVTKLKLDNYSGAGFESRSKYLFGKVSIQIKLVEGDSAGTVTAFYMSSDGPNHNEFDFEFLGNTTGEPYIVQTNIYVNGVGNREQRLNLWFDPTTEFHTYSILWSKRSVVFMVDETPIRVQKNLEEKGIPFAKDQAMGVYSSIWNADDWATQGGLVKTDWSHAPFVASYKEFQIDACEIPTTTDLSKCNGDQKFWWDEPTVSELSLHQNHQLIWVRANHMIYDYCFDATRFPVTPLECQHHRNKIAKNSIKILLTMETRSVKRKKKKKEEEANWFIRVDRISNLPDSLNHQILLLLPLKSAAQASLLSKRWRSLFLSLPDLDFTSINDLKNPKSFSSNSIYKVLSLRSHRDSNNLRSLRFRVPVTFTSLNSLIRLAVTHQVQDLDIEVTTKDYFNFPRWIVTSQNLRALTLKSANLGFRLPPSSSARGGFQKLTSLSLSRVILHNQPCLSDFFTDPSFPLLEKLTLECCFGLKELKVSCRLLQEFSLKNSLQLEGLEVSGNKLQKLKVESCFYSYSEKSFVKINTPNLKTFLWNSNAVTTSVHFLDKLVCLRKAFVKVFWHHQDLNSQIQSLFTLLSGLCHSYKLQLGNQSVEILSSKKGLLKNHLLPFHNMRFLELQTRLNRHNVQTLSCLFKSCPMLNILTVKIIDDQTSERRQWNKDLWDMSNSEIQYWESQAYELESFLNHLEFVEIHGFVECENEMSLAIFLLRHGKALIKMTLRSSFLCRDSLRRQMIRSQLTGFSMASSKAKISFH

SEQ ID NO: 79148 - protein, 796 aa, Arabidopsis thaliana
  peptide (1)..(796): Ceres Seq. ID no. 12649326
MDLFKCVMMIMVLVVSCGEAVSGAKFDELYRSSWAMDHCVNEGEVTKLKLDNYSGAGFESRSKYLFGKVSIQIKLVEGDSAGTVTAFYMSSDGPNHNEFDFEFLGNTTGEPYIVQTNIYVNGVGNREQRLNLWFDPTTEFHTYSILWSKRSVVFMVDETPIRVQKNLEEKGIPFAKDQAMGVYSSIWNADDWATQGGLVKTDWSHAPFVASYKEFQIDACEIPTTTDLSKCNGDQKFWWDEPTVSELSLHQNHQLIWVRANHMIYDYCFDATRFPVTPLECQHHRNKIAKNSIKILLTMETRSVKRKKKKKEEEANWFIRVDRISNLPDSLNHQILLLLPLKSAAQASLLSKRWRSLFLSLPDLDFTSINDLKNPKSFSSNSIYKVLSLRSHRDSNNLRSLRFRVPVTFTSLNSLIRLAVTHQVQDLDIEVTTKDYFNFPRWIVTSQNLRALTLKSANLGFRLPPSSSARGGFQKLTSLSLSRVILHNQPCLSDFFTDPSFPLLEKLTLECCFGLKELKVSCRLLQEFSLKNSLQLEGLEVSGNKLQKLKVESCFYSYSEKSFVKINTPNLKTFLWNSNAVTTSVHFLDKLVCLRKAFVKVFWHHQDLNSQIQSLFTLLSGLCHSYKLQLGNQSVEILSSKKGLLKNHLLPFHNMRFLELQTRLNRHNVQTLSCLFKSCPMLNILTVKIIDDQTSERRQWNKDLWDMSNSEIQYWESQAYELESFLNHLEFVEIHGFVECENEMSLAIFLLRHGKALIKMTLRSSFLCRDSLRRQMIRSQLTGFSMASSKAKISFH

SEQ ID NO: 79149 - protein, 789 aa, Arabidopsis thaliana
  peptide (1)..(789): Ceres Seq. ID no. 12649327
MMIMVLVVSCGEAVSGAKFDELYRSSWAMDHCVNEGEVTKLKLDNYSGAGFESRSKYLFGKVSIQIKLVEGDSAGTVTAFYMSSDGPNHNEFDFEFLGNTTGEPYIVQTNIYVNGVGNREQRLNLWFDPTTEFHTYSILWSKRSVVFMVDETPIRVQKNLEEKGIPFAKDQAMGVYSSIWNADDWATQGGLVKTDWSHAPFVASYKEFQIDACEIPTTTDLSKCNGDQKFWWDEPTVSELSLHQNHQLIWVRANHMIYDYCFDATRFPVTPLECQHHRNKIAKNSIKILLTMETRSVKRKKKKKEEEANWFIRVDRISNLPDSLNHQILLLLPLKSAAQASLLSKRWRSLFLSLPDLDFTSINDLKNPKSFSSNSIYKVLSLRSHRDSNNLRSLRFRVPVTFTSLNSLIRLAVTHQVQDLDIEVTTKDYFNFPRWIVTSQNLRALTLKSANLGFRLPPSSSARGGFQKLTSLSLSRVILHNQPCLSDFFTDPSFPLLEKLTLECCFGLKELKVSCRLLQEFSLKNSLQLEGLEVSGNKLQKLKVESCFYSYSEKSFVKINTPNLKTFLWNSNAVTTSVHFLDKLVCLRKAFVKVFWHHQDLNSQIQSLFTLLSGLCHSYKLQLGNQSVEILSSKKGLLKNHLLPFHNMRFLELQTRLNRHNVQTLSCLFKSCPMLNILTVKIIDDQTSERRQWNKDLWDMSNSEIQYWESQAYELESFLNHLEFVEIHGFVECENEMSLAIFLLRHGKALIKMTLRSSFLCRDSLRRQMIRSQLTGFSMASSKAKISFH

SEQ ID NO: 79150 - DNA, 2412 bp, Arabidopsis thaliana
  misc_feature (1)..(2412): Ceres Seq. ID no. 12649336
  misc_feature (1)..(2412): Ortholog of  Ceres SEQ ID NO 13584744 as cited in SEQ ID NO 69137
atgattctttctgtcttcttctatatgtttttgctgcatattcgtcgattagattgttttgttgcagttcaagactccaaaacattgttcaaaggttcaacattgatcaatgacagccatggagagactcttgtttcagctggtcagagatttgagcttggcttcttcactcctaatggaagctccgacgaaagaaggtacttagggatttggttttacaatttacatccactgactgttgtctgggttgcaaatcgtgaatctccggttcttgaccgttcctgcattttcaccatctctaaagatgggaatcttgaagttattgattcaaagggaagagtgtattgggacaccggtgttaaaccttcctcagtatctgcggagagaatggtaaagctgatggataatggtaatcttgtgttgattagtgatggaaatgaagcaaatgtggtttggcagagttttcagaatcctactgatacatttctcccagggatgaggatggatgagaatatgactttatcatcatggagaagcttcaacgatccatcacatggaaatttcacctttcagatggatcaagaagaagacaaacagttcatcatttggaaaagatcaatgagatactggaaatccggaatttcgggtaaattcataggatccgacgagatgccttatgcgatttcttactttctttccaatttcacagagactgttactgttcacaatgcctctgtgcctcctctcttcacatctttgtataccaatacaaggttcaccatgagctcctctggtcaagctcagtacttcaggttagatggagaaagattctgggcacagatttgggctgaacctagagatgaatgtagtgtatacaatgcttgtggaaattttggtagctgcaacagcaagaatgaggaaatgtgtaagtgtttgccaggttttaggcctaatttcctggagaaatgggtcaagggagatttttctggtggatgttccagggagtcaaggatctgtggtaaagacggtgttgtggtgggagacatgttcttgaatctgagtgtggttgaagtaggaagtccggattcacagtttgatgcacataatgaaaaagaatgcagagcagagtgcttgaataattgccaatgccaagcttactcatatgaagaagttgatatacttcaaagcaataccaagtgctggatttggttggaggatctcaataatctcaaggaaggctatttaggtagccgcaacgttttcattcgcgtagcagttccagatatagactgtaaagactggcctaattcatcttgcagtaaatctggagaagggaagaagcagtgcttctgcaatcatgattttaagtggaatggattcaatctaaactgcactcaagatgttccatcttttgagctcgagaccatcctatatgcaacatccaacttctcaaatgcaaacaagctaggccaaggagggtttggaccggtttataagggaatgtttcctggagatcaagagattgctgtgaagaggctatctcgctgctcgggtcaaggactggaggaattcaagaatgaagttgttttgattgccaagctccaacaccggaatcttgttcgacttcttggctattgtgttgctggagaagagaaactgttattgtatgaatacatgccacacaaaagcttagacttcttcatcttcgaccggaagctttgccagcgattagattggaagatgcgttgtaatatcattctaggaatcgctcgtggacttctctatctgcatcaagactctagactgagaatcatccacagagatctaaaaacaagcaacattctgttagatgaagagatgaatcccaagatctctgactttggcttggctagaatatttggaggcagtgaaacatcagccaatactaatagagttgttggaacctatggatacatgtctccagagtatgctttagaaggtcttttctcattcaaatcagatgtctttagtttcggcgtggttgtgattgaaactatcagcgggaagcgtaacaccgggtttcatgaacctgagaaatctttaagccttctaggccatgcgtgggatctctggaaagcggaaagggggattgagttattggatcaggctttacaagaatcatgcgaaaccgagggattcttgaagtgcttgaacgtaggacttctctgtgtacaagaagatcctaatgatcgtcctacaatgtcaaatgttgttttcatgctcggaagcagcgaagctgctactcttcctactccaaaacaaccggcttttgttcttagacgttgcccttcatcaagcaaagcttcctcatccaccaagccagaaacttgctctgaaaatgagcttaccataactcttgaagatggaagataa

SEQ ID NO: 79151 - protein, 803 aa, Arabidopsis thaliana
  peptide (1)..(803): Ceres Seq. ID no. 12649337
MILSVFFYMFLLHIRRLDCFVAVQDSKTLFKGSTLINDSHGETLVSAGQRFELGFFTPNGSSDERRYLGIWFYNLHPLTVVWVANRESPVLDRSCIFTISKDGNLEVIDSKGRVYWDTGVKPSSVSAERMVKLMDNGNLVLISDGNEANVVWQSFQNPTDTFLPGMRMDENMTLSSWRSFNDPSHGNFTFQMDQEEDKQFIIWKRSMRYWKSGISGKFIGSDEMPYAISYFLSNFTETVTVHNASVPPLFTSLYTNTRFTMSSSGQAQYFRLDGERFWAQIWAEPRDECSVYNACGNFGSCNSKNEEMCKCLPGFRPNFLEKWVKGDFSGGCSRESRICGKDGVVVGDMFLNLSVVEVGSPDSQFDAHNEKECRAECLNNCQCQAYSYEEVDILQSNTKCWIWLEDLNNLKEGYLGSRNVFIRVAVPDIDCKDWPNSSCSKSGEGKKQCFCNHDFKWNGFNLNCTQDVPSFELETILYATSNFSNANKLGQGGFGPVYKGMFPGDQEIAVKRLSRCSGQGLEEFKNEVVLIAKLQHRNLVRLLGYCVAGEEKLLLYEYMPHKSLDFFIFDRKLCQRLDWKMRCNIILGIARGLLYLHQDSRLRIIHRDLKTSNILLDEEMNPKISDFGLARIFGGSETSANTNRVVGTYGYMSPEYALEGLFSFKSDVFSFGVVVIETISGKRNTGFHEPEKSLSLLGHAWDLWKAERGIELLDQALQESCETEGFLKCLNVGLLCVQEDPNDRPTMSNVVFMLGSSEAATLPTPKQPAFVLRRCPSSSKASSSTKPETCSENELTITLEDGR

SEQ ID NO: 79152 - protein, 795 aa, Arabidopsis thaliana
  peptide (1)..(795): Ceres Seq. ID no. 12649338
MFLLHIRRLDCFVAVQDSKTLFKGSTLINDSHGETLVSAGQRFELGFFTPNGSSDERRYLGIWFYNLHPLTVVWVANRESPVLDRSCIFTISKDGNLEVIDSKGRVYWDTGVKPSSVSAERMVKLMDNGNLVLISDGNEANVVWQSFQNPTDTFLPGMRMDENMTLSSWRSFNDPSHGNFTFQMDQEEDKQFIIWKRSMRYWKSGISGKFIGSDEMPYAISYFLSNFTETVTVHNASVPPLFTSLYTNTRFTMSSSGQAQYFRLDGERFWAQIWAEPRDECSVYNACGNFGSCNSKNEEMCKCLPGFRPNFLEKWVKGDFSGGCSRESRICGKDGVVVGDMFLNLSVVEVGSPDSQFDAHNEKECRAECLNNCQCQAYSYEEVDILQSNTKCWIWLEDLNNLKEGYLGSRNVFIRVAVPDIDCKDWPNSSCSKSGEGKKQCFCNHDFKWNGFNLNCTQDVPSFELETILYATSNFSNANKLGQGGFGPVYKGMFPGDQEIAVKRLSRCSGQGLEEFKNEVVLIAKLQHRNLVRLLGYCVAGEEKLLLYEYMPHKSLDFFIFDRKLCQRLDWKMRCNIILGIARGLLYLHQDSRLRIIHRDLKTSNILLDEEMNPKISDFGLARIFGGSETSANTNRVVGTYGYMSPEYALEGLFSFKSDVFSFGVVVIETISGKRNTGFHEPEKSLSLLGHAWDLWKAERGIELLDQALQESCETEGFLKCLNVGLLCVQEDPNDRPTMSNVVFMLGSSEAATLPTPKQPAFVLRRCPSSSKASSSTKPETCSENELTITLEDGR

SEQ ID NO: 79153 - protein, 674 aa, Arabidopsis thaliana
  peptide (1)..(674): Ceres Seq. ID no. 12649339
MVKLMDNGNLVLISDGNEANVVWQSFQNPTDTFLPGMRMDENMTLSSWRSFNDPSHGNFTFQMDQEEDKQFIIWKRSMRYWKSGISGKFIGSDEMPYAISYFLSNFTETVTVHNASVPPLFTSLYTNTRFTMSSSGQAQYFRLDGERFWAQIWAEPRDECSVYNACGNFGSCNSKNEEMCKCLPGFRPNFLEKWVKGDFSGGCSRESRICGKDGVVVGDMFLNLSVVEVGSPDSQFDAHNEKECRAECLNNCQCQAYSYEEVDILQSNTKCWIWLEDLNNLKEGYLGSRNVFIRVAVPDIDCKDWPNSSCSKSGEGKKQCFCNHDFKWNGFNLNCTQDVPSFELETILYATSNFSNANKLGQGGFGPVYKGMFPGDQEIAVKRLSRCSGQGLEEFKNEVVLIAKLQHRNLVRLLGYCVAGEEKLLLYEYMPHKSLDFFIFDRKLCQRLDWKMRCNIILGIARGLLYLHQDSRLRIIHRDLKTSNILLDEEMNPKISDFGLARIFGGSETSANTNRVVGTYGYMSPEYALEGLFSFKSDVFSFGVVVIETISGKRNTGFHEPEKSLSLLGHAWDLWKAERGIELLDQALQESCETEGFLKCLNVGLLCVQEDPNDRPTMSNVVFMLGSSEAATLPTPKQPAFVLRRCPSSSKASSSTKPETCSENELTITLEDGR

SEQ ID NO: 79154 - DNA, 2214 bp, Arabidopsis thaliana
  misc_feature (1)..(2214): Ceres Seq. ID no. 12649439
  misc_feature (1)..(2214): Ortholog of  Ceres SEQ ID NO 15176563 as cited in SEQ ID NO 58992
atggcgagtgagagttcgcaatcttcctcgccgtcgtcatctcaacctccgtcatctgtaccttctccgtcgccgggtaacaacgtcggcgatacgtttataggaagtttcatcagtctaatttctaagtacgagatccgttacgaaggcattctctaccatctcaacgttcaggactcgacgctaggtctaaaaaacgtaagatcatgtggaacggaggggaggaagaaagatgggccgcaaattccgccatgtgataaagtttacgattacattctttttcgtggaagtgacatcaaggatctccaagttaacccatctccatctgctcaatcaagacaagagattcaaagtgaacaagacgtcaatcagtcccctcactctaggccagctatgactatgagctctccgatttctggctatgatagcggttatggtttggggagaggatcacaatggatcaatacacctgctttgagtagtaaaccggttcctgtcacacaacattcatcagtccctttaagcttccagcctccttcagctaatgctggaagtttgacagaatcaccagtgagcttaattgattcaactcaaagtaatgctggttcctcgatgcccattccttcttttgtgcaaggtaacaaatttgcttccagtggtgtccctcttggtatgatgcagaagccagtttcatcctcctcgaccatacccaatggtccgcagattattgattatttttcttcaccaatcatggggttagtggatgattcatcacaggttgttactcgttcacctgacgtctcttccaatcaatcatactcttccaacccttctcctcttggtcaaacacaactccatactccacctggccttgcttcagtatcctctaacctttctccaccttctgaagcgcagctttctgctccaaatattcagaaaatttaccccagtgcaccccaggctattggtaaagttgtctatgaccctcagtctaatcatcctcaccgatctatacctcatgagttacctgctgtggcttctaattcagctcctgtgattcctggtccattgtcaaaatcgcctgagtcatttttcgatatggatccgtcactgcaatctaggcagcagatggtatataggggtcaagagatgtttgctgcaactaacccggcatcagcgaatgtgccatcacaaagttttgctcccagaaatcatgcaccattgctgcctcttccagtttcagctcatcagtctcggatccctagttctagcattgagtacactgaagaatttgattttgaagcaatgaatgagaagttcaagaagagtgaactatggggttatcttggaagaaataaccagaggaatcaaaatgattatggggaagaaactgcgattgagccaaacgcagaagggaagcctgcatataacaaggatgacttttttgacacaatctcgtgcaatcaacttgaccgtgtggcaagaagcggacaacagcacaaccagtttcccgaacacatgagacaagttcctgaggcatttggtaataattttcaaaggccacctccactacaaccaggtcagggtgcatatctcgctgcacaaaccaattacagaggcggataccataataacaacaacaacaactactactcaaactcgggttatgccatcatttgtgccataatctctattgttgtaatcgttggtggcattatagtcttcgttggttacctggtcattcatcctcgagttcccatcattagtgtcgcggatgctcacctcgacttcttaaagtatgatatagttggagttttgcaaacgcagttaacgattgtgattcgcgtagagaatgataacgctaaggctcatgcgttgtttgatgaaactgagttcaagctaagctatgaaggcaaacctattgcgattttaaaagcgcctgagtttgaagttgttaaagagaaatcaatgttccttccttacttggttcagtcatatccaataccattgaatccaacaatgatgcaagctgtagactatgcggttaaaaaagatgttattactttcgagctcaaaggtggctcaagaactcggtggcgagtcggaccattaggatcggttaagtttgagtgtaaccttagctgtcagcttaggtttagaccttctgatcatagttacattccatctccttgcacctctgctcataagcattag

SEQ ID NO: 79155 - protein, 737 aa, Arabidopsis thaliana
  peptide (1)..(737): Ceres Seq. ID no. 12649440
MASESSQSSSPSSSQPPSSVPSPSPGNNVGDTFIGSFISLISKYEIRYEGILYHLNVQDSTLGLKNVRSCGTEGRKKDGPQIPPCDKVYDYILFRGSDIKDLQVNPSPSAQSRQEIQSEQDVNQSPHSRPAMTMSSPISGYDSGYGLGRGSQWINTPALSSKPVPVTQHSSVPLSFQPPSANAGSLTESPVSLIDSTQSNAGSSMPIPSFVQGNKFASSGVPLGMMQKPVSSSSTIPNGPQIIDYFSSPIMGLVDDSSQVVTRSPDVSSNQSYSSNPSPLGQTQLHTPPGLASVSSNLSPPSEAQLSAPNIQKIYPSAPQAIGKVVYDPQSNHPHRSIPHELPAVASNSAPVIPGPLSKSPESFFDMDPSLQSRQQMVYRGQEMFAATNPASANVPSQSFAPRNHAPLLPLPVSAHQSRIPSSSIEYTEEFDFEAMNEKFKKSELWGYLGRNNQRNQNDYGEETAIEPNAEGKPAYNKDDFFDTISCNQLDRVARSGQQHNQFPEHMRQVPEAFGNNFQRPPPLQPGQGAYLAAQTNYRGGYHNNNNNNYYSNSGYAIICAIISIVVIVGGIIVFVGYLVIHPRVPIISVADAHLDFLKYDIVGVLQTQLTIVIRVENDNAKAHALFDETEFKLSYEGKPIAILKAPEFEVVKEKSMFLPYLVQSYPIPLNPTMMQAVDYAVKKDVITFELKGGSRTRWRVGPLGSVKFECNLSCQLRFRPSDHSYIPSPCTSAHKH

SEQ ID NO: 79156 - protein, 606 aa, Arabidopsis thaliana
  peptide (1)..(606): Ceres Seq. ID no. 12649441
MTMSSPISGYDSGYGLGRGSQWINTPALSSKPVPVTQHSSVPLSFQPPSANAGSLTESPVSLIDSTQSNAGSSMPIPSFVQGNKFASSGVPLGMMQKPVSSSSTIPNGPQIIDYFSSPIMGLVDDSSQVVTRSPDVSSNQSYSSNPSPLGQTQLHTPPGLASVSSNLSPPSEAQLSAPNIQKIYPSAPQAIGKVVYDPQSNHPHRSIPHELPAVASNSAPVIPGPLSKSPESFFDMDPSLQSRQQMVYRGQEMFAATNPASANVPSQSFAPRNHAPLLPLPVSAHQSRIPSSSIEYTEEFDFEAMNEKFKKSELWGYLGRNNQRNQNDYGEETAIEPNAEGKPAYNKDDFFDTISCNQLDRVARSGQQHNQFPEHMRQVPEAFGNNFQRPPPLQPGQGAYLAAQTNYRGGYHNNNNNNYYSNSGYAIICAIISIVVIVGGIIVFVGYLVIHPRVPIISVADAHLDFLKYDIVGVLQTQLTIVIRVENDNAKAHALFDETEFKLSYEGKPIAILKAPEFEVVKEKSMFLPYLVQSYPIPLNPTMMQAVDYAVKKDVITFELKGGSRTRWRVGPLGSVKFECNLSCQLRFRPSDHSYIPSPCTSAHKH

SEQ ID NO: 79157 - protein, 604 aa, Arabidopsis thaliana
  peptide (1)..(604): Ceres Seq. ID no. 12649442
MSSPISGYDSGYGLGRGSQWINTPALSSKPVPVTQHSSVPLSFQPPSANAGSLTESPVSLIDSTQSNAGSSMPIPSFVQGNKFASSGVPLGMMQKPVSSSSTIPNGPQIIDYFSSPIMGLVDDSSQVVTRSPDVSSNQSYSSNPSPLGQTQLHTPPGLASVSSNLSPPSEAQLSAPNIQKIYPSAPQAIGKVVYDPQSNHPHRSIPHELPAVASNSAPVIPGPLSKSPESFFDMDPSLQSRQQMVYRGQEMFAATNPASANVPSQSFAPRNHAPLLPLPVSAHQSRIPSSSIEYTEEFDFEAMNEKFKKSELWGYLGRNNQRNQNDYGEETAIEPNAEGKPAYNKDDFFDTISCNQLDRVARSGQQHNQFPEHMRQVPEAFGNNFQRPPPLQPGQGAYLAAQTNYRGGYHNNNNNNYYSNSGYAIICAIISIVVIVGGIIVFVGYLVIHPRVPIISVADAHLDFLKYDIVGVLQTQLTIVIRVENDNAKAHALFDETEFKLSYEGKPIAILKAPEFEVVKEKSMFLPYLVQSYPIPLNPTMMQAVDYAVKKDVITFELKGGSRTRWRVGPLGSVKFECNLSCQLRFRPSDHSYIPSPCTSAHKH

SEQ ID NO: 79158 - DNA, 2163 bp, Arabidopsis thaliana
  misc_feature (1)..(2163): Ceres Seq. ID no. 12649474
  misc_feature (1)..(2163): Ortholog of  Ceres SEQ ID NO 14315461 as cited in SEQ ID NO 57150
atgtctaaagttgtgtatgaaggatggatggtaaggtatggaagaagaaagatcggacgatcgtatattcatatgaggtatttcgtgttggagcctcgtcttttggcttattacaagaagaagcctcaagataatcagcttcctatcaagacgatggttattgatggaaactgtagagttgaggatcgtggcttgaagacacatcatggacatatggtttatgtgttgtctatttataacaagaaagaaaagcaccacagaatcacgatggcagctttcaacatccaggaagctttaatgtggaaggagaaaattgagtgtgtcatagatcagcatcaagactccctagttccaagtggtcagcaatatgtttcttttgaatataaacctggaatggacgctggaaggaccgcttcatcttcagatcatgaaagcccagagttcagtgcgctggaggatgaaaatgactctcagcgtgatttattaaggaggacaactattggaaatggccctccagaatctatacttgactggactaaagagtttgatgctgagttgtcaaaccagagttccagcaaccaagcgttttcgagaaaacactggcgtctccttcagtgccaaaatggtctacggatttttgaagagctacttgaagttgattatcttccaagaagctgcagcagggctatgaaggctgttggtgttgtagaggccacatgtgaagagatattcgagcttgtgatgagcatggatggcactcgatatgagtgggactgcagttttcataatggaagattagtggaagaggtcgatggtcacacagcaatactctatcacagacttctgctcgactggtttccaatggttgtatggcctcgtgacctctgctatgtacgttattggcgacgtaatgacgatggaagttatgtggtattgtttcgttctagggagcatgaaaattgtggtccacaacctggatttgtgcgggctcatcttgagagtggaggatttaacatcgccccactaaagccccggaatggaaggcctaggacacaagtgcaacatctaatacaaatcgatctgaaagggtggggttcaggttatcttccagcatttcaacaacattgtcttcttcaaatgctgaacagtgtttctggtttgcgtgagtggttctcacagacagatgatagaggtcaaccgatcaggatccctgttatggttaatatggcatcttcttccttagcgttgggtaaaggtggaaagcatcaccataagtcttccctttctattgatcaaacaaatggtgccagcagaaactctgtgctaatggatgaagactcggatgacgatgacgagtttcagatacctgattcagaaccagagcctgaaacgagtaagcaggatcaggagactgatgccaagaaaacagaggaacctgctctcaacattgatctgtcatgtttctcgggtaatctgcgacacgatgataacgaaaatgcccgtaactgctggaggatttctgatgggaacaactttaaagtccgtggcaagagtttctgtgacgataaaaggaagattcctgctgggaagcatctaatggatcttgtcgccgtcgattggttcaaagacactaaaagaatggatcatgtggttagacgcaagggctgtgctgcacaagttgctgcagagaaaggtcttttctcaacggtagtaaatgttcaagttcctggatcaacacactatagtatggtattttatttcgtgactaaagaacttgtacctggatcactcttccaacgttttgttgatggtgatgacgaatttcgtaatagcaggctcaagcttatacctttagtcccaaagggttcatggatagtaaggcaaagcgtgggaagcactccgtgtctcctcgggaaagcagtagattgcaactatatccgtggtccaacatacttagaaatagatgtagatatcggctcatccacagtcgcaaatggagttcttggtcttgtcatcggcgtaatcacatctttggttgtcgaaatggctttccttgtacaggcgaatacaccagaagaattgcccgagcggcttatcggggcggtgagggtttctcatgtagagctatcatcggctatagttcccaatttggattcagattag

SEQ ID NO: 79159 - protein, 720 aa, Arabidopsis thaliana
  peptide (1)..(720): Ceres Seq. ID no. 12649475
MSKVVYEGWMVRYGRRKIGRSYIHMRYFVLEPRLLAYYKKKPQDNQLPIKTMVIDGNCRVEDRGLKTHHGHMVYVLSIYNKKEKHHRITMAAFNIQEALMWKEKIECVIDQHQDSLVPSGQQYVSFEYKPGMDAGRTASSSDHESPEFSALEDENDSQRDLLRRTTIGNGPPESILDWTKEFDAELSNQSSSNQAFSRKHWRLLQCQNGLRIFEELLEVDYLPRSCSRAMKAVGVVEATCEEIFELVMSMDGTRYEWDCSFHNGRLVEEVDGHTAILYHRLLLDWFPMVVWPRDLCYVRYWRRNDDGSYVVLFRSREHENCGPQPGFVRAHLESGGFNIAPLKPRNGRPRTQVQHLIQIDLKGWGSGYLPAFQQHCLLQMLNSVSGLREWFSQTDDRGQPIRIPVMVNMASSSLALGKGGKHHHKSSLSIDQTNGASRNSVLMDEDSDDDDEFQIPDSEPEPETSKQDQETDAKKTEEPALNIDLSCFSGNLRHDDNENARNCWRISDGNNFKVRGKSFCDDKRKIPAGKHLMDLVAVDWFKDTKRMDHVVRRKGCAAQVAAEKGLFSTVVNVQVPGSTHYSMVFYFVTKELVPGSLFQRFVDGDDEFRNSRLKLIPLVPKGSWIVRQSVGSTPCLLGKAVDCNYIRGPTYLEIDVDIGSSTVANGVLGLVIGVITSLVVEMAFLVQANTPEELPERLIGAVRVSHVELSSAIVPNLDSD

SEQ ID NO: 79160 - protein, 711 aa, Arabidopsis thaliana
  peptide (1)..(711): Ceres Seq. ID no. 12649476
MVRYGRRKIGRSYIHMRYFVLEPRLLAYYKKKPQDNQLPIKTMVIDGNCRVEDRGLKTHHGHMVYVLSIYNKKEKHHRITMAAFNIQEALMWKEKIECVIDQHQDSLVPSGQQYVSFEYKPGMDAGRTASSSDHESPEFSALEDENDSQRDLLRRTTIGNGPPESILDWTKEFDAELSNQSSSNQAFSRKHWRLLQCQNGLRIFEELLEVDYLPRSCSRAMKAVGVVEATCEEIFELVMSMDGTRYEWDCSFHNGRLVEEVDGHTAILYHRLLLDWFPMVVWPRDLCYVRYWRRNDDGSYVVLFRSREHENCGPQPGFVRAHLESGGFNIAPLKPRNGRPRTQVQHLIQIDLKGWGSGYLPAFQQHCLLQMLNSVSGLREWFSQTDDRGQPIRIPVMVNMASSSLALGKGGKHHHKSSLSIDQTNGASRNSVLMDEDSDDDDEFQIPDSEPEPETSKQDQETDAKKTEEPALNIDLSCFSGNLRHDDNENARNCWRISDGNNFKVRGKSFCDDKRKIPAGKHLMDLVAVDWFKDTKRMDHVVRRKGCAAQVAAEKGLFSTVVNVQVPGSTHYSMVFYFVTKELVPGSLFQRFVDGDDEFRNSRLKLIPLVPKGSWIVRQSVGSTPCLLGKAVDCNYIRGPTYLEIDVDIGSSTVANGVLGLVIGVITSLVVEMAFLVQANTPEELPERLIGAVRVSHVELSSAIVPNLDSD

SEQ ID NO: 79161 - protein, 696 aa, Arabidopsis thaliana
  peptide (1)..(696): Ceres Seq. ID no. 12649477
MRYFVLEPRLLAYYKKKPQDNQLPIKTMVIDGNCRVEDRGLKTHHGHMVYVLSIYNKKEKHHRITMAAFNIQEALMWKEKIECVIDQHQDSLVPSGQQYVSFEYKPGMDAGRTASSSDHESPEFSALEDENDSQRDLLRRTTIGNGPPESILDWTKEFDAELSNQSSSNQAFSRKHWRLLQCQNGLRIFEELLEVDYLPRSCSRAMKAVGVVEATCEEIFELVMSMDGTRYEWDCSFHNGRLVEEVDGHTAILYHRLLLDWFPMVVWPRDLCYVRYWRRNDDGSYVVLFRSREHENCGPQPGFVRAHLESGGFNIAPLKPRNGRPRTQVQHLIQIDLKGWGSGYLPAFQQHCLLQMLNSVSGLREWFSQTDDRGQPIRIPVMVNMASSSLALGKGGKHHHKSSLSIDQTNGASRNSVLMDEDSDDDDEFQIPDSEPEPETSKQDQETDAKKTEEPALNIDLSCFSGNLRHDDNENARNCWRISDGNNFKVRGKSFCDDKRKIPAGKHLMDLVAVDWFKDTKRMDHVVRRKGCAAQVAAEKGLFSTVVNVQVPGSTHYSMVFYFVTKELVPGSLFQRFVDGDDEFRNSRLKLIPLVPKGSWIVRQSVGSTPCLLGKAVDCNYIRGPTYLEIDVDIGSSTVANGVLGLVIGVITSLVVEMAFLVQANTPEELPERLIGAVRVSHVELSSAIVPNLDSD

SEQ ID NO: 79162 - DNA, 2283 bp, Arabidopsis thaliana
  misc_feature (1)..(2283): Ceres Seq. ID no. 12649498
  misc_feature (1)..(2283): Ortholog of  Ceres SEQ ID NO 15176095 as cited in SEQ ID NO 59699
atgaagaagcttacttctctcttccctctcctctttctcattcccctcttagcctcatgtgctgaagaaaaacaggtgtatattgtctattttggagaacataaaggtgataaagcctttcatgaaattgaagaacatcatcattcttatcttcaatcggttaaagaatccgaagaagacgctagagcatcgctcttgtatagctacaaacatagcatcaatggcttcgcggctgagctaacccctgaccaagcctctaaactagaaaaattagcagaggttgtttcagtattcaagagccatccaagaaaatatgaagcacatacgacacggtcatgggaatttgtaggattggaggaggaagaaaccgacagtgatgttccacgtcgaaaaaatgatgccgatgatcggtttcgtgtgggaagaaattttttgaagaaggcaaagcatggtgatggaatcatcgtcggtgttctcgacagtggtgtgtggccagaatcaaagagtttcaatgacaaaggaatgggaccagttccaaaatcatggaaaggaatctgccaaaccggagttgcctttaactcttctcactgtaaccgagatcccgacggacatgggtcccacacagcttctactgccgttggccgtcgagttctcggtgcatccgcacttggcggtttcgccaagggctcggcatcgggcggtgcaccgttagctcgtctagctatttacaaagcttgttgggccaagcccaatgcggaaaaagttgaaggaaatatctgtctagaagaggacatgcttgccgcgatcgatgacgccatcgctgatggcgttcacgtcatcagcatttccatcggaacgaccgagccttttccatttacacaagatggaatcgcgatgggggcgttgcatgcggttaagaggaatattgtggttgctgctagcgctgggaattcagggccaaagccgggaactttgtcgaatctggcaccgtggattataactgtcggagctagtactcttgatcgggctttcgttggcggtcttgttcttggcaatggctatacaatcaagacggattcgataacggcatttaaaatggacaaatttgcccctcttgtttacgcttctaacgtggttgttcccggcattgcattgaacgagacatcgcaatgtttaccaaattcactaaaaccggagcttgtgagtggtaaagtggtcttgtgtttaagaggagccggttcaagaatcggtaaaggcatggaggtaaaacgagctggaggagccggtatgattctcggaaatatcgcagctaacggcaatgaagttccttcagactctcattttgttccgactgccggggttaccccaaccgtggtcgataaaattctggagtacatcaaaaccgataaaaacccgaaggcttttatcaaaccggggaaaacggtttacaaataccaagcagctccttccatgaccgggttttctagccgcggcccaaacgttgtagaccccaacattctaaagccggatataaccgccccaggactgtacatactggctgcatggagcggagcagattcaccgagcaaaatgtcagtagatcaaagagttgcaggttataacatctactcaggaacttcaatgtcttgtcctcatgtcgctggtgcaattgctcttctcaaagccattcatcccaaatggagtagcgctgctataagatcagctcttatgaccactgcttggatgactaacgacaagaagaaaccgatccaagacactactggtttaccagcaaacccatttgcacttgggtcaggacatttcagaccaacaaaagctgcagatcccggtttagtctatgatgcatcataccgagcttaccttctctatggctgctcggttaacatcaccaatattgacccgacattcaaatgtcctagtaaaattccgcccggttataatcacaattacccgtcaatcgcggtcccgaatctcaagaagacggtgaccgttaaaagaacagttacaaatgttggaactggtaactcaacaagcacatacttattcagcgttaaaccgccatcgggtatttcggttaaggctataccgaatatattgtcctttaaccggattggtcagaagcagcggtttaaaatcgttattaaaccactgaagaaccaggtgatgaatgcgactgaaaagggtcaataccaatttggatggtttagttggacagataaagtccatgttgtgaggagtccaattgctgtttccttagcttga

SEQ ID NO: 79163 - protein, 760 aa, Arabidopsis thaliana
  peptide (1)..(760): Ceres Seq. ID no. 12649499
MKKLTSLFPLLFLIPLLASCAEEKQVYIVYFGEHKGDKAFHEIEEHHHSYLQSVKESEEDARASLLYSYKHSINGFAAELTPDQASKLEKLAEVVSVFKSHPRKYEAHTTRSWEFVGLEEEETDSDVPRRKNDADDRFRVGRNFLKKAKHGDGIIVGVLDSGVWPESKSFNDKGMGPVPKSWKGICQTGVAFNSSHCNRDPDGHGSHTASTAVGRRVLGASALGGFAKGSASGGAPLARLAIYKACWAKPNAEKVEGNICLEEDMLAAIDDAIADGVHVISISIGTTEPFPFTQDGIAMGALHAVKRNIVVAASAGNSGPKPGTLSNLAPWIITVGASTLDRAFVGGLVLGNGYTIKTDSITAFKMDKFAPLVYASNVVVPGIALNETSQCLPNSLKPELVSGKVVLCLRGAGSRIGKGMEVKRAGGAGMILGNIAANGNEVPSDSHFVPTAGVTPTVVDKILEYIKTDKNPKAFIKPGKTVYKYQAAPSMTGFSSRGPNVVDPNILKPDITAPGLYILAAWSGADSPSKMSVDQRVAGYNIYSGTSMSCPHVAGAIALLKAIHPKWSSAAIRSALMTTAWMTNDKKKPIQDTTGLPANPFALGSGHFRPTKAADPGLVYDASYRAYLLYGCSVNITNIDPTFKCPSKIPPGYNHNYPSIAVPNLKKTVTVKRTVTNVGTGNSTSTYLFSVKPPSGISVKAIPNILSFNRIGQKQRFKIVIKPLKNQVMNATEKGQYQFGWFSWTDKVHVVRSPIAVSLA

SEQ ID NO: 79164 - protein, 586 aa, Arabidopsis thaliana
  peptide (1)..(586): Ceres Seq. ID no. 12649500
MGPVPKSWKGICQTGVAFNSSHCNRDPDGHGSHTASTAVGRRVLGASALGGFAKGSASGGAPLARLAIYKACWAKPNAEKVEGNICLEEDMLAAIDDAIADGVHVISISIGTTEPFPFTQDGIAMGALHAVKRNIVVAASAGNSGPKPGTLSNLAPWIITVGASTLDRAFVGGLVLGNGYTIKTDSITAFKMDKFAPLVYASNVVVPGIALNETSQCLPNSLKPELVSGKVVLCLRGAGSRIGKGMEVKRAGGAGMILGNIAANGNEVPSDSHFVPTAGVTPTVVDKILEYIKTDKNPKAFIKPGKTVYKYQAAPSMTGFSSRGPNVVDPNILKPDITAPGLYILAAWSGADSPSKMSVDQRVAGYNIYSGTSMSCPHVAGAIALLKAIHPKWSSAAIRSALMTTAWMTNDKKKPIQDTTGLPANPFALGSGHFRPTKAADPGLVYDASYRAYLLYGCSVNITNIDPTFKCPSKIPPGYNHNYPSIAVPNLKKTVTVKRTVTNVGTGNSTSTYLFSVKPPSGISVKAIPNILSFNRIGQKQRFKIVIKPLKNQVMNATEKGQYQFGWFSWTDKVHVVRSPIAVSLA

SEQ ID NO: 79165 - protein, 496 aa, Arabidopsis thaliana; identical to SEQ ID NO: 48930
  peptide (1)..(496): Ceres Seq. ID no. 12649501

SEQ ID NO: 79166 - DNA, 1731 bp, Arabidopsis thaliana
  misc_feature (1)..(1731): Ceres Seq. ID no. 12649526
  misc_feature (1)..(1731): Ortholog of  Ceres SEQ ID NO 13655640 as cited in SEQ ID NO 63844
  misc_feature (1)..(1731): Ortholog of  Ceres SEQ ID NO 13584744 as cited in SEQ ID NO 69137
atggagatttctttgatgaagtttctgtttttaggaatctgggtttattattactctgttcttgactctgtttctgccatggatagtcttttatctcccaagggtgttaactatgaagtggctgcgttaatgtcagtgaagaacaagatgaaagatgagaaagaggttttgtctggttgggatattaactctgttgatccttgtacttggaacatggttggttgttcttctgaaggttttgtggtttctctgttacttcagaataatcagttaactggtccgattccttctgagttaggccaactctctgagcttgaaacgcttgatttatcggggaatcggtttagtggtgaaatcccagcttctttagggttcttaactcacttaaactacttgcggcttagcaggaatcttttatctgggcaagtccctcacctcgtcgctggcctctcaggtctttctttcttggatctatctttcaacaatctaagcggaccaactccgaatatatcagcaaaagattacagcttcccaagagctttgctcagatgctacacctcgacgggtttgtctgaaaaggacaatagcaaacatcacagcttagtgctctcttttgcatttggcattgttgttgcctttatcatctccctaatgtttctcttcttctgggtgctttggcatcgatcacgtctctcaagatcacacgtgcagcaagactacgaatttgaaatcggccatctgaaaaggttcagttttcgcgaaatacaaaccgcaacaagcaattttagtccaaagaacattttgggacaaggagggtttgggatggtttataaagggtatctcccaaatggaactgtggtggcagttaaaagattgaaagatccgatttatacaggagaagttcagtttcaaaccgaagtagagatgattggcttagctgttcaccgtaaccttttacgcctctttggattctgtatgaccccggaagagagaatgcttgtgtatccgtacatgccaaatggaagcgtagctgatcgtctgagagacaattatggagaaaagccgtctctagattggaatcggaggataagcattgcactcggcgcagctcgaggacttgtttacttgcacgagcaatgcaatccaaagattattcacagagacgtcaaagctgcaaatattctacttgatgagagctttgaagcaatagttggcgattttggtctagcaaagcttttagaccagagagattcacatgtcactaccgcagtccgaggaaccattggacacatcgctcccgagtacctttccactggacagtcctcagagaaaaccgatgttttcggattcggagtactaatccttgaactcataacaggtcataagatgattgatcaaggcaatggtcaagttcgaaaaggaatgatattgagctgggtaaggacattgaaagcagagaagagatttgcagagatggtggacagagatttgaagggagagtttgatgatttggtgttggaggaagtagtggaattggctttgctttgtacacagccacatccgaatctaagaccgaggatgtctcaagtgttgaaggtactagaaggtttagtggaacagtgtgaaggagggtatgaagctagagctccaagtgtctctaggaactacagtaatggtcatgaagagcagtcctttattattgaagccattgagctctctggaccacgatga

SEQ ID NO: 79167 - protein, 576 aa, Arabidopsis thaliana
  peptide (1)..(576): Ceres Seq. ID no. 12649527
MEISLMKFLFLGIWVYYYSVLDSVSAMDSLLSPKGVNYEVAALMSVKNKMKDEKEVLSGWDINSVDPCTWNMVGCSSEGFVVSLLLQNNQLTGPIPSELGQLSELETLDLSGNRFSGEIPASLGFLTHLNYLRLSRNLLSGQVPHLVAGLSGLSFLDLSFNNLSGPTPNISAKDYSFPRALLRCYTSTGLSEKDNSKHHSLVLSFAFGIVVAFIISLMFLFFWVLWHRSRLSRSHVQQDYEFEIGHLKRFSFREIQTATSNFSPKNILGQGGFGMVYKGYLPNGTVVAVKRLKDPIYTGEVQFQTEVEMIGLAVHRNLLRLFGFCMTPEERMLVYPYMPNGSVADRLRDNYGEKPSLDWNRRISIALGAARGLVYLHEQCNPKIIHRDVKAANILLDESFEAIVGDFGLAKLLDQRDSHVTTAVRGTIGHIAPEYLSTGQSSEKTDVFGFGVLILELITGHKMIDQGNGQVRKGMILSWVRTLKAEKRFAEMVDRDLKGEFDDLVLEEVVELALLCTQPHPNLRPRMSQVLKVLEGLVEQCEGGYEARAPSVSRNYSNGHEEQSFIIEAIELSGPR

SEQ ID NO: 79168 - protein, 571 aa, Arabidopsis thaliana
  peptide (1)..(571): Ceres Seq. ID no. 12649528
MKFLFLGIWVYYYSVLDSVSAMDSLLSPKGVNYEVAALMSVKNKMKDEKEVLSGWDINSVDPCTWNMVGCSSEGFVVSLLLQNNQLTGPIPSELGQLSELETLDLSGNRFSGEIPASLGFLTHLNYLRLSRNLLSGQVPHLVAGLSGLSFLDLSFNNLSGPTPNISAKDYSFPRALLRCYTSTGLSEKDNSKHHSLVLSFAFGIVVAFIISLMFLFFWVLWHRSRLSRSHVQQDYEFEIGHLKRFSFREIQTATSNFSPKNILGQGGFGMVYKGYLPNGTVVAVKRLKDPIYTGEVQFQTEVEMIGLAVHRNLLRLFGFCMTPEERMLVYPYMPNGSVADRLRDNYGEKPSLDWNRRISIALGAARGLVYLHEQCNPKIIHRDVKAANILLDESFEAIVGDFGLAKLLDQRDSHVTTAVRGTIGHIAPEYLSTGQSSEKTDVFGFGVLILELITGHKMIDQGNGQVRKGMILSWVRTLKAEKRFAEMVDRDLKGEFDDLVLEEVVELALLCTQPHPNLRPRMSQVLKVLEGLVEQCEGGYEARAPSVSRNYSNGHEEQSFIIEAIELSGPR

SEQ ID NO: 79169 - protein, 550 aa, Arabidopsis thaliana
  peptide (1)..(550): Ceres Seq. ID no. 12649529
MDSLLSPKGVNYEVAALMSVKNKMKDEKEVLSGWDINSVDPCTWNMVGCSSEGFVVSLLLQNNQLTGPIPSELGQLSELETLDLSGNRFSGEIPASLGFLTHLNYLRLSRNLLSGQVPHLVAGLSGLSFLDLSFNNLSGPTPNISAKDYSFPRALLRCYTSTGLSEKDNSKHHSLVLSFAFGIVVAFIISLMFLFFWVLWHRSRLSRSHVQQDYEFEIGHLKRFSFREIQTATSNFSPKNILGQGGFGMVYKGYLPNGTVVAVKRLKDPIYTGEVQFQTEVEMIGLAVHRNLLRLFGFCMTPEERMLVYPYMPNGSVADRLRDNYGEKPSLDWNRRISIALGAARGLVYLHEQCNPKIIHRDVKAANILLDESFEAIVGDFGLAKLLDQRDSHVTTAVRGTIGHIAPEYLSTGQSSEKTDVFGFGVLILELITGHKMIDQGNGQVRKGMILSWVRTLKAEKRFAEMVDRDLKGEFDDLVLEEVVELALLCTQPHPNLRPRMSQVLKVLEGLVEQCEGGYEARAPSVSRNYSNGHEEQSFIIEAIELSGPR

SEQ ID NO: 79170 - DNA, 2130 bp, Arabidopsis thaliana
  misc_feature (1)..(2130): Ceres Seq. ID no. 12649545
  misc_feature (1)..(2130): Ortholog of  Ceres SEQ ID NO 14307374 as cited in SEQ ID NO 54073
atgggttgtcgatggaatccaattgggttccaattctcttgcttcatgttcttgatcattactcttcaatctcgttcttcgttgtccctcgaatccgaaggatttgtattgttgaaattccgggcaagagttgattctgatcctcatggaactcttgcaaattggaatgtttctgatcatgatcatttctgttcttggtttggtgttacgtgtgtcgacaataaagtgcagatgctgaatcttagtggttgttctttgggaggaactttagctccggagcttagtcaattgagtgaattaagatctctaatactatccaagaacaaactctctggtgacattccaaacgaatttgcgagtttcgcgaaattagagttcttggatttgcgagataataacttaaacggagtagttccacccgagctaaataaagtgttgacaccagaaaacttgttgctttctggtaacaaatttgcgggttttatgaccgtaaagttcctgagacttcaatcgctgtataaagtccagatgaacaagaatcgagagctatcttcggtttccgctgatgtcctcgactgtgtcaatagaaaacttggatactgtgtttcaaggagaagtttaataacaagaaacaaggcaaaggcattcgtattgcggattagagcaacttcaagacattacatgaaagcattttcttttatctctcaatacttttggtctgatttggtgcgaagagaatctcatgggaagaattatgtagtgaattatcacccaagtgagaacgaaactagtatcttcaaaagacgtgagttactcgaggaaacaagcaatttagcggctatgcctgcgcctgatacgcccagtccttctcctgagattataactatagtgtttcctcgaagcagcgggtcgtttccagcattaactaatgcaaagaagagaatacctccattgatccctccttcttctcctcctcctctacctaccaacaacaccatcgctagtgatccaccgaggaaattcgaagaaaaatcgaaagggtttaaggacgtttggttgtatgttgtgatcggtgttgctgctttcgtagcgatgctgataatagtagcggttatattcttcttccggaaaagagctgtgaagagtataggtccatggaagactggtttgagtggacaattgcagaaagcttttgttactggtgtacctaagctaaaccggtctgaactagaaacagcctgtgaagatttcagtaatatcattgaagcatttgatggttacactgtctataaaggaactttgtccagtggcgttgagattgcggttgcttcaaccgccattttggaaactagggaatggacaagagctatggaaatgacttaccgcagaaggattgatacaatgtcaagagtcaaccataagaactttattaatctgattggttattgcgaagaagatgaaccgtttaataggatgatggttttcgaatatgctccaaatggaactcttttcgaacatttgcatgataaggaaatggagcatcttgattggaacgcgaggacgaggataataatgggaactgcttattgtctgcaatatatgcacgagctcaatcctccaatctcacacactaaacttgtctcatcagcaatatacttaaccgatgattacgcagcaaaggtcggagaggttcctttcagcggacaaaccgggagtaaaccgagaaaaccgatgagtggtgatttagaccaatctttattgccattacctcctgaaccagagactaatgtctatagctttggagtattaatgcttgagataatctctggaaagctctcagattcagaagaagaaggatcaattctaaaatgggcgtcaaagtatctggagaatgataatttgagagatatgattgatcctacactaacaacgtataaagaagaagaacttgaagctatatgtgacgtggcacgacattgtctgaaacttgacgaaagccaaagaccaaaaatgaaatatgtggttcaacaattgaaagaagtaataaacatatctcaagaacaagcaacaccaagactctctcctctttggtgggcagagcttgagatcttatcctctgaagctacataa

SEQ ID NO: 79171 - protein, 709 aa, Arabidopsis thaliana
  peptide (1)..(709): Ceres Seq. ID no. 12649546
MGCRWNPIGFQFSCFMFLIITLQSRSSLSLESEGFVLLKFRARVDSDPHGTLANWNVSDHDHFCSWFGVTCVDNKVQMLNLSGCSLGGTLAPELSQLSELRSLILSKNKLSGDIPNEFASFAKLEFLDLRDNNLNGVVPPELNKVLTPENLLLSGNKFAGFMTVKFLRLQSLYKVQMNKNRELSSVSADVLDCVNRKLGYCVSRRSLITRNKAKAFVLRIRATSRHYMKAFSFISQYFWSDLVRRESHGKNYVVNYHPSENETSIFKRRELLEETSNLAAMPAPDTPSPSPEIITIVFPRSSGSFPALTNAKKRIPPLIPPSSPPPLPTNNTIASDPPRKFEEKSKGFKDVWLYVVIGVAAFVAMLIIVAVIFFFRKRAVKSIGPWKTGLSGQLQKAFVTGVPKLNRSELETACEDFSNIIEAFDGYTVYKGTLSSGVEIAVASTAILETREWTRAMEMTYRRRIDTMSRVNHKNFINLIGYCEEDEPFNRMMVFEYAPNGTLFEHLHDKEMEHLDWNARTRIIMGTAYCLQYMHELNPPISHTKLVSSAIYLTDDYAAKVGEVPFSGQTGSKPRKPMSGDLDQSLLPLPPEPETNVYSFGVLMLEIISGKLSDSEEEGSILKWASKYLENDNLRDMIDPTLTTYKEEELEAICDVARHCLKLDESQRPKMKYVVQQLKEVINISQEQATPRLSPLWWAELEILSSEAT

SEQ ID NO: 79172 - protein, 694 aa, Arabidopsis thaliana
  peptide (1)..(694): Ceres Seq. ID no. 12649547
MFLIITLQSRSSLSLESEGFVLLKFRARVDSDPHGTLANWNVSDHDHFCSWFGVTCVDNKVQMLNLSGCSLGGTLAPELSQLSELRSLILSKNKLSGDIPNEFASFAKLEFLDLRDNNLNGVVPPELNKVLTPENLLLSGNKFAGFMTVKFLRLQSLYKVQMNKNRELSSVSADVLDCVNRKLGYCVSRRSLITRNKAKAFVLRIRATSRHYMKAFSFISQYFWSDLVRRESHGKNYVVNYHPSENETSIFKRRELLEETSNLAAMPAPDTPSPSPEIITIVFPRSSGSFPALTNAKKRIPPLIPPSSPPPLPTNNTIASDPPRKFEEKSKGFKDVWLYVVIGVAAFVAMLIIVAVIFFFRKRAVKSIGPWKTGLSGQLQKAFVTGVPKLNRSELETACEDFSNIIEAFDGYTVYKGTLSSGVEIAVASTAILETREWTRAMEMTYRRRIDTMSRVNHKNFINLIGYCEEDEPFNRMMVFEYAPNGTLFEHLHDKEMEHLDWNARTRIIMGTAYCLQYMHELNPPISHTKLVSSAIYLTDDYAAKVGEVPFSGQTGSKPRKPMSGDLDQSLLPLPPEPETNVYSFGVLMLEIISGKLSDSEEEGSILKWASKYLENDNLRDMIDPTLTTYKEEELEAICDVARHCLKLDESQRPKMKYVVQQLKEVINISQEQATPRLSPLWWAELEILSSEAT

SEQ ID NO: 79173 - protein, 632 aa, Arabidopsis thaliana
  peptide (1)..(632): Ceres Seq. ID no. 12649548
MLNLSGCSLGGTLAPELSQLSELRSLILSKNKLSGDIPNEFASFAKLEFLDLRDNNLNGVVPPELNKVLTPENLLLSGNKFAGFMTVKFLRLQSLYKVQMNKNRELSSVSADVLDCVNRKLGYCVSRRSLITRNKAKAFVLRIRATSRHYMKAFSFISQYFWSDLVRRESHGKNYVVNYHPSENETSIFKRRELLEETSNLAAMPAPDTPSPSPEIITIVFPRSSGSFPALTNAKKRIPPLIPPSSPPPLPTNNTIASDPPRKFEEKSKGFKDVWLYVVIGVAAFVAMLIIVAVIFFFRKRAVKSIGPWKTGLSGQLQKAFVTGVPKLNRSELETACEDFSNIIEAFDGYTVYKGTLSSGVEIAVASTAILETREWTRAMEMTYRRRIDTMSRVNHKNFINLIGYCEEDEPFNRMMVFEYAPNGTLFEHLHDKEMEHLDWNARTRIIMGTAYCLQYMHELNPPISHTKLVSSAIYLTDDYAAKVGEVPFSGQTGSKPRKPMSGDLDQSLLPLPPEPETNVYSFGVLMLEIISGKLSDSEEEGSILKWASKYLENDNLRDMIDPTLTTYKEEELEAICDVARHCLKLDESQRPKMKYVVQQLKEVINISQEQATPRLSPLWWAELEILSSEAT

SEQ ID NO: 79174 - DNA, 628 bp, Arabidopsis thaliana
  misc_feature (1)..(628): Ceres Seq. ID no. 12649553
  misc_feature (1)..(628): Ortholog of  Ceres SEQ ID NO 12557888 as cited in SEQ ID NO 76
  misc_feature (1)..(628): Ortholog of  Ceres SEQ ID NO 15179616 as cited in SEQ ID NO 1061
  misc_feature (1)..(628): Ortholog of  Ceres SEQ ID NO 13664090 as cited in SEQ ID NO 61005
  misc_feature (1)..(628): Ortholog of  Ceres SEQ ID NO 15174400 as cited in SEQ ID NO 0
ttgtcctcttctcaaacatatctcaacttattgtttgaatataaaaagagatatcaaaaagaagagaagaccaaaaacaaaacaaaaatctctaataaaaatggcttccaaagctatcttcttctctttctttgtcgtctccgccgtgtgtttgtcttctctggcaggtttcgccgccgctgatgctgacgacttcgatcgtttccagattcaaggatcagtttactgtgacacttgccgtgtccaattcgttacccgtctcagcaaattcctcgaaggcgcgaaagtgaagttggagtgcaggagcagaacaaacggaaccataacattgaccaaagaagctgttaccgacaaaacaggaagctacaaaatggaagtaaccggtgaccacgaggaagaagtttgcgagcttgttttggtccaatcaccagacagtggttgcagtgatgtcagcacagaggcttacttacgtaacgccgctaagatcagtttaacggcgaatgacggaatcgtctcccacgagacacgtattgttaaccctctcggtttcatggttcagactccattggctgattgtcctgctgctttcaaggagcttggtattgtccctgacgtaacattctaagcg

SEQ ID NO: 79175 - protein, 207 aa, Arabidopsis thaliana; identical to SEQ ID NO: 27084
  peptide (1)..(207): Ceres Seq. ID no. 12649554

SEQ ID NO: 79176 - protein, 174 aa, Arabidopsis thaliana; identical to SEQ ID NO: 27085
  peptide (1)..(174): Ceres Seq. ID no. 12649555

SEQ ID NO: 79177 - DNA, 606 bp, Arabidopsis thaliana
  misc_feature (1)..(606): Ceres Seq. ID no. 12649613
  misc_feature (1)..(606): Ortholog of  Ceres SEQ ID NO 13661089 as cited in SEQ ID NO 61053
accaccacaaatctcatcgaaatgtcgtctcaagaaacgaaatcagatcaaagagaaggagcagagatctgcaatggcgaatcaaactgcaaacagaaagccaaagagattttatcaaccatgaatctacccaaaggtcttcttcctctagacaacatgacagagatcggtcacaacaaatcaaccggttatgtctggatcaagatcaagaacaaggttcaacatcggtttaaagccattggacgaaacgtatcttacgattcggaggttactgcgatccttgagaatcgtcggatgagtcagctcacgggaatcaagagcaaagagattttgatttgggttacgatctctgagatctttgttaatcatcaagatccgactcaaatcacttttgctaatcctacgggactatcacgtactttccccgtcactgcttttgaagaagacgaatgattcatttgtcaacgctcaccatcatgatactttgcttagctaaattatcttttgttttttccttataattccttttgtttagctaagttctattttcaacatttgtatttctgcatcttttccattagagattttataaaaataataatatag

SEQ ID NO: 79178 - protein, 150 aa, Arabidopsis thaliana; identical to SEQ ID NO: 29819
  peptide (1)..(150): Ceres Seq. ID no. 12649614

SEQ ID NO: 79179 - protein, 143 aa, Arabidopsis thaliana; identical to SEQ ID NO: 29820
  peptide (1)..(143): Ceres Seq. ID no. 12649615

SEQ ID NO: 79180 - protein, 110 aa, Arabidopsis thaliana; identical to SEQ ID NO: 29821
  peptide (1)..(110): Ceres Seq. ID no. 12649616

SEQ ID NO: 79181 - DNA, 1485 bp, Arabidopsis thaliana
  misc_feature (1)..(1485): Ceres Seq. ID no. 12649648
  misc_feature (1)..(1485): Ortholog of  Ceres SEQ ID NO 15169439 as cited in SEQ ID NO 55062
atggttgcgatacccaatattaagataaagtttggtcctcaaggttctgtcagaacattccaaacgttgtctgatagttcgaagaaaattgagcatgtagtgactgaagatttatctcaatcctcggagaaatcaaagaagcgtggtgggcctaaagagctagatgaagttcaacctaagaagaagcagaggctggattgtgattggtctagtcaatgtttggcattgttacgttttttgatggagcaccgtggtggatggctctttaaggagcctgttgatcctgttaaaatggagattcctgattacttcaatgtcatacaaaagccaatggatttaggcactgtcaaatcgaaacttttgaagaatgtctacagtaatgctgatgagtttgcagcggatgttcggttaacttttgccaatgcgatgcattataatcctctgtggaatgaggttcacacgattgcaaaggagattaatgagatttttgaggttagatgggaatcactcatgaagaaaaaggttttgaggttatcctggaatgaagttagagaaggttataagagacagccagttgaacgtgattgttctagacggagcagcactggaacatcagcttcctctggggtgggattgacgaaaccagctaaagagaactccgaaaagggttctctttcgtccaagccagtgaaagtgcagagcaaaaagaatactcctgctgtgacgcctaaagcattagcaacctgtaaatgtggtaggataatttgcatatgcctcaagtcctgtagctcatttggaagtgacgtttgttcgttaacggattgtcaattaaagaacatttcaggtgcacaagcgagcgagttagatcctcaatctaatgggtctgacacttcaaagaaggagagaaatggtagtctcaagtctcagcttgataaaccttcaaacagtgatctgttgggtaatgagttgaaaacggcttttcctgctctgccgccggtacctcctgagaaagctcttcgtgctgcaatactcaaagctcaatatgcaggaaccatcataaaagctaaacacagaatagtccttggccagaataacaaagctgatctgattagaatacagatagaaaaggaacagatggaaagagcacaacgtgaagagaaagctagaattgaagccgagatgagagctgctaaggttgctgaacgaatgagggcacaagacgagttgaaacagaaacgtgagagtcaacggcttgaaatagcaaagatgaaaaaaggcttcgattttgaacggaacaaccactcgaaattgaagaaaaaattcgttaaagtctgtggctgctttagtctgacaaaagctcggttgttacttgaagagttgggtctggttttgaaaaatgattattgtccggaactggaagtgatcgggtcagaaaaatttgatgcaatgagaatggacgatcttgaggaaggagagatcctttag

SEQ ID NO: 79182 - protein, 494 aa, Arabidopsis thaliana
  peptide (1)..(494): Ceres Seq. ID no. 12649649
MVAIPNIKIKFGPQGSVRTFQTLSDSSKKIEHVVTEDLSQSSEKSKKRGGPKELDEVQPKKKQRLDCDWSSQCLALLRFLMEHRGGWLFKEPVDPVKMEIPDYFNVIQKPMDLGTVKSKLLKNVYSNADEFAADVRLTFANAMHYNPLWNEVHTIAKEINEIFEVRWESLMKKKVLRLSWNEVREGYKRQPVERDCSRRSSTGTSASSGVGLTKPAKENSEKGSLSSKPVKVQSKKNTPAVTPKALATCKCGRIICICLKSCSSFGSDVCSLTDCQLKNISGAQASELDPQSNGSDTSKKERNGSLKSQLDKPSNSDLLGNELKTAFPALPPVPPEKALRAAILKAQYAGTIIKAKHRIVLGQNNKADLIRIQIEKEQMERAQREEKARIEAEMRAAKVAERMRAQDELKQKRESQRLEIAKMKKGFDFERNNHSKLKKKFVKVCGCFSLTKARLLLEELGLVLKNDYCPELEVIGSEKFDAMRMDDLEEGEIL

SEQ ID NO: 79183 - protein, 414 aa, Arabidopsis thaliana
  peptide (1)..(414): Ceres Seq. ID no. 12649650
MEHRGGWLFKEPVDPVKMEIPDYFNVIQKPMDLGTVKSKLLKNVYSNADEFAADVRLTFANAMHYNPLWNEVHTIAKEINEIFEVRWESLMKKKVLRLSWNEVREGYKRQPVERDCSRRSSTGTSASSGVGLTKPAKENSEKGSLSSKPVKVQSKKNTPAVTPKALATCKCGRIICICLKSCSSFGSDVCSLTDCQLKNISGAQASELDPQSNGSDTSKKERNGSLKSQLDKPSNSDLLGNELKTAFPALPPVPPEKALRAAILKAQYAGTIIKAKHRIVLGQNNKADLIRIQIEKEQMERAQREEKARIEAEMRAAKVAERMRAQDELKQKRESQRLEIAKMKKGFDFERNNHSKLKKKFVKVCGCFSLTKARLLLEELGLVLKNDYCPELEVIGSEKFDAMRMDDLEEGEIL

SEQ ID NO: 79184 - protein, 397 aa, Arabidopsis thaliana
  peptide (1)..(397): Ceres Seq. ID no. 12649651
MEIPDYFNVIQKPMDLGTVKSKLLKNVYSNADEFAADVRLTFANAMHYNPLWNEVHTIAKEINEIFEVRWESLMKKKVLRLSWNEVREGYKRQPVERDCSRRSSTGTSASSGVGLTKPAKENSEKGSLSSKPVKVQSKKNTPAVTPKALATCKCGRIICICLKSCSSFGSDVCSLTDCQLKNISGAQASELDPQSNGSDTSKKERNGSLKSQLDKPSNSDLLGNELKTAFPALPPVPPEKALRAAILKAQYAGTIIKAKHRIVLGQNNKADLIRIQIEKEQMERAQREEKARIEAEMRAAKVAERMRAQDELKQKRESQRLEIAKMKKGFDFERNNHSKLKKKFVKVCGCFSLTKARLLLEELGLVLKNDYCPELEVIGSEKFDAMRMDDLEEGEIL

SEQ ID NO: 79185 - DNA, 1008 bp, Arabidopsis thaliana
  misc_feature (1)..(1008): Ceres Seq. ID no. 12649686
  misc_feature (1)..(1008): Ortholog of  Ceres SEQ ID NO 13594416 as cited in SEQ ID NO 51058
  misc_feature (1)..(1008): Ortholog of  Ceres SEQ ID NO 13596609 as cited in SEQ ID NO 63070
  misc_feature (1)..(1008): Ortholog of  Ceres SEQ ID NO 12616895 as cited in SEQ ID NO 63909
  misc_feature (1)..(1008): Ortholog of  Ceres SEQ ID NO 14302096 as cited in SEQ ID NO 68356
  misc_feature (1)..(1008): Ortholog of  Ceres SEQ ID NO 13598574 as cited in SEQ ID NO 69083
atgcctttaagcaacaatgtaattggttgcataaacttcatcaccgtcctcctctccattccggtcatcggcgccggaatctggctagccataggaacagtaaactcatgcgtcaagcttcttcaatggccagtaataatcctcggagtcttaatcctcttagtgggtctcgctggtttcattggagggttttggagaatcacatggcttcttgttgtttacttaatcgccatgcttattctcattgtacttttgggttgccttgtcggatttatttacatggttaccataagaggctctggtcatccagaaccaagtagagcttatcttgagtatagtcttcaagatttctctggttggttacgtagaagagttcagagatcttataaatgggaaaggattcgtacttgtttgagtacaactaccatttgccctgaactaaatcagagatacactttggctcaagatttcttcaatgctcatcttgatcccattcaatctggttgctgcaagcccccaacaaaatgtggattcacatttgttaatcctacttattggataagtcccatagatatgtctgctgatatggattgtctaaattggagcaatgaccaaaacactttgtgttacacttgtgattcttgtaaagccggcttgctcgcaaatattaaggtagattggttaaaagcggatatctttctactcttggcgcttatcggattgattatcgtctacattatcgggtgctgcgcattccgtaatgcggaaactgaggatattttcaggaagtacaagcagggttatacttgatcaagatgagaagtttagtggcaaaactgcgaggaattttaatatttactggattcctgtattttagtttctctacgttttggcccctgtagtatgtttttgtgtgaactacctgaacattcgttgtaactggaagattatgttgtatatctatctttgatttgggtttgtgaaacttaactaattatctatttttgt

SEQ ID NO: 79186 - protein, 269 aa, Arabidopsis thaliana
  peptide (1)..(269): Ceres Seq. ID no. 12649687
MPLSNNVIGCINFITVLLSIPVIGAGIWLAIGTVNSCVKLLQWPVIILGVLILLVGLAGFIGGFWRITWLLVVYLIAMLILIVLLGCLVGFIYMVTIRGSGHPEPSRAYLEYSLQDFSGWLRRRVQRSYKWERIRTCLSTTTICPELNQRYTLAQDFFNAHLDPIQSGCCKPPTKCGFTFVNPTYWISPIDMSADMDCLNWSNDQNTLCYTCDSCKAGLLANIKVDWLKADIFLLLALIGLIIVYIIGCCAFRNAETEDIFRKYKQGYT

SEQ ID NO: 79187 - protein, 192 aa, Arabidopsis thaliana
  peptide (1)..(192): Ceres Seq. ID no. 12649688
MLILIVLLGCLVGFIYMVTIRGSGHPEPSRAYLEYSLQDFSGWLRRRVQRSYKWERIRTCLSTTTICPELNQRYTLAQDFFNAHLDPIQSGCCKPPTKCGFTFVNPTYWISPIDMSADMDCLNWSNDQNTLCYTCDSCKAGLLANIKVDWLKADIFLLLALIGLIIVYIIGCCAFRNAETEDIFRKYKQGYT

SEQ ID NO: 79188 - protein, 176 aa, Arabidopsis thaliana
  peptide (1)..(176): Ceres Seq. ID no. 12649689
MVTIRGSGHPEPSRAYLEYSLQDFSGWLRRRVQRSYKWERIRTCLSTTTICPELNQRYTLAQDFFNAHLDPIQSGCCKPPTKCGFTFVNPTYWISPIDMSADMDCLNWSNDQNTLCYTCDSCKAGLLANIKVDWLKADIFLLLALIGLIIVYIIGCCAFRNAETEDIFRKYKQGYT

SEQ ID NO: 79189 - DNA, 1326 bp, Arabidopsis thaliana
  misc_feature (1)..(1326): Ceres Seq. ID no. 12649730
  misc_feature (1)..(1326): Ortholog of  Ceres SEQ ID NO 14306420 as cited in SEQ ID NO 53854
  misc_feature (1)..(1326): Ortholog of  Ceres SEQ ID NO 14306410 as cited in SEQ ID NO 53870
atgaaattcaaattctcgttcccagaagaaactgagcttcgaagaaacgtttacactagtagttccggtgaagaaaacagagtcgtcgttgattctcgtcatgtttctcaacagatcctcactgtccgatctactaactccactttacagagtaaaccggaaaaactaaaccggagaaatttggtggaacaaggattagcgaaagcaagagcatcgattttagaagcttcttcgaatgttaacactacattgttcaaatctgatcttccaaactcagaaatttatcgtaatccatcagctttatatcggagttacttagaaatggagaagaggtttaaggtgtatgtatacgaagaaggcgagccaccgctagttcacgatggaccgtgtaagagtgtttacgcggttgaagggagattcataactgagatggagaaaagaaggactaagtttcgtacttatgatcctaaccaagcttatgtttacttcttgccatttagtgttacttggctggttcgatacttatacgaaggcaattctgatgctaagcctttgaaaacatttgtttccgattatatcagattagtatctactaatcatcctttttggaatcgaactaatggtgctgatcacttcatgcttacttgtcacgattggggacctctgacttcacaagctaatagagatttgttcaacacttcgattcgagttatgtgtaatgctaattcatcagaagggtttaatcctactaaagatgtgactcttcctgagatcaaactctatggtggtgaagttgatcacaaactcaggttatctaaaaccttatccgcttctccgcggccttacctcgggttcttcgcaggcggtgtccacggtccggttagaccgattcttttaaaacactggaaacagcgtgacctggatatgcctgtttatgaataccttcctaaacacttaaactactatgatttcatgagaagttcaaagttctgtttttgtcccagtgggtatgaggtagctagtcctcgagtcatcgaagccatctactctgagtgtatccccgtcattctctcggttaacttcgtgttaccattcactgatgttcttcgttgggagactttctctgtactggtcgacgtttcagagattccgaggttgaaggagattctcatgtcgatctccaatgagaaatatgaatggcttaaaagtaacttgaggtatgtgaggagacatttcgagcttaacgatcctcctcagagatttgatgcatttcacttgactcttcattccatttggttacgtagacttaacttgaagcttacgtaa

SEQ ID NO: 79190 - protein, 441 aa, Arabidopsis thaliana
  peptide (1)..(441): Ceres Seq. ID no. 12649731
MKFKFSFPEETELRRNVYTSSSGEENRVVVDSRHVSQQILTVRSTNSTLQSKPEKLNRRNLVEQGLAKARASILEASSNVNTTLFKSDLPNSEIYRNPSALYRSYLEMEKRFKVYVYEEGEPPLVHDGPCKSVYAVEGRFITEMEKRRTKFRTYDPNQAYVYFLPFSVTWLVRYLYEGNSDAKPLKTFVSDYIRLVSTNHPFWNRTNGADHFMLTCHDWGPLTSQANRDLFNTSIRVMCNANSSEGFNPTKDVTLPEIKLYGGEVDHKLRLSKTLSASPRPYLGFFAGGVHGPVRPILLKHWKQRDLDMPVYEYLPKHLNYYDFMRSSKFCFCPSGYEVASPRVIEAIYSECIPVILSVNFVLPFTDVLRWETFSVLVDVSEIPRLKEILMSISNEKYEWLKSNLRYVRRHFELNDPPQRFDAFHLTLHSIWLRRLNLKLT

SEQ ID NO: 79191 - protein, 334 aa, Arabidopsis thaliana; identical to SEQ ID NO: 72786
  peptide (1)..(334): Ceres Seq. ID no. 12649732

SEQ ID NO: 79192 - protein, 298 aa, Arabidopsis thaliana; identical to SEQ ID NO: 72787
  peptide (1)..(298): Ceres Seq. ID no. 12649733

SEQ ID NO: 79193 - DNA, 1173 bp, Arabidopsis thaliana
  misc_feature (1)..(1173): Ceres Seq. ID no. 12649764
  misc_feature (1)..(1173): Ortholog of  Ceres SEQ ID NO 13654989 as cited in SEQ ID NO 63117
gaactctagtgttaagatttagcagagagtatccgaatgggaaattgtctctcagcttcgacacttcccaccgaaccaaatgctcccaaatcagtggaggagggtgtgaaagtcttcacggtggcagatctgaagaaagcgactaatgatttcggaaaccagatggaactaggagagagcttgggatacatcaatcccaaaacgttatctccggccaagaaaggtgttggcatggccgtcgcggtcaagaaaatttacttagccaatgaacaagcttttcaagattggcttgttgacgtagagtttctacgacataactctcatccaagcttggtgaagctaattggctactgttatgatcgtgatatgttgtttattgtttctgaatactttccaaatggaagcttaggaagttacatcagtagagatagtcgtccaaagtcattgccgtgggagacacgacttaagatatccataggagcggctcagtgtcttgccttcttgcactctaggaagcaagccggtctataccgcagatatctcactgcttcgaaaatcctgctcgactcggacttcaacgcaagagtttcctattttggaaagccaaaagtttctctcgatgaattggtatacaccatcgggttttcaaatgtagcacctagatatcaatacccacctcccgaatacatactctcagggatgtcgaacatggcgggcgatgtgtatagctttggtgttatactacttaaaatgttaactggtttaggaaaagacctcacaatctcagcaaagcgagaaataaaaaataaaaagtacaacattgtggagatgatcgatccagatttgaagaatagctatccacttgaagcgggaagacttatgtgcgagcttattaaacaatgcctagaggtagacccgaagatgcgaccaaccatgcaagaagtgctagataatctgaatgctatagctcagatttgaggagaaactatataagggttactaatgctgaaaacattgtttcactataagacagttataacatagtcaatgtatgcatttgtatacaataactcgtatatgacgagaagtattaagaaacaagacctaattctccattcttatccatcactcaagaacagagctatatgctaatcaactttgaacctttacact

SEQ ID NO: 79194 - protein, 313 aa, Arabidopsis thaliana; identical to SEQ ID NO: 21363
  peptide (1)..(313): Ceres Seq. ID no. 12649765

SEQ ID NO: 79195 - protein, 271 aa, Arabidopsis thaliana; identical to SEQ ID NO: 21364
  peptide (1)..(271): Ceres Seq. ID no. 12649766

SEQ ID NO: 79196 - protein, 248 aa, Arabidopsis thaliana; identical to SEQ ID NO: 21365
  peptide (1)..(248): Ceres Seq. ID no. 12649767

SEQ ID NO: 79197 - DNA, 1020 bp, Arabidopsis thaliana
  misc_feature (1)..(1020): Ceres Seq. ID no. 12649784
  misc_feature (1)..(1020): Ortholog of  Ceres SEQ ID NO 13639663 as cited in SEQ ID NO 57850
atgggtttggattattacgatatattgaaagtgaataggaacgcaacagaggatgatctaaagaaatcttacagaaaattggctatgaaatggcatcctgacaaaaaccctaacaccaaaacagaagctgaagccaagtttaagcaaatctctgaggcttatgaggttttgagtgatccgcagaagcgagcggtgtatgatcaatacggggaagaaggattaagcgatatgccacctcccgggagcacgggaaacaatggaagagcgggaggttttaaccctagaaatgcggaagatatatttgcagagttctttggaagtagtccatttggatttggttcagctggtggtcctggaaggtcaatgaggtttcaatcagacggtggaggaggaatgtttggcgggtttggtggtggaaacaacggtagcgaaaacaatatattcagaacttacagtgaaggcactcctgcgcctaagaaacctccaccggttgagagtaaattgccttgtagccttgaagagttgtattctggatcaactaggaaaatgaagatctctagatccattgttgatgctaatgggagacaagcgcaagagacagagattttgacgattgttgtgaaaccaggatggaaaaaagggacaaagataaagtttccagacaaaggaaatgagcaagtgaatcagttaccagctgatttggtgtttgtaatagacgagaaaccacatgatttgttcacgagagatgggaatgatctcatcacaagcagaagagtaacgcttgcagaagctataggaggaacaactgtgaatatcaacaccctcgatgggcggaatctacccgttggtgtcgcggaaatcgtgagtcccgggtatgagtttgtggttcctggagaagggatgccaatagctaaagaaccaagaaacaaaggtgatcttaagattaagttcgatgttcagtttcccgcaagattgacaacggagcagaaatccgctctcaagcgggtcttagcgggttga

SEQ ID NO: 79198 - protein, 339 aa, Arabidopsis thaliana
  peptide (1)..(339): Ceres Seq. ID no. 12649785
MGLDYYDILKVNRNATEDDLKKSYRKLAMKWHPDKNPNTKTEAEAKFKQISEAYEVLSDPQKRAVYDQYGEEGLSDMPPPGSTGNNGRAGGFNPRNAEDIFAEFFGSSPFGFGSAGGPGRSMRFQSDGGGGMFGGFGGGNNGSENNIFRTYSEGTPAPKKPPPVESKLPCSLEELYSGSTRKMKISRSIVDANGRQAQETEILTIVVKPGWKKGTKIKFPDKGNEQVNQLPADLVFVIDEKPHDLFTRDGNDLITSRRVTLAEAIGGTTVNINTLDGRNLPVGVAEIVSPGYEFVVPGEGMPIAKEPRNKGDLKIKFDVQFPARLTTEQKSALKRVLAG

SEQ ID NO: 79199 - protein, 311 aa, Arabidopsis thaliana
  peptide (1)..(311): Ceres Seq. ID no. 12649786
MKWHPDKNPNTKTEAEAKFKQISEAYEVLSDPQKRAVYDQYGEEGLSDMPPPGSTGNNGRAGGFNPRNAEDIFAEFFGSSPFGFGSAGGPGRSMRFQSDGGGGMFGGFGGGNNGSENNIFRTYSEGTPAPKKPPPVESKLPCSLEELYSGSTRKMKISRSIVDANGRQAQETEILTIVVKPGWKKGTKIKFPDKGNEQVNQLPADLVFVIDEKPHDLFTRDGNDLITSRRVTLAEAIGGTTVNINTLDGRNLPVGVAEIVSPGYEFVVPGEGMPIAKEPRNKGDLKIKFDVQFPARLTTEQKSALKRVLAG

SEQ ID NO: 79200 - protein, 263 aa, Arabidopsis thaliana
  peptide (1)..(263): Ceres Seq. ID no. 12649787
MPPPGSTGNNGRAGGFNPRNAEDIFAEFFGSSPFGFGSAGGPGRSMRFQSDGGGGMFGGFGGGNNGSENNIFRTYSEGTPAPKKPPPVESKLPCSLEELYSGSTRKMKISRSIVDANGRQAQETEILTIVVKPGWKKGTKIKFPDKGNEQVNQLPADLVFVIDEKPHDLFTRDGNDLITSRRVTLAEAIGGTTVNINTLDGRNLPVGVAEIVSPGYEFVVPGEGMPIAKEPRNKGDLKIKFDVQFPARLTTEQKSALKRVLAG

SEQ ID NO: 79201 - DNA, 1805 bp, Arabidopsis thaliana
  misc_feature (1)..(1805): Ceres Seq. ID no. 12649850
  misc_feature (1)..(1805): Ortholog of  Ceres SEQ ID NO 13600220 as cited in SEQ ID NO 0
gcaacacaaaaacatacacactactaataaaccatgaagcttcttatgctcgcctttgtttttctattagctttggcgacttgtaaaggtgacgagtttgtttgtgaagagaacgagccattcacatgtaaccaaactaaacttttcaacagtggcaatttcgaaaaaggcttcatcttcggtgttgcatcttctgcttaccaggtggaaggcggtagaggccgtggacttaacgtttgggatagcttcactcaccgattcccagagaaaggtggagctgatttgggaaatggagacactacttgtgactcatatactctttggcagaaagatatagacgtgatggacgagctcaactctactggctacagattctccattgcgtggtcaagactccttccaaaaggaaagaggagcaggggagtgaacccaggagctattaagtactacaacggtctcatagatggcctcgtcgcaaagaatatgacgccctttgttaccctctttcattgggaccttcctcaaacactacaagatgaatataacggtttcttgaacaaaacgatcgtagacgatttcaaggattacgcggatctatgtttcgagttatttggtgatagggtaaagaactggatcaccatcaaccagctatacacagtgcctactagaggatatgcattgggaacagatgcacccggtcgatgttctcctaagattgacgttagatgtcccggcggaaattcgtcaacagaaccctatattgttgcacataaccagcttcttgctcatgcagcggccgttgatgtttacaggacgaaatataaggatgaccaaaaaggtatgattggaccagtgatgataactagatggtttcttccatttgatcatagtcaagagagcaaagatgcaactgagcgggctaaaatatttttccatggatggttcatggggcctctaacagaaggtaaatacccagacatcatgagggaatatgttggtgatcggcttccagagttcagtgaaacagaagccgcacttgtaaagggttcatatgattttcttggtctcaactattacgtcactcaatacgcccaaaataatcagacgattgttccttcggacgtacacactgccttgatggactcacgcacaactctcacatctaaaaatgcaactggtcatgctcctggtccaccgttcaatgcagccagttactactacccaaaaggcatttactacgtaatggattacttcaaaaccacttacggtgaccctttaatatatgtcactgagaatggatttagtaccccaggtgatgaggactttgagaaggctactgccgattacaagcggattgattatctctgtagtcatctctgtttcctcagtaaagtcatcaaggagaagaatgtcaacgtgaaaggatattttgcttggtctcttggggataattacgaattctgtaacggatttaccgtcagattcggactaagttacgttgatttcgcaaatatcactggtgatagagacctcaaagcatctggcaaatggttccagaagttcataaacgttaccgacgaagactctacgaaccaagatctactccgctcaagcgtctcctccaagaaccgtgatcggaagagtcttgcagatgcatgaaatatccaatccactatatgtccaccaagatcatcttcatgtttcctctttctacttgctccatagataaggagctttttctaccatatgtattaaaataaaatcctaataaaagatgatcaataataataaagactttgtttact

SEQ ID NO: 79202 - protein, 541 aa, Arabidopsis thaliana; identical to SEQ ID NO: 23715
  peptide (1)..(541): Ceres Seq. ID no. 12649851

SEQ ID NO: 79203 - protein, 537 aa, Arabidopsis thaliana; identical to SEQ ID NO: 23716
  peptide (1)..(537): Ceres Seq. ID no. 12649852

SEQ ID NO: 79204 - protein, 438 aa, Arabidopsis thaliana; identical to SEQ ID NO: 23717
  peptide (1)..(438): Ceres Seq. ID no. 12649853

SEQ ID NO: 79205 - DNA, 1483 bp, Arabidopsis thaliana
  misc_feature (1)..(1483): Ceres Seq. ID no. 12649903
  misc_feature (1)..(1483): Ortholog of  Ceres SEQ ID NO 15175507 as cited in SEQ ID NO 20619
  misc_feature (1)..(1483): Ortholog of  Ceres SEQ ID NO 13639663 as cited in SEQ ID NO 57850
  misc_feature (1)..(1483): Ortholog of  Ceres SEQ ID NO 14302150 as cited in SEQ ID NO 0
acaacattctccttctccttctcctcgtgaagacttttctctctgtttattttttttagggttttcgtaagaacagagcaaaaaacatgtttggaagaggaccttcaaggaagagcgataacacaaagttctacgagatccttggtgttcctaagaccgcagcaccagaagatctcaagaaagcttataagaaagccgctatcaaaaaccatcctgataagggtggtgatcccgaaaagtttaaagagttagcacaggcttatgaagttttaagtgatcctgagaagcgtgagatctatgatcaatatggggaagatgcactcaaggaaggaatgggtggtggaggtggtggacacgatccatttgatatcttctcttccttctttggtagtggtggacacccattcggaagtcatagccggggaaggaggcagaggcgtggtgaagatgttgttcatcccttgaaggtttccttagaggatgtttatctcggaacaacaaagaagctctcactttctaggaaggctttgtgctcaaagtgtaacggcaagggttcaaagtctggagcttcaatgaaatgtggtggctgtcaaggttcgggaatgaagatctcgatcaggcagtttggacctggaatgatgcagcaggtgcagcatgcttgtaatgattgcaaaggcacaggagagaccatcaatgatcgggacaggtgtccacaatgcaaaggagagaaggttgtctctgagaagaaggtgcttgaagtaaatgtggagaagggaatgcaacacaatcagaagatcacattcagtggacaagccgatgaagcgcctgatactgtcaccggagatatagtgtttgtcattcagcagaaggagcacccaaagttcaaaagaaagggtgaggatctctttgtggagcacaccatctctctaaccgaggccttgtgtggcttccagtttgtcttgacccatttggacaaaagacagcttctcatcaaatccaagcccggagaggtcgtcaaacctgattcatacaaggcgataagtgatgagggaatgccaatataccaaaggccgttcatgaagggtaagctatacattcacttcacggttgaattcccggaatcgctgagcccggatcagacaaaggccattgaagcagttttgccaaagccaaccaaggcagctataagcgatatggaaatagacgactgcgaagagacgactctgcatgatgtgaacattgaggatgagatgaaaaggaaggcgcaagctcaaagagaggcttatgatgacgatgaggaagatcacccaggcggtgctcagcgtgtgcaatgtgcccagcagtgatcaacatgcgcatcttagtgatctccaatatttgcttctgtcttttctccttttcattgtattatttttgggtctttttatagactttgccaattcagtgggaagaacctcgtcctaattcaaatccttgttacacc

SEQ ID NO: 79206 - protein, 419 aa, Arabidopsis thaliana; identical to SEQ ID NO: 26877
  peptide (1)..(419): Ceres Seq. ID no. 12649904

SEQ ID NO: 79207 - protein, 337 aa, Arabidopsis thaliana; identical to SEQ ID NO: 26878
  peptide (1)..(337): Ceres Seq. ID no. 12649905

SEQ ID NO: 79208 - protein, 257 aa, Arabidopsis thaliana; identical to SEQ ID NO: 26879
  peptide (1)..(257): Ceres Seq. ID no. 12649906

SEQ ID NO: 79209 - DNA, 1410 bp, Arabidopsis thaliana
  misc_feature (1)..(1410): Ceres Seq. ID no. 12650066
  misc_feature (1)..(1410): Ortholog of  Ceres SEQ ID NO 13659033 as cited in SEQ ID NO 66372
  misc_feature (1)..(1410): Ortholog of  Ceres SEQ ID NO 13655724 as cited in SEQ ID NO 68973
  misc_feature (1)..(1410): Ortholog of  Ceres SEQ ID NO 12625899 as cited in SEQ ID NO 69079
  misc_feature (1)..(1410): Ortholog of  Ceres SEQ ID NO 15180366 as cited in SEQ ID NO 0
atgtctaagaactcaaacgttgaagagaatggaggagcaaagccaatctgtgaagctttgaggagattcaaaaggtcgaggcttgtgttcgagccgtctttaggagtgttggggtttttcttggttggggtctgtttggtttgcagttttttcttctttgattacagaagcgttgctaaaagctatggcctttcggataaatctgagagattcgtttggctcaagtttgacaatatcagcagcagcagcagtagtagtagtaatagttcaaagagagttgggtttctggaagagagtggaagtgggtgtgatgtgttcgatggagattgggtttgggacgagtcttatccattgtatcaatccaaagattgcagatttctcgatgaagggtttaggtgtagtgactttggaaggtctgatttgttctatactcagtggcgttggcaacctagacactgtaatttgcccagatttgatgcaaaactgatgctggagaaactccgggacaagcggcttgtgtttgttggcgattcaataggaagaaaccagtgggagtctctactttgtctactatcttctgcagtcaagaacgagagcttgatttatgaaataaatggaagtccgatcacaaagcacaaagggttcttggtgttcaaatttgaggagtacaattgcacagtggagtactacagatctccatttttggttcctcaaagcagaccaccgattggatcacctggaaaggtcaagacaagtttgaaactggacactatggattggacttcaagcaaatggagagatgctgacgttttagtgctcaatactggacactggtggaacgaggggaaaactactagaacgggatgttactttcaagaaggagaagaagtaaaattgaagatgaatgtagatgatgcttataagcgagctctgaataccgttgtgaaatggatacataccgagctcgattcaaacaaaactcaagtcttctttcgcactttcgcccccgtgcatttcaggggaggagattggaaaacaggaggaacatgtcatatggagacattaccagagattggaacctcattggcttcatcagagacctgggaacagttaaagatcctcagagatgtgttgtcacataactcaaacagatcagagactgttaaagtgaaactgttgaacataacggcaatggctgctcaaagaaaagatggtcacccatcactctactatctcggtccgcatggtcctgcaccgcttcatcgccaagactgtagccactggtgccttcccggtgttcctgacacgtggaacgagctcttctatgcattatttatgaaacaagaagctccttcttcttctaaaagagttgaagaagcgaacagtacaggaaatgttacaatgtcgtga

SEQ ID NO: 79210 - protein, 469 aa, Arabidopsis thaliana
  peptide (1)..(469): Ceres Seq. ID no. 12650067
MSKNSNVEENGGAKPICEALRRFKRSRLVFEPSLGVLGFFLVGVCLVCSFFFFDYRSVAKSYGLSDKSERFVWLKFDNISSSSSSSSNSSKRVGFLEESGSGCDVFDGDWVWDESYPLYQSKDCRFLDEGFRCSDFGRSDLFYTQWRWQPRHCNLPRFDAKLMLEKLRDKRLVFVGDSIGRNQWESLLCLLSSAVKNESLIYEINGSPITKHKGFLVFKFEEYNCTVEYYRSPFLVPQSRPPIGSPGKVKTSLKLDTMDWTSSKWRDADVLVLNTGHWWNEGKTTRTGCYFQEGEEVKLKMNVDDAYKRALNTVVKWIHTELDSNKTQVFFRTFAPVHFRGGDWKTGGTCHMETLPEIGTSLASSETWEQLKILRDVLSHNSNRSETVKVKLLNITAMAAQRKDGHPSLYYLGPHGPAPLHRQDCSHWCLPGVPDTWNELFYALFMKQEAPSSSKRVEEANSTGNVTMS

SEQ ID NO: 79211 - protein, 307 aa, Arabidopsis thaliana
  peptide (1)..(307): Ceres Seq. ID no. 12650068
MLEKLRDKRLVFVGDSIGRNQWESLLCLLSSAVKNESLIYEINGSPITKHKGFLVFKFEEYNCTVEYYRSPFLVPQSRPPIGSPGKVKTSLKLDTMDWTSSKWRDADVLVLNTGHWWNEGKTTRTGCYFQEGEEVKLKMNVDDAYKRALNTVVKWIHTELDSNKTQVFFRTFAPVHFRGGDWKTGGTCHMETLPEIGTSLASSETWEQLKILRDVLSHNSNRSETVKVKLLNITAMAAQRKDGHPSLYYLGPHGPAPLHRQDCSHWCLPGVPDTWNELFYALFMKQEAPSSSKRVEEANSTGNVTMS

SEQ ID NO: 79212 - DNA, 748 bp, Arabidopsis thaliana
  misc_feature (1)..(748): Ceres Seq. ID no. 12650069
  misc_feature (1)..(748): Ortholog of  Ceres SEQ ID NO 13654738 as cited in SEQ ID NO 62613
actctcctttctcaattaatataagccaatcaccatcaaaatatcatttgagaactctagaaacctgcttcaatggcgatcgacaagcttccacttcttctctttctctccatactcctctgcctcaatcgccctgttcttagcgacaccgatgaagaggacattcttctcacaggaatcaacagctacagaacaacacagaatctaacaatcttaagcaagaacgaaaacgcagaatgcctagctgacgaaatcgcagaccaattcaagaacaaaccttgtaccaacgacactggctcagccacagtacctggaactgagccacagttcgcaaactaccctcagattctagcaaaatgccacttgaacgtctcagacacgagagacggctcgattatgcctgcatgtgttcctcgtttagaatcaaacctcgtcctcacaaacttcaccaagtcacaatactcaatgagtttgaacgattccaagtttacagggattggtattggtaaagaagatgattggatcgttgtagtcctcactaccaacacaccagaaggaagctattctacagctactcctacaaaacaagagtctaatggcttcacctttggtattggtctcgttagttatttagtcattttcatgtactcttccttttgtttctttctcttttgagatatcaaatgttttgatgagttatcaaacactctttcctttagactatcaagaataaattttgttaaagatt

SEQ ID NO: 79213 - protein, 200 aa, Arabidopsis thaliana
  peptide (1)..(200): Ceres Seq. ID no. 12650070
MAIDKLPLLLFLSILLCLNRPVLSDTDEEDILLTGINSYRTTQNLTILSKNENAECLADEIADQFKNKPCTNDTGSATVPGTEPQFANYPQILAKCHLNVSDTRDGSIMPACVPRLESNLVLTNFTKSQYSMSLNDSKFTGIGIGKEDDWIVVVLTTNTPEGSYSTATPTKQESNGFTFGIGLVSYLVIFMYSSFCFFLF

SEQ ID NO: 79214 - DNA, 811 bp, Arabidopsis thaliana
  misc_feature (1)..(811): Ceres Seq. ID no. 12650071
  misc_feature (1)..(811): Ortholog of  Ceres SEQ ID NO 13583358 as cited in SEQ ID NO 62221
  misc_feature (1)..(811): Ortholog of  Ceres SEQ ID NO 15179036 as cited in SEQ ID NO 0
actatacagtaatcgaaggaaccaagaaacggtctcaatcttattttcagcgatggcgatgtcaattctaaagctaagaaatttatcggcactaagatcggcggcaaatagtgcccggatcggagtttcatcgaggggtttctcaaagctcgcggaaggcactgacataacctcggcggcgcctggcgtttctctccagaaagctcgcagctgggacgaaggtgtttcctccaaattctccaccacgccattgtcagatatcttcaaggggaagaaagtcgtcatctttggtcttcctggggcttacacgggagtttgttcacagcagcatgtgcctagctacaagagccacattgataagtttaaagccaaaggcattgattctgtcatctgtgtctctgttaatgatccctttgctatcaatggttgggcagagaagcttggtgccaaagatgcaattgagttttatggagattttgatgggaaatttcacaaaagcttggggctagacaaggatctctctgctgcattgctcgggccacggtctgagagatggtcggcttatgtagaagacgggaaggttaaggcggtgaatgtggaagaagcaccgtctgacttcaaggttacaggggcagaagtcatcttaggacagatctaaaaagtatttccagagttgctgtttcttctgagttgcaactgataataagtttgatccgaacatgtctcaaggatcagaccaagtaacagcttcacttcttttgttttgtttccacagtttcagtttaaataaaacttatgtgtcttgccgttt

SEQ ID NO: 79215 - protein, 218 aa, Arabidopsis thaliana; identical to SEQ ID NO: 29695
  peptide (1)..(218): Ceres Seq. ID no. 12650072

SEQ ID NO: 79216 - protein, 201 aa, Arabidopsis thaliana; identical to SEQ ID NO: 29696
  peptide (1)..(201): Ceres Seq. ID no. 12650073

SEQ ID NO: 79217 - protein, 199 aa, Arabidopsis thaliana; identical to SEQ ID NO: 29697
  peptide (1)..(199): Ceres Seq. ID no. 12650074

SEQ ID NO: 79218 - DNA, 1806 bp, Arabidopsis thaliana
  misc_feature (1)..(1806): Ceres Seq. ID no. 12650116
  misc_feature (1)..(1806): Ortholog of  Ceres SEQ ID NO 14312423 as cited in SEQ ID NO 55259
atggcagcttcttcaactaatgctcgtctcaccaaccctcctcgtctactctccaaaccccgactttcacctacctccgtcgccaatctccgttttccagccgccgatttctccactcgcttctttgccgattcttcgtccccgcggctaaggagtgtaccgtttccggtggtattttccgatcaaaggcgccggcgaagcatggaacctagcaatgtctatgtggcttcaaattccacggaaatggagatcggaagtcatgatatcgtgaagaatccgagcttgatctgtgctccagtgatggcggattcaatagacaagatggtgattgaaacgagtaaagcccatgaattgggtgcagacttggttgaaattcgattagattggctaaaggacttcaatcctcttgaggatctaaaaaccattattaagaaatctcctctacccactttattcacctacagaccaaaatgggaaggtggtcagtatgaaggtgatgaaaatgagagacgggatgtgcttcgtctggccatggagttgggagctgattatattgatgttgaacttcaggtggcaagtgagttcatcaaatctattgacggaaagaagcctggaaagttcaaagtaattgtttcatcgcacaactatcagaataccccttctgttgaggaccttgatggccttgttgcaagaatacaacagactggagccgacattgttaagattgctactactgctgtggacattgcagatgttgctcgcatgttccatataacctcaaaagctcaagttcccacaattggacttgttatgggtgaaagaggtttgatgtctcggattctttgttcgaaatttggtggttatttgacctttggcaccttagattctagtaaagtttctgcgccaggtcaaccaacgatcaaggatctgttggatctttacaactttagaagaattggtcctgacacaaaggtatatggaattattggcaagcctgtcagccacagcaaatcacctattgttcacaatcaagctttcaaatcagttgattttaatggagtatatgtccacctgttagttgataatcttgtaagctttcttcaagcatactcatcctctgatttcgctggattcagctgtacaattccgcacaaagaagctgcattgcaatgttgtgatgaagttgatccattggcaaagtctataggagctgtgaacactatactaaggagaaaaagtgacggaaagttgttgggttacaacacagattgtattggttccatttctgctattgaggatggcctacgaagtgatccaagcagtgtaccttcttcttcttcgccattggccagtaaaacagtggtggttattggtgctggtggagcaggcaaggctcttgcttatggtgcaaaagaaaagggggccaaagttgtaattgctaatcgaacttacgaacgagcactagaactcgcagaagcaataggaggcaaagcgttatctctgacagatttagataactatcacccagaagatggcatggttttggcaaacacaacatctatgggtatgcaaccaaatgttgaggagactccaatttctaaggatgcattgaagcactatgcactggtctttgatgcggtatacactccgagaatcaccagactgttgagggaagcagaagaaagtggagccataactgtctcagggtcagagatgtttgtcaggcaggcttacgagcagtttgagatcttcaccggtttacccgctccaaaggaactctactggcaaataatgtcaaagtactga

SEQ ID NO: 79219 - protein, 601 aa, Arabidopsis thaliana
  peptide (1)..(601): Ceres Seq. ID no. 12650117
MAASSTNARLTNPPRLLSKPRLSPTSVANLRFPAADFSTRFFADSSSPRLRSVPFPVVFSDQRRRRSMEPSNVYVASNSTEMEIGSHDIVKNPSLICAPVMADSIDKMVIETSKAHELGADLVEIRLDWLKDFNPLEDLKTIIKKSPLPTLFTYRPKWEGGQYEGDENERRDVLRLAMELGADYIDVELQVASEFIKSIDGKKPGKFKVIVSSHNYQNTPSVEDLDGLVARIQQTGADIVKIATTAVDIADVARMFHITSKAQVPTIGLVMGERGLMSRILCSKFGGYLTFGTLDSSKVSAPGQPTIKDLLDLYNFRRIGPDTKVYGIIGKPVSHSKSPIVHNQAFKSVDFNGVYVHLLVDNLVSFLQAYSSSDFAGFSCTIPHKEAALQCCDEVDPLAKSIGAVNTILRRKSDGKLLGYNTDCIGSISAIEDGLRSDPSSVPSSSSPLASKTVVVIGAGGAGKALAYGAKEKGAKVVIANRTYERALELAEAIGGKALSLTDLDNYHPEDGMVLANTTSMGMQPNVEETPISKDALKHYALVFDAVYTPRITRLLREAEESGAITVSGSEMFVRQAYEQFEIFTGLPAPKELYWQIMSKY

SEQ ID NO: 79220 - protein, 534 aa, Arabidopsis thaliana
  peptide (1)..(534): Ceres Seq. ID no. 12650118
MEPSNVYVASNSTEMEIGSHDIVKNPSLICAPVMADSIDKMVIETSKAHELGADLVEIRLDWLKDFNPLEDLKTIIKKSPLPTLFTYRPKWEGGQYEGDENERRDVLRLAMELGADYIDVELQVASEFIKSIDGKKPGKFKVIVSSHNYQNTPSVEDLDGLVARIQQTGADIVKIATTAVDIADVARMFHITSKAQVPTIGLVMGERGLMSRILCSKFGGYLTFGTLDSSKVSAPGQPTIKDLLDLYNFRRIGPDTKVYGIIGKPVSHSKSPIVHNQAFKSVDFNGVYVHLLVDNLVSFLQAYSSSDFAGFSCTIPHKEAALQCCDEVDPLAKSIGAVNTILRRKSDGKLLGYNTDCIGSISAIEDGLRSDPSSVPSSSSPLASKTVVVIGAGGAGKALAYGAKEKGAKVVIANRTYERALELAEAIGGKALSLTDLDNYHPEDGMVLANTTSMGMQPNVEETPISKDALKHYALVFDAVYTPRITRLLREAEESGAITVSGSEMFVRQAYEQFEIFTGLPAPKELYWQIMSKY

SEQ ID NO: 79221 - protein, 520 aa, Arabidopsis thaliana
  peptide (1)..(520): Ceres Seq. ID no. 12650119
MEIGSHDIVKNPSLICAPVMADSIDKMVIETSKAHELGADLVEIRLDWLKDFNPLEDLKTIIKKSPLPTLFTYRPKWEGGQYEGDENERRDVLRLAMELGADYIDVELQVASEFIKSIDGKKPGKFKVIVSSHNYQNTPSVEDLDGLVARIQQTGADIVKIATTAVDIADVARMFHITSKAQVPTIGLVMGERGLMSRILCSKFGGYLTFGTLDSSKVSAPGQPTIKDLLDLYNFRRIGPDTKVYGIIGKPVSHSKSPIVHNQAFKSVDFNGVYVHLLVDNLVSFLQAYSSSDFAGFSCTIPHKEAALQCCDEVDPLAKSIGAVNTILRRKSDGKLLGYNTDCIGSISAIEDGLRSDPSSVPSSSSPLASKTVVVIGAGGAGKALAYGAKEKGAKVVIANRTYERALELAEAIGGKALSLTDLDNYHPEDGMVLANTTSMGMQPNVEETPISKDALKHYALVFDAVYTPRITRLLREAEESGAITVSGSEMFVRQAYEQFEIFTGLPAPKELYWQIMSKY

SEQ ID NO: 79222 - DNA, 2160 bp, Arabidopsis thaliana
  misc_feature (1)..(2160): Ceres Seq. ID no. 12650157
  misc_feature (1)..(2160): Ortholog of  Ceres SEQ ID NO 13593889 as cited in SEQ ID NO 53305
  misc_feature (1)..(2160): Ortholog of  Ceres SEQ ID NO 13581959 as cited in SEQ ID NO 56156
atggttaagcttcttcaagacccgattacacctaacaaggagctgctgaagaagatgatagagctagagaaaagtcaggagcatctaatgcaggagatgtctcggctcaaggtctccacggagcttcggaaggagagccgtatccagtgttccatgaatctgagaccatcgccctggaagttcactcataaacagtatctcaatattttgcagtccatggcacaatctgttcatgccttcgatctcaatatgcgaattatcttttggaatgctatggcggaaaaggtttatgggtactctgctgcagaagcagttggacagaaccctattgacgttatggtagatgatcgggatgctccctttgccatgactattgctcaactttgttccaatggagagagctggactggcaagtttcctgtcaagcgcagaacaggagagaaattctcagctgtcactacgtgttcccccttctatgctgatgacggttctcttattgggatcgtttctatcacaagtgacgtagcaccatatctgaacccaacaatctctttggctaaattaaaggcttcagaagtcgaaaccagctctacccctgcaaggaatagttttgcctttaaacttgggttggacaccaaaggagctgttgtatcgaaacttggccttgattctgatcagcctatacaagttgctatagcatcaaagatatctgatttggcatccaaggtgagaaacaaggtcaggtcgaaaatgccagcaggtgatagtagtgtcacagtatttgagggtgaaactggggatagtcatcattcagatcatggagtcttcggtgctactctctctgaccacatggatgatgcagcatcaagtggtgctagcacaccaagaggggactttatccaatctccttttggtgtattcacatgtaacgatgacaagttttcttccgaacccttcatagattccagtgatggatatcctataacccttttcacctcaaaagctgaagaatggatggtaaagaaaggtttgtcttggccatggaaagggaatgagcaggaaggttcaagagtaaagcctacttattctgtatggccttgtgtacagaatgaacaaaagaaagataagtctcaccagatcaaccgctattctggtgttaagtctaaaagccatgcctctgaaagtaataagcctaccaataacaaggcttctggtttgcggtcttcttgtataaatgcgaacagcgctattagccgtggaattatcagtcacagtactatgaacaaggtggatacaaatagtaattgcttggagtatgaaattttgtgggatgatttgacaatcggagaacaaatcggacaaggctcatgtggaactgtctatcacggtctttggtttggatctgatgtagctgtaaaattgatctccaaacaagaatattcagaagaggtcatacaatcttttagacaagaggtatcgttgatgcaaagacttagacatcctaacgttctgctgtttatgggagctgtgactttacctcagggtctctgtatagtgtcagagttccttccacgtggaagtctatttcgtctactgcagagaaatatgtcaaaacttgattggaggcggcgtatcaatatggccttggacattgctcgcggcatgaattatcttcaccgctgtagtccccccatcatccatcgtgatttgaagtcatcaaatctgctggtagacaagaacttgaccgttaaggtagctgactttggtctatcgcgtattaagcatcatacatacctaaccagcaagtcgggaaagggaatgcctcaatggatggcaccagaagttcttcgaaatgagtctgctgatgagaagtctgacatttacagctttggagtagtactatgggagcttgccacagagaagatcccatgggaaaatctcaactcgatgcaggtgatcggagctgtggggttcatgaaccagaggctggaaattccaaaggacattgatcctgattggatctcactaatagagagctgttggcacagggatgcaaagctgagacccacattccaagaactgatggagagactaagagacctgcaaagaaagtatacaatacagttccaagcgactcgtgctgcgttatctgacaagtga

SEQ ID NO: 79223 - protein, 719 aa, Arabidopsis thaliana
  peptide (1)..(719): Ceres Seq. ID no. 12650158
MVKLLQDPITPNKELLKKMIELEKSQEHLMQEMSRLKVSTELRKESRIQCSMNLRPSPWKFTHKQYLNILQSMAQSVHAFDLNMRIIFWNAMAEKVYGYSAAEAVGQNPIDVMVDDRDAPFAMTIAQLCSNGESWTGKFPVKRRTGEKFSAVTTCSPFYADDGSLIGIVSITSDVAPYLNPTISLAKLKASEVETSSTPARNSFAFKLGLDTKGAVVSKLGLDSDQPIQVAIASKISDLASKVRNKVRSKMPAGDSSVTVFEGETGDSHHSDHGVFGATLSDHMDDAASSGASTPRGDFIQSPFGVFTCNDDKFSSEPFIDSSDGYPITLFTSKAEEWMVKKGLSWPWKGNEQEGSRVKPTYSVWPCVQNEQKKDKSHQINRYSGVKSKSHASESNKPTNNKASGLRSSCINANSAISRGIISHSTMNKVDTNSNCLEYEILWDDLTIGEQIGQGSCGTVYHGLWFGSDVAVKLISKQEYSEEVIQSFRQEVSLMQRLRHPNVLLFMGAVTLPQGLCIVSEFLPRGSLFRLLQRNMSKLDWRRRINMALDIARGMNYLHRCSPPIIHRDLKSSNLLVDKNLTVKVADFGLSRIKHHTYLTSKSGKGMPQWMAPEVLRNESADEKSDIYSFGVVLWELATEKIPWENLNSMQVIGAVGFMNQRLEIPKDIDPDWISLIESCWHRDAKLRPTFQELMERLRDLQRKYTIQFQATRAALSDK

SEQ ID NO: 79224 - protein, 701 aa, Arabidopsis thaliana
  peptide (1)..(701): Ceres Seq. ID no. 12650159
MIELEKSQEHLMQEMSRLKVSTELRKESRIQCSMNLRPSPWKFTHKQYLNILQSMAQSVHAFDLNMRIIFWNAMAEKVYGYSAAEAVGQNPIDVMVDDRDAPFAMTIAQLCSNGESWTGKFPVKRRTGEKFSAVTTCSPFYADDGSLIGIVSITSDVAPYLNPTISLAKLKASEVETSSTPARNSFAFKLGLDTKGAVVSKLGLDSDQPIQVAIASKISDLASKVRNKVRSKMPAGDSSVTVFEGETGDSHHSDHGVFGATLSDHMDDAASSGASTPRGDFIQSPFGVFTCNDDKFSSEPFIDSSDGYPITLFTSKAEEWMVKKGLSWPWKGNEQEGSRVKPTYSVWPCVQNEQKKDKSHQINRYSGVKSKSHASESNKPTNNKASGLRSSCINANSAISRGIISHSTMNKVDTNSNCLEYEILWDDLTIGEQIGQGSCGTVYHGLWFGSDVAVKLISKQEYSEEVIQSFRQEVSLMQRLRHPNVLLFMGAVTLPQGLCIVSEFLPRGSLFRLLQRNMSKLDWRRRINMALDIARGMNYLHRCSPPIIHRDLKSSNLLVDKNLTVKVADFGLSRIKHHTYLTSKSGKGMPQWMAPEVLRNESADEKSDIYSFGVVLWELATEKIPWENLNSMQVIGAVGFMNQRLEIPKDIDPDWISLIESCWHRDAKLRPTFQELMERLRDLQRKYTIQFQATRAALSDK

SEQ ID NO: 79225 - protein, 690 aa, Arabidopsis thaliana
  peptide (1)..(690): Ceres Seq. ID no. 12650160
MQEMSRLKVSTELRKESRIQCSMNLRPSPWKFTHKQYLNILQSMAQSVHAFDLNMRIIFWNAMAEKVYGYSAAEAVGQNPIDVMVDDRDAPFAMTIAQLCSNGESWTGKFPVKRRTGEKFSAVTTCSPFYADDGSLIGIVSITSDVAPYLNPTISLAKLKASEVETSSTPARNSFAFKLGLDTKGAVVSKLGLDSDQPIQVAIASKISDLASKVRNKVRSKMPAGDSSVTVFEGETGDSHHSDHGVFGATLSDHMDDAASSGASTPRGDFIQSPFGVFTCNDDKFSSEPFIDSSDGYPITLFTSKAEEWMVKKGLSWPWKGNEQEGSRVKPTYSVWPCVQNEQKKDKSHQINRYSGVKSKSHASESNKPTNNKASGLRSSCINANSAISRGIISHSTMNKVDTNSNCLEYEILWDDLTIGEQIGQGSCGTVYHGLWFGSDVAVKLISKQEYSEEVIQSFRQEVSLMQRLRHPNVLLFMGAVTLPQGLCIVSEFLPRGSLFRLLQRNMSKLDWRRRINMALDIARGMNYLHRCSPPIIHRDLKSSNLLVDKNLTVKVADFGLSRIKHHTYLTSKSGKGMPQWMAPEVLRNESADEKSDIYSFGVVLWELATEKIPWENLNSMQVIGAVGFMNQRLEIPKDIDPDWISLIESCWHRDAKLRPTFQELMERLRDLQRKYTIQFQATRAALSDK

SEQ ID NO: 79226 - DNA, 931 bp, Arabidopsis thaliana
  misc_feature (1)..(931): Ceres Seq. ID no. 12650302
  misc_feature (1)..(931): Ortholog of  Ceres SEQ ID NO 14303446 as cited in SEQ ID NO 59378
atgagcgcgacggagctgccgacgaaggaggcacacatacttaaaggccacgagggggcggttttagcggcgaggtttaacggtgacggaaactacgctctcacctgtggcaaggatcgaactatccgcctctggaacccgcaccgtggaatcttaatcaagacctacaaatctcatggccgcgaagtccgcgacgttcatgttacttcagacaatgccaaattttgctcatgtggtggtgatcggcaagtttactactgggatgtttcaactggacgtgtaatccgtaaattccgtggtcatgatggagaggtcaatgcagtgaagttcaatgattcgtcgtctgtggttgtatcagctgggttcgatcgttcgctacgtgtatgggactgcagatctcacagtgttgagccagtacagatcattgatacatttttggatacagtcatgtctgttgttttaacaaagactgagattattggtggtagtgtcgatggaacagttcgcacatttgacatgcgtatcggtagggagatgtcagataacctaggccaaccggttaactgtatatcgatatcaaatgatggaaactgcgttttagctggttgcttggattctactctgcgtctacttgacaggaccacaggagagctactccaagtctataaaggtcatatttccaagtcatttaaaacggattgttgcctcacgaattcggatgcacatgtgattggaggatcagaggatggattggttttcttttgggatttggtagatgcaaaagtgctatcgaaatttagagctcacgatttagtggtgacaagcgtgagttaccacccgaaggaagactgtatgttgacttcttcggtcgatggtacaattcgtgtctggaaaaaatgaagaaacaacaaatcttgacttcgattgattt

SEQ ID NO: 79227 - protein, 299 aa, Arabidopsis thaliana; identical to SEQ ID NO: 23167
  peptide (1)..(299): Ceres Seq. ID no. 12650303

SEQ ID NO: 79228 - protein, 150 aa, Arabidopsis thaliana
  peptide (1)..(150): Ceres Seq. ID no. 12650304
MSVVLTKTEIIGGSVDGTVRTFDMRIGREMSDNLGQPVNCISISNDGNCVLAGCLDSTLRLLDRTTGELLQVYKGHISKSFKTDCCLTNSDAHVIGGSEDGLVFFWDLVDAKVLSKFRAHDLVVTSVSYHPKEDCMLTSSVDGTIRVWKK

SEQ ID NO: 79229 - DNA, 1332 bp, Arabidopsis thaliana
  misc_feature (1)..(1332): Ceres Seq. ID no. 12650391
  misc_feature (1)..(1332): Ortholog of  Ceres SEQ ID NO 13655640 as cited in SEQ ID NO 63844
  misc_feature (1)..(1332): Ortholog of  Ceres SEQ ID NO 13584744 as cited in SEQ ID NO 69137
atgggtggaataccagaatccattggaaatctgtctagcttgaccagcttagatttggaggataatcacttaactgatcgcattccatccactctcggtaatctcaagaatctacagttctttagaaaaactggaatcatcgctggagttgttagcggaatagcggttattctactaggattcttcttctttttcttctgcaaggataaacataaaggatataaacgagacgtatttgtggatgttgcaggaacgaactttaaaaaaggtttgatttcaggtgaagtggacagaaggattgcttttggacagttgagaagatttgcatggagagagcttcagttggctacagatgagttcagtgaaaagaatgttctcggacaaggaggctttgggaaagtttacaaaggattgctttcggatggcaccaaagtcgctgtaaaaagattgactgattttgaacgtccaggaggagatgaagctttccagagagaagttgagatgataagtgtagctgttcataggaatctgcttcgccttatcggcttttgtacaacacaaactgaacgacttttggtgtatcctttcatgcagaatctaagtgttgcatattgcttaagagagattaaacccggggatccagttctggattggttcaggaggaaacagattgcgttaggtgcagcacgaggactcgaatatcttcatgaacattgcaacccgaagatcatacacagagatgtgaaagctgcaaatgtgttactagatgaagactttgaagcagtggttggtgattttggtttagccaagttggtagatgttagaaggactaatgtaaccactcaggtccgaggaacaatgggtcatattgcaccagaatgtatatccacagggaaatcgtcagagaaaaccgatgttttcgggtacggaattatgcttctggagcttgtaactggacaaagagcaattgatttctcgcggttagaggaagaagatgatgtcttattgctagaccatgtgaagaaactggaaagagagaagagattagaagacatagtagataagaagcttgatgaggattatataaaggaagaagttgaaatgatgatacaagtagctctgctatgcacacaagcagcaccggaagaacgaccagcgatgtcggaagtagtaagaatgctagaaggagaagggcttgcagagagatgggaagagtggcagaatcttgaagtgacgagacaagaagagtttcagaggttgcagaggagatttgattggggtgaagattccattaataatcaagatgctattgaattatctggtggaagatag

SEQ ID NO: 79230 - protein, 443 aa, Arabidopsis thaliana
  peptide (1)..(443): Ceres Seq. ID no. 12650392
MGGIPESIGNLSSLTSLDLEDNHLTDRIPSTLGNLKNLQFFRKTGIIAGVVSGIAVILLGFFFFFFCKDKHKGYKRDVFVDVAGTNFKKGLISGEVDRRIAFGQLRRFAWRELQLATDEFSEKNVLGQGGFGKVYKGLLSDGTKVAVKRLTDFERPGGDEAFQREVEMISVAVHRNLLRLIGFCTTQTERLLVYPFMQNLSVAYCLREIKPGDPVLDWFRRKQIALGAARGLEYLHEHCNPKIIHRDVKAANVLLDEDFEAVVGDFGLAKLVDVRRTNVTTQVRGTMGHIAPECISTGKSSEKTDVFGYGIMLLELVTGQRAIDFSRLEEEDDVLLLDHVKKLEREKRLEDIVDKKLDEDYIKEEVEMMIQVALLCTQAAPEERPAMSEVVRMLEGEGLAERWEEWQNLEVTRQEEFQRLQRRFDWGEDSINNQDAIELSGGR

SEQ ID NO: 79231 - protein, 276 aa, Arabidopsis thaliana
  peptide (1)..(276): Ceres Seq. ID no. 12650393
MISVAVHRNLLRLIGFCTTQTERLLVYPFMQNLSVAYCLREIKPGDPVLDWFRRKQIALGAARGLEYLHEHCNPKIIHRDVKAANVLLDEDFEAVVGDFGLAKLVDVRRTNVTTQVRGTMGHIAPECISTGKSSEKTDVFGYGIMLLELVTGQRAIDFSRLEEEDDVLLLDHVKKLEREKRLEDIVDKKLDEDYIKEEVEMMIQVALLCTQAAPEERPAMSEVVRMLEGEGLAERWEEWQNLEVTRQEEFQRLQRRFDWGEDSINNQDAIELSGGR

SEQ ID NO: 79232 - protein, 247 aa, Arabidopsis thaliana
  peptide (1)..(247): Ceres Seq. ID no. 12650394
MQNLSVAYCLREIKPGDPVLDWFRRKQIALGAARGLEYLHEHCNPKIIHRDVKAANVLLDEDFEAVVGDFGLAKLVDVRRTNVTTQVRGTMGHIAPECISTGKSSEKTDVFGYGIMLLELVTGQRAIDFSRLEEEDDVLLLDHVKKLEREKRLEDIVDKKLDEDYIKEEVEMMIQVALLCTQAAPEERPAMSEVVRMLEGEGLAERWEEWQNLEVTRQEEFQRLQRRFDWGEDSINNQDAIELSGGR

SEQ ID NO: 79233 - DNA, 783 bp, Arabidopsis thaliana
  misc_feature (1)..(783): Ceres Seq. ID no. 12650413
  misc_feature (1)..(783): Ortholog of  Ceres SEQ ID NO 13581889 as cited in SEQ ID NO 50900
  misc_feature (1)..(783): Ortholog of  Ceres SEQ ID NO 13581902 as cited in SEQ ID NO 52223
atggctcgtaccaagcaaaccgcaaggaaatccaccggaggaaaagccccaaggaaacaactcgcaacaaaggcggcgaggaaatcagctccggcgaccggaggagtaaagaagccacacagattccgtcctggaactgttgccctaagagaaatcaggaagtatcagaagagcactgagcttctgatccgcaagcttccgttccagcgtttggttcgtgagatcgctcaggatttcaaaacagatctgcgtttccagagcagcgccgtcgcagcacttcaggaagcggctgaagcatacctcgttggattgtttgaagacaccaatctttgcgcgattcatgctaagagagtcactatcatgcctaaggatattcaattgactgctagaatatccaccggaggaaaagctccgaggaagcaattagcgccaaaagcggcgagacaatctgcaccagcaacgggaggagtgaagaagccacacagattccgtccaggaactgttgcgttgagagatattaggaaataccaaaagagtaccgagattttgatcagaaagcttccgtttcagcgacttgttcgtgagatcgctcaagatttcaaaacggatctgaggtttcagagcagtgccgtcgctgctctccaggaagctgctgaggcttaccttgttgggttattcgaagatacaaacctctgtgcgattcacgcaaagagggtgacgatcatgcctaaagagatccaattagcgagaaggattagaggtgagagagctcgaggagagtga

SEQ ID NO: 79234 - protein, 260 aa, Arabidopsis thaliana
  peptide (1)..(260): Ceres Seq. ID no. 12650414
MARTKQTARKSTGGKAPRKQLATKAARKSAPATGGVKKPHRFRPGTVALREIRKYQKSTELLIRKLPFQRLVREIAQDFKTDLRFQSSAVAALQEAAEAYLVGLFEDTNLCAIHAKRVTIMPKDIQLTARISTGGKAPRKQLAPKAARQSAPATGGVKKPHRFRPGTVALRDIRKYQKSTEILIRKLPFQRLVREIAQDFKTDLRFQSSAVAALQEAAEAYLVGLFEDTNLCAIHAKRVTIMPKEIQLARRIRGERARGE

SEQ ID NO: 79235 - protein, 140 aa, Arabidopsis thaliana
  peptide (1)..(140): Ceres Seq. ID no. 12650415
MPKDIQLTARISTGGKAPRKQLAPKAARQSAPATGGVKKPHRFRPGTVALRDIRKYQKSTEILIRKLPFQRLVREIAQDFKTDLRFQSSAVAALQEAAEAYLVGLFEDTNLCAIHAKRVTIMPKEIQLARRIRGERARGE

SEQ ID NO: 79236 - DNA, 1359 bp, Arabidopsis thaliana
  misc_feature (1)..(1359): Ceres Seq. ID no. 12650441
  misc_feature (1)..(1359): Ortholog of  Ceres SEQ ID NO 13597260 as cited in SEQ ID NO 63885
atggctcctccaatgacgaattgcttaacgttttctctgtcaccaatggagatgttgaaatcaactgatcagtctcacttctcttcttcttacgacgattcttctactccttatctcatcgataacttctatgctttcaaagaagaagctgagatagaagctgctgctgcttcaatggcggattcaacaaccttatctacttttttcgatcattctcagactcagattccaaagctggaagatttcctcggtgattcctttgtccgttactctgataaccaaacagagacccaagactcttcttctctcactccattctacgatccacgtcaccgcaccgttgccgaaggagttacagggttcttctctgatcatcatcagccagatttcaagacgataaactcgggaccagaaatcttcgatgactcaacaacttccaacatcggtggtactcatctctccagtcacgtggtggagtcatcaacgacggcgaagttagggtttaacggtgattgcaccaccaccggaggagttttgtctctaggggttaacaacacatcagatcaacctttgagctgtaacaatggcgagagaggtggaaacagtaacaagaagaaaacagtttctaagaaggaaacatcagatgattcaaagaagaagattgtcgaaacattgggacaaagaacttcaatttatcgtggagtcacccgacatagatggactggaagatacgaagcgcatctatgggataacagctgtaggagggaaggtcaagccagaaaaggacgtcaaggtggatatgacaaggaagatagagcagctagagcctatgacttggcagctttaaaatactggggttctactgctactacaaattttccggtctcgagttattcaaaagaacttgaggaaatgaatcacatgaccaagcaagagtttattgcatctcttaggaggaaaagtagcggtttttcgagaggagcttcaatatatagaggtgtcacaaggcatcatcaacaaggtcgctggcaagcaagaatcggccgtgtcgcaggaaacaaagatctttacctcggaacctttggaggagcagctgcgaaacgccacaaactcaaactcgctcttgaatctccttcttcatcatcctctgaccataacctccaacaacaacagttgcttccgtcctcttctccctcggatcaaaaccctaactcaatcccatgtggcattccatttgagccttcagttctctattaccaccagaacttctttcagcattatcctttggtctctgactctacaattcaagctcctatgaaccaagctgagtttttcttgtggcctaaccagtcttactaa

SEQ ID NO: 79237 - protein, 452 aa, Arabidopsis thaliana
  peptide (1)..(452): Ceres Seq. ID no. 12650442
MAPPMTNCLTFSLSPMEMLKSTDQSHFSSSYDDSSTPYLIDNFYAFKEEAEIEAAAASMADSTTLSTFFDHSQTQIPKLEDFLGDSFVRYSDNQTETQDSSSLTPFYDPRHRTVAEGVTGFFSDHHQPDFKTINSGPEIFDDSTTSNIGGTHLSSHVVESSTTAKLGFNGDCTTTGGVLSLGVNNTSDQPLSCNNGERGGNSNKKKTVSKKETSDDSKKKIVETLGQRTSIYRGVTRHRWTGRYEAHLWDNSCRREGQARKGRQGGYDKEDRAARAYDLAALKYWGSTATTNFPVSSYSKELEEMNHMTKQEFIASLRRKSSGFSRGASIYRGVTRHHQQGRWQARIGRVAGNKDLYLGTFGGAAAKRHKLKLALESPSSSSSDHNLQQQQLLPSSSPSDQNPNSIPCGIPFEPSVLYYHQNFFQHYPLVSDSTIQAPMNQAEFFLWPNQSY

SEQ ID NO: 79238 - protein, 448 aa, Arabidopsis thaliana
  peptide (1)..(448): Ceres Seq. ID no. 12650443
MTNCLTFSLSPMEMLKSTDQSHFSSSYDDSSTPYLIDNFYAFKEEAEIEAAAASMADSTTLSTFFDHSQTQIPKLEDFLGDSFVRYSDNQTETQDSSSLTPFYDPRHRTVAEGVTGFFSDHHQPDFKTINSGPEIFDDSTTSNIGGTHLSSHVVESSTTAKLGFNGDCTTTGGVLSLGVNNTSDQPLSCNNGERGGNSNKKKTVSKKETSDDSKKKIVETLGQRTSIYRGVTRHRWTGRYEAHLWDNSCRREGQARKGRQGGYDKEDRAARAYDLAALKYWGSTATTNFPVSSYSKELEEMNHMTKQEFIASLRRKSSGFSRGASIYRGVTRHHQQGRWQARIGRVAGNKDLYLGTFGGAAAKRHKLKLALESPSSSSSDHNLQQQQLLPSSSPSDQNPNSIPCGIPFEPSVLYYHQNFFQHYPLVSDSTIQAPMNQAEFFLWPNQSY

SEQ ID NO: 79239 - protein, 437 aa, Arabidopsis thaliana
  peptide (1)..(437): Ceres Seq. ID no. 12650444
MEMLKSTDQSHFSSSYDDSSTPYLIDNFYAFKEEAEIEAAAASMADSTTLSTFFDHSQTQIPKLEDFLGDSFVRYSDNQTETQDSSSLTPFYDPRHRTVAEGVTGFFSDHHQPDFKTINSGPEIFDDSTTSNIGGTHLSSHVVESSTTAKLGFNGDCTTTGGVLSLGVNNTSDQPLSCNNGERGGNSNKKKTVSKKETSDDSKKKIVETLGQRTSIYRGVTRHRWTGRYEAHLWDNSCRREGQARKGRQGGYDKEDRAARAYDLAALKYWGSTATTNFPVSSYSKELEEMNHMTKQEFIASLRRKSSGFSRGASIYRGVTRHHQQGRWQARIGRVAGNKDLYLGTFGGAAAKRHKLKLALESPSSSSSDHNLQQQQLLPSSSPSDQNPNSIPCGIPFEPSVLYYHQNFFQHYPLVSDSTIQAPMNQAEFFLWPNQSY

SEQ ID NO: 79240 - DNA, 1410 bp, Arabidopsis thaliana
  misc_feature (1)..(1410): Ceres Seq. ID no. 12650445
  misc_feature (1)..(1410): Ortholog of  Ceres SEQ ID NO 13657138 as cited in SEQ ID NO 65923
  misc_feature (1)..(1410): Ortholog of  Ceres SEQ ID NO 13584744 as cited in SEQ ID NO 69137
atggctgttgaagagatggagaagaagatcaaaggaagccaagagacggagctacataaaaacgacttatcaatcgaagacccatctccaagatgcgtgcttgaaattccggtaatgagttcagattccgataacagcagcagttgtagctcgtgttctcctgataaatcatcgtcgccattatcaacaactcctccaaacgtttcgtcttttcatcaatggaacaagatgatcgaatccatcaagaagaaatcaattaggagattctctgtcattcctctcctcgctagctacgagctcacccgcaaaaagaaacaaccgaaactatctccttgttcagaaaacgacttcgattgtgatcaaatcctcgtcgctaaaccttcgtggcgtaatttcaccttcgacgaactcgttgccgccaccgacaattttaatcccggtaaagttcaaatcttgaaaagacgatattatccccaaaagaacatgattgggaaaggaggacatgcggaggtgtacaaaggggttttaccggacggagagactgtggcgatcaagaagctgacgagacatgcaaaggaagtagaagaacgagtcagtgatttcttatcggagcttgggataatcgcacatgttaaccatccaaacgcagctaggcttcgtggtttcagttgtgatcgcggtttgcattttgtgcttgagtactcttctcatggcagtcttgcttctctactctttggatcagaggagtgtttggattggaagaaacggtataaagtggctatgggtatagctgatggtttgagttatcttcataacgattgccctcgacggattattcaccgagacatcaaagcttccaacattttgctctctcaagactacgaagctcagatttcggattttggactagctaagtggctcccagagcattggcctcatcacattgttttccctatcgaaggcacattcggatatctagctccagagtacttcatgcacgggattgtcgatgagaagacggatgtttttgcttttggtgtattgcttctagagatcataactggtcgtcgagctgttgataccgatagccggcaaagcatagttatgtgggcaaaacctcttctggagaagaacaacatggaagaaatagttgatcctcagctaggcaatgactttgatgaaaccgagatgaaacgagtgatgcaaacagcttcaatgtgcatacaccatgtatccactatgcgtcctgacatgaaccggttggttcagctgttgcgcggagatgaccagttagctgaacaaaaaccaggtggagcaagaacagtgagtctcgacgattgcgacttagatcacacctcttcctcttaccttaacgatctcactcgacatagacagctcttaatggagtaa

SEQ ID NO: 79241 - protein, 469 aa, Arabidopsis thaliana
  peptide (1)..(469): Ceres Seq. ID no. 12650446
MAVEEMEKKIKGSQETELHKNDLSIEDPSPRCVLEIPVMSSDSDNSSSCSSCSPDKSSSPLSTTPPNVSSFHQWNKMIESIKKKSIRRFSVIPLLASYELTRKKKQPKLSPCSENDFDCDQILVAKPSWRNFTFDELVAATDNFNPGKVQILKRRYYPQKNMIGKGGHAEVYKGVLPDGETVAIKKLTRHAKEVEERVSDFLSELGIIAHVNHPNAARLRGFSCDRGLHFVLEYSSHGSLASLLFGSEECLDWKKRYKVAMGIADGLSYLHNDCPRRIIHRDIKASNILLSQDYEAQISDFGLAKWLPEHWPHHIVFPIEGTFGYLAPEYFMHGIVDEKTDVFAFGVLLLEIITGRRAVDTDSRQSIVMWAKPLLEKNNMEEIVDPQLGNDFDETEMKRVMQTASMCIHHVSTMRPDMNRLVQLLRGDDQLAEQKPGGARTVSLDDCDLDHTSSSYLNDLTRHRQLLME

SEQ ID NO: 79242 - protein, 464 aa, Arabidopsis thaliana
  peptide (1)..(464): Ceres Seq. ID no. 12650447
MEKKIKGSQETELHKNDLSIEDPSPRCVLEIPVMSSDSDNSSSCSSCSPDKSSSPLSTTPPNVSSFHQWNKMIESIKKKSIRRFSVIPLLASYELTRKKKQPKLSPCSENDFDCDQILVAKPSWRNFTFDELVAATDNFNPGKVQILKRRYYPQKNMIGKGGHAEVYKGVLPDGETVAIKKLTRHAKEVEERVSDFLSELGIIAHVNHPNAARLRGFSCDRGLHFVLEYSSHGSLASLLFGSEECLDWKKRYKVAMGIADGLSYLHNDCPRRIIHRDIKASNILLSQDYEAQISDFGLAKWLPEHWPHHIVFPIEGTFGYLAPEYFMHGIVDEKTDVFAFGVLLLEIITGRRAVDTDSRQSIVMWAKPLLEKNNMEEIVDPQLGNDFDETEMKRVMQTASMCIHHVSTMRPDMNRLVQLLRGDDQLAEQKPGGARTVSLDDCDLDHTSSSYLNDLTRHRQLLME

SEQ ID NO: 79243 - protein, 431 aa, Arabidopsis thaliana
  peptide (1)..(431): Ceres Seq. ID no. 12650448
MSSDSDNSSSCSSCSPDKSSSPLSTTPPNVSSFHQWNKMIESIKKKSIRRFSVIPLLASYELTRKKKQPKLSPCSENDFDCDQILVAKPSWRNFTFDELVAATDNFNPGKVQILKRRYYPQKNMIGKGGHAEVYKGVLPDGETVAIKKLTRHAKEVEERVSDFLSELGIIAHVNHPNAARLRGFSCDRGLHFVLEYSSHGSLASLLFGSEECLDWKKRYKVAMGIADGLSYLHNDCPRRIIHRDIKASNILLSQDYEAQISDFGLAKWLPEHWPHHIVFPIEGTFGYLAPEYFMHGIVDEKTDVFAFGVLLLEIITGRRAVDTDSRQSIVMWAKPLLEKNNMEEIVDPQLGNDFDETEMKRVMQTASMCIHHVSTMRPDMNRLVQLLRGDDQLAEQKPGGARTVSLDDCDLDHTSSSYLNDLTRHRQLLME

SEQ ID NO: 79244 - DNA, 2211 bp, Arabidopsis thaliana
  misc_feature (1)..(2211): Ceres Seq. ID no. 12650453
  misc_feature (1)..(2211): Ortholog of  Ceres SEQ ID NO 13655640 as cited in SEQ ID NO 63844
atggaaacgagaagtcgaagcccaccgtgtcgtactctgaaaaatctgagaaagttcctcctaggtcgagatcaaaaccttcctaggtgctcttcgctttcactgcccccaatctcttccttctccgcttgtgttctgaaatcatcatcgattggggctgacatagaggatgtgggagaagtaattcaaccaatcacgaatcatcattcatcccgcgatcaggcaatcttcgtttttggagcagaagccagattctacaggacttgcctgatacagcacacgttgatatcatcaggctaccgatgctgttttcgacaaggtgatcccggggacatattttaccacggggatgcaactcccgatgaagatggaacagtgaacttcaacaacgctgaacaaacatctcaggttggttggattacttattcaaagaaggtgcctatatggagtcataaaactggtaaggcttcagatttcagcaccagtttctccttcaaaatcgatgctcgtaatctttcagcagatggtcatggaatctgtttctttcttgctcctatgggagctcaactacctgcatactcagttggtggtttcttgaatttgttcactcggaagaataattactcatcttcgtttccgctagttcatgttgaatttgacacgtttaacaatccaggatgggatcctaatgatgttggatctcatgttgggatcaataacaactctcttgtttcttccaactacacttcttggaatgcaagctctcacagccaagatatttgtcatgcaaagatctcttatgattccgtgaccaagaatttaagtgtgacttgggcttatgagctaacagcaacctctgatcctaaggagagttcaagcctttcttacatcatcgacctcgctaaggttctgccatcagatgttatgttcgggtttatagctgccgctgggacaaacacagaggaacatagacttttatcatgggagctcagttcaagtttggacagcgacaaagccgatagcaggataggactagtaattggcatttcggcttccgggtttgtttttctgacgtttatggtcatcacaaccgtggtggtttggtcacggaagcaaagaaagaagaaagaaagagatatagaaaacatgatatcgataaacaaagaccttgaaagggaagcaggaccaagaaagttttcttataaggatcttgtgtcagcaaccaacagattctcaagccatagaaagctaggtgaaggaggatttggagcagtttatgaaggaaacttgaaagaaatcaatacaatggttgcggtgaagaaactatccggtgattcaaggcagggaaagaacgagtttttaaacgaagttaagatcatcagcaaactgagacatcgaaacctcgtgcagctcatcggttggtgtaatgagaaaaatgagttcttgctgatatatgagttagttccaaatggtagcttgaactctcacctctttgggaaaagacccaatttactttcttgggacataaggtacaagataggtcttggtttagcctctgctctgctttatcttcatgaagaatgggatcaatgtgtactgcacagagacatcaaggcaagtaatataatgcttgacagtgaattcaatgtaaagttaggtgatttcgggttggctcggctaatgaaccatgaacttggttcccatacaacggggttggctggaacttttgggtacatggcacctgaatatgtaatgaaaggaagtgcgagtaaagaatctgatatatatagctttggaattgttttactagagattgtcacagggagaaaatcgctggaacgtacacaagaagataacagtgatacagagagtgatgatgagaagagtctagtggagaaagtttgggagctttatggaaaacaagaactgatcacttcatgtgttgatgacaaattgggtgaggatttcgacaagaaagaagctgaatgtcttctggttttagggttatggtgtgctcatcctgataaaaactcgagaccttcgataaaacaagggatccaagtcatgaattttgagtcaccattgcctgatcttccattgaagaggcctgttgctatgtattacatctcgactactacttcttcttcttctccctcagttaactcaaatggagtttctgtaacgttctcaggcatcgagtatggtcgttaa

SEQ ID NO: 79245 - protein, 736 aa, Arabidopsis thaliana
  peptide (1)..(736): Ceres Seq. ID no. 12650454
METRSRSPPCRTLKNLRKFLLGRDQNLPRCSSLSLPPISSFSACVLKSSSIGADIEDVGEVIQPITNHHSSRDQAIFVFGAEARFYRTCLIQHTLISSGYRCCFRQGDPGDIFYHGDATPDEDGTVNFNNAEQTSQVGWITYSKKVPIWSHKTGKASDFSTSFSFKIDARNLSADGHGICFFLAPMGAQLPAYSVGGFLNLFTRKNNYSSSFPLVHVEFDTFNNPGWDPNDVGSHVGINNNSLVSSNYTSWNASSHSQDICHAKISYDSVTKNLSVTWAYELTATSDPKESSSLSYIIDLAKVLPSDVMFGFIAAAGTNTEEHRLLSWELSSSLDSDKADSRIGLVIGISASGFVFLTFMVITTVVVWSRKQRKKKERDIENMISINKDLEREAGPRKFSYKDLVSATNRFSSHRKLGEGGFGAVYEGNLKEINTMVAVKKLSGDSRQGKNEFLNEVKIISKLRHRNLVQLIGWCNEKNEFLLIYELVPNGSLNSHLFGKRPNLLSWDIRYKIGLGLASALLYLHEEWDQCVLHRDIKASNIMLDSEFNVKLGDFGLARLMNHELGSHTTGLAGTFGYMAPEYVMKGSASKESDIYSFGIVLLEIVTGRKSLERTQEDNSDTESDDEKSLVEKVWELYGKQELITSCVDDKLGEDFDKKEAECLLVLGLWCAHPDKNSRPSIKQGIQVMNFESPLPDLPLKRPVAMYYISTTTSSSSPSVNSNGVSVTFSGIEYGR

SEQ ID NO: 79246 - protein, 551 aa, Arabidopsis thaliana; identical to SEQ ID NO: 73007
  peptide (1)..(551): Ceres Seq. ID no. 12650455

SEQ ID NO: 79247 - protein, 428 aa, Arabidopsis thaliana
  peptide (1)..(428): Ceres Seq. ID no. 12650456
MFGFIAAAGTNTEEHRLLSWELSSSLDSDKADSRIGLVIGISASGFVFLTFMVITTVVVWSRKQRKKKERDIENMISINKDLEREAGPRKFSYKDLVSATNRFSSHRKLGEGGFGAVYEGNLKEINTMVAVKKLSGDSRQGKNEFLNEVKIISKLRHRNLVQLIGWCNEKNEFLLIYELVPNGSLNSHLFGKRPNLLSWDIRYKIGLGLASALLYLHEEWDQCVLHRDIKASNIMLDSEFNVKLGDFGLARLMNHELGSHTTGLAGTFGYMAPEYVMKGSASKESDIYSFGIVLLEIVTGRKSLERTQEDNSDTESDDEKSLVEKVWELYGKQELITSCVDDKLGEDFDKKEAECLLVLGLWCAHPDKNSRPSIKQGIQVMNFESPLPDLPLKRPVAMYYISTTTSSSSPSVNSNGVSVTFSGIEYGR

SEQ ID NO: 79248 - DNA, 960 bp, Arabidopsis thaliana
  misc_feature (1)..(960): Ceres Seq. ID no. 12650477
  misc_feature (1)..(960): Ortholog of  Ceres SEQ ID NO 12625452 as cited in SEQ ID NO 63642
atgatgaatgtttctggagaatgtgtaggccgtgaaagatgcgaggaattagccaagtcttcttcgttttaccggaaagtttactcggagatagaagaaattggatgggaaccaataaggagattaggtggagatttaacgttttttagctttcacattctagataagaagggaagagctcacaacttagaaattcaactgaacagagactatcctaattcaccaccttctgtttctgcgcgaattaacttttgcttcgatgtaggatgtgccatatatgtttacactagaatggtcaacaagttcaagattgaaggatgtaatgcaccaattccaaaaggtagatctaagactttgctacattctctctttcatttggactatcttcaagaattttggtctgtcttggacaatatcgataaatctctatgtgttgttgatgtcaagcaaccagctcgtgcctctgctattcgccggattgatgctgggaatgattgtatcatcattgttcatatcgacttcaaagaccctaaatccctaccagagtcccggtttattggtcctgtgccttcagctacgcatatgaacaacttgcatatgttatggagaagaaattgcaaaagatggtcaaatgaaagatcatttcctgagaaccttgaatgtattctaggtactgagcttccaaagcctctaggtctccaagtggaagacgatcaacaacaagttgaatgtgggatttgctatgcgcagtttctacccaccgatgaggagctcggagctagaagtgggacacgaacagattacacatgtgaaaacatcagttgcaacaagtctttccatagcctctgcctcacagactggttaaggtctatcacaacaacaagacagtcatttgatgttctgtttgggaactgcccttattgttcagacccagttgcagtcaaaaccagcaacaaatag

SEQ ID NO: 79249 - protein, 319 aa, Arabidopsis thaliana
  peptide (1)..(319): Ceres Seq. ID no. 12650478
MMNVSGECVGRERCEELAKSSSFYRKVYSEIEEIGWEPIRRLGGDLTFFSFHILDKKGRAHNLEIQLNRDYPNSPPSVSARINFCFDVGCAIYVYTRMVNKFKIEGCNAPIPKGRSKTLLHSLFHLDYLQEFWSVLDNIDKSLCVVDVKQPARASAIRRIDAGNDCIIIVHIDFKDPKSLPESRFIGPVPSATHMNNLHMLWRRNCKRWSNERSFPENLECILGTELPKPLGLQVEDDQQQVECGICYAQFLPTDEELGARSGTRTDYTCENISCNKSFHSLCLTDWLRSITTTRQSFDVLFGNCPYCSDPVAVKTSNK

SEQ ID NO: 79250 - protein, 318 aa, Arabidopsis thaliana
  peptide (1)..(318): Ceres Seq. ID no. 12650479
MNVSGECVGRERCEELAKSSSFYRKVYSEIEEIGWEPIRRLGGDLTFFSFHILDKKGRAHNLEIQLNRDYPNSPPSVSARINFCFDVGCAIYVYTRMVNKFKIEGCNAPIPKGRSKTLLHSLFHLDYLQEFWSVLDNIDKSLCVVDVKQPARASAIRRIDAGNDCIIIVHIDFKDPKSLPESRFIGPVPSATHMNNLHMLWRRNCKRWSNERSFPENLECILGTELPKPLGLQVEDDQQQVECGICYAQFLPTDEELGARSGTRTDYTCENISCNKSFHSLCLTDWLRSITTTRQSFDVLFGNCPYCSDPVAVKTSNK

SEQ ID NO: 79251 - protein, 222 aa, Arabidopsis thaliana
  peptide (1)..(222): Ceres Seq. ID no. 12650480
MVNKFKIEGCNAPIPKGRSKTLLHSLFHLDYLQEFWSVLDNIDKSLCVVDVKQPARASAIRRIDAGNDCIIIVHIDFKDPKSLPESRFIGPVPSATHMNNLHMLWRRNCKRWSNERSFPENLECILGTELPKPLGLQVEDDQQQVECGICYAQFLPTDEELGARSGTRTDYTCENISCNKSFHSLCLTDWLRSITTTRQSFDVLFGNCPYCSDPVAVKTSNK

SEQ ID NO: 79252 - DNA, 1105 bp, Arabidopsis thaliana
  misc_feature (1)..(1105): Ceres Seq. ID no. 12650481
  misc_feature (1)..(1105): Ortholog of  Ceres SEQ ID NO 13581092 as cited in SEQ ID NO 54771
  misc_feature (1)..(1105): Ortholog of  Ceres SEQ ID NO 13594298 as cited in SEQ ID NO 57803
  misc_feature (1)..(1105): Ortholog of  Ceres SEQ ID NO 13503476 as cited in SEQ ID NO 61978
  misc_feature (1)..(1105): Ortholog of  Ceres SEQ ID NO 12578438 as cited in SEQ ID NO 62201
  misc_feature (1)..(1105): Ortholog of  Ceres SEQ ID NO 12617675 as cited in SEQ ID NO 64656
acttttacaactaactcataagtaaaacacagacagtttttagatggctaagatatattccccttcttttcccggtactctctgtctttgcatttttactctcttgacgctaatgttcattcgggtttccgctcgacccgcgacattcgtcgaggatttcaaagccgcctggtcggaatctcacatccgtcaaatggaagacggaaaagctatccagctcgtccttgatcagagcactggatgtggatttgcttccaaaagaaaatatctattcggacgagtgagcatgaagatcaaactcattcccggagactctgccggtacggtcaccgctttctacatgaactccgatacggccacggtgagagacgagctagattttgagttcttgggaaacagaagtggtcaaccttactcagtgcaaacaaacatatttgctcatggcaaaggagatagagaacaaagagttaatctttggttcgacccatctatggattaccacacttacactatcttatggtcacacaaacacattgttttttacgtagacgatgtgccaataagagaatacaaaaacaacgaagccaagaacatagcttacccaacatcacaacctatgggagtatactcaacattatgggaagcagatgactgggcaacacgtggtggattagagaaaattgattggagcaaagctccattttatgcttattacaaagatttcgacatcgaaggttgtcctgttcctggaccaaccttttgtccatcgaaccctcataattggtgggaaggttatgcctatcagtctcttaacgccgttgaagctcgacgttaccggtgggttagagtaaaccatatggtttatgattattgtactgaccggtctaggtttcctgtcccaccacccgagtgtcgtgcttgaaaataattgcatacgtacgttgcaatgatcatgtttcgtcttgtacgagattttatatataaattgtgggaaaatgtggattgtattgtcctcttacgcaattgtgcagacgtacgtgagtgtgtatagatataattgtgatttgtggttatttgaaatttttataaacatagatgaattctg

SEQ ID NO: 79253 - protein, 292 aa, Arabidopsis thaliana; identical to SEQ ID NO: 28915
  peptide (1)..(292): Ceres Seq. ID no. 12650482

SEQ ID NO: 79254 - protein, 269 aa, Arabidopsis thaliana; identical to SEQ ID NO: 28916
  peptide (1)..(269): Ceres Seq. ID no. 12650483

SEQ ID NO: 79255 - protein, 242 aa, Arabidopsis thaliana; identical to SEQ ID NO: 28917
  peptide (1)..(242): Ceres Seq. ID no. 12650484

SEQ ID NO: 79256 - DNA, 408 bp, Arabidopsis thaliana
  misc_feature (1)..(408): Ceres Seq. ID no. 12650513
  misc_feature (1)..(408): Ortholog of  Ceres SEQ ID NO 15224558 as cited in SEQ ID NO 58612
atgagggtttccaaccctaacttaaaaatccagggtttctacactcgtaatcaagaatcgatgacatggcctagtgttggcaagtacaaagtggacattgcatccttcgagtctatagccttgcctgagctacaggtcaaagacgataccaatcttttcatcattgatgaagttggcaagatggagatgtttagtccatccttttttccggctgtcctcaatgttttggactccaacgttcctcttcttgcttccattcctagcccaaaatttggtcgacatcttcctgaagtggcaaggttgaagaaccaaccgggagtgaatgtaatctccctgagtgcgactaacagagatcccatgaaagaacatatctttgatgttttctctggttggctgcccaagcaatag

SEQ ID NO: 79257 - protein, 135 aa, Arabidopsis thaliana
  peptide (1)..(135): Ceres Seq. ID no. 12650514
MRVSNPNLKIQGFYTRNQESMTWPSVGKYKVDIASFESIALPELQVKDDTNLFIIDEVGKMEMFSPSFFPAVLNVLDSNVPLLASIPSPKFGRHLPEVARLKNQPGVNVISLSATNRDPMKEHIFDVFSGWLPKQ

SEQ ID NO: 79258 - protein, 115 aa, Arabidopsis thaliana
  peptide (1)..(115): Ceres Seq. ID no. 12650515
MTWPSVGKYKVDIASFESIALPELQVKDDTNLFIIDEVGKMEMFSPSFFPAVLNVLDSNVPLLASIPSPKFGRHLPEVARLKNQPGVNVISLSATNRDPMKEHIFDVFSGWLPKQ

SEQ ID NO: 79259 - protein, 75 aa, Arabidopsis thaliana
  peptide (1)..(75): Ceres Seq. ID no. 12650516
MEMFSPSFFPAVLNVLDSNVPLLASIPSPKFGRHLPEVARLKNQPGVNVISLSATNRDPMKEHIFDVFSGWLPKQ

SEQ ID NO: 79260 - DNA, 1188 bp, Arabidopsis thaliana
  misc_feature (1)..(1188): Ceres Seq. ID no. 12650529
  misc_feature (1)..(1188): Ortholog of  Ceres SEQ ID NO 15226269 as cited in SEQ ID NO 64009
atggaagaaacgtccaagctacagttaccggagagtttccttagctttctagaggcgaatggccttgatccttcaatctatactcacggagattcaattccacgttatgtaaggttgaaacctggattcgaggatgctttcgaagagattgaatccgaaattaactgtaaactggagaaggtgaattggttaccaggattttactccatccctccagatgttcatatagccagaaccaaggcctatcagcaaggcatgatgtacggaatcgatgcagcttccggtgccgctgtctcagctcttggtatctccccaggagaccatgtcttggatctttgtgctgctcctggtgctaaactatgtatgatgcttgacctactgggtcagaagggtactgccaccggtgtcgatgttgcaaggcatcgtcttgctgcctgcagaactatgcttctaaagtatgggcttgctgaaaggagccggctttttcttgctgatggaaccactttctcagtcccaccaaccagaaacctaccatgtgagtcatgtgtggacgatcatgaagacacattcaagcagtggacctcccgtagaccttacaaagaaaggaaacaagaagctaaggcaaggaagaattctgttttgccgcagaatggacaggcagaaattattttctacggacagggttctggagtaatcgggctaaaaaagaatgaactttatagatcccttgaccaaaatgattatgcatcttatgggtatgataaggttcttgtggacgcagagtgcacacacgatggttcgatcaaacatatccagaaatttgagcaatggggttggaaaactctggaacgccgtgttctggatgctgagagaaccgatacaaacttaaaagctcttcagttgaatctactgagaaatggattcagattgttgaaagaagctggcactctagtgtacagcacctgcagtttgacgcatgcccaaaacgaagatgtggtggatcagttcctttctgaaaatttctctgcagagctacaagagattgaaatggccaaggattggccgtgtagaagtggtcgcacgcctaagacactgcggtttgatccttccacctcagcaaccagcggccttttcgttgcaaaaatcaggaaattgccacccaacgaagcaaagaagaatgtgttgtga

SEQ ID NO: 79261 - protein, 395 aa, Arabidopsis thaliana
  peptide (1)..(395): Ceres Seq. ID no. 12650530
MEETSKLQLPESFLSFLEANGLDPSIYTHGDSIPRYVRLKPGFEDAFEEIESEINCKLEKVNWLPGFYSIPPDVHIARTKAYQQGMMYGIDAASGAAVSALGISPGDHVLDLCAAPGAKLCMMLDLLGQKGTATGVDVARHRLAACRTMLLKYGLAERSRLFLADGTTFSVPPTRNLPCESCVDDHEDTFKQWTSRRPYKERKQEAKARKNSVLPQNGQAEIIFYGQGSGVIGLKKNELYRSLDQNDYASYGYDKVLVDAECTHDGSIKHIQKFEQWGWKTLERRVLDAERTDTNLKALQLNLLRNGFRLLKEAGTLVYSTCSLTHAQNEDVVDQFLSENFSAELQEIEMAKDWPCRSGRTPKTLRFDPSTSATSGLFVAKIRKLPPNEAKKNVL

SEQ ID NO: 79262 - protein, 310 aa, Arabidopsis thaliana
  peptide (1)..(310): Ceres Seq. ID no. 12650531
MMYGIDAASGAAVSALGISPGDHVLDLCAAPGAKLCMMLDLLGQKGTATGVDVARHRLAACRTMLLKYGLAERSRLFLADGTTFSVPPTRNLPCESCVDDHEDTFKQWTSRRPYKERKQEAKARKNSVLPQNGQAEIIFYGQGSGVIGLKKNELYRSLDQNDYASYGYDKVLVDAECTHDGSIKHIQKFEQWGWKTLERRVLDAERTDTNLKALQLNLLRNGFRLLKEAGTLVYSTCSLTHAQNEDVVDQFLSENFSAELQEIEMAKDWPCRSGRTPKTLRFDPSTSATSGLFVAKIRKLPPNEAKKNVL

SEQ ID NO: 79263 - protein, 309 aa, Arabidopsis thaliana
  peptide (1)..(309): Ceres Seq. ID no. 12650532
MYGIDAASGAAVSALGISPGDHVLDLCAAPGAKLCMMLDLLGQKGTATGVDVARHRLAACRTMLLKYGLAERSRLFLADGTTFSVPPTRNLPCESCVDDHEDTFKQWTSRRPYKERKQEAKARKNSVLPQNGQAEIIFYGQGSGVIGLKKNELYRSLDQNDYASYGYDKVLVDAECTHDGSIKHIQKFEQWGWKTLERRVLDAERTDTNLKALQLNLLRNGFRLLKEAGTLVYSTCSLTHAQNEDVVDQFLSENFSAELQEIEMAKDWPCRSGRTPKTLRFDPSTSATSGLFVAKIRKLPPNEAKKNVL

SEQ ID NO: 79264 - DNA, 749 bp, Arabidopsis thaliana
  misc_feature (1)..(749): Ceres Seq. ID no. 12650546
  misc_feature (1)..(749): Ortholog of  Ceres SEQ ID NO 15178928 as cited in SEQ ID NO 1118
atcgtcatcgtgaaatgtgcagctccggaaataaataatcactaaaataaccagatccgatctactgccccggtttctcgccggaatctccattctgtaaccggcgatcctctttctgctcagttatggaagacgtgaaagggaaggagattattgatgatgctcctattgacaacaaggtttcagatgaaatggagagtgaggaaaatgcgatcaagaaaaagtatggaggattgttgcctaagaagattcctttgatatctaaggaccatgaacgtgcgttttttgactcagctgattgggctttaggcaagcaaaaaggacagaagccgaaagggcctttggaagctctccgcccaaaactgcagccaaccccgcaacagcaaccaagagcaagacgaatggcttattcttcaggcgaaactgaagacactgagattgataacaacgaagctccggatgaccaagcctgcgcatcagctgtggatagtaccaatttaaaggacgatggaggcgcaaaagacaacatcaaatcatgaacaacatatagagatctcttgaggagcgcaaacaaacaacatcacaagtcaatttacagaagaataagcgaccaggtttgctttgcaacggttgtaatatcaagtctcttaccttatcatacttgggactgcaaatctgtatcacttacaaacctcctggcttgaaacgtctattggacgattgcaaatgatttgctttaatgatccatc

SEQ ID NO: 79265 - protein, 137 aa, Arabidopsis thaliana; identical to SEQ ID NO: 28532
  peptide (1)..(137): Ceres Seq. ID no. 12650547

SEQ ID NO: 79266 - protein, 115 aa, Arabidopsis thaliana; identical to SEQ ID NO: 28533
  peptide (1)..(115): Ceres Seq. ID no. 12650548

SEQ ID NO: 79267 - DNA, 1166 bp, Arabidopsis thaliana
  misc_feature (1)..(1166): Ceres Seq. ID no. 12650552
  misc_feature (1)..(1166): Ortholog of  Ceres SEQ ID NO 14311044 as cited in SEQ ID NO 53643
gtataaagttttgtaatttacttttcaggagaaaaaaatgggtcaagctttgggttgtattcaagttgatcagtcgaatgtagcaatcaaagagacttttgggaaattcgacgaagttcttgagccgggttgtcactgtttgccatggtgtttgggaagtcaagtcgctggtcacctttctttacgtgttcaacagctcgatgttcgctgcgagacaaagactaaggataatgtgtttgtcacggttgttgcttccattcaataccgtgccttagcggagagtgctcaagatgctttttacaagctcagcaacacgaggaatcagattcaagcttatgtctttgatgtgatccgagcaagtgtacctaagctggatctagactctacctttgagcaaaagaatgacattgcaaaaaccgttgagactgagctcgaaaaggctatgtcgcattacgggtatgagattgttcagacactgattgtggatatcgagcctgatgtgcacgtcaagagggcaatgaatgagatcaatgctgcttctagaatgagagaggcagcgagtgagaaagctgaggcagagaagattctgcagatcaagcgtgctgagggagaagctgaatcgaaatacctttcaggtatgggtatagcccgtcagagacaagccattgtggacggtctgagaaacagcgtcctcgccttctccgagtctgttccaggaacatcttccaaagacgtgatggatatggttcttgtgactcagtactttgacacattgaaggaaattggtgcttcttcgaagtcaaactcggtgttcataccgcacggtccaggcgctgttagggacattgcttcacagatcagggatggtcttcttcagggtaactctgctgctgagtagagaaatgtctcaaagtacaaaaaggctttttcagagttttagagttgtgttactacttgctactcagtttatcttttagcggttggctctatatgggttcttaaatttcttatcgtttctctcttctaggcttgtggacttgatccattttcttgttttatgggtttgtggatagagtttgggcttgaaaaatatttgtgttattttgggttttaatgtcgttaactcgttattaatgtttaaacagtggttaaagaatttgttaacg

SEQ ID NO: 79268 - protein, 286 aa, Arabidopsis thaliana; identical to SEQ ID NO: 23094
  peptide (1)..(286): Ceres Seq. ID no. 12650553

SEQ ID NO: 79269 - protein, 151 aa, Arabidopsis thaliana; identical to SEQ ID NO: 23095
  peptide (1)..(151): Ceres Seq. ID no. 12650554

SEQ ID NO: 79270 - DNA, 947 bp, Arabidopsis thaliana
  misc_feature (1)..(947): Ceres Seq. ID no. 12650555
  misc_feature (1)..(947): Ortholog of  Ceres SEQ ID NO 14311044 as cited in SEQ ID NO 53643
atgggtcaagctttgggttgtattcaagttgatcagtcgaatgtagcaatcaaagagacttttgggaaattcgacgaagttcttgagccgggttgtcactgtttgccatggtgtttgggaagtcaagtcgctggtcacctttctttacgtgttcaacagctcgatgttcgctgcgagacaaagactaaggataatgtgtttgtcacggttgttgcttccattcaataccgtgccttagcggagagtgctcaagatgctttttacaagctcagcaacacgaggaatcagattcaagcttatgtctttgatgtgatccgagcaagtgtacctaagctggatctagactctacctttgagcaaaagaatgacattgcaaaaaccgttgagactgagctcgaaaaggctatgtcgcattacgggtatgagattgttcagacactgattgtggatatcgagcctgatgtgcacgtcaagagggcaatgaatgagatcaatgctgcttctagaatgagagaggcagcgagtgagaaagctgaggcagagaagattctgcagatcaagcgtgctgagggagaagctgaatcgaaatacctttcaggtatgggtatagcccgtcagagacaagccattgtggacggtctgagaaacagcgtcctcgccttctccgagtctgttccaggaacatcttccaaagacgtgatggatatggttcttgtgactcagtactttgacacattgaaggaaattggtgcttcttcgaagtcaaactcggtgttcataccgcacggtccaggcgctgttagggacattgcttcacagatcagggatggtcttcttcagggtaactctgctgctgagtagagaaatgtctcaaagtacaaaaaggctttttcagagttttagagttgtgttactacttgctactcagtttatcttttagcggttgg

SEQ ID NO: 79271 - protein, 286 aa, Arabidopsis thaliana; identical to SEQ ID NO: 23094
  peptide (1)..(286): Ceres Seq. ID no. 12650556

SEQ ID NO: 79272 - protein, 151 aa, Arabidopsis thaliana; identical to SEQ ID NO: 23095
  peptide (1)..(151): Ceres Seq. ID no. 12650557

SEQ ID NO: 79273 - DNA, 1379 bp, Arabidopsis thaliana
  misc_feature (1)..(1379): Ceres Seq. ID no. 12650612
  misc_feature (1)..(1379): Ortholog of  Ceres SEQ ID NO 13623732 as cited in SEQ ID NO 0
agagatagttgtgacagagagattcatggcggaagcttgcggagtgagaaggatgaagctgggaagccaaggccttgaggtatctgcgcaaggccttggttgcatgggcctctccgctttctacggtgctcccaagccggaaaatgaagccatcgctctcatccaccacgctattcactccggcgttactctccttgacacctccgatatctacggccctgagaccaatgaagttctcctcggaaaggctctcaaggatggggtgagagaaaaagtggaacttgcgaccaaatttggaatcagttatgcagaggggaaaagagaggtcagaggagatcctgaatatgtaagggctgcttgtgaggcaagtttaaagaggctagatattgcctgcatcgatctctattatcagcatcgtgtcgatactcgtgtccctatcgaaatcactatgggagaactgaagaagctggttgaagagggtaaaataaagtacattggtttgtctgaagcctctgcctcaactatcagaagagcacatgctgttcacccaattactgccgtgcagatagaatggtccttgtggacgagagatgtggaagaagaaatcattccgacctgcagggaacttgggattgggattgttgcttacagtcctctaggacgaggtttcttcgcatctggacccaagcttgttgagaacctagaaaaggatgacttcagaaaggctctaccaagattccaagaggaaaacttagaccacaacaagattgtttatgaaaaagtttgtgcaatatcggagaagaaagggtgcactcctggacaactagccctggcatgggttcatcaccagggagatgacgtttgccctatcccaggaaccactaagatcgagaacctcaaacagaacattggagctttgtcagtgaaactcactcctgaagagatgactgagcttgaggccattgcccaaccaggttttgtgaaaggagatagatacagtaacatgataccaactttcaagaacgctgagacaccaccattgtctgcttggaaagccgcttaaaaccggctgaagtttctacggttgtggtggtgcatcatgacattgaagtggtcttaactttctgtcagctagatcagtgtgttggggaataatggtgcgtcttcgagagtagagtatcattcccacggaaacccaagtatcatggttaatgccttgaagaataaataatgtagagttccccaagtgaaaacttcaattttacatttccatacattgtaaccaaactctataaataaagtgttgtgatacataccttaccaaaaaaggctatctatattgtaaaattcatcttctactcaataacttgtgcttctct

SEQ ID NO: 79274 - protein, 353 aa, Arabidopsis thaliana
  peptide (1)..(353): Ceres Seq. ID no. 12650613
EIVVTERFMAEACGVRRMKLGSQGLEVSAQGLGCMGLSAFYGAPKPENEAIALIHHAIHSGVTLLDTSDIYGPETNEVLLGKALKDGVREKVELATKFGISYAEGKREVRGDPEYVRAACEASLKRLDIACIDLYYQHRVDTRVPIEITMGELKKLVEEGKIKYIGLSEASASTIRRAHAVHPITAVQIEWSLWTRDVEEEIIPTCRELGIGIVAYSPLGRGFFASGPKLVENLEKDDFRKALPRFQEENLDHNKIVYEKVCAISEKKGCTPGQLALAWVHHQGDDVCPIPGTTKIENLKQNIGALSVKLTPEEMTELEAIAQPGFVKGDRYSNMIPTFKNAETPPLSAWKAA

SEQ ID NO: 79275 - protein, 345 aa, Arabidopsis thaliana; identical to SEQ ID NO: 28593
  peptide (1)..(345): Ceres Seq. ID no. 12650614

SEQ ID NO: 79276 - protein, 336 aa, Arabidopsis thaliana; identical to SEQ ID NO: 28594
  peptide (1)..(336): Ceres Seq. ID no. 12650615

SEQ ID NO: 79277 - DNA, 1409 bp, Arabidopsis thaliana
  misc_feature (1)..(1409): Ceres Seq. ID no. 12650616
  misc_feature (1)..(1409): Ortholog of  Ceres SEQ ID NO 15168537 as cited in SEQ ID NO 57100
  misc_feature (1)..(1409): Ortholog of  Ceres SEQ ID NO 15178681 as cited in SEQ ID NO 63192
  misc_feature (1)..(1409): Ortholog of  Ceres SEQ ID NO 13579918 as cited in SEQ ID NO 64644
  misc_feature (1)..(1409): Ortholog of  Ceres SEQ ID NO 13654122 as cited in SEQ ID NO 68192
ttatttcttcacttttcatgatcccgaggacatcttagaccccaaatgttcttcgtcgatgttcctttggaaactggttcctctatacttgttcggatcagaaacaaagtctctctcagcaacagagtccattttgcagatagttcctgaggcaatggctgctacttcatctaacgtcctttgcaatgctagcgagtcagatctttgtcgtgatgattccgctgcatttctacttaaatttgtagccattgcttcgattctcttagctggagctgctggtgtaactataccactcattggcaggaaccgtcgtttccttcaaactgatggtaatctctttgtgactgctaaagcttttgcagctggtgtgattctcgccacgggttttgttcatatgttggcgggtggcacggaagctttgaagaacccgtgcttaccggatttcccttggtctaagtttcctttcccgggattctttgcgatgattgctgctttgatcactctgtttgtggatttcatggggactcagtactatgaacggaagcaagagagggaagctagtgagtctgttgaaccgtttggccgtgaacaatcaccgggtattgttgttcccatgattggagaaggaacgaatgatgggaaagtgtttggtgaagaagacagtggtgggattcacattgttggcattcatgctcatgctgctcatcatagacatagtcatcctcctggtcatgattcatgtgaaggacacagtaaaatcgacattggtcatgctcatgctcatgggcacgggcatggacacggacatggacacgtacacgggggtttggatgctgttaatggagctaggcatatcgttgtttctcaggttctggagcttggaattgtgtcacattccataatcatcggtctatcccttggagtatctcagtctccttgcacaatccggcctctaatcgcagcactatccttccatcaattctttgaaggatttgcgctcggtggatgcatctcccaagcgcaattcaggaacaaatcagcgaccataatggcttgttttttcgccctcacaaccccgatagggatcgggattggaaccgcagtggcgtcgtctttcaattctcacagtgtcggagcattggtcactgaaggtatcttggactcgctctcagccggaattcttgtgtacatggctttagtggatctcatagctgctgatttcttgagtacaaaaatgaggtgtaactttaggcttcaaattgtatcttatgtaatgttgttcctaggagctggactcatgtcttctcttgccatttgggcttaattagagtataagattccatagtttcttctatagctacaaataacatgtatagttctttctagagaatttatcaatctaagatttc

SEQ ID NO: 79278 - protein, 440 aa, Arabidopsis thaliana
  peptide (1)..(440): Ceres Seq. ID no. 12650617
YFFTFHDPEDILDPKCSSSMFLWKLVPLYLFGSETKSLSATESILQIVPEAMAATSSNVLCNASESDLCRDDSAAFLLKFVAIASILLAGAAGVTIPLIGRNRRFLQTDGNLFVTAKAFAAGVILATGFVHMLAGGTEALKNPCLPDFPWSKFPFPGFFAMIAALITLFVDFMGTQYYERKQEREASESVEPFGREQSPGIVVPMIGEGTNDGKVFGEEDSGGIHIVGIHAHAAHHRHSHPPGHDSCEGHSKIDIGHAHAHGHGHGHGHGHVHGGLDAVNGARHIVVSQVLELGIVSHSIIIGLSLGVSQSPCTIRPLIAALSFHQFFEGFALGGCISQAQFRNKSATIMACFFALTTPIGIGIGTAVASSFNSHSVGALVTEGILDSLSAGILVYMALVDLIAADFLSTKMRCNFRLQIVSYVMLFLGAGLMSSLAIWA

SEQ ID NO: 79279 - protein, 421 aa, Arabidopsis thaliana; identical to SEQ ID NO: 29955
  peptide (1)..(421): Ceres Seq. ID no. 12650618

SEQ ID NO: 79280 - protein, 389 aa, Arabidopsis thaliana; identical to SEQ ID NO: 29956
  peptide (1)..(389): Ceres Seq. ID no. 12650619

SEQ ID NO: 79281 - DNA, 1230 bp, Arabidopsis thaliana
  misc_feature (1)..(1230): Ceres Seq. ID no. 12650620
  misc_feature (1)..(1230): Ortholog of  Ceres SEQ ID NO 13658032 as cited in SEQ ID NO 66092
atgaaaactttggaattagctttacctccatctccaccgtctttagttccttcttttaactacaattccaccgcacgaagcgtcgggaatgatgtcagaaccaacttcgatgttcaactttttctaaggaaacctaaacaccaaaaatcagaacctgtcgtcgttattcaacaacctcagattcaaccgcaaaatccaagttctcgttgttctacttctgatattctcagactaatggattctctttctttaccaggaaacgaagatatttactcttgtcttgccaaagaatcagccagagaaaacgatcaacgtggagctcacgagctacaagtgcatatcatgaagtctagtattagacccacgatcacttttatcaatcgtcttcttttgatgcatgtttcgtgtgggcgtttagatattacacgccagatgttcgatagaatgcctcacagagattttcattcctgggcaattgttttcctcggttgtattgaaatgggtgattacgaggacgctgctttcctttttgtttcgatgttgaaacattctcagaaaggtgctttcaagattccgtcttggatcttgggctgcgttttgaaagcttgtgccatgattagagacttcgagttagggaaacaggttcatgccttgtgtcataagctagggtttatagacgaagaagattcatatctatcgggttctttgatacgtttctacggagaattcaggtgtttggaagacgctaatctcgtgttacaccagctctctaatgctaacactgttgcttgggcagcgaaagttactaacgattacagagaaggagagtttcaagaagtaatccgcgatttcatcgaaatgggtaaccatggaatcaagaagaacgtctcagtgttctctaatgttctaaaagcatgctcatgggtcagtgacggtgggagaagcgggcaacaagtgcatgcgaatgctataaagctcggatttgagtcagattgtttgatccgatgtcggttaattgagatgtatgggaagtatgggaaggtgaaagacgcggaaaaggtttttaagagtagtaaggacgagactagtgttagttgctggaacgctatggtcgcaagttatatgcagaatgggatttacattgaagccattaagcttctctatcagatgaaagcaactggaatcaaagcacatgacacgcttttgaacgaagcccaccttcagatgtaa

SEQ ID NO: 79282 - protein, 409 aa, Arabidopsis thaliana
  peptide (1)..(409): Ceres Seq. ID no. 12650621
MKTLELALPPSPPSLVPSFNYNSTARSVGNDVRTNFDVQLFLRKPKHQKSEPVVVIQQPQIQPQNPSSRCSTSDILRLMDSLSLPGNEDIYSCLAKESARENDQRGAHELQVHIMKSSIRPTITFINRLLLMHVSCGRLDITRQMFDRMPHRDFHSWAIVFLGCIEMGDYEDAAFLFVSMLKHSQKGAFKIPSWILGCVLKACAMIRDFELGKQVHALCHKLGFIDEEDSYLSGSLIRFYGEFRCLEDANLVLHQLSNANTVAWAAKVTNDYREGEFQEVIRDFIEMGNHGIKKNVSVFSNVLKACSWVSDGGRSGQQVHANAIKLGFESDCLIRCRLIEMYGKYGKVKDAEKVFKSSKDETSVSCWNAMVASYMQNGIYIEAIKLLYQMKATGIKAHDTLLNEAHLQM

SEQ ID NO: 79283 - protein, 331 aa, Arabidopsis thaliana
  peptide (1)..(331): Ceres Seq. ID no. 12650622
MDSLSLPGNEDIYSCLAKESARENDQRGAHELQVHIMKSSIRPTITFINRLLLMHVSCGRLDITRQMFDRMPHRDFHSWAIVFLGCIEMGDYEDAAFLFVSMLKHSQKGAFKIPSWILGCVLKACAMIRDFELGKQVHALCHKLGFIDEEDSYLSGSLIRFYGEFRCLEDANLVLHQLSNANTVAWAAKVTNDYREGEFQEVIRDFIEMGNHGIKKNVSVFSNVLKACSWVSDGGRSGQQVHANAIKLGFESDCLIRCRLIEMYGKYGKVKDAEKVFKSSKDETSVSCWNAMVASYMQNGIYIEAIKLLYQMKATGIKAHDTLLNEAHLQM

SEQ ID NO: 79284 - protein, 295 aa, Arabidopsis thaliana
  peptide (1)..(295): Ceres Seq. ID no. 12650623
MKSSIRPTITFINRLLLMHVSCGRLDITRQMFDRMPHRDFHSWAIVFLGCIEMGDYEDAAFLFVSMLKHSQKGAFKIPSWILGCVLKACAMIRDFELGKQVHALCHKLGFIDEEDSYLSGSLIRFYGEFRCLEDANLVLHQLSNANTVAWAAKVTNDYREGEFQEVIRDFIEMGNHGIKKNVSVFSNVLKACSWVSDGGRSGQQVHANAIKLGFESDCLIRCRLIEMYGKYGKVKDAEKVFKSSKDETSVSCWNAMVASYMQNGIYIEAIKLLYQMKATGIKAHDTLLNEAHLQM

SEQ ID NO: 79285 - DNA, 672 bp, Arabidopsis thaliana
  misc_feature (1)..(672): Ceres Seq. ID no. 12650637
  misc_feature (1)..(672): Ortholog of  Ceres SEQ ID NO 12614670 as cited in SEQ ID NO 68565
atgttggcttcgaatacaaaaaccatcaaagaacaaggaccagattcagggctgagtcttgatgatctgatagatgactgcaaggctttctatctagctggtcaaaatgtgacttcttcattgtttgtttggacacttgttgctctaagccaacatcaagattggcaaaacaaagcaagagacgagatttctcaggccttcggtaacaacgaacccgatttcgaagggctaagccacctgaaagtcgtaacaatgatcctccatgaagttctacgactctattcaccagcttacttcacatgtcggataactaaacaagaagtgaagctagagagattctctttacctgaaggagttgtagtaacaataccaatgctcttggtgcaccatgattctgatctttggggagacgatgtgaaagagtttaagcccgagagattcgccaatggcgtggcgggtgcaaccaaaggaagactctccttcttgccatttagctcgggccctcggacttgtatcggtcagaacttttcgatgttgcaagctaaactcttcttggcaatggtacttcaaaggttcagtgttgaactctctccatcgtatactcatgctcctttcccagctgcaactacatttccacaacatggagctcatttgatcatccgaaaactgtag

SEQ ID NO: 79286 - protein, 223 aa, Arabidopsis thaliana
  peptide (1)..(223): Ceres Seq. ID no. 12650638
MLASNTKTIKEQGPDSGLSLDDLIDDCKAFYLAGQNVTSSLFVWTLVALSQHQDWQNKARDEISQAFGNNEPDFEGLSHLKVVTMILHEVLRLYSPAYFTCRITKQEVKLERFSLPEGVVVTIPMLLVHHDSDLWGDDVKEFKPERFANGVAGATKGRLSFLPFSSGPRTCIGQNFSMLQAKLFLAMVLQRFSVELSPSYTHAPFPAATTFPQHGAHLIIRKL

SEQ ID NO: 79287 - protein, 139 aa, Arabidopsis thaliana
  peptide (1)..(139): Ceres Seq. ID no. 12650639
MILHEVLRLYSPAYFTCRITKQEVKLERFSLPEGVVVTIPMLLVHHDSDLWGDDVKEFKPERFANGVAGATKGRLSFLPFSSGPRTCIGQNFSMLQAKLFLAMVLQRFSVELSPSYTHAPFPAATTFPQHGAHLIIRKL

SEQ ID NO: 79288 - DNA, 3141 bp, Arabidopsis thaliana
  misc_feature (1)..(3141): Ceres Seq. ID no. 12650654
  misc_feature (1)..(3141): Ortholog of  Ceres SEQ ID NO 14314869 as cited in SEQ ID NO 58320
atgagagggaggatatgtttcttggcaatagtgattctctgttctttctccttcatcttagtaagatccttaaacgaagaagggcgtgttcttctggagtttaaagctttccttaatgactccaatggctatctcgcaagctggaatcagttggattcaaatccctgcaactggaccggaatcgcgtgtacccatctcagaactgtaacttctgttgatctaaatgggatgaatctatcaggtacactatctcctctcatatgcaagcttcatggtttaaggaaattgaatgtctccaccaacttcatctctggtccaatccctcaagatttatctctctgtcgaagtctagaggttcttgatctctgcacaaataggttccatggagtgataccaattcagctaaccatgatcatcactcttaagaagctgtatctatgcgagaattatcttttcggttctatccctagacaaatcggtaatttgagttcactccaagagcttgtgatctacagcaataatctcaccggtgtaatccctccttccatggcgaaattgagacagctccggatcattagggcaggacggaatggattctcgggtgtgattccgtctgaaatcagcggatgcgagagcctaaaggtacttggattagcagagaatcttcttgagggttctcttcctaagcagctcgagaagcttcaaaatcttactgatttgatactctggcaaaaccgtctatctggtgagatacctccttccgtaggaaacatcagcagactggaggtgcttgcgctgcatgaaaactacttcacgggatcaattccaagagagattgggaagctcacaaagatgaaaaggctgtacctttacacaaaccagttaaccggagagatacctcgcgaaataggcaacttgatagatgcagctgagatagatttttcggagaatcagttaacaggtttcataccaaaagagtttggtcatatcctgaatctcaaattacttcatctttttgagaacattcttctaggtccaattcctagggagcttggggaattgacactgttggagaagctagacttgtctatcaatagactaaacggtactatcccgcaagagcttcagttcctaccttaccttgtagatttgcagctttttgacaaccagcttgaagggaagatacctcctttaatcggtttctatagcaatttttctgttcttgacatgtctgccaattctctgtctggtccaattcctaaccttactgcattagagcttcaccaaaactggttatcagggaatatatctgcagacctgggaaagctgaagaatttggaaagactgcgtctagctaacaacaattttactggtgaaattcctcctgagattgggaatctcacaaagattgttggctttaacatctcctccaatcagctcactggtcacatccctaaagagttgggaagttgtgtcactatccagaggcttgaccttagtggcaacaagttttccggatacatagcacaagagcttggtcagttggtatatttggagattttgagattgtctgataatagattgaccggagaaattcctcatagctttggagatcttactcggctcatggagttacaactaggaggcaatctcttgtctgaaaacatcccagtggagctcgggaagttaacctctctgcaaatctccctcaacattagtcacaataatctctcaggtactattccagacagtttaggaaatctacagatgttggagatactttacctcaacgacaacaagctttcaggtgagatccctgcatcaattgggaatctcatgagcctcctcatctgcaatatctcaaacaataacttggtcggaacagtaccagacacagccgtgttccagcggatggattcatcgaactttgctggaaaccatggtttgtgtaactctcagagaagccattgtcaaccacttgtcccacattctgattcaaagctaaattggttaatcaacggttcgcaaaggcaaaagatcttgacaatcacttgtattgtaatcgggtcggtttttcttatcacttttcttggtctctgttggacaataaagcggcgggaaccagcgtttgttgcacttgaggatcaaacaaaaccagatgtcatggacagctactatttccctaaaaaaggtttcacatatcaaggcctcgtggatgcaaccagaaacttttccgaagacgtggttttagggagaggagcgtgtggaacagtctacaaagctgaaatgtcaggtggcgaggtgatagctgtaaagaagctgaattctcgcggtgaaggagctagttctgataatagtttcagagctgagatatcaactcttggaaagataaggcaccggaatattgtgaagctatatggtttctgctatcaccagaattcaaatcttctcttgtatgagtacatgtcaaaaggaagcctcggcgaacaactacagcgaggtgagaaaaactgtttgttggattggaatgctcggtatagaatcgccctcggtgctgcagagggtttgtgttatctccatcatgattgcagacctcaaatagtccatcgcgacataaaatcgaacaacattcttcttgatgaacggttccaggctcatgttggagattttggcctggctaagttgattgatctctcttactcaaagtccatgtcagctgttgctgggtcttacggatacatcgctccagaatatgcttacacgatgaaggtgacagagaaatgtgatatctatagctttggagttgtgcttctggagctaataacaggaaagcccccagttcaaccgctggagcaaggaggggatctagtcaattgggttcgacgatcgatccgtaacatgattccaaccattgaaatgtttgatgcgaggctagatacaaatgataagagaacagttcatgaaatgtctcttgtcctaaagattgcactgttctgcaccagcaattctccagctagtagaccaactatgagagaagtggtcgctatgattacagaagctcggggatcaagtagcctttcttcctcatccattacatcagaaactcctctagaagaagcaaactcctccaaagaaatttga

SEQ ID NO: 79289 - protein, 1046 aa, Arabidopsis thaliana
  peptide (1)..(1046): Ceres Seq. ID no. 12650655
MRGRICFLAIVILCSFSFILVRSLNEEGRVLLEFKAFLNDSNGYLASWNQLDSNPCNWTGIACTHLRTVTSVDLNGMNLSGTLSPLICKLHGLRKLNVSTNFISGPIPQDLSLCRSLEVLDLCTNRFHGVIPIQLTMIITLKKLYLCENYLFGSIPRQIGNLSSLQELVIYSNNLTGVIPPSMAKLRQLRIIRAGRNGFSGVIPSEISGCESLKVLGLAENLLEGSLPKQLEKLQNLTDLILWQNRLSGEIPPSVGNISRLEVLALHENYFTGSIPREIGKLTKMKRLYLYTNQLTGEIPREIGNLIDAAEIDFSENQLTGFIPKEFGHILNLKLLHLFENILLGPIPRELGELTLLEKLDLSINRLNGTIPQELQFLPYLVDLQLFDNQLEGKIPPLIGFYSNFSVLDMSANSLSGPIPNLTALELHQNWLSGNISADLGKLKNLERLRLANNNFTGEIPPEIGNLTKIVGFNISSNQLTGHIPKELGSCVTIQRLDLSGNKFSGYIAQELGQLVYLEILRLSDNRLTGEIPHSFGDLTRLMELQLGGNLLSENIPVELGKLTSLQISLNISHNNLSGTIPDSLGNLQMLEILYLNDNKLSGEIPASIGNLMSLLICNISNNNLVGTVPDTAVFQRMDSSNFAGNHGLCNSQRSHCQPLVPHSDSKLNWLINGSQRQKILTITCIVIGSVFLITFLGLCWTIKRREPAFVALEDQTKPDVMDSYYFPKKGFTYQGLVDATRNFSEDVVLGRGACGTVYKAEMSGGEVIAVKKLNSRGEGASSDNSFRAEISTLGKIRHRNIVKLYGFCYHQNSNLLLYEYMSKGSLGEQLQRGEKNCLLDWNARYRIALGAAEGLCYLHHDCRPQIVHRDIKSNNILLDERFQAHVGDFGLAKLIDLSYSKSMSAVAGSYGYIAPEYAYTMKVTEKCDIYSFGVVLLELITGKPPVQPLEQGGDLVNWVRRSIRNMIPTIEMFDARLDTNDKRTVHEMSLVLKIALFCTSNSPASRPTMREVVAMITEARGSSSLSSSSITSETPLEEANSSKEI

SEQ ID NO: 79290 - protein, 970 aa, Arabidopsis thaliana
  peptide (1)..(970): Ceres Seq. ID no. 12650656
MNLSGTLSPLICKLHGLRKLNVSTNFISGPIPQDLSLCRSLEVLDLCTNRFHGVIPIQLTMIITLKKLYLCENYLFGSIPRQIGNLSSLQELVIYSNNLTGVIPPSMAKLRQLRIIRAGRNGFSGVIPSEISGCESLKVLGLAENLLEGSLPKQLEKLQNLTDLILWQNRLSGEIPPSVGNISRLEVLALHENYFTGSIPREIGKLTKMKRLYLYTNQLTGEIPREIGNLIDAAEIDFSENQLTGFIPKEFGHILNLKLLHLFENILLGPIPRELGELTLLEKLDLSINRLNGTIPQELQFLPYLVDLQLFDNQLEGKIPPLIGFYSNFSVLDMSANSLSGPIPNLTALELHQNWLSGNISADLGKLKNLERLRLANNNFTGEIPPEIGNLTKIVGFNISSNQLTGHIPKELGSCVTIQRLDLSGNKFSGYIAQELGQLVYLEILRLSDNRLTGEIPHSFGDLTRLMELQLGGNLLSENIPVELGKLTSLQISLNISHNNLSGTIPDSLGNLQMLEILYLNDNKLSGEIPASIGNLMSLLICNISNNNLVGTVPDTAVFQRMDSSNFAGNHGLCNSQRSHCQPLVPHSDSKLNWLINGSQRQKILTITCIVIGSVFLITFLGLCWTIKRREPAFVALEDQTKPDVMDSYYFPKKGFTYQGLVDATRNFSEDVVLGRGACGTVYKAEMSGGEVIAVKKLNSRGEGASSDNSFRAEISTLGKIRHRNIVKLYGFCYHQNSNLLLYEYMSKGSLGEQLQRGEKNCLLDWNARYRIALGAAEGLCYLHHDCRPQIVHRDIKSNNILLDERFQAHVGDFGLAKLIDLSYSKSMSAVAGSYGYIAPEYAYTMKVTEKCDIYSFGVVLLELITGKPPVQPLEQGGDLVNWVRRSIRNMIPTIEMFDARLDTNDKRTVHEMSLVLKIALFCTSNSPASRPTMREVVAMITEARGSSSLSSSSITSETPLEEANSSKEI

SEQ ID NO: 79291 - protein, 910 aa, Arabidopsis thaliana
  peptide (1)..(910): Ceres Seq. ID no. 12650657
MIITLKKLYLCENYLFGSIPRQIGNLSSLQELVIYSNNLTGVIPPSMAKLRQLRIIRAGRNGFSGVIPSEISGCESLKVLGLAENLLEGSLPKQLEKLQNLTDLILWQNRLSGEIPPSVGNISRLEVLALHENYFTGSIPREIGKLTKMKRLYLYTNQLTGEIPREIGNLIDAAEIDFSENQLTGFIPKEFGHILNLKLLHLFENILLGPIPRELGELTLLEKLDLSINRLNGTIPQELQFLPYLVDLQLFDNQLEGKIPPLIGFYSNFSVLDMSANSLSGPIPNLTALELHQNWLSGNISADLGKLKNLERLRLANNNFTGEIPPEIGNLTKIVGFNISSNQLTGHIPKELGSCVTIQRLDLSGNKFSGYIAQELGQLVYLEILRLSDNRLTGEIPHSFGDLTRLMELQLGGNLLSENIPVELGKLTSLQISLNISHNNLSGTIPDSLGNLQMLEILYLNDNKLSGEIPASIGNLMSLLICNISNNNLVGTVPDTAVFQRMDSSNFAGNHGLCNSQRSHCQPLVPHSDSKLNWLINGSQRQKILTITCIVIGSVFLITFLGLCWTIKRREPAFVALEDQTKPDVMDSYYFPKKGFTYQGLVDATRNFSEDVVLGRGACGTVYKAEMSGGEVIAVKKLNSRGEGASSDNSFRAEISTLGKIRHRNIVKLYGFCYHQNSNLLLYEYMSKGSLGEQLQRGEKNCLLDWNARYRIALGAAEGLCYLHHDCRPQIVHRDIKSNNILLDERFQAHVGDFGLAKLIDLSYSKSMSAVAGSYGYIAPEYAYTMKVTEKCDIYSFGVVLLELITGKPPVQPLEQGGDLVNWVRRSIRNMIPTIEMFDARLDTNDKRTVHEMSLVLKIALFCTSNSPASRPTMREVVAMITEARGSSSLSSSSITSETPLEEANSSKEI

SEQ ID NO: 79292 - DNA, 861 bp, Arabidopsis thaliana
  misc_feature (1)..(861): Ceres Seq. ID no. 12650724
  misc_feature (1)..(861): Ortholog of  Ceres SEQ ID NO 14311243 as cited in SEQ ID NO 20434
  misc_feature (1)..(861): Ortholog of  Ceres SEQ ID NO 12609528 as cited in SEQ ID NO 51902
atgggaaatcagaagctcaaatggacggcggaggaagaggaggcgttactcgccggagttaggaagcatggccctggaaagtggaagaatattctccgcgatcctgaattagctgagcagctctctagtcgctctaacatcgacctcaaggataaatggcgtaatttaagtgttgctcctggtattcaaggctctaaggataagatacggacaccaaaaatcaaagctgctgcttttcatctggctgccgctgctgctgccgctattgtaactcctactcatagtggtcactcttctccagttgctactcttccccgaagtggatcttctgatttgagcattgatgatagttttaacattgtagttgatccaaagaatgctcccaggtatgatggaatgatatttgaagctctttcaaacttgacggatgctaatggatctgatgtcagcgcaattttcaacttcattgagcaacgacaagaagtgccaccaaatttcaggaggatgcttagttcaagattgaggaggcttgcagctcagggaaagcttgaaaagacacagaacttctataagatgaatgataatagcttggtacaaagaacaccacatgtagcgagaccaaaagagagcaacacgaaatcccggcagcagacaaacagtcagggaccctctatttcacagcagattgttgaagcttcaataacagcagcttataagctcgtagaagtagagaacaaattagatgtgtcgaaaggagctgcagaagagatagagagactgatgaaactggcagaagaggctgatgagatgctagtgatagcgagagagatgcacgaagaatatttgttgtattgcaggtag

SEQ ID NO: 79293 - protein, 286 aa, Arabidopsis thaliana
  peptide (1)..(286): Ceres Seq. ID no. 12650725
MGNQKLKWTAEEEEALLAGVRKHGPGKWKNILRDPELAEQLSSRSNIDLKDKWRNLSVAPGIQGSKDKIRTPKIKAAAFHLAAAAAAAIVTPTHSGHSSPVATLPRSGSSDLSIDDSFNIVVDPKNAPRYDGMIFEALSNLTDANGSDVSAIFNFIEQRQEVPPNFRRMLSSRLRRLAAQGKLEKTQNFYKMNDNSLVQRTPHVARPKESNTKSRQQTNSQGPSISQQIVEASITAAYKLVEVENKLDVSKGAAEEIERLMKLAEEADEMLVIAREMHEEYLLYCR

SEQ ID NO: 79294 - protein, 154 aa, Arabidopsis thaliana
  peptide (1)..(154): Ceres Seq. ID no. 12650726
MIFEALSNLTDANGSDVSAIFNFIEQRQEVPPNFRRMLSSRLRRLAAQGKLEKTQNFYKMNDNSLVQRTPHVARPKESNTKSRQQTNSQGPSISQQIVEASITAAYKLVEVENKLDVSKGAAEEIERLMKLAEEADEMLVIAREMHEEYLLYCR

SEQ ID NO: 79295 - DNA, 880 bp, Arabidopsis thaliana
  misc_feature (1)..(880): Ceres Seq. ID no. 12650735
  misc_feature (1)..(880): Ortholog of  Ceres SEQ ID NO 14315253 as cited in SEQ ID NO 52508
  misc_feature (1)..(880): Ortholog of  Ceres SEQ ID NO 12627566 as cited in SEQ ID NO 62753
aaatgatcgctgcgacagcgagtgtgtgacgttaaaccctaaatctggtgtctttgtgcaatcgcaagattcattcactctctgcgacactaaagatcgaaacttttgaattgcagaaatggcgacagctttagcttccaagctctccaaaggacgttcattgcttggaggtctttgcaatgctttctctggtttgatgaattcctcctccaatggaatgatgaatggaagcatcctctctcagcaacaacataggacattcattcaaatggggacgattctcaaatgcgtggataactcgtgtgctaaagaggtgatgtgcattcaatccctgagaggtaagaaaggagcaagacttggcgatatcattgttggttcagtgaaagaagctaacccaattgttcaaaaaaaagtaaagaaagacgctatcccaaaaggtaaagtgaagaaagggatggtcgtgtacggtgtggttgtgcgtgctgcgatgcctaaaggacgtgctgatggaagccaagtcaagtttgatgacaatgccattgtagttgttggcattaaggaaaagaaagggcagaataattcacatggttccaagaggaaaatggagtacaaccaaccgactggtacccgagtgtttggtcctgtcccgcacgagatgcgcctcaggaaacagctcaagatcctttctttggctcagcacattgtttgagacaatacaccacactaaaacatcagttatgatctcctttatgtgactctctttgatccattcatcacttgggtttctgttgattcttcaactatccaactcattatttttgttaattctaatgaattatgaaaccttaacgtaccaattatgatctcttatttaggtttc

SEQ ID NO: 79296 - protein, 196 aa, Arabidopsis thaliana; identical to SEQ ID NO: 21071
  peptide (1)..(196): Ceres Seq. ID no. 12650736

SEQ ID NO: 79297 - protein, 170 aa, Arabidopsis thaliana; identical to SEQ ID NO: 21072
  peptide (1)..(170): Ceres Seq. ID no. 12650737

SEQ ID NO: 79298 - protein, 163 aa, Arabidopsis thaliana; identical to SEQ ID NO: 21073
  peptide (1)..(163): Ceres Seq. ID no. 12650738

SEQ ID NO: 79299 - DNA, 2448 bp, Arabidopsis thaliana
  misc_feature (1)..(2448): Ceres Seq. ID no. 12650754
  misc_feature (1)..(2448): Ortholog of  Ceres SEQ ID NO 14306908 as cited in SEQ ID NO 53320
atggaagataagggaaagggtgtggtggaaggagatgaggggaacttgatttctgagttagaagaaggtccaagcaatatggaatgtgacaagcaagtacttggtggtgatactaattatgatgataaagacttaaacagtgatgaagaaggtctggtagatgatgatgatgatgatagtgatgatgatgatgagggagatgagtcagaagaagaagatgactttgaagctggaagtgtcccaaacacgtttgaacgacctgagtatgaagctctggctgagaggaaacgcaaagcacttgctgattctcaacgtaatcctagtaacatctcgaatagcacctcgggcgtggagggattcatggaatttatgtcttctggtcgccgacggaaatccaggaagtataagaaaaagggtagaagacctgggtcaaagaaagaagttgcacctgacattctaaagaggtttagggaggctctttttcttcatgcacatggccgtgacattgaggctttacctattttagtagaagttattaagcaagcaccagctttcgatatagcatactattacctttcacgtgtttctgagcaacttggtaagaccgaatcatcctctacggaagcattaaagattgctgcaaatatcaaaggttcaaaatcacctttttggaagttgctttatgagaggttcaaggaacaagagaacatttcggtagcaaggagttatgcgtcgaaagcaattcaagctgatccagatgatatccctttgaaatatgaatatgcagacatctgcctaaatactggaaaatatagagaagctgctgaaacctttgagcaaatatttcgtcggtgtcctgagagaattgaagcactcaagtggggggtacagtatttccttaaatccggtgagggtgaacgagcagcgagcatcttagaggatcatatcaaatcccattcatctgaagtggggcacgatgtcttggatttactggcttctgttttcatgaaaattaatgcgcatgatagagctcttaagtatattcacgatgtgcgccagatttacaatgttggaaaagaattgtcttccagcttgaaaatcagacaagccatctgtcatgttcaccttgaagaaatggagcaggcagagagcgtgttaagcattctaccacaggaggctgtatctgaacatccagagctcatcaccaatttggctgatgagctaacaaacattgggaatttccactctgctctcaaatactatatagaagcaatcagtgaacctgtgaatggcaatttgtttgtaaaaattgctcgctgttatatgtcattggaagaaagaaaacaggccattgttttctattataaagctctgaatgaactcagtgatacggttgatgttcgcataactctggcttcactcctcctggaagatggcaaacgagatgaagctgtattagtgctttctcctccggaaaatccagaagcggtacattgctttattaaacagtactttgacagctttgatgcgaaattttgtgataatgtagatcctgatacggctaaactgaaggcatggtggaaaaacagaaagatcaggatgaatctttgtcagatctatcattcagagggaatgctggaggacttcgccaatacagcactgcagttggtacttaagtcaaggggaaaagaaaacgactggttctttcagagcatcaaagaaacaaaaaacgccgacgtcctagagatgctcaagcttcccaaaatatcttgcgatactatggatccaaagcagtggtttgactgtgtaagatctgtcattcagcaacatccatatcgtttgaatgcctggaactgctattacagtgtcatttcgagactagggaaaagagcatcgactgaagctaagttcatgcatcacttaaggagcaagtaccgagattgcgtaccccccattcttattgctggtcatcacttcaccgtgacaagccgacatcaagatgctgcaagagaataccttgaagcatataaattaatgcctgagagtcctttaattaacctgtgtgtgggagctgcgttaatcaacttagccctcggttttcgactcaaaaacagacacgagtgtcttgctcaaggctttgcatttctgtacaacaatctcagaatttgcagtaacagtcaggaggcgttatacaacgttgctcgagcgtatcagcatgtaggactagtgactcttgcagcttcatactacgagaaggtgttagcgatttacgagaaagattacacgatgccgaaacttcctaacgaggatccgattgttgcggaagagcggaagcctgtgaactgtgacctacgcaaagaagctgcacacaatctgcatttgatctataagcacagtggagcgtttgatctcgcgaggcaagtattaaaggatcactgcactttctga

SEQ ID NO: 79300 - protein, 815 aa, Arabidopsis thaliana
  peptide (1)..(815): Ceres Seq. ID no. 12650755
MEDKGKGVVEGDEGNLISELEEGPSNMECDKQVLGGDTNYDDKDLNSDEEGLVDDDDDDSDDDDEGDESEEEDDFEAGSVPNTFERPEYEALAERKRKALADSQRNPSNISNSTSGVEGFMEFMSSGRRRKSRKYKKKGRRPGSKKEVAPDILKRFREALFLHAHGRDIEALPILVEVIKQAPAFDIAYYYLSRVSEQLGKTESSSTEALKIAANIKGSKSPFWKLLYERFKEQENISVARSYASKAIQADPDDIPLKYEYADICLNTGKYREAAETFEQIFRRCPERIEALKWGVQYFLKSGEGERAASILEDHIKSHSSEVGHDVLDLLASVFMKINAHDRALKYIHDVRQIYNVGKELSSSLKIRQAICHVHLEEMEQAESVLSILPQEAVSEHPELITNLADELTNIGNFHSALKYYIEAISEPVNGNLFVKIARCYMSLEERKQAIVFYYKALNELSDTVDVRITLASLLLEDGKRDEAVLVLSPPENPEAVHCFIKQYFDSFDAKFCDNVDPDTAKLKAWWKNRKIRMNLCQIYHSEGMLEDFANTALQLVLKSRGKENDWFFQSIKETKNADVLEMLKLPKISCDTMDPKQWFDCVRSVIQQHPYRLNAWNCYYSVISRLGKRASTEAKFMHHLRSKYRDCVPPILIAGHHFTVTSRHQDAAREYLEAYKLMPESPLINLCVGAALINLALGFRLKNRHECLAQGFAFLYNNLRICSNSQEALYNVARAYQHVGLVTLAASYYEKVLAIYEKDYTMPKLPNEDPIVAEERKPVNCDLRKEAAHNLHLIYKHSGAFDLARQVLKDHCTF

SEQ ID NO: 79301 - protein, 789 aa, Arabidopsis thaliana
  peptide (1)..(789): Ceres Seq. ID no. 12650756
MECDKQVLGGDTNYDDKDLNSDEEGLVDDDDDDSDDDDEGDESEEEDDFEAGSVPNTFERPEYEALAERKRKALADSQRNPSNISNSTSGVEGFMEFMSSGRRRKSRKYKKKGRRPGSKKEVAPDILKRFREALFLHAHGRDIEALPILVEVIKQAPAFDIAYYYLSRVSEQLGKTESSSTEALKIAANIKGSKSPFWKLLYERFKEQENISVARSYASKAIQADPDDIPLKYEYADICLNTGKYREAAETFEQIFRRCPERIEALKWGVQYFLKSGEGERAASILEDHIKSHSSEVGHDVLDLLASVFMKINAHDRALKYIHDVRQIYNVGKELSSSLKIRQAICHVHLEEMEQAESVLSILPQEAVSEHPELITNLADELTNIGNFHSALKYYIEAISEPVNGNLFVKIARCYMSLEERKQAIVFYYKALNELSDTVDVRITLASLLLEDGKRDEAVLVLSPPENPEAVHCFIKQYFDSFDAKFCDNVDPDTAKLKAWWKNRKIRMNLCQIYHSEGMLEDFANTALQLVLKSRGKENDWFFQSIKETKNADVLEMLKLPKISCDTMDPKQWFDCVRSVIQQHPYRLNAWNCYYSVISRLGKRASTEAKFMHHLRSKYRDCVPPILIAGHHFTVTSRHQDAAREYLEAYKLMPESPLINLCVGAALINLALGFRLKNRHECLAQGFAFLYNNLRICSNSQEALYNVARAYQHVGLVTLAASYYEKVLAIYEKDYTMPKLPNEDPIVAEERKPVNCDLRKEAAHNLHLIYKHSGAFDLARQVLKDHCTF

SEQ ID NO: 79302 - protein, 695 aa, Arabidopsis thaliana
  peptide (1)..(695): Ceres Seq. ID no. 12650757
MEFMSSGRRRKSRKYKKKGRRPGSKKEVAPDILKRFREALFLHAHGRDIEALPILVEVIKQAPAFDIAYYYLSRVSEQLGKTESSSTEALKIAANIKGSKSPFWKLLYERFKEQENISVARSYASKAIQADPDDIPLKYEYADICLNTGKYREAAETFEQIFRRCPERIEALKWGVQYFLKSGEGERAASILEDHIKSHSSEVGHDVLDLLASVFMKINAHDRALKYIHDVRQIYNVGKELSSSLKIRQAICHVHLEEMEQAESVLSILPQEAVSEHPELITNLADELTNIGNFHSALKYYIEAISEPVNGNLFVKIARCYMSLEERKQAIVFYYKALNELSDTVDVRITLASLLLEDGKRDEAVLVLSPPENPEAVHCFIKQYFDSFDAKFCDNVDPDTAKLKAWWKNRKIRMNLCQIYHSEGMLEDFANTALQLVLKSRGKENDWFFQSIKETKNADVLEMLKLPKISCDTMDPKQWFDCVRSVIQQHPYRLNAWNCYYSVISRLGKRASTEAKFMHHLRSKYRDCVPPILIAGHHFTVTSRHQDAAREYLEAYKLMPESPLINLCVGAALINLALGFRLKNRHECLAQGFAFLYNNLRICSNSQEALYNVARAYQHVGLVTLAASYYEKVLAIYEKDYTMPKLPNEDPIVAEERKPVNCDLRKEAAHNLHLIYKHSGAFDLARQVLKDHCTF

SEQ ID NO: 79303 - DNA, 1495 bp, Arabidopsis thaliana
  misc_feature (1)..(1495): Ceres Seq. ID no. 12650788
  misc_feature (1)..(1495): Ortholog of  Ceres SEQ ID NO 15175957 as cited in SEQ ID NO 20615
  misc_feature (1)..(1495): Ortholog of  Ceres SEQ ID NO 14301490 as cited in SEQ ID NO 66234
atgggatgctttgcgtcaacgccgaaagactcaggtgggaacagaagaaagccaacaagcatcggtgaggtttcagtatatgtacctggtttaaggatacccagagcggtggattttttgcagtcacttggtgatcaattaccgaagactttagtggaacgcttgacagctttaagaacgcgtatagtagtgatggctaatcaagaaggacctacaattacgagaactaggagaaagacacaacatggaggttcaacgctcttggatctccatcaagctttgctagattatctacctgttgtcttgggattaactaaagatggtagccatctacagtttaaagtgcaatttaattgggtaaatcaggaggatgaggaagaggaaacagagatgtcaaacgtttggtatgaagttttatctgttttgcatctaatggcaatgctacaaatgtctcaagccaatttactgcttcttcctagaggttctagtgatggtcacaatcatccgaaagtatccgaagaaaacagacgaacttcgattgatatcttcttaaaagcagctggatatcttgattgtgccgttaagcatgttctcccccagttttctgctgagcaaaggagaagtttaccagttgacttagcagaaggaactctacgggctctttgcttgcaagcacttggccagggtgttgatatccaacttggcatggcgattgatagctcaaaggccactcttgcagtaaaacgaagactttcatgtgaaatggtgaaatattggcagcaggcacaagataatttaatgaatctcccgttagcaaatggttggggagaaaagcatggactctttgttaagtggaagtatgttgaagctaaggctgcggcttactactatcatggtttgattcttgatgaaggaaacacagagaagtcacatggcatggcagttgctgctttacaagctgcagatgaatgtttcaaagaaagtaagaaagcatccgaagcattcaacgcctctgcgcctacttcaagaacaccgcccctctttggaacaatgaaatatctaactgagaaaatcccgaaagatacttcgagtaaagtcaggataaaccgtgatctctactcctatgaaaaaatcatggagacagcaccaacacttcctgatttcgctttggcattgaaaccagatgagtatcaacttccactcgccgaagcttcgtagtctgaagatgctcaaagcgcttcgaaccaactttaggagcaaacgaagagagagagagatgtgtaaaccttgtatagccaaaaaatcagtggtttccaatgacggcctgcaaattatggtatggctatagaatttacccaacaggtttctatgatctgatctctaccgtgtgagaaaaaacacttatcaaaattgggtttggatcagtttacatgagagagatctttgtatgttaatgtactaatatattccttcaataaagcattatttttttccc

SEQ ID NO: 79304 - protein, 405 aa, Arabidopsis thaliana
  peptide (1)..(405): Ceres Seq. ID no. 12650789
MGCFASTPKDSGGNRRKPTSIGEVSVYVPGLRIPRAVDFLQSLGDQLPKTLVERLTALRTRIVVMANQEGPTITRTRRKTQHGGSTLLDLHQALLDYLPVVLGLTKDGSHLQFKVQFNWVNQEDEEEETEMSNVWYEVLSVLHLMAMLQMSQANLLLLPRGSSDGHNHPKVSEENRRTSIDIFLKAAGYLDCAVKHVLPQFSAEQRRSLPVDLAEGTLRALCLQALGQGVDIQLGMAIDSSKATLAVKRRLSCEMVKYWQQAQDNLMNLPLANGWGEKHGLFVKWKYVEAKAAAYYYHGLILDEGNTEKSHGMAVAALQAADECFKESKKASEAFNASAPTSRTPPLFGTMKYLTEKIPKDTSSKVRINRDLYSYEKIMETAPTLPDFALALKPDEYQLPLAEAS

SEQ ID NO: 79305 - protein, 341 aa, Arabidopsis thaliana
  peptide (1)..(341): Ceres Seq. ID no. 12650790
MANQEGPTITRTRRKTQHGGSTLLDLHQALLDYLPVVLGLTKDGSHLQFKVQFNWVNQEDEEEETEMSNVWYEVLSVLHLMAMLQMSQANLLLLPRGSSDGHNHPKVSEENRRTSIDIFLKAAGYLDCAVKHVLPQFSAEQRRSLPVDLAEGTLRALCLQALGQGVDIQLGMAIDSSKATLAVKRRLSCEMVKYWQQAQDNLMNLPLANGWGEKHGLFVKWKYVEAKAAAYYYHGLILDEGNTEKSHGMAVAALQAADECFKESKKASEAFNASAPTSRTPPLFGTMKYLTEKIPKDTSSKVRINRDLYSYEKIMETAPTLPDFALALKPDEYQLPLAEAS

SEQ ID NO: 79306 - protein, 275 aa, Arabidopsis thaliana
  peptide (1)..(275): Ceres Seq. ID no. 12650791
MSNVWYEVLSVLHLMAMLQMSQANLLLLPRGSSDGHNHPKVSEENRRTSIDIFLKAAGYLDCAVKHVLPQFSAEQRRSLPVDLAEGTLRALCLQALGQGVDIQLGMAIDSSKATLAVKRRLSCEMVKYWQQAQDNLMNLPLANGWGEKHGLFVKWKYVEAKAAAYYYHGLILDEGNTEKSHGMAVAALQAADECFKESKKASEAFNASAPTSRTPPLFGTMKYLTEKIPKDTSSKVRINRDLYSYEKIMETAPTLPDFALALKPDEYQLPLAEAS

SEQ ID NO: 79307 - DNA, 1121 bp, Arabidopsis thaliana
  misc_feature (1)..(1121): Ceres Seq. ID no. 12650792
  misc_feature (1)..(1121): Ortholog of  Ceres SEQ ID NO 13647762 as cited in SEQ ID NO 20426
agctttcttcttgttcctacatacccatcttccctcacctacatcaaacctagggtttcttaactatatcaacaacatatataaatttatatataggttgtgatttattgaagatcataaagatcaaaaggagagaggtattaaaaaatgatgtgtagtcgaggccattggagacctgcagaagacgagaagctaagagaactcgtcgaacaatttggtcctcataattggaacgccatagctcagaagctctctggtcgatctggtaagagttgtagattgagatggtttaatcaattggatcctaggattaaccgaaaccctttcacggaggaagaagaagaaaggcttttagcgtctcatcggatccatgggaacagatggtctgtgatcgctagattttttcccggtcgaactgataacgctgttaaaaaccattggcacgtcatcatggctcgtcgtggccgagaacggtccaagctccgtccacgaggccttggccatgatggcacggtggctgcgactgggatgattggtaattataaagactgcgataaggagagaagattggcaaccacaaccgctatcaattttccttatcaattctctcatattaatcattttcaagtcctcaaagagttcttgaccggaaagatcgggttcagaaatagtactactccaatacaagaaggagcaatagaccaaactaaacgaccgatggagttctacaattttcttcaagtaaacacggattcgaagatacacgaattgatagataattcaagaaaagacgaagaagaagatgtcgatcaaaacaaccgaattcctaacgagaattgtgttccatttttcgactttttgtctgttggaaactctgcctctcagggtttatgttaatttgtccgtaccacatgtactataaggtggaccatatgttaattaaagataatgtagaaagtactaatcaattagagctcttgtttgagccaaatgtgaaaattagttaagccatcccaaacatgttcttgtataacaaatataaggttgtacttttccacctttatcaggtctaattttctatttttattttaaggatgtttaatcagactcatcaccattcg

SEQ ID NO: 79308 - protein, 249 aa, Arabidopsis thaliana
  peptide (1)..(249): Ceres Seq. ID no. 12650793
MMCSRGHWRPAEDEKLRELVEQFGPHNWNAIAQKLSGRSGKSCRLRWFNQLDPRINRNPFTEEEEERLLASHRIHGNRWSVIARFFPGRTDNAVKNHWHVIMARRGRERSKLRPRGLGHDGTVAATGMIGNYKDCDKERRLATTTAINFPYQFSHINHFQVLKEFLTGKIGFRNSTTPIQEGAIDQTKRPMEFYNFLQVNTDSKIHELIDNSRKDEEEDVDQNNRIPNENCVPFFDFLSVGNSASQGLC

SEQ ID NO: 79309 - protein, 248 aa, Arabidopsis thaliana
  peptide (1)..(248): Ceres Seq. ID no. 12650794
MCSRGHWRPAEDEKLRELVEQFGPHNWNAIAQKLSGRSGKSCRLRWFNQLDPRINRNPFTEEEEERLLASHRIHGNRWSVIARFFPGRTDNAVKNHWHVIMARRGRERSKLRPRGLGHDGTVAATGMIGNYKDCDKERRLATTTAINFPYQFSHINHFQVLKEFLTGKIGFRNSTTPIQEGAIDQTKRPMEFYNFLQVNTDSKIHELIDNSRKDEEEDVDQNNRIPNENCVPFFDFLSVGNSASQGLC

SEQ ID NO: 79310 - protein, 148 aa, Arabidopsis thaliana
  peptide (1)..(148): Ceres Seq. ID no. 12650795
MARRGRERSKLRPRGLGHDGTVAATGMIGNYKDCDKERRLATTTAINFPYQFSHINHFQVLKEFLTGKIGFRNSTTPIQEGAIDQTKRPMEFYNFLQVNTDSKIHELIDNSRKDEEEDVDQNNRIPNENCVPFFDFLSVGNSASQGLC

SEQ ID NO: 79311 - DNA, 2976 bp, Arabidopsis thaliana
  misc_feature (1)..(2976): Ceres Seq. ID no. 12650823
  misc_feature (1)..(2976): Ortholog of  Ceres SEQ ID NO 13593889 as cited in SEQ ID NO 53305
  misc_feature (1)..(2976): Ortholog of  Ceres SEQ ID NO 13581959 as cited in SEQ ID NO 56156
atgaagatgaacatgaagaaatttctcaaaaagcttcgtatcacgcccaatcaacgagacgatggtgaaggttcagtctctaacagaagcaataagtctagtgatgcagaaccatctccttctgattcattgaggtctcaagataactctgaattcaaaccctttttgggtttatcaaattggttaagctctgttactcacaggaaaagcccttcttcttccaatgccaccaatagcaaagaggatgacactaccatggaacatggtggtcccgttgggtcggaatctgggatgcagggtttgggttctagtagtaattccaaggatccagaagttgaagaagaatatcagatacagttggctctagagttaagtgctagggaggatcctgaagctgctcagattgaggctatgaagcagttcagcttaggttctcgtccttctgctcccgagaatactccagctgaactcatggcatatagatattggaattataactgtcttggctatgatgacaagattgtggatggtttctatgacctgtgtggagtaatgaatgaatcttccttaaaaagaatacctcccttagttgatcttcaggggacacttgtgtcagatggtgtaacttgggatgctgttctagtgaacagcagcaaagattctaatctgttgagacttgaacaaatggctcttgatattgcagcaaaatcaaagtcagcgtcttcttcagggtttgtgaacagtgaattggtaaggcaactggcagttttagttgctgattacatgggtggaccagttttggatccagatagcacgttaagagcttggtggagtctgagctacagcttgaaagcaaccctccgtagcatggttctgcccctgggttctctaactattggattggctcgtcatcgtgccttgttattcaaagttttgtgtgatagtgtcggcgttccttgtcgaatagtcaaaggacagcaatataccggttcagatgatgtggcaatgaactccattaagactgatgatggcagttgcaaattattttccttaacgaatccaaatgtgaatttcagggagtacattgttgatctcatgggagatccaggcacgcttatccccgctgatgcagctggactacaaatggactttgatgattctgtctactctgccagtcccagagatgttgattcatctcatgtagcttcttccagcagtggggtcgagagctcaattgaagaacacacagaatcttggtcagcggaacatcgttctaggaccaagggttcccgggaggaaaaccaatctgcaggtggaggggatctcatgattccaaatattagggaagctgtgggaagtcaaaaggctcctgttcaacatctttccagcaagcctactcattctttcactcatgccagatcaccttcgtggactgaaggtgttagctctccagctggacgcaggatgaaagtcaaagatgtttcacaatatatgattgatgctgccaaagagaatccacaactagctcagaagcttcatgatgtgttacttgaaagtggagttgtagctcctcgaaatttattttcggaagtctattcagagtcaatggaggcaacaggtgaaatcaaatctgtggctgaatccaatgatgagaaagggaaagattttggaacaatccagcaaggaagaaaccagagcaaccttggccctgtgaggtttttgcctcctcttccaagaccgcaatctaaagcaattacccatgacctacgtgaacattcaggatctggactcggtcatttgtctgaacattgcaatattgatggtcactctgattcctcacattctgaaacatctactgactatcccagaaatgttcctgttgccgtagctgcagcggctgttgttgcgtcttccatggttgttgctgccgccaagtcagcaaactcggattcctccactttagaactttctgctgcagctgctgctgcagttatggcgacagctgcagcagtgagcaggcagtttgaactagattcacttagcaacggggatgctggttctggtgggcttcatggggtagattcaggaggagaacgaatatccgacagatctattggcaatgaaagttcaaaatctgatgctgcaattgatgatgtagctgaatgcgagattttgtgggaggaaattactgtggctgagcgtatcggactggtggctgtcaagaagttcattgaccaagatattactggagaggcactggaggaattcagaagtgaggtccggatgatgagaaggctcagacaccctaatattgttctcttcatgggagctgtaacccgcccaccaaatctctcaattgttacagaatttcttcctcgaggtagcttgtataggttaattcacaggcctaataaccaattagatgagcgaaagcgtctgaggatggctcttgatgctgctcgtggaatgaattatttacacagctgtaatccggtaattgtccatcgtgatcttaaatctccaaaccttctagttgacaaaaattgggttgtcaaggtgtgcgattttgggttgtctagaatgaaagtaagcacatacctctcttcaaagtcaacagcaggcacggctgaatggatggctccagaagtgcttagaaacgaacccgcagatgagaagtgtgatgtgtacagctacggggtcattctctgggaactctttacgttacagcaaccatggggaaaaatgaacccaatgcaagtggttggcgcggttggttttcaacatcgacgacttgatatccctgaatttgtggatcctggaattgcagatatcatcaggaaatgttggcagacggatccaaggttaagaccaagttttggagagatcatggattctttaaagcagctacagaaacctatccagagagcagcagttcccagttcttctgcattgaccactgatgagcaggaacaataa

SEQ ID NO: 79312 - protein, 991 aa, Arabidopsis thaliana
  peptide (1)..(991): Ceres Seq. ID no. 12650824
MKMNMKKFLKKLRITPNQRDDGEGSVSNRSNKSSDAEPSPSDSLRSQDNSEFKPFLGLSNWLSSVTHRKSPSSSNATNSKEDDTTMEHGGPVGSESGMQGLGSSSNSKDPEVEEEYQIQLALELSAREDPEAAQIEAMKQFSLGSRPSAPENTPAELMAYRYWNYNCLGYDDKIVDGFYDLCGVMNESSLKRIPPLVDLQGTLVSDGVTWDAVLVNSSKDSNLLRLEQMALDIAAKSKSASSSGFVNSELVRQLAVLVADYMGGPVLDPDSTLRAWWSLSYSLKATLRSMVLPLGSLTIGLARHRALLFKVLCDSVGVPCRIVKGQQYTGSDDVAMNSIKTDDGSCKLFSLTNPNVNFREYIVDLMGDPGTLIPADAAGLQMDFDDSVYSASPRDVDSSHVASSSSGVESSIEEHTESWSAEHRSRTKGSREENQSAGGGDLMIPNIREAVGSQKAPVQHLSSKPTHSFTHARSPSWTEGVSSPAGRRMKVKDVSQYMIDAAKENPQLAQKLHDVLLESGVVAPRNLFSEVYSESMEATGEIKSVAESNDEKGKDFGTIQQGRNQSNLGPVRFLPPLPRPQSKAITHDLREHSGSGLGHLSEHCNIDGHSDSSHSETSTDYPRNVPVAVAAAAVVASSMVVAAAKSANSDSSTLELSAAAAAAVMATAAAVSRQFELDSLSNGDAGSGGLHGVDSGGERISDRSIGNESSKSDAAIDDVAECEILWEEITVAERIGLVAVKKFIDQDITGEALEEFRSEVRMMRRLRHPNIVLFMGAVTRPPNLSIVTEFLPRGSLYRLIHRPNNQLDERKRLRMALDAARGMNYLHSCNPVIVHRDLKSPNLLVDKNWVVKVCDFGLSRMKVSTYLSSKSTAGTAEWMAPEVLRNEPADEKCDVYSYGVILWELFTLQQPWGKMNPMQVVGAVGFQHRRLDIPEFVDPGIADIIRKCWQTDPRLRPSFGEIMDSLKQLQKPIQRAAVPSSSALTTDEQEQ

SEQ ID NO: 79313 - protein, 989 aa, Arabidopsis thaliana
  peptide (1)..(989): Ceres Seq. ID no. 12650825
MNMKKFLKKLRITPNQRDDGEGSVSNRSNKSSDAEPSPSDSLRSQDNSEFKPFLGLSNWLSSVTHRKSPSSSNATNSKEDDTTMEHGGPVGSESGMQGLGSSSNSKDPEVEEEYQIQLALELSAREDPEAAQIEAMKQFSLGSRPSAPENTPAELMAYRYWNYNCLGYDDKIVDGFYDLCGVMNESSLKRIPPLVDLQGTLVSDGVTWDAVLVNSSKDSNLLRLEQMALDIAAKSKSASSSGFVNSELVRQLAVLVADYMGGPVLDPDSTLRAWWSLSYSLKATLRSMVLPLGSLTIGLARHRALLFKVLCDSVGVPCRIVKGQQYTGSDDVAMNSIKTDDGSCKLFSLTNPNVNFREYIVDLMGDPGTLIPADAAGLQMDFDDSVYSASPRDVDSSHVASSSSGVESSIEEHTESWSAEHRSRTKGSREENQSAGGGDLMIPNIREAVGSQKAPVQHLSSKPTHSFTHARSPSWTEGVSSPAGRRMKVKDVSQYMIDAAKENPQLAQKLHDVLLESGVVAPRNLFSEVYSESMEATGEIKSVAESNDEKGKDFGTIQQGRNQSNLGPVRFLPPLPRPQSKAITHDLREHSGSGLGHLSEHCNIDGHSDSSHSETSTDYPRNVPVAVAAAAVVASSMVVAAAKSANSDSSTLELSAAAAAAVMATAAAVSRQFELDSLSNGDAGSGGLHGVDSGGERISDRSIGNESSKSDAAIDDVAECEILWEEITVAERIGLVAVKKFIDQDITGEALEEFRSEVRMMRRLRHPNIVLFMGAVTRPPNLSIVTEFLPRGSLYRLIHRPNNQLDERKRLRMALDAARGMNYLHSCNPVIVHRDLKSPNLLVDKNWVVKVCDFGLSRMKVSTYLSSKSTAGTAEWMAPEVLRNEPADEKCDVYSYGVILWELFTLQQPWGKMNPMQVVGAVGFQHRRLDIPEFVDPGIADIIRKCWQTDPRLRPSFGEIMDSLKQLQKPIQRAAVPSSSALTTDEQEQ

SEQ ID NO: 79314 - protein, 987 aa, Arabidopsis thaliana
  peptide (1)..(987): Ceres Seq. ID no. 12650826
MKKFLKKLRITPNQRDDGEGSVSNRSNKSSDAEPSPSDSLRSQDNSEFKPFLGLSNWLSSVTHRKSPSSSNATNSKEDDTTMEHGGPVGSESGMQGLGSSSNSKDPEVEEEYQIQLALELSAREDPEAAQIEAMKQFSLGSRPSAPENTPAELMAYRYWNYNCLGYDDKIVDGFYDLCGVMNESSLKRIPPLVDLQGTLVSDGVTWDAVLVNSSKDSNLLRLEQMALDIAAKSKSASSSGFVNSELVRQLAVLVADYMGGPVLDPDSTLRAWWSLSYSLKATLRSMVLPLGSLTIGLARHRALLFKVLCDSVGVPCRIVKGQQYTGSDDVAMNSIKTDDGSCKLFSLTNPNVNFREYIVDLMGDPGTLIPADAAGLQMDFDDSVYSASPRDVDSSHVASSSSGVESSIEEHTESWSAEHRSRTKGSREENQSAGGGDLMIPNIREAVGSQKAPVQHLSSKPTHSFTHARSPSWTEGVSSPAGRRMKVKDVSQYMIDAAKENPQLAQKLHDVLLESGVVAPRNLFSEVYSESMEATGEIKSVAESNDEKGKDFGTIQQGRNQSNLGPVRFLPPLPRPQSKAITHDLREHSGSGLGHLSEHCNIDGHSDSSHSETSTDYPRNVPVAVAAAAVVASSMVVAAAKSANSDSSTLELSAAAAAAVMATAAAVSRQFELDSLSNGDAGSGGLHGVDSGGERISDRSIGNESSKSDAAIDDVAECEILWEEITVAERIGLVAVKKFIDQDITGEALEEFRSEVRMMRRLRHPNIVLFMGAVTRPPNLSIVTEFLPRGSLYRLIHRPNNQLDERKRLRMALDAARGMNYLHSCNPVIVHRDLKSPNLLVDKNWVVKVCDFGLSRMKVSTYLSSKSTAGTAEWMAPEVLRNEPADEKCDVYSYGVILWELFTLQQPWGKMNPMQVVGAVGFQHRRLDIPEFVDPGIADIIRKCWQTDPRLRPSFGEIMDSLKQLQKPIQRAAVPSSSALTTDEQEQ

SEQ ID NO: 79315 - DNA, 3495 bp, Arabidopsis thaliana
  misc_feature (1)..(3495): Ceres Seq. ID no. 12650857
  misc_feature (1)..(3495): Ortholog of  Ceres SEQ ID NO 14306268 as cited in SEQ ID NO 51135
  misc_feature (1)..(3495): Ortholog of  Ceres SEQ ID NO 15225368 as cited in SEQ ID NO 58345
  misc_feature (1)..(3495): Ortholog of  Ceres SEQ ID NO 13584744 as cited in SEQ ID NO 69137
atgtccatcttttttttcttcatcagcttcgtcgtcttctccgtcgctgacctcccgtcgtgcttctcagccgatcaacagtacgaggagtgtcgctcacgtaatctgacatgtggatctggacacagggtattcgagagtaccacgtatccgttctggggtggattcaataaacccaaattctgcggtcattcgtcattcaaactctcctgcgagggtgatcaaaacctaaccctagcgatcgggaacatcactcttcgcgttgtttctgcgaatctggaggatcataaaatttccgttgccgatgatagtctactagacggaggttgcctaaacatttggaacttcaacgggaagaatcagttcacattagactccaacaccgagacgatcgatgtattcgtcaactgttccggcgtagctccgttgcagatttcttgcgaagaaagctacgaggatccggtgacatatcatgtcttgcgatcgtcggattctgacgaaggttgtatgaaatatgcagaaattccgatgctgaggtctgctaaggacgagcttcaacggtccgaactaacttttgtggaagctttgagaaaaggattcgatttgaggtacatcatggaagacaaagcttgccggagatgcattgattccggtgggatttgtggttcggcgttagattcggagagtttccggtgtctatgtgcggacagacctcacaactcctcctgcgacgataacactaaccaagcaactcaaaccctctctcttgatccaaagttcaaggcttgtgagccgaaatcatgcggcaaaggtccccagatctcctatccattttatctatctggaaagcaagaatctttttgtggttatccaagttttgaactcacttgtgatgatgaagaaaagctccctgttctcgggatctccggtgaggaatatgtcatcaagaacatatcttacttaacacagtcgtttcaggtcgtgaactcaaaggcttctcatgatccatgtcccagaccgctgaacaatcttaccctccataggactcctttctttgtgaacccttctcatatcaacttcactatactttacaattgttccgatcacctgctggaggattttaggacataccctcttacttgtgctcgaaacacgagtcttcttcgatcttttggggtctttgacagaaagaaacttggaaaagagaaacaaattgcatccatgtcgtgccagaaactagtggatgttcctgttttagctagtaatgagtctgatgtgatgggtatgacttatgttgagattttgaagaggggttttgttctgaattggactgcaaacagttgcttccgctgcatcaccagcggcgggagatgtggaactgatcaacaagaattcgtatgcttgtgtcctgatggacctaaacttcatgatacttgcacgaatggcaaaaatgataaaagaaggagagtgatagtgaagattacaaaatccatctcaggtgcatccgctgcggtcgtaggattaatagctgcgagcatattttggtatgtataccatcgtagaaaaacaaaaagttacagaaattcttcagcattgcttccaagaaacatctcatcagatccatctgcaaagtcttttgacatcgagaaagcagaggaattattagtcggagttcatattttctcttacgaagaacttgaagaagccactaataacttcgacccatctaaagaactcggtgatggaggctttggtactgtctattacggtaagcttaaagatggacgaagcgtagccgttaaacggttatacgataacaacttcaaaagagcagagcaattcaggaatgaagttgagatcttaacgggtttacgccatccaaacctcgtggctctctttggatgctcctcaaaacagagccgggacttactgctagtgtatgagtatgttgcaaacggcacgttagctgatcatctacatggtccacaggcaaaccctagctcacttccttggtctattcggctcaaaatcgctgttgaaactgcctctgccttgaagtatctccacgcctccaagatcatccaccgtgatgttaaatccaacaacatccttctcgaccaaaacttcaatgtcaaggttgcggattttggactctctagactgtttcctatggataaaacgcacgtatctaccgctccacaaggaactccgggatatgtcgacccggattaccacttatgctatcaactctcaaacaaaagcgacgtgtacagctttgcggtagtgttaatggagcttatctcttcacttccagcagtcgacatcacaagaccgcgccaagagatcaacctctcgaacatggcagtcgttaaaatccagaaccacgagctccgcgacatggtggatccgtcacttgggtttgacacggatacaagagtgagacagacggtgatcgctgtcgctgagctggcgttccaatgcttgcagtcggataaagatcttaggccatgtatgtcgcacgtgcaggatacgttgacgaggatacagaacaatggatttggttcggaaatggatgttgtagatgtgaacaagagtggaccgttggttgcacagtctccagatagtgtcattgtgaaatgggacaagagggaccgtaacatacaaaacttcgtgattgggcctgaccggactaaatcagcaattttgtattgctatttgctgccaactgaaactatttttttattagtgacaatagccatggatatatattcttccataactcaagctgcagatctaaacaacaacaacagtaaccttcattttcaaacatttcatccttcctctacttctctcgaatcgctcttccttcatcatcatcaacaacaattacttcactttcccggaaactctccagacagtagtaacaatttctcttcaacttcaagtttcctccatagtgatcacaacatcgtcgatgagaccaagaagagaaaagctttgttacctactttgtcttcatcagagactagcggcgtctccgataatacgaatgttattgccactgaaacaggttctttgagaagaggtaagaggttgaagaagaagaaggaagaagaagacgagaaagagagagaagttgttcatgtgagagccagaagaggccaagccactgatagccacagcttagcagaacgggttcggcgagggaaaataaacgagagattaagatgcttgcaagatatggtgcccggatgttataaggctatgggaatggctacgatgcttgacgagataattaattatgtccagtctctacagaatcaagtcgagttcctctcgatgaaactcactgcagcaagttcgttttatgactttaactcagagacagatgcagttgattccatgcagagagcaaaggcacgtgagacagtggagatggggagacaaacaagagatgggagtcctgtcttccatttatcaacatggtccctttga

SEQ ID NO: 79316 - protein, 1164 aa, Arabidopsis thaliana
  peptide (1)..(1164): Ceres Seq. ID no. 12650858
MSIFFFFISFVVFSVADLPSCFSADQQYEECRSRNLTCGSGHRVFESTTYPFWGGFNKPKFCGHSSFKLSCEGDQNLTLAIGNITLRVVSANLEDHKISVADDSLLDGGCLNIWNFNGKNQFTLDSNTETIDVFVNCSGVAPLQISCEESYEDPVTYHVLRSSDSDEGCMKYAEIPMLRSAKDELQRSELTFVEALRKGFDLRYIMEDKACRRCIDSGGICGSALDSESFRCLCADRPHNSSCDDNTNQATQTLSLDPKFKACEPKSCGKGPQISYPFYLSGKQESFCGYPSFELTCDDEEKLPVLGISGEEYVIKNISYLTQSFQVVNSKASHDPCPRPLNNLTLHRTPFFVNPSHINFTILYNCSDHLLEDFRTYPLTCARNTSLLRSFGVFDRKKLGKEKQIASMSCQKLVDVPVLASNESDVMGMTYVEILKRGFVLNWTANSCFRCITSGGRCGTDQQEFVCLCPDGPKLHDTCTNGKNDKRRRVIVKITKSISGASAAVVGLIAASIFWYVYHRRKTKSYRNSSALLPRNISSDPSAKSFDIEKAEELLVGVHIFSYEELEEATNNFDPSKELGDGGFGTVYYGKLKDGRSVAVKRLYDNNFKRAEQFRNEVEILTGLRHPNLVALFGCSSKQSRDLLLVYEYVANGTLADHLHGPQANPSSLPWSIRLKIAVETASALKYLHASKIIHRDVKSNNILLDQNFNVKVADFGLSRLFPMDKTHVSTAPQGTPGYVDPDYHLCYQLSNKSDVYSFAVVLMELISSLPAVDITRPRQEINLSNMAVVKIQNHELRDMVDPSLGFDTDTRVRQTVIAVAELAFQCLQSDKDLRPCMSHVQDTLTRIQNNGFGSEMDVVDVNKSGPLVAQSPDSVIVKWDKRDRNIQNFVIGPDRTKSAILYCYLLPTETIFLLVTIAMDIYSSITQAADLNNNNSNLHFQTFHPSSTSLESLFLHHHQQQLLHFPGNSPDSSNNFSSTSSFLHSDHNIVDETKKRKALLPTLSSSETSGVSDNTNVIATETGSLRRGKRLKKKKEEEDEKEREVVHVRARRGQATDSHSLAERVRRGKINERLRCLQDMVPGCYKAMGMATMLDEIINYVQSLQNQVEFLSMKLTAASSFYDFNSETDAVDSMQRAKARETVEMGRQTRDGSPVFHLSTWSL

SEQ ID NO: 79317 - protein, 995 aa, Arabidopsis thaliana
  peptide (1)..(995): Ceres Seq. ID no. 12650859
MKYAEIPMLRSAKDELQRSELTFVEALRKGFDLRYIMEDKACRRCIDSGGICGSALDSESFRCLCADRPHNSSCDDNTNQATQTLSLDPKFKACEPKSCGKGPQISYPFYLSGKQESFCGYPSFELTCDDEEKLPVLGISGEEYVIKNISYLTQSFQVVNSKASHDPCPRPLNNLTLHRTPFFVNPSHINFTILYNCSDHLLEDFRTYPLTCARNTSLLRSFGVFDRKKLGKEKQIASMSCQKLVDVPVLASNESDVMGMTYVEILKRGFVLNWTANSCFRCITSGGRCGTDQQEFVCLCPDGPKLHDTCTNGKNDKRRRVIVKITKSISGASAAVVGLIAASIFWYVYHRRKTKSYRNSSALLPRNISSDPSAKSFDIEKAEELLVGVHIFSYEELEEATNNFDPSKELGDGGFGTVYYGKLKDGRSVAVKRLYDNNFKRAEQFRNEVEILTGLRHPNLVALFGCSSKQSRDLLLVYEYVANGTLADHLHGPQANPSSLPWSIRLKIAVETASALKYLHASKIIHRDVKSNNILLDQNFNVKVADFGLSRLFPMDKTHVSTAPQGTPGYVDPDYHLCYQLSNKSDVYSFAVVLMELISSLPAVDITRPRQEINLSNMAVVKIQNHELRDMVDPSLGFDTDTRVRQTVIAVAELAFQCLQSDKDLRPCMSHVQDTLTRIQNNGFGSEMDVVDVNKSGPLVAQSPDSVIVKWDKRDRNIQNFVIGPDRTKSAILYCYLLPTETIFLLVTIAMDIYSSITQAADLNNNNSNLHFQTFHPSSTSLESLFLHHHQQQLLHFPGNSPDSSNNFSSTSSFLHSDHNIVDETKKRKALLPTLSSSETSGVSDNTNVIATETGSLRRGKRLKKKKEEEDEKEREVVHVRARRGQATDSHSLAERVRRGKINERLRCLQDMVPGCYKAMGMATMLDEIINYVQSLQNQVEFLSMKLTAASSFYDFNSETDAVDSMQRAKARETVEMGRQTRDGSPVFHLSTWSL

SEQ ID NO: 79318 - protein, 988 aa, Arabidopsis thaliana
  peptide (1)..(988): Ceres Seq. ID no. 12650860
MLRSAKDELQRSELTFVEALRKGFDLRYIMEDKACRRCIDSGGICGSALDSESFRCLCADRPHNSSCDDNTNQATQTLSLDPKFKACEPKSCGKGPQISYPFYLSGKQESFCGYPSFELTCDDEEKLPVLGISGEEYVIKNISYLTQSFQVVNSKASHDPCPRPLNNLTLHRTPFFVNPSHINFTILYNCSDHLLEDFRTYPLTCARNTSLLRSFGVFDRKKLGKEKQIASMSCQKLVDVPVLASNESDVMGMTYVEILKRGFVLNWTANSCFRCITSGGRCGTDQQEFVCLCPDGPKLHDTCTNGKNDKRRRVIVKITKSISGASAAVVGLIAASIFWYVYHRRKTKSYRNSSALLPRNISSDPSAKSFDIEKAEELLVGVHIFSYEELEEATNNFDPSKELGDGGFGTVYYGKLKDGRSVAVKRLYDNNFKRAEQFRNEVEILTGLRHPNLVALFGCSSKQSRDLLLVYEYVANGTLADHLHGPQANPSSLPWSIRLKIAVETASALKYLHASKIIHRDVKSNNILLDQNFNVKVADFGLSRLFPMDKTHVSTAPQGTPGYVDPDYHLCYQLSNKSDVYSFAVVLMELISSLPAVDITRPRQEINLSNMAVVKIQNHELRDMVDPSLGFDTDTRVRQTVIAVAELAFQCLQSDKDLRPCMSHVQDTLTRIQNNGFGSEMDVVDVNKSGPLVAQSPDSVIVKWDKRDRNIQNFVIGPDRTKSAILYCYLLPTETIFLLVTIAMDIYSSITQAADLNNNNSNLHFQTFHPSSTSLESLFLHHHQQQLLHFPGNSPDSSNNFSSTSSFLHSDHNIVDETKKRKALLPTLSSSETSGVSDNTNVIATETGSLRRGKRLKKKKEEEDEKEREVVHVRARRGQATDSHSLAERVRRGKINERLRCLQDMVPGCYKAMGMATMLDEIINYVQSLQNQVEFLSMKLTAASSFYDFNSETDAVDSMQRAKARETVEMGRQTRDGSPVFHLSTWSL

SEQ ID NO: 79319 - DNA, 5109 bp, Arabidopsis thaliana
  misc_feature (1)..(5109): Ceres Seq. ID no. 12650865
  misc_feature (1)..(5109): Ortholog of  Ceres SEQ ID NO 12586556 as cited in SEQ ID NO 64667
  misc_feature (1)..(5109): Ortholog of  Ceres SEQ ID NO 13660894 as cited in SEQ ID NO 67475
atgtcaagcagagaaaaccctagcggaatctgcaaaagcattcccaagctcatctcttccttcgtcgacactttcgttgattactccgtctccggcatcttcctgccccaagatcctagctcacaaaatgagattctgcaaacgaggttcgagaagccggagcgactcgttgcaatcggtgatctccatggcgatctcgagaagtctagagaagcattcaagatcgctggtctgattgattcgtcggacagatggactggtggatcaacgatggttgttcaggtgggcgacgtactagatcgaggtggagaggagttgaagatactttatttcttagagaaattgaaacgagaggctgagagagctggaggtaagattctgactatgaatgggaaccatgagatcatgaatatagaaggtgactttagatatgtgactaagaaaggtttagaggaatttcagatttgggctgattggtattgtttagggaacaagatgaagactttatgcagtggtcttgataaacctaaggatccttacgaagggattccgatgagcttccctcgtatgagagccgactgttttgaaggaattagagctaggattgctgcattgagacctgatggtccgattgcaaagagattcttgactaagaatcaaacagttgctgttgttggtgattcggtttttgttcacggtggtcttttagctgagcatatagagtatggactggagaggattaacgaggaggttcggggttggattaacgggtttaaaggaggaagatatgcgcctgcttattgtagaggagggaactctgtagtttggttgaggaagttctcggaagaaatggctcacaaatgtgattgtgcagctcttgagcatgctctttccactattcccggggttaagaggatgatcatgggacatacaatccaggatgctggtatcaacggtgtttgtaatgataaagccattaggattgatgttggcatgtccaagggatgtgctgatggattgcctgaggttttggagatccgcagggactccggtgaagcttatcttatggcttctgttttgcttccattgccacaagtatttgttttgtttgattatcgcaggagccgtaaagagtcaagctttccccgcgccgtctacaattccaattccatttcttctaattcaaccaatgccaatcatttccttcgccggatttctaacttctgtgaaaccggagacctcgacaagtcctttcgaactgtccaagaattcgttggcgatgacgagagctcgtccgatgcgtttcttcttgtccgagaagctcttgggcttctcttacaagcttctgggaagagaaaagacattgaaatgggaagaaagatccaccagctggtttctgggtcgacccggttaaggaatgatgacgttctctgtactcgtattatcaccatgtacgctatgtgtggctctcctgatgattctcggtttgtgtttgatgccttgcggagtaagaatctcttccagtggaatgctgttatcagctcttactcaagaaacgagctttacgatgaagtattagagacgtttatcgagatgatctcaacgactgatcttttaccggatcatttcacttatccatgtgtgattaaggcttgtgctgggatgtctgatgttgggatcgggcttgcggttcatgggttggtggtgaagaccggattggtggaagatgtttttgtgggtaatgcattggtgtctttctatggaactcatggttttgttactgatgccttgcaactgttcgatataatgcctgagagaaatttggtttcctggaactccatgattcgagtgttctcggataatggtttctcagaagaaagcttcttgcttcttggagaaatgatggaggaaaatggtgatggtgcgtttatgccggatgttgctacacttgttactgtgttgccggtttgtgcaagagaaagagaaatagggttgggaaaaggtgttcatgggtgggcggtgaaattgaggttggacaaggaactagtccttaacaatgccttaatggacatgtactccaaatgcggttgcattactaatgcacaaatgatctttaagatgaacaataacaagaatgtggtttcttggaacacaatggtaggaggtttttcagcagagggtgatacacatgggacgtttgatgttctgagacagatgctggcaggaggcgaagatgtcaaagcggacgaggtaaccattctaaatgcagtgcctgtttgtttccatgaatcattcttaccgagtttaaaggaacttcattgttactccttaaaacaagagtttgtatacaatgagttagtagccaatgcctttgtggcttcttatgcaaagtgtggctcactgagttatgcccagcgtgtgtttcatggtataaggagtaaaacagtgaactcttggaatgctttgattggcggccatgctcagagcaatgatccgagattgtccttggatgctcatttgcagatgaaaatttctggattgctacctgatagttttactgtctgtagtcttctttcagcttgttctaaactaaaatccctgcggttgggaaaggaagtgcatgggtttataatccgaaattggttagaaagagatttgtttgtttatttatcagtactctcattatacattcattgtggggagctatgcactgtacaagcattatttgatgcaatggaagataaaagcttagtatcttggaatactgtaatcaccggttaccttcagaatggatttcctgatagagctttgggcgtctttagacaaatggttttgtatggaatccagctttgtgggatttctatgatgcctgtgtttggtgcgtgttcgctgctaccttctcttcgactggggagagaagcgcatgcttatgctttgaagcacctcctggaggacgatgcgtttattgcatgttctttaattgatatgtatgccaagaatggttctataacacaatcatctaaggttttcaatggcttgaaggagaaaagcacggcatcttggaatgccatgataatgggatatggaatacatggcctagcaaaagaggctataaaactctttgaagagatgcaaagaacaggtcataaccctgatgacctaactttcttaggtgttctaacggcttgcaaccatagtggtctgatccatgaagggctgagatatctggatcaaatgaagtcttcttttgggctaaagccaaatttaaagcattatgcttgtgtcattgacatgttaggccgagctgggcaactagacaaggctctaagggttgttgcagaagagatgtctgaggaagctgacgttggaatttggaagtctctgctcagctcatgcagaatccatcaaaatctggaaatgggagagaaagttgctgctaagttattcgaattagaaccagaaaagcctgagaattatgttctgctttccaacttatatgcaggattggggaaatgggaagacgtgagaaaagtgagacagagaatgaacgagatgagtttacgaaaggatgctggatgctcttggatcgaactaaacaggaaggtatttagctttgttgtcggtgaaagattcttagatggttttgaggaaatcaaaagtctttggagtatattggagatgaagatatcgaagatgggatacagaccagacacaatgtcagtacaacatgatctaagtgaagaggagaagattgaacagttaaggggacacagcgagaagcttgcccttacctacgggttgattaaaacttcagaaggaacaactattagagtttacaagaacctaaggatctgtgtggactgtcacaatgcagcaaagttgatctccaaggtcatggaaagggaaatagttgtgagggacaacaaaaggtttcatcatttcaagaatggggaagagaagcaagacgcaatgaagagttcaatgagcatcattgtcttcttgtttgtgaccatcttcaccatctctgcttcttccttgaaccctgaggaaacttgcatacaaagaaacatcaaccggtcacaacctccaagctcttcactcgaacccaagacatcaaagttcgactttcttgtggacaagttgtgcagagacatggctcgtgccgtcatgttctctgtgaggataaccggaaaattcccatctcactatgtgaaggcgatgtgtaatgtgtttggaaatgacgagaagaaagtgaaagagtatgttgtgaagaaatggttgggaggtgaaaaggttttgtcgaatctcgttagcaagaaagacatttacatggcgtcgaggaatcaggagaaatctcccaaagtgcaagagctttacgacctctgcaaagagactttcactggcaaagctccttctcctgcttccatggctatccaaaagctatgctctgtgttggactcagttagtcctgcagatgttgggcttgaagaggtatctcaagacgatgatcgaggctatggagtttctggggttagccgtttcaatagagtaggacgatgggcacaaccgataacattcttagacattcatgaatgtgatacttttacaatgtgtattttctgcttcccaacgtcttcagtgatcccattgcatgatcatccagagatggctgtgtttagtaaaatcctctatggatcacttcatgttaaagcttacgattgggtcgaacctccatgtattatcacacaagataaaggcgtccccggttctcttccagcaaggttggcgaaattggtgagtgacaaagttataacgcctcagtctgagataccggcgttgtacccaaagactggaggcaatctccattgcttcactgcgttgactccatgtgctgtgctcgacattctctcacctccttacaaagaaagtgttggcaggagttgcagttactacatggactatccgttttccactttcgcattggagaacggaatgaagaaggtggatgaaggaaaggaagacgaatacgcatggcttgtacagattgacacgcccgatgatcttcacatgcgtcccggatcatatactggtccaactatcagagtctag

SEQ ID NO: 79320 - protein, 1702 aa, Arabidopsis thaliana
  peptide (1)..(1702): Ceres Seq. ID no. 12650866
MSSRENPSGICKSIPKLISSFVDTFVDYSVSGIFLPQDPSSQNEILQTRFEKPERLVAIGDLHGDLEKSREAFKIAGLIDSSDRWTGGSTMVVQVGDVLDRGGEELKILYFLEKLKREAERAGGKILTMNGNHEIMNIEGDFRYVTKKGLEEFQIWADWYCLGNKMKTLCSGLDKPKDPYEGIPMSFPRMRADCFEGIRARIAALRPDGPIAKRFLTKNQTVAVVGDSVFVHGGLLAEHIEYGLERINEEVRGWINGFKGGRYAPAYCRGGNSVVWLRKFSEEMAHKCDCAALEHALSTIPGVKRMIMGHTIQDAGINGVCNDKAIRIDVGMSKGCADGLPEVLEIRRDSGEAYLMASVLLPLPQVFVLFDYRRSRKESSFPRAVYNSNSISSNSTNANHFLRRISNFCETGDLDKSFRTVQEFVGDDESSSDAFLLVREALGLLLQASGKRKDIEMGRKIHQLVSGSTRLRNDDVLCTRIITMYAMCGSPDDSRFVFDALRSKNLFQWNAVISSYSRNELYDEVLETFIEMISTTDLLPDHFTYPCVIKACAGMSDVGIGLAVHGLVVKTGLVEDVFVGNALVSFYGTHGFVTDALQLFDIMPERNLVSWNSMIRVFSDNGFSEESFLLLGEMMEENGDGAFMPDVATLVTVLPVCAREREIGLGKGVHGWAVKLRLDKELVLNNALMDMYSKCGCITNAQMIFKMNNNKNVVSWNTMVGGFSAEGDTHGTFDVLRQMLAGGEDVKADEVTILNAVPVCFHESFLPSLKELHCYSLKQEFVYNELVANAFVASYAKCGSLSYAQRVFHGIRSKTVNSWNALIGGHAQSNDPRLSLDAHLQMKISGLLPDSFTVCSLLSACSKLKSLRLGKEVHGFIIRNWLERDLFVYLSVLSLYIHCGELCTVQALFDAMEDKSLVSWNTVITGYLQNGFPDRALGVFRQMVLYGIQLCGISMMPVFGACSLLPSLRLGREAHAYALKHLLEDDAFIACSLIDMYAKNGSITQSSKVFNGLKEKSTASWNAMIMGYGIHGLAKEAIKLFEEMQRTGHNPDDLTFLGVLTACNHSGLIHEGLRYLDQMKSSFGLKPNLKHYACVIDMLGRAGQLDKALRVVAEEMSEEADVGIWKSLLSSCRIHQNLEMGEKVAAKLFELEPEKPENYVLLSNLYAGLGKWEDVRKVRQRMNEMSLRKDAGCSWIELNRKVFSFVVGERFLDGFEEIKSLWSILEMKISKMGYRPDTMSVQHDLSEEEKIEQLRGHSEKLALTYGLIKTSEGTTIRVYKNLRICVDCHNAAKLISKVMEREIVVRDNKRFHHFKNGEEKQDAMKSSMSIIVFLFVTIFTISASSLNPEETCIQRNINRSQPPSSSLEPKTSKFDFLVDKLCRDMARAVMFSVRITGKFPSHYVKAMCNVFGNDEKKVKEYVVKKWLGGEKVLSNLVSKKDIYMASRNQEKSPKVQELYDLCKETFTGKAPSPASMAIQKLCSVLDSVSPADVGLEEVSQDDDRGYGVSGVSRFNRVGRWAQPITFLDIHECDTFTMCIFCFPTSSVIPLHDHPEMAVFSKILYGSLHVKAYDWVEPPCIITQDKGVPGSLPARLAKLVSDKVITPQSEIPALYPKTGGNLHCFTALTPCAVLDILSPPYKESVGRSCSYYMDYPFSTFALENGMKKVDEGKEDEYAWLVQIDTPDDLHMRPGSYTGPTIRV

SEQ ID NO: 79321 - protein, 1612 aa, Arabidopsis thaliana
  peptide (1)..(1612): Ceres Seq. ID no. 12650867
MVVQVGDVLDRGGEELKILYFLEKLKREAERAGGKILTMNGNHEIMNIEGDFRYVTKKGLEEFQIWADWYCLGNKMKTLCSGLDKPKDPYEGIPMSFPRMRADCFEGIRARIAALRPDGPIAKRFLTKNQTVAVVGDSVFVHGGLLAEHIEYGLERINEEVRGWINGFKGGRYAPAYCRGGNSVVWLRKFSEEMAHKCDCAALEHALSTIPGVKRMIMGHTIQDAGINGVCNDKAIRIDVGMSKGCADGLPEVLEIRRDSGEAYLMASVLLPLPQVFVLFDYRRSRKESSFPRAVYNSNSISSNSTNANHFLRRISNFCETGDLDKSFRTVQEFVGDDESSSDAFLLVREALGLLLQASGKRKDIEMGRKIHQLVSGSTRLRNDDVLCTRIITMYAMCGSPDDSRFVFDALRSKNLFQWNAVISSYSRNELYDEVLETFIEMISTTDLLPDHFTYPCVIKACAGMSDVGIGLAVHGLVVKTGLVEDVFVGNALVSFYGTHGFVTDALQLFDIMPERNLVSWNSMIRVFSDNGFSEESFLLLGEMMEENGDGAFMPDVATLVTVLPVCAREREIGLGKGVHGWAVKLRLDKELVLNNALMDMYSKCGCITNAQMIFKMNNNKNVVSWNTMVGGFSAEGDTHGTFDVLRQMLAGGEDVKADEVTILNAVPVCFHESFLPSLKELHCYSLKQEFVYNELVANAFVASYAKCGSLSYAQRVFHGIRSKTVNSWNALIGGHAQSNDPRLSLDAHLQMKISGLLPDSFTVCSLLSACSKLKSLRLGKEVHGFIIRNWLERDLFVYLSVLSLYIHCGELCTVQALFDAMEDKSLVSWNTVITGYLQNGFPDRALGVFRQMVLYGIQLCGISMMPVFGACSLLPSLRLGREAHAYALKHLLEDDAFIACSLIDMYAKNGSITQSSKVFNGLKEKSTASWNAMIMGYGIHGLAKEAIKLFEEMQRTGHNPDDLTFLGVLTACNHSGLIHEGLRYLDQMKSSFGLKPNLKHYACVIDMLGRAGQLDKALRVVAEEMSEEADVGIWKSLLSSCRIHQNLEMGEKVAAKLFELEPEKPENYVLLSNLYAGLGKWEDVRKVRQRMNEMSLRKDAGCSWIELNRKVFSFVVGERFLDGFEEIKSLWSILEMKISKMGYRPDTMSVQHDLSEEEKIEQLRGHSEKLALTYGLIKTSEGTTIRVYKNLRICVDCHNAAKLISKVMEREIVVRDNKRFHHFKNGEEKQDAMKSSMSIIVFLFVTIFTISASSLNPEETCIQRNINRSQPPSSSLEPKTSKFDFLVDKLCRDMARAVMFSVRITGKFPSHYVKAMCNVFGNDEKKVKEYVVKKWLGGEKVLSNLVSKKDIYMASRNQEKSPKVQELYDLCKETFTGKAPSPASMAIQKLCSVLDSVSPADVGLEEVSQDDDRGYGVSGVSRFNRVGRWAQPITFLDIHECDTFTMCIFCFPTSSVIPLHDHPEMAVFSKILYGSLHVKAYDWVEPPCIITQDKGVPGSLPARLAKLVSDKVITPQSEIPALYPKTGGNLHCFTALTPCAVLDILSPPYKESVGRSCSYYMDYPFSTFALENGMKKVDEGKEDEYAWLVQIDTPDDLHMRPGSYTGPTIRV

SEQ ID NO: 79322 - protein, 1574 aa, Arabidopsis thaliana
  peptide (1)..(1574): Ceres Seq. ID no. 12650868
MNGNHEIMNIEGDFRYVTKKGLEEFQIWADWYCLGNKMKTLCSGLDKPKDPYEGIPMSFPRMRADCFEGIRARIAALRPDGPIAKRFLTKNQTVAVVGDSVFVHGGLLAEHIEYGLERINEEVRGWINGFKGGRYAPAYCRGGNSVVWLRKFSEEMAHKCDCAALEHALSTIPGVKRMIMGHTIQDAGINGVCNDKAIRIDVGMSKGCADGLPEVLEIRRDSGEAYLMASVLLPLPQVFVLFDYRRSRKESSFPRAVYNSNSISSNSTNANHFLRRISNFCETGDLDKSFRTVQEFVGDDESSSDAFLLVREALGLLLQASGKRKDIEMGRKIHQLVSGSTRLRNDDVLCTRIITMYAMCGSPDDSRFVFDALRSKNLFQWNAVISSYSRNELYDEVLETFIEMISTTDLLPDHFTYPCVIKACAGMSDVGIGLAVHGLVVKTGLVEDVFVGNALVSFYGTHGFVTDALQLFDIMPERNLVSWNSMIRVFSDNGFSEESFLLLGEMMEENGDGAFMPDVATLVTVLPVCAREREIGLGKGVHGWAVKLRLDKELVLNNALMDMYSKCGCITNAQMIFKMNNNKNVVSWNTMVGGFSAEGDTHGTFDVLRQMLAGGEDVKADEVTILNAVPVCFHESFLPSLKELHCYSLKQEFVYNELVANAFVASYAKCGSLSYAQRVFHGIRSKTVNSWNALIGGHAQSNDPRLSLDAHLQMKISGLLPDSFTVCSLLSACSKLKSLRLGKEVHGFIIRNWLERDLFVYLSVLSLYIHCGELCTVQALFDAMEDKSLVSWNTVITGYLQNGFPDRALGVFRQMVLYGIQLCGISMMPVFGACSLLPSLRLGREAHAYALKHLLEDDAFIACSLIDMYAKNGSITQSSKVFNGLKEKSTASWNAMIMGYGIHGLAKEAIKLFEEMQRTGHNPDDLTFLGVLTACNHSGLIHEGLRYLDQMKSSFGLKPNLKHYACVIDMLGRAGQLDKALRVVAEEMSEEADVGIWKSLLSSCRIHQNLEMGEKVAAKLFELEPEKPENYVLLSNLYAGLGKWEDVRKVRQRMNEMSLRKDAGCSWIELNRKVFSFVVGERFLDGFEEIKSLWSILEMKISKMGYRPDTMSVQHDLSEEEKIEQLRGHSEKLALTYGLIKTSEGTTIRVYKNLRICVDCHNAAKLISKVMEREIVVRDNKRFHHFKNGEEKQDAMKSSMSIIVFLFVTIFTISASSLNPEETCIQRNINRSQPPSSSLEPKTSKFDFLVDKLCRDMARAVMFSVRITGKFPSHYVKAMCNVFGNDEKKVKEYVVKKWLGGEKVLSNLVSKKDIYMASRNQEKSPKVQELYDLCKETFTGKAPSPASMAIQKLCSVLDSVSPADVGLEEVSQDDDRGYGVSGVSRFNRVGRWAQPITFLDIHECDTFTMCIFCFPTSSVIPLHDHPEMAVFSKILYGSLHVKAYDWVEPPCIITQDKGVPGSLPARLAKLVSDKVITPQSEIPALYPKTGGNLHCFTALTPCAVLDILSPPYKESVGRSCSYYMDYPFSTFALENGMKKVDEGKEDEYAWLVQIDTPDDLHMRPGSYTGPTIRV

SEQ ID NO: 79323 - DNA, 1482 bp, Arabidopsis thaliana
  misc_feature (1)..(1482): Ceres Seq. ID no. 12650893
  misc_feature (1)..(1482): Ortholog of  Ceres SEQ ID NO 15178096 as cited in SEQ ID NO 52497
atcaatcatcatcatcactctctctcaatccaacaaagaaaaaaaaagtcttcttctttttttacaagtctgagaattttctacagaaacaaaaatctgattgtttttcccactttgcatctgttttgaggatgccagctacggattttcaaggatcatttggaaggtcgttgctaagtttacggcgagaccaagttgactcatcaacagtcgtctccggaagtagtagccaccacgagccaagcaccatggaggttgagctagattcgtttcaaagacaagtcgctgagaaattcatcgatctcaacgcttcttcaaacgaccttctctctctcgaatggatcggaaagcttcttgattctttcctctgttgtcaagaagagtttcgagctatcgtattcaaccaccgatctcagatctctaaatctccgatggaccgtttgatttcagattacttcgaacggagcatcaaagctctagatgtctgtaacgccatccgcgacggtatcgaacagatccgtcaatgggagaaacttgccgatattgtgatctctgctttagatagtcaccgtccgatcggagaaggtcagctccggcgagctaagaaagctctgattgatttagcaatcggaatgcttgacgagaaagatcatccttctggaaccaatctagctcatcgtaaccgttcattcggaagagtcaaagacagtcaccaccgttcgattggtcatttcagatctctttcttggagtgtttcaagatcatggtcagcttctaagcagttacaagctttagcgagtaacttggcaacgcctcgaccaaacgatgtcgttgctagcaatggtttagctgtaccggtttacacaatgacttcggttttgctttttgtgatgtgggttttggtagctgcgattccttgtcaagaccgtggattgcaagttaacttctttgtgcctaggcatttccaatgggcagctccggttatgtcgttgcacgataagattgttgaggaatctaagagaagagataggaagaattgttgtggtttgcttaaggagattgataggattgagaagagttcgaggttgatgaatgaattgatcgattcgattcatttcccgttgaatgatgacaaggaagttgaggtgaaacagagagttgatgagcttgttcaagttcgtgaagctttgagaaatggtttggatccgtttgagaggaaagtaagagaagttttccatcggattgtgagaagcagaactgagagtcttgattctctttgatcttgcacatgtttgtctgaatatgatgaatgattcatgtttggattttttgttttgtttttgtttttctctatttatcctttttgatcacttgtaaaaaagaaactcaaagagtgtagaagtgtcatcttctctttgtgatgctgatagtgattctgttcttctttgtgtagctacttgcttagattgaagttattttttc

SEQ ID NO: 79324 - protein, 425 aa, Arabidopsis thaliana; identical to SEQ ID NO: 25498
  peptide (1)..(425): Ceres Seq. ID no. 12650894

SEQ ID NO: 79325 - protein, 382 aa, Arabidopsis thaliana; identical to SEQ ID NO: 25499
  peptide (1)..(382): Ceres Seq. ID no. 12650895

SEQ ID NO: 79326 - protein, 343 aa, Arabidopsis thaliana; identical to SEQ ID NO: 25500
  peptide (1)..(343): Ceres Seq. ID no. 12650896

SEQ ID NO: 79327 - DNA, 1493 bp, Arabidopsis thaliana
  misc_feature (1)..(1493): Ceres Seq. ID no. 12650914
  misc_feature (1)..(1493): Ortholog of  Ceres SEQ ID NO 15175677 as cited in SEQ ID NO 55728
  misc_feature (1)..(1493): Ortholog of  Ceres SEQ ID NO 14308152 as cited in SEQ ID NO 59018
ctttttttttgttgttggtgtaatgatatcacagagagaagaaagagaagagaagaagcagagagtgatgggagataagaaattgatttcatcttcttcttcttcctcggtttacgatactcgtatcaatcatcatcttcatcatcctccgtcttcttccgacgaaatctctcagtttctccggcatattttcgaccgttcttctcctttaccttcttactactccccggcgacgactacaacgacggcgtctttgattggtgtgcacgggagcggtgacccacatgcagataactcgagaagtctcgtttctcatcatccaccgtcagattctgtgcttatgtcgaaacgtgtcggagatttctctgaggttttaatcggcggaggatcaggctcagccgccgcgtgttttggtttctccggtggtggtaataataacaacgttcaaggaaatagctctgggactcgagtatcgtcttcttccgttggagctagtggcaacgagacagatgagtatgactgtgaaagcgaggaaggaggagaagctgtagttgatgaagctccctcttccaagtcaggtccttcttctcgtagttcatctaaaagatgcagagctgctgaagttcataatctctctgagaagaggaggagaagtagaattaatgaaaaaatgaaagctttacaaagtctcatccctaattcaaataagacggataaggcttcaatgcttgatgaagccattgagtatctgaaacagcttcagctccaagttcagatgttgactatgagaaatggaataaacttgcatcctttgtgtttacctggaactacattacacccattgcaactctctcagattcgaccccctgaagcaaccaatgatcctctgcttaatcataccaatcagtttgcttcgacttctaatgcaccggaaatgatcaatactgtggcttcttcatacgctttggaaccttctattcgcagtcactttggacctttccctctccttacttcacccgtggagatgagtcgggaaggtgggttaactcatccaaggttgaacattggtcattccaacgcaaacataaccggggaacaagctctgtttgatggacaacctgacctaaaagatcgaattacttgaacagtgtcccaacttcgggatctctatgtgttcttgtttcttagaacgcaagccataaagctgtctgacaatggagatgcatttaactgtctttattttttctaaggttctatttaaaatcaattgttggtgacacgaattctagagtctaatcttttggatctaatagctatatataaaaaggactgaaattttattacaaagtaattgactaattgttagattgttgtatgtttatggtggatgtaaattttctagatcatcttcgtattgtatttgagagtttgatactcgatggctttggatatgtaaattaccccgataagcttctagagaagttttcgattct

SEQ ID NO: 79328 - protein, 380 aa, Arabidopsis thaliana
  peptide (1)..(380): Ceres Seq. ID no. 12650915
FFFVVGVMISQREEREEKKQRVMGDKKLISSSSSSSVYDTRINHHLHHPPSSSDEISQFLRHIFDRSSPLPSYYSPATTTTTASLIGVHGSGDPHADNSRSLVSHHPPSDSVLMSKRVGDFSEVLIGGGSGSAAACFGFSGGGNNNNVQGNSSGTRVSSSSVGASGNETDEYDCESEEGGEAVVDEAPSSKSGPSSRSSSKRCRAAEVHNLSEKRRRSRINEKMKALQSLIPNSNKTDKASMLDEAIEYLKQLQLQVQMLTMRNGINLHPLCLPGTTLHPLQLSQIRPPEATNDPLLNHTNQFASTSNAPEMINTVASSYALEPSIRSHFGPFPLLTSPVEMSREGGLTHPRLNIGHSNANITGEQALFDGQPDLKDRIT

SEQ ID NO: 79329 - protein, 373 aa, Arabidopsis thaliana
  peptide (1)..(373): Ceres Seq. ID no. 12650916
MISQREEREEKKQRVMGDKKLISSSSSSSVYDTRINHHLHHPPSSSDEISQFLRHIFDRSSPLPSYYSPATTTTTASLIGVHGSGDPHADNSRSLVSHHPPSDSVLMSKRVGDFSEVLIGGGSGSAAACFGFSGGGNNNNVQGNSSGTRVSSSSVGASGNETDEYDCESEEGGEAVVDEAPSSKSGPSSRSSSKRCRAAEVHNLSEKRRRSRINEKMKALQSLIPNSNKTDKASMLDEAIEYLKQLQLQVQMLTMRNGINLHPLCLPGTTLHPLQLSQIRPPEATNDPLLNHTNQFASTSNAPEMINTVASSYALEPSIRSHFGPFPLLTSPVEMSREGGLTHPRLNIGHSNANITGEQALFDGQPDLKDRIT

SEQ ID NO: 79330 - protein, 358 aa, Arabidopsis thaliana
  peptide (1)..(358): Ceres Seq. ID no. 12650917
MGDKKLISSSSSSSVYDTRINHHLHHPPSSSDEISQFLRHIFDRSSPLPSYYSPATTTTTASLIGVHGSGDPHADNSRSLVSHHPPSDSVLMSKRVGDFSEVLIGGGSGSAAACFGFSGGGNNNNVQGNSSGTRVSSSSVGASGNETDEYDCESEEGGEAVVDEAPSSKSGPSSRSSSKRCRAAEVHNLSEKRRRSRINEKMKALQSLIPNSNKTDKASMLDEAIEYLKQLQLQVQMLTMRNGINLHPLCLPGTTLHPLQLSQIRPPEATNDPLLNHTNQFASTSNAPEMINTVASSYALEPSIRSHFGPFPLLTSPVEMSREGGLTHPRLNIGHSNANITGEQALFDGQPDLKDRIT

SEQ ID NO: 79331 - DNA, 1500 bp, Arabidopsis thaliana
  misc_feature (1)..(1500): Ceres Seq. ID no. 12650918
  misc_feature (1)..(1500): Ortholog of  Ceres SEQ ID NO 14315455 as cited in SEQ ID NO 56988
tcgtttatatatttgttttacttgttttgcacatacacacaaaaataaaaaagactttatatttatttactttttaatcacacggattagctccggcgaagtatggtcgtcgtcttcatcttcttcctccatcatcagatttttccttaaatggaagaaaccaaacgaaactccgatcttctccgttctcgtgttttcctctctggcttttattgctgggattgggaatttctcaccgctctcttgctttttagttgctgattctttttccttcgactttctatttccaatctttcttcttctctttgtgtattagattatttttagttttatttttctgtggtaaaataaaaaaagttcgccggagatgacggctgtgacggcggcgcaaagatcagttccggcgccgtttttaagcaaaacgtatcagctagttgatgatcatagcacagacgacgtcgtttcatggaacgaagaaggaacagcttttgtcgtgtggaaaacagcagagtttgctaaagatcttcttcctcaatacttcaagcataataatttctcaagcttcattcgtcagctcaacacttacggatttcgtaaaactgtaccggataaatgggaatttgcaaacgattatttccggagaggcggggaggatctgttgacggacatacgacggcgtaaatcggtgattgcttcaacggcggggaaatgtgttgttgttggttcgccttctgagtctaattctggtggtggtgatgatcacggttcaagctccacgtcatcacccggttcgtcgaagaatcctggttcggtggagaacatggttgctgatttatcaggagagaacgagaagcttaaacgtgaaaacaataacttgagctcggagctcgcggcggcgaagaagcagcgcgatgagctagtgacgttcttgacgggtcatctgaaagtaagaccggaacaaatcgataaaatgatcaaaggagggaaatttaaaccggtggagtctgacgaagagagtgagtgcgaaggttgcgacggcggcggaggagcagaggagggggtaggtgaaggattgaaattgtttggggtgtggttgaaaggagagagaaaaaagagggaccgggatgaaaagaattatgtggtgagtgggtcccgtatgacggaaataaagaacgtggactttcacgcgccgttgtggaaaagcagcaaagtctgcaactaaaaaaagagtagaagactgttcaaaccagcgtgtgacacgtcatcgacgacgacgaaaaaaatgatttaaaaaactatttttttccgtaaggaagaaaagttatttttatgttttaaaaaggtgaagaaggtccagaaggatcaacgcaaatatataaatggattttcatgtattatataatttaattagtgtattaagaaaataaaacagatgttgaagttttattgttgcttaatttatgtcttcataatgtaaaaaagcatgtgaaatacttggtc

SEQ ID NO: 79332 - protein, 284 aa, Arabidopsis thaliana
  peptide (1)..(284): Ceres Seq. ID no. 12650919
MTAVTAAQRSVPAPFLSKTYQLVDDHSTDDVVSWNEEGTAFVVWKTAEFAKDLLPQYFKHNNFSSFIRQLNTYGFRKTVPDKWEFANDYFRRGGEDLLTDIRRRKSVIASTAGKCVVVGSPSESNSGGGDDHGSSSTSSPGSSKNPGSVENMVADLSGENEKLKRENNNLSSELAAAKKQRDELVTFLTGHLKVRPEQIDKMIKGGKFKPVESDEESECEGCDGGGGAEEGVGEGLKLFGVWLKGERKKRDRDEKNYVVSGSRMTEIKNVDFHAPLWKSSKVCN

SEQ ID NO: 79333 - DNA, 1245 bp, Arabidopsis thaliana
  misc_feature (1)..(1245): Ceres Seq. ID no. 12650924
  misc_feature (1)..(1245): Ortholog of  Ceres SEQ ID NO 15176057 as cited in SEQ ID NO 56363
atggagaacgaatcgccctccaagaaaaacatgccgccatcgtgcggaacactcgtaaccatcctcagcctcgatggtggtggagtcagaggaatcatcgccggagtaatccttgcctatctcgaaaaacaacttcaggaactagatggagaacacgtgagggtagctgattatttcgacgtgatagccggaactagcaccggtggtcttgtgacggcgatgttgactgcaccggacgagaacggtagacctcgtttcgcggctaaagaaattgtgccgttttaccttgaacattgtcccaagatatttccccagcccacaggcgtgcttgctctgttaccgaagcttcctaagcttctgtctggtccaaagtacagcggaaactatctgcgaactacacttggtaagcttcttggagagacaaaacttcgccagacactcacaaacgttgttatacctaccttcgacatcaagacacttcaacccactattttctcatcttaccaggcgttgactgatcctagcttggacgtcaaggtatcggacatatgcatcggcacatcagctgctcccacttactttcctccttattacttttccaacgaagacagtcaaggcaagactaggcattttaacctcgttgatggcggggttactgctaataacccgactttggtggccatgactgctgtgacgaagcagattgtgaataataaccctgatatgggtactctcaatccgttaggttacgaccagtttctcgttatatcgataggaacaggatctgcaaaaaaagaagagaggtacagcgcaaagaaggctgcaaaatggggaatcatatcttggttatatgaagatggaactactccgatattagacattacctttgaatcaagccgcgacatagtccattatcacagctctgttgtgtttaaagccctacaatctgaagacaagtacctcagaatcgatgatgatacattggaaggagatgcaagcactctggatctatcgacaaagtctaatttagaaaatcttataaaacttggagagaagatgctgacaaacagagtcatgcaaatgaacatcgacactggtacatatgaacctgctgctgaaaatattaacaatgatgaacaactcaagaggtttgcgaaaatcctctccgaggaaaggaaattaaggagaaagaggagcgacaaaatgactaaagattcatcaatcggatcacaagagatcaagtaa

SEQ ID NO: 79334 - protein, 414 aa, Arabidopsis thaliana
  peptide (1)..(414): Ceres Seq. ID no. 12650925
MENESPSKKNMPPSCGTLVTILSLDGGGVRGIIAGVILAYLEKQLQELDGEHVRVADYFDVIAGTSTGGLVTAMLTAPDENGRPRFAAKEIVPFYLEHCPKIFPQPTGVLALLPKLPKLLSGPKYSGNYLRTTLGKLLGETKLRQTLTNVVIPTFDIKTLQPTIFSSYQALTDPSLDVKVSDICIGTSAAPTYFPPYYFSNEDSQGKTRHFNLVDGGVTANNPTLVAMTAVTKQIVNNNPDMGTLNPLGYDQFLVISIGTGSAKKEERYSAKKAAKWGIISWLYEDGTTPILDITFESSRDIVHYHSSVVFKALQSEDKYLRIDDDTLEGDASTLDLSTKSNLENLIKLGEKMLTNRVMQMNIDTGTYEPAAENINNDEQLKRFAKILSEERKLRRKRSDKMTKDSSIGSQEIK

SEQ ID NO: 79335 - protein, 404 aa, Arabidopsis thaliana
  peptide (1)..(404): Ceres Seq. ID no. 12650926
MPPSCGTLVTILSLDGGGVRGIIAGVILAYLEKQLQELDGEHVRVADYFDVIAGTSTGGLVTAMLTAPDENGRPRFAAKEIVPFYLEHCPKIFPQPTGVLALLPKLPKLLSGPKYSGNYLRTTLGKLLGETKLRQTLTNVVIPTFDIKTLQPTIFSSYQALTDPSLDVKVSDICIGTSAAPTYFPPYYFSNEDSQGKTRHFNLVDGGVTANNPTLVAMTAVTKQIVNNNPDMGTLNPLGYDQFLVISIGTGSAKKEERYSAKKAAKWGIISWLYEDGTTPILDITFESSRDIVHYHSSVVFKALQSEDKYLRIDDDTLEGDASTLDLSTKSNLENLIKLGEKMLTNRVMQMNIDTGTYEPAAENINNDEQLKRFAKILSEERKLRRKRSDKMTKDSSIGSQEIK

SEQ ID NO: 79336 - protein, 341 aa, Arabidopsis thaliana
  peptide (1)..(341): Ceres Seq. ID no. 12650927
MLTAPDENGRPRFAAKEIVPFYLEHCPKIFPQPTGVLALLPKLPKLLSGPKYSGNYLRTTLGKLLGETKLRQTLTNVVIPTFDIKTLQPTIFSSYQALTDPSLDVKVSDICIGTSAAPTYFPPYYFSNEDSQGKTRHFNLVDGGVTANNPTLVAMTAVTKQIVNNNPDMGTLNPLGYDQFLVISIGTGSAKKEERYSAKKAAKWGIISWLYEDGTTPILDITFESSRDIVHYHSSVVFKALQSEDKYLRIDDDTLEGDASTLDLSTKSNLENLIKLGEKMLTNRVMQMNIDTGTYEPAAENINNDEQLKRFAKILSEERKLRRKRSDKMTKDSSIGSQEIK

SEQ ID NO: 79337 - DNA, 1626 bp, Arabidopsis thaliana
  misc_feature (1)..(1626): Ceres Seq. ID no. 12650932
  misc_feature (1)..(1626): Ortholog of  Ceres SEQ ID NO 14313167 as cited in SEQ ID NO 54354
atgaaacagaccaatctcctggtatgtaaattattcataggagccctgttttggttaggctctgttttggttaatgcagaagacccatatatgttctacacttggactgttacttatggtacaagatctcctttaggtgttcctcaacaggtcattcttatcaatggacagttccctggtccagcgattgaagcggtcacaaacaacaacattgttgttaatctcattaacaagctggacgagccattcctcatcacctggaatggagtgaagcagaggaggacatcgtggcaagatggagtattgggaacaaactgtccgatccaaccaaactcgaactggacttaccagtttcaacttaaagatcaaatcggtacttacacttacttcgcttccacgtcactgcaccgagccagtggtgcttttggtgctctcaacattaaccagagatctgttattacgactccttatccaacacccgatggagatttcaccctcctcgtctctgactggttctcaaatatgacccacaaggacttgcgaaaatcgctcgacgcaggctctgctcttcctcttcctgatgctcttctcatcaatggagtctctaaaggtttaatctttaccggtcaacaaggtaaaacatacaagttccgggtatccaatgtcggtatagctacatcgataaattttaggattcaaaatcacacaatgagcctcattgaagtagaaggcgctcacactcttcaggagagttatgagtcgcttgacgtccacgttggtcagtccatgaccgtcctggtcactttaaaagcttctgtgagggactatttcatcgtggcctcaacccggtttacaaaaccggtactaaccacaaccgcgagtctccgttaccaaggctccaaaaacgctgcatatgggcctctccccattggtcctacttaccatatccattggtccatgaaacaagcaagaaccattaggatgaatttgacggcaaatgctgcaaggccaaacccacaaggatcatttcattacgggaccataccaataaaccgaactctagtcctagccaatgcagccacattgatctacgggaagcttcggtacacagtaaaccgaatatcatacatcaacccaacaacaccattgaaactcgctgattggtacaacatctcgggcgtgttcgatttcaagacaatcattagcactccaacaaccggaccggctcatattggtacatcggttatcgacgttgaacttcatgagttcgtcgaaatcgttttccaaaacgacgaaagatcaattcaatcttggcacatggacggtactagcgcctatgctgtcggatacgggtcagggacatggaacgtgaccatgaggaaacgttacaacttggttgatgctgttccaagacacacttttcaggtgtatccgttatcgtggacaaccatattggtgtcgttggataacaaaggaatgtggaatctaaggtcacaaatatggtcgaggaggtatttaggacaagagctctatgttcgtgtttggaacgatgagaagtctctctacactgaagctgagcctcctcttaacgttctttattgcggcaaagccaaacgtcccctttag

SEQ ID NO: 79338 - protein, 541 aa, Arabidopsis thaliana
  peptide (1)..(541): Ceres Seq. ID no. 12650933
MKQTNLLVCKLFIGALFWLGSVLVNAEDPYMFYTWTVTYGTRSPLGVPQQVILINGQFPGPAIEAVTNNNIVVNLINKLDEPFLITWNGVKQRRTSWQDGVLGTNCPIQPNSNWTYQFQLKDQIGTYTYFASTSLHRASGAFGALNINQRSVITTPYPTPDGDFTLLVSDWFSNMTHKDLRKSLDAGSALPLPDALLINGVSKGLIFTGQQGKTYKFRVSNVGIATSINFRIQNHTMSLIEVEGAHTLQESYESLDVHVGQSMTVLVTLKASVRDYFIVASTRFTKPVLTTTASLRYQGSKNAAYGPLPIGPTYHIHWSMKQARTIRMNLTANAARPNPQGSFHYGTIPINRTLVLANAATLIYGKLRYTVNRISYINPTTPLKLADWYNISGVFDFKTIISTPTTGPAHIGTSVIDVELHEFVEIVFQNDERSIQSWHMDGTSAYAVGYGSGTWNVTMRKRYNLVDAVPRHTFQVYPLSWTTILVSLDNKGMWNLRSQIWSRRYLGQELYVRVWNDEKSLYTEAEPPLNVLYCGKAKRPL

SEQ ID NO: 79339 - protein, 511 aa, Arabidopsis thaliana
  peptide (1)..(511): Ceres Seq. ID no. 12650934
MFYTWTVTYGTRSPLGVPQQVILINGQFPGPAIEAVTNNNIVVNLINKLDEPFLITWNGVKQRRTSWQDGVLGTNCPIQPNSNWTYQFQLKDQIGTYTYFASTSLHRASGAFGALNINQRSVITTPYPTPDGDFTLLVSDWFSNMTHKDLRKSLDAGSALPLPDALLINGVSKGLIFTGQQGKTYKFRVSNVGIATSINFRIQNHTMSLIEVEGAHTLQESYESLDVHVGQSMTVLVTLKASVRDYFIVASTRFTKPVLTTTASLRYQGSKNAAYGPLPIGPTYHIHWSMKQARTIRMNLTANAARPNPQGSFHYGTIPINRTLVLANAATLIYGKLRYTVNRISYINPTTPLKLADWYNISGVFDFKTIISTPTTGPAHIGTSVIDVELHEFVEIVFQNDERSIQSWHMDGTSAYAVGYGSGTWNVTMRKRYNLVDAVPRHTFQVYPLSWTTILVSLDNKGMWNLRSQIWSRRYLGQELYVRVWNDEKSLYTEAEPPLNVLYCGKAKRPL

SEQ ID NO: 79340 - protein, 367 aa, Arabidopsis thaliana
  peptide (1)..(367): Ceres Seq. ID no. 12650935
MTHKDLRKSLDAGSALPLPDALLINGVSKGLIFTGQQGKTYKFRVSNVGIATSINFRIQNHTMSLIEVEGAHTLQESYESLDVHVGQSMTVLVTLKASVRDYFIVASTRFTKPVLTTTASLRYQGSKNAAYGPLPIGPTYHIHWSMKQARTIRMNLTANAARPNPQGSFHYGTIPINRTLVLANAATLIYGKLRYTVNRISYINPTTPLKLADWYNISGVFDFKTIISTPTTGPAHIGTSVIDVELHEFVEIVFQNDERSIQSWHMDGTSAYAVGYGSGTWNVTMRKRYNLVDAVPRHTFQVYPLSWTTILVSLDNKGMWNLRSQIWSRRYLGQELYVRVWNDEKSLYTEAEPPLNVLYCGKAKRPL

SEQ ID NO: 79341 - DNA, 2076 bp, Arabidopsis thaliana
  misc_feature (1)..(2076): Ceres Seq. ID no. 12650936
  misc_feature (1)..(2076): Ortholog of  Ceres SEQ ID NO 12586556 as cited in SEQ ID NO 64667
  misc_feature (1)..(2076): Ortholog of  Ceres SEQ ID NO 13660894 as cited in SEQ ID NO 67475
atgaatcattcaaatgcgagaaagttaactactctccatggatttatattaaagagaaatctatcatcttttcacgcctcactgaagcggttttcagataaaaagttcttcaatccgaaccatgaggacggtggtgttgtggtggagcgattatgtagagctaatagatttggtgaagccattgatgtattatgtggacagaagctcttaagagaagctgttcaacttctgggtcgggctaagaagccacctgcttctacttattgcaatctcattcaagtttgtagccaaacacgtgctcttgaagaaggtaagaaggtccatgaacacattaggacttctgggtttgtacctgggattgttatatggaaccgtcttttgagaatgtatgcgaaatgtggtagcttggttgatgcacggaaggtgttcgacgaaatgccgaatagagatttgtgttcgtggaatgtaatggttaatgggtatgcggaggttgggttgcttgaggaagcgaggaagttgtttgatgaaatgactgaaaaagatagttattcgtggacggctatggttacgggttatgttaagaaggatcagcctgaagaggcattggtgttgtatagtttgatgcaacgggtaccgaattcaagaccaaacatttttacagtttctattgcagtagctgctgctgctgcggttaaatgtatccgtagagggaaagagattcatgggcatatcgttcgagctggtttggattcagatgaagtgctttggagttcattgatggatatgtatggaaaatgtggctgtatcgatgaagcaagaaacatatttgataagattgttgagaaagatgttgtctcgtggacatcaatgatagatagatatttcaagtctagtagatggcgggaagggttttctttgttttccgagttggtaggttcttgtgaacggcccaatgaatacacttttgctggagtcttgaatgcttgtgctgatctcacaacagaagagctagggaagcaagttcatggatatatgacaagagttgggtttgatccttactcttttgcatcaagctctcttgtagatatgtacaccaaatgtggaaatattgaaagtgcaaaacacgttgtcgatggatgtcctaaacccgatttagtttcttggacttctttgatcggagggtgtgctcagaatgggcaacctgatgaagccttgaaatatttcgacttgctcctcaaatccggcactaaacctgaccatgttacctttgtaaacgtcctctccgcttgtactcatgccggattggtcgaaaaaggactcgaattcttctattctataactgagaaacacaggttatctcatacttctgatcattacacttgtcttgttgatcttttagctcggtctggaagattcgaacagttaaagagcgtcattagtgaaatgccgatgaaaccgagtaagtttctgtgggcttctgtgctcggtgggtgtagcacttacggaaacattgacctagcagaggaagcggctcaagaactgttcaagatagaacccgaaaatcctgttacttatgttacaatggctaacatctatgctgcagcaggtaaatgggaggaagaagggaaaatgagaaagagaatgcaagaaatcggagtcaccaaaaggcctggttcaagctggaccgagataaaacggaagcgtcatgtattcatagcagcggatacttcgcatccaatgtataaccaaatagttgagttcttgagggaattgaggaagaagatgaaagaagaagggtatgttccggctacgagtcttgtattgcacgatgtagaagatgaacaaaaagaagagaatcttgtgtatcatagcgagaaacttgctgttgcatttgcaattctatcgacagaagaaggaacggcgattaaggtgtttaagaacttgaggtcttgtgtggattgtcacggtgctattaagttcatatcgaacatcacaaagaggaagataaccgtaagggactctactcggtttcattgctttgagaatggacaatgttcttgtggagattattggtaa

SEQ ID NO: 79342 - protein, 691 aa, Arabidopsis thaliana
  peptide (1)..(691): Ceres Seq. ID no. 12650937
MNHSNARKLTTLHGFILKRNLSSFHASLKRFSDKKFFNPNHEDGGVVVERLCRANRFGEAIDVLCGQKLLREAVQLLGRAKKPPASTYCNLIQVCSQTRALEEGKKVHEHIRTSGFVPGIVIWNRLLRMYAKCGSLVDARKVFDEMPNRDLCSWNVMVNGYAEVGLLEEARKLFDEMTEKDSYSWTAMVTGYVKKDQPEEALVLYSLMQRVPNSRPNIFTVSIAVAAAAAVKCIRRGKEIHGHIVRAGLDSDEVLWSSLMDMYGKCGCIDEARNIFDKIVEKDVVSWTSMIDRYFKSSRWREGFSLFSELVGSCERPNEYTFAGVLNACADLTTEELGKQVHGYMTRVGFDPYSFASSSLVDMYTKCGNIESAKHVVDGCPKPDLVSWTSLIGGCAQNGQPDEALKYFDLLLKSGTKPDHVTFVNVLSACTHAGLVEKGLEFFYSITEKHRLSHTSDHYTCLVDLLARSGRFEQLKSVISEMPMKPSKFLWASVLGGCSTYGNIDLAEEAAQELFKIEPENPVTYVTMANIYAAAGKWEEEGKMRKRMQEIGVTKRPGSSWTEIKRKRHVFIAADTSHPMYNQIVEFLRELRKKMKEEGYVPATSLVLHDVEDEQKEENLVYHSEKLAVAFAILSTEEGTAIKVFKNLRSCVDCHGAIKFISNITKRKITVRDSTRFHCFENGQCSCGDYW

SEQ ID NO: 79343 - protein, 563 aa, Arabidopsis thaliana
  peptide (1)..(563): Ceres Seq. ID no. 12650938
MYAKCGSLVDARKVFDEMPNRDLCSWNVMVNGYAEVGLLEEARKLFDEMTEKDSYSWTAMVTGYVKKDQPEEALVLYSLMQRVPNSRPNIFTVSIAVAAAAAVKCIRRGKEIHGHIVRAGLDSDEVLWSSLMDMYGKCGCIDEARNIFDKIVEKDVVSWTSMIDRYFKSSRWREGFSLFSELVGSCERPNEYTFAGVLNACADLTTEELGKQVHGYMTRVGFDPYSFASSSLVDMYTKCGNIESAKHVVDGCPKPDLVSWTSLIGGCAQNGQPDEALKYFDLLLKSGTKPDHVTFVNVLSACTHAGLVEKGLEFFYSITEKHRLSHTSDHYTCLVDLLARSGRFEQLKSVISEMPMKPSKFLWASVLGGCSTYGNIDLAEEAAQELFKIEPENPVTYVTMANIYAAAGKWEEEGKMRKRMQEIGVTKRPGSSWTEIKRKRHVFIAADTSHPMYNQIVEFLRELRKKMKEEGYVPATSLVLHDVEDEQKEENLVYHSEKLAVAFAILSTEEGTAIKVFKNLRSCVDCHGAIKFISNITKRKITVRDSTRFHCFENGQCSCGDYW

SEQ ID NO: 79344 - protein, 546 aa, Arabidopsis thaliana
  peptide (1)..(546): Ceres Seq. ID no. 12650939
MPNRDLCSWNVMVNGYAEVGLLEEARKLFDEMTEKDSYSWTAMVTGYVKKDQPEEALVLYSLMQRVPNSRPNIFTVSIAVAAAAAVKCIRRGKEIHGHIVRAGLDSDEVLWSSLMDMYGKCGCIDEARNIFDKIVEKDVVSWTSMIDRYFKSSRWREGFSLFSELVGSCERPNEYTFAGVLNACADLTTEELGKQVHGYMTRVGFDPYSFASSSLVDMYTKCGNIESAKHVVDGCPKPDLVSWTSLIGGCAQNGQPDEALKYFDLLLKSGTKPDHVTFVNVLSACTHAGLVEKGLEFFYSITEKHRLSHTSDHYTCLVDLLARSGRFEQLKSVISEMPMKPSKFLWASVLGGCSTYGNIDLAEEAAQELFKIEPENPVTYVTMANIYAAAGKWEEEGKMRKRMQEIGVTKRPGSSWTEIKRKRHVFIAADTSHPMYNQIVEFLRELRKKMKEEGYVPATSLVLHDVEDEQKEENLVYHSEKLAVAFAILSTEEGTAIKVFKNLRSCVDCHGAIKFISNITKRKITVRDSTRFHCFENGQCSCGDYW

SEQ ID NO: 79345 - DNA, 2301 bp, Arabidopsis thaliana
  misc_feature (1)..(2301): Ceres Seq. ID no. 12650944
  misc_feature (1)..(2301): Ortholog of  Ceres SEQ ID NO 15168900 as cited in SEQ ID NO 217
atggagttgatttcagtgattttcttcttcttttgctctgttttgagttcctctgctttaaactctgatgggttggttttgatgaagtttaaatcctctgttcttgttgatcctctgtctttattacagacatggaattacaaacacgaaagtccatgttcttggagaggaatctcttgtaataacgattctaaagtcttaactttgtctcttcccaattctcagcttcttggttcgattccttctgatttgggttctctcttaacacttcaaagtctcgatctttccaataattccttcaatgggccattaccggtttctttcttcaacgctagagagcttcgtttccttgatctctctagtaacatgatctccggcgaaatcccttccgcaattggtgatcttcacaatcttctaaccctaaatctctctgataatgccttggcgggaaagttacctacaaatttggcgtcgttgagaaacttaacggtggtttctttggagaataattacttttccggcgagattcccggcggttggagagttgttgagttcttagacctgtcgtcgaatctgatcaatggctcgcttcctccggattttggcggatatagtctccagtacttaaatgtctcgtttaaccaaatctccggcgaaattccaccggagatcggagtcaatttcccaagaaacgtcaccgttgatctctccttcaacaatttaaccggtccaatccctgattctccggttttcttaaaccaggaatcaaatttcttttcaggaaacccgggtctatgcggtgaaccgacccgaaacccgtgtcttatcccttcctcgccgtctatcgtctccgaagccgacgtaccgacgtctacaccagcaatcgccgcaataccgaacacaatcggttcaaacccggttaccgatccaaattcacaacaaaccgacccaaatccccgaaccgggttacgacccggagttataatagggatcgtagtcggagatatcgctggaatcggaatcctcgccgtgattttcctctacatctacagatgcaagaagaacaagatagtggataacaacaacaacgacaagcaaagaacagaaacagacacaattacgttatcaacattttcatcttcttcttcttcaccagaagagtcaagaagattcaggaaatggtcgtgtctacgaaaagatcctgaaacgacaccgtctgaagaagaagatgaagatgatgaagacgaagaaagcggttacaatgcaaatcaacggtcaggagataacaagttagtgaccgttgatggagagaaggagatggagattgagactctgcttaaggcttcagcttatattttaggagccacaggttcgagtataatgtataaagccgttcttgaagacggtagggttttcgcggttcgtcgactcggtgaaaacggtttatctcagcgccggtttaaggattttgagccgcacattcgagccattgggaaattggttcacccgaatttggttagactttgtgggttctattggggtaccgacgagaaactagtcatttacgattttgtccctaacggcagcctcgtcaacccccgttaccgaaaaggaggagggtcttcttcaccgtatcacctaccgtgggaaactcggctcaagatagcaaagggcattgcacgtgggctggcttatctccacgagaagaagcatgtgcatggaaacttgaagcctagcaacatacttttgggccatgacatggaacccaaaataggcgatttcggactcgaaaggcttcttacaggcgaaacaagctacattcgagctggtggatcttctaggattttcagtagtaagcgttacacaacttcctcgcgagaattctcgtctatcgggcctacaccaagcccgagtccgagctcggtgggggcgatgtcaccctactgcgcaccagagtctttccgaagcctaaaaccgagtccgaaatgggacgtttacggctttggagtgatccttctcgagcttctcacgggaaagattgtgtctgttgaagagattgtgctaggaaacggacttacggttgaggacgggcaccgcgcagtgagaatggctgatgtggcgatccgcggcgagttagatggcaaacaagagtttttactcgattgtttcaagttaggctatagctgtgcgtctcctgttcctcaaaagaggccaacgatgaaagaatctttggctgttcttgaaagattccatcctaactcctctgttattaagtcttcatcgttccattacggacattaa

SEQ ID NO: 79346 - protein, 766 aa, Arabidopsis thaliana
  peptide (1)..(766): Ceres Seq. ID no. 12650945
MELISVIFFFFCSVLSSSALNSDGLVLMKFKSSVLVDPLSLLQTWNYKHESPCSWRGISCNNDSKVLTLSLPNSQLLGSIPSDLGSLLTLQSLDLSNNSFNGPLPVSFFNARELRFLDLSSNMISGEIPSAIGDLHNLLTLNLSDNALAGKLPTNLASLRNLTVVSLENNYFSGEIPGGWRVVEFLDLSSNLINGSLPPDFGGYSLQYLNVSFNQISGEIPPEIGVNFPRNVTVDLSFNNLTGPIPDSPVFLNQESNFFSGNPGLCGEPTRNPCLIPSSPSIVSEADVPTSTPAIAAIPNTIGSNPVTDPNSQQTDPNPRTGLRPGVIIGIVVGDIAGIGILAVIFLYIYRCKKNKIVDNNNNDKQRTETDTITLSTFSSSSSSPEESRRFRKWSCLRKDPETTPSEEEDEDDEDEESGYNANQRSGDNKLVTVDGEKEMEIETLLKASAYILGATGSSIMYKAVLEDGRVFAVRRLGENGLSQRRFKDFEPHIRAIGKLVHPNLVRLCGFYWGTDEKLVIYDFVPNGSLVNPRYRKGGGSSSPYHLPWETRLKIAKGIARGLAYLHEKKHVHGNLKPSNILLGHDMEPKIGDFGLERLLTGETSYIRAGGSSRIFSSKRYTTSSREFSSIGPTPSPSPSSVGAMSPYCAPESFRSLKPSPKWDVYGFGVILLELLTGKIVSVEEIVLGNGLTVEDGHRAVRMADVAIRGELDGKQEFLLDCFKLGYSCASPVPQKRPTMKESLAVLERFHPNSSVIKSSSFHYGH

SEQ ID NO: 79347 - protein, 739 aa, Arabidopsis thaliana
  peptide (1)..(739): Ceres Seq. ID no. 12650946
MKFKSSVLVDPLSLLQTWNYKHESPCSWRGISCNNDSKVLTLSLPNSQLLGSIPSDLGSLLTLQSLDLSNNSFNGPLPVSFFNARELRFLDLSSNMISGEIPSAIGDLHNLLTLNLSDNALAGKLPTNLASLRNLTVVSLENNYFSGEIPGGWRVVEFLDLSSNLINGSLPPDFGGYSLQYLNVSFNQISGEIPPEIGVNFPRNVTVDLSFNNLTGPIPDSPVFLNQESNFFSGNPGLCGEPTRNPCLIPSSPSIVSEADVPTSTPAIAAIPNTIGSNPVTDPNSQQTDPNPRTGLRPGVIIGIVVGDIAGIGILAVIFLYIYRCKKNKIVDNNNNDKQRTETDTITLSTFSSSSSSPEESRRFRKWSCLRKDPETTPSEEEDEDDEDEESGYNANQRSGDNKLVTVDGEKEMEIETLLKASAYILGATGSSIMYKAVLEDGRVFAVRRLGENGLSQRRFKDFEPHIRAIGKLVHPNLVRLCGFYWGTDEKLVIYDFVPNGSLVNPRYRKGGGSSSPYHLPWETRLKIAKGIARGLAYLHEKKHVHGNLKPSNILLGHDMEPKIGDFGLERLLTGETSYIRAGGSSRIFSSKRYTTSSREFSSIGPTPSPSPSSVGAMSPYCAPESFRSLKPSPKWDVYGFGVILLELLTGKIVSVEEIVLGNGLTVEDGHRAVRMADVAIRGELDGKQEFLLDCFKLGYSCASPVPQKRPTMKESLAVLERFHPNSSVIKSSSFHYGH

SEQ ID NO: 79348 - protein, 644 aa, Arabidopsis thaliana
  peptide (1)..(644): Ceres Seq. ID no. 12650947
MISGEIPSAIGDLHNLLTLNLSDNALAGKLPTNLASLRNLTVVSLENNYFSGEIPGGWRVVEFLDLSSNLINGSLPPDFGGYSLQYLNVSFNQISGEIPPEIGVNFPRNVTVDLSFNNLTGPIPDSPVFLNQESNFFSGNPGLCGEPTRNPCLIPSSPSIVSEADVPTSTPAIAAIPNTIGSNPVTDPNSQQTDPNPRTGLRPGVIIGIVVGDIAGIGILAVIFLYIYRCKKNKIVDNNNNDKQRTETDTITLSTFSSSSSSPEESRRFRKWSCLRKDPETTPSEEEDEDDEDEESGYNANQRSGDNKLVTVDGEKEMEIETLLKASAYILGATGSSIMYKAVLEDGRVFAVRRLGENGLSQRRFKDFEPHIRAIGKLVHPNLVRLCGFYWGTDEKLVIYDFVPNGSLVNPRYRKGGGSSSPYHLPWETRLKIAKGIARGLAYLHEKKHVHGNLKPSNILLGHDMEPKIGDFGLERLLTGETSYIRAGGSSRIFSSKRYTTSSREFSSIGPTPSPSPSSVGAMSPYCAPESFRSLKPSPKWDVYGFGVILLELLTGKIVSVEEIVLGNGLTVEDGHRAVRMADVAIRGELDGKQEFLLDCFKLGYSCASPVPQKRPTMKESLAVLERFHPNSSVIKSSSFHYGH

SEQ ID NO: 79349 - DNA, 1503 bp, Arabidopsis thaliana
  misc_feature (1)..(1503): Ceres Seq. ID no. 12650952
  misc_feature (1)..(1503): Ortholog of  Ceres SEQ ID NO 14306857 as cited in SEQ ID NO 60035
  misc_feature (1)..(1503): Ortholog of  Ceres SEQ ID NO 15169611 as cited in SEQ ID NO 65939
  misc_feature (1)..(1503): Ortholog of  Ceres SEQ ID NO 14307960 as cited in SEQ ID NO 66187
  misc_feature (1)..(1503): Ortholog of  Ceres SEQ ID NO 13502874 as cited in SEQ ID NO 66298
  misc_feature (1)..(1503): Ortholog of  Ceres SEQ ID NO 12614124 as cited in SEQ ID NO 68392
atggaaggtcaaaccctaattttcacattccttttcatatctctttctctcacgtttatcatcggaagaatcaagcgaagacctaaccttcctccgagtccgtcgtgggcgttaccggtgatcggtcacctccgccttctcaagccgccactccaccgagtttttctatccgtctctgagtccctaggcgatgctccgataatctccctccgtctcggcaaccgactcgttttcgttgtctcttcacactcactcgccgaggaatgcttcacaaagaacgacgtcgtactcgcgaaccgcttcaactcccttgcttcaaaacacatctcatatggctgcacaacggttgttacagcttcgtacggcgaccattggagaaatctccgccgtattggcgctgttgagatattctcggctcaccgtctcaatagcttttcatctatccgccgagacgagatccaccggcttatagcttgtctctcacggaactcttcactcgaatttacaaaggttgagatgaaatcaatgttttctaacttaacattcaacaacattataagaatgttggctggaaaatgttactacggagatggtgcagaggatgacccggaggctaaacgcgtgcgggagcttatagcagagggaatgggttgttttggtgctggaaacactgctgattatttaccgatcctgacttggatcacaggttccgagaaacggataaagaagatcgctagtaggcttgatgagttcttgcagggattggtcgatgaaagacgagaagggaaggagaaaaggcagaacacaatggttgatcacttgctttgtctgcaagaaacccaacccgagtactacacggacaacattatcaaaggaatcatgctctctcttatactagcggggactgatacatccgcagtaacattggaatggacattgtcagctttgttgaaccatccacagatactaagcaaggcgagagatgaaatcgataataaggttggcctcaacaggcttgtagaggaatcagacctctcacatcttccttatcttcaaaacattgtgtccgagtcgttgcgcttataccctgcgagtcccttgttggttcctcacgtagcatcagaagactgtaaagtagggggttaccatatgccacgtggaacgatgctattgactaatgcatgggcaatacatagggatcctaagatatgggatgatccaacgagcttcaaaccagagaggttcgagaaagaaggggaggctcagaagctattggggtttgggctaggaagaagggcgtgtcctgggtccggtctggctcaacggctagcgagcttgactatcgggtctttgattcaatgttttgagtgggagaggataggagaagaagaggtggatatgactgaaggtggaggaggagtcataatgcccaaagctataccgttggtagccatgtgcaaagcacgccccgttgttggtaagatcctcaacgagtccgcttga

SEQ ID NO: 79350 - protein, 500 aa, Arabidopsis thaliana
  peptide (1)..(500): Ceres Seq. ID no. 12650953
MEGQTLIFTFLFISLSLTFIIGRIKRRPNLPPSPSWALPVIGHLRLLKPPLHRVFLSVSESLGDAPIISLRLGNRLVFVVSSHSLAEECFTKNDVVLANRFNSLASKHISYGCTTVVTASYGDHWRNLRRIGAVEIFSAHRLNSFSSIRRDEIHRLIACLSRNSSLEFTKVEMKSMFSNLTFNNIIRMLAGKCYYGDGAEDDPEAKRVRELIAEGMGCFGAGNTADYLPILTWITGSEKRIKKIASRLDEFLQGLVDERREGKEKRQNTMVDHLLCLQETQPEYYTDNIIKGIMLSLILAGTDTSAVTLEWTLSALLNHPQILSKARDEIDNKVGLNRLVEESDLSHLPYLQNIVSESLRLYPASPLLVPHVASEDCKVGGYHMPRGTMLLTNAWAIHRDPKIWDDPTSFKPERFEKEGEAQKLLGFGLGRRACPGSGLAQRLASLTIGSLIQCFEWERIGEEEVDMTEGGGGVIMPKAIPLVAMCKARPVVGKILNESA

SEQ ID NO: 79351 - protein, 328 aa, Arabidopsis thaliana
  peptide (1)..(328): Ceres Seq. ID no. 12650954
MKSMFSNLTFNNIIRMLAGKCYYGDGAEDDPEAKRVRELIAEGMGCFGAGNTADYLPILTWITGSEKRIKKIASRLDEFLQGLVDERREGKEKRQNTMVDHLLCLQETQPEYYTDNIIKGIMLSLILAGTDTSAVTLEWTLSALLNHPQILSKARDEIDNKVGLNRLVEESDLSHLPYLQNIVSESLRLYPASPLLVPHVASEDCKVGGYHMPRGTMLLTNAWAIHRDPKIWDDPTSFKPERFEKEGEAQKLLGFGLGRRACPGSGLAQRLASLTIGSLIQCFEWERIGEEEVDMTEGGGGVIMPKAIPLVAMCKARPVVGKILNESA

SEQ ID NO: 79352 - protein, 325 aa, Arabidopsis thaliana
  peptide (1)..(325): Ceres Seq. ID no. 12650955
MFSNLTFNNIIRMLAGKCYYGDGAEDDPEAKRVRELIAEGMGCFGAGNTADYLPILTWITGSEKRIKKIASRLDEFLQGLVDERREGKEKRQNTMVDHLLCLQETQPEYYTDNIIKGIMLSLILAGTDTSAVTLEWTLSALLNHPQILSKARDEIDNKVGLNRLVEESDLSHLPYLQNIVSESLRLYPASPLLVPHVASEDCKVGGYHMPRGTMLLTNAWAIHRDPKIWDDPTSFKPERFEKEGEAQKLLGFGLGRRACPGSGLAQRLASLTIGSLIQCFEWERIGEEEVDMTEGGGGVIMPKAIPLVAMCKARPVVGKILNESA

SEQ ID NO: 79353 - DNA, 1500 bp, Arabidopsis thaliana
  misc_feature (1)..(1500): Ceres Seq. ID no. 12650956
  misc_feature (1)..(1500): Ortholog of  Ceres SEQ ID NO 14306857 as cited in SEQ ID NO 60035
  misc_feature (1)..(1500): Ortholog of  Ceres SEQ ID NO 15227091 as cited in SEQ ID NO 60294
  misc_feature (1)..(1500): Ortholog of  Ceres SEQ ID NO 15169611 as cited in SEQ ID NO 65939
  misc_feature (1)..(1500): Ortholog of  Ceres SEQ ID NO 14307960 as cited in SEQ ID NO 66187
  misc_feature (1)..(1500): Ortholog of  Ceres SEQ ID NO 13502874 as cited in SEQ ID NO 66298
  misc_feature (1)..(1500): Ortholog of  Ceres SEQ ID NO 12614124 as cited in SEQ ID NO 68392
atggaagctctaatgcttatcttcacgttctgtttcatagttctctctctcatattcctcatcggaagaatcaagcgaaagctcaaccttcctccgagtcctgcatgggcgttaccagtgatcggtcacctccgtcttctcaagccaccactccaccgtgttttcctctccgtctctcaatctttaggcgacgctccgatcatctccctccgtctcggcaaccgactcctattcgttgtctcttcacactcaatcgccgaggaatgcttcacgaagaacgacgtcatactcgcgaaccgacaaaccaccatttctacaaaacacatctcatacggcaactccaccgtggtctctgcttcgtacagcgaacactggagaaatctccgccgcatcggcgccttagagattttctcggctcatagactcaatagcttttcctctattcgccgcgatgagatcaggaggcttataggccgtctcttacggaactcttcttacgggtttactaaggttgagatgaaatcaatgttttctgacttaacattcaacaacatcattagaatgctagccggaaagtgttactatggagacggtaaagaagatgacccggaggccaaacgcgtgcggacgcttatcgcagaggctatgagttcttctggtcctggaaacgctgctgattatataccgatcctgacttggatcacatattccgagacacggataaagaagctcgctggtaggcttgatgagttcttgcaaggattggtcgatgagaaacgagaaggaaaggagaagaaggagaacacgatggttgatcacttgctttgtctgcaagaaacccaaccagagtactacatggaccgcatcatcaaaggaaccatgctttctcttatagcaggggggactgatacaacagcggtaacattggaatgggcattgtcaagcttgttgaacaatcctgaggtgctgaacaaggccagagacgagatcgacagaatgatcggtgtagacaggcttttggaggaatcagacatcccaaatcttccttatctacagaacattgtatctgaaacgttacgtctgtaccctgcagcccctatgctgcttcctcacgtagcctcgaaagattgtaaagttgggggatacgatatgccgcgtgggacgatgctattgactaatgcatgggctatacacagggatcccctgctatgggatgatccaacgagcttcaagccagagaggttcgagaaagaaggagaggctaagaagctaatgccgttcgggctaggaagaagggcatgtcctggatccggtttggctcagcggctagtgaccttgagtctcgggtctttgattcaatgttttgaatgggagaggattggagaagaagaggtcgatatgactgaaggtccaggactcacaatgccgaaagctagaccgttggaagctatgtgcagagcacgtgactttgttggtaaaatcttacccgactcctcttga

SEQ ID NO: 79354 - protein, 499 aa, Arabidopsis thaliana
  peptide (1)..(499): Ceres Seq. ID no. 12650957
MEALMLIFTFCFIVLSLIFLIGRIKRKLNLPPSPAWALPVIGHLRLLKPPLHRVFLSVSQSLGDAPIISLRLGNRLLFVVSSHSIAEECFTKNDVILANRQTTISTKHISYGNSTVVSASYSEHWRNLRRIGALEIFSAHRLNSFSSIRRDEIRRLIGRLLRNSSYGFTKVEMKSMFSDLTFNNIIRMLAGKCYYGDGKEDDPEAKRVRTLIAEAMSSSGPGNAADYIPILTWITYSETRIKKLAGRLDEFLQGLVDEKREGKEKKENTMVDHLLCLQETQPEYYMDRIIKGTMLSLIAGGTDTTAVTLEWALSSLLNNPEVLNKARDEIDRMIGVDRLLEESDIPNLPYLQNIVSETLRLYPAAPMLLPHVASKDCKVGGYDMPRGTMLLTNAWAIHRDPLLWDDPTSFKPERFEKEGEAKKLMPFGLGRRACPGSGLAQRLVTLSLGSLIQCFEWERIGEEEVDMTEGPGLTMPKARPLEAMCRARDFVGKILPDSS

SEQ ID NO: 79355 - protein, 495 aa, Arabidopsis thaliana
  peptide (1)..(495): Ceres Seq. ID no. 12650958
MLIFTFCFIVLSLIFLIGRIKRKLNLPPSPAWALPVIGHLRLLKPPLHRVFLSVSQSLGDAPIISLRLGNRLLFVVSSHSIAEECFTKNDVILANRQTTISTKHISYGNSTVVSASYSEHWRNLRRIGALEIFSAHRLNSFSSIRRDEIRRLIGRLLRNSSYGFTKVEMKSMFSDLTFNNIIRMLAGKCYYGDGKEDDPEAKRVRTLIAEAMSSSGPGNAADYIPILTWITYSETRIKKLAGRLDEFLQGLVDEKREGKEKKENTMVDHLLCLQETQPEYYMDRIIKGTMLSLIAGGTDTTAVTLEWALSSLLNNPEVLNKARDEIDRMIGVDRLLEESDIPNLPYLQNIVSETLRLYPAAPMLLPHVASKDCKVGGYDMPRGTMLLTNAWAIHRDPLLWDDPTSFKPERFEKEGEAKKLMPFGLGRRACPGSGLAQRLVTLSLGSLIQCFEWERIGEEEVDMTEGPGLTMPKARPLEAMCRARDFVGKILPDSS

SEQ ID NO: 79356 - protein, 327 aa, Arabidopsis thaliana
  peptide (1)..(327): Ceres Seq. ID no. 12650959
MKSMFSDLTFNNIIRMLAGKCYYGDGKEDDPEAKRVRTLIAEAMSSSGPGNAADYIPILTWITYSETRIKKLAGRLDEFLQGLVDEKREGKEKKENTMVDHLLCLQETQPEYYMDRIIKGTMLSLIAGGTDTTAVTLEWALSSLLNNPEVLNKARDEIDRMIGVDRLLEESDIPNLPYLQNIVSETLRLYPAAPMLLPHVASKDCKVGGYDMPRGTMLLTNAWAIHRDPLLWDDPTSFKPERFEKEGEAKKLMPFGLGRRACPGSGLAQRLVTLSLGSLIQCFEWERIGEEEVDMTEGPGLTMPKARPLEAMCRARDFVGKILPDSS

SEQ ID NO: 79357 - DNA, 1245 bp, Arabidopsis thaliana
  misc_feature (1)..(1245): Ceres Seq. ID no. 12650964
  misc_feature (1)..(1245): Ortholog of  Ceres SEQ ID NO 15169611 as cited in SEQ ID NO 65939
  misc_feature (1)..(1245): Ortholog of  Ceres SEQ ID NO 13502874 as cited in SEQ ID NO 66298
  misc_feature (1)..(1245): Ortholog of  Ceres SEQ ID NO 12614124 as cited in SEQ ID NO 68392
atgggcaagtatgtggcttatgactacacctccatggttacggctccttacggtgaccactggcgaaacctccgtcgtatcaccgctttagaagtcttctccacaaatcgactcaacgcttcagcggaaatccgacatgacgaagttaagatgcttctccaaaagcttcacgatttatctgtcgaacgcccggctaaagtggagttacgacagttactaacgggtcttaccctaaatgtgataatgagaatgatgaccggaaagagattcttcgaggaagatgatggcggaaaggcggggataagtttggagttccgggaactagtggcggagattctagagctctctgcggcggacaatccagctgattttttgccggctctacggtggtttgactacaaaggtttggtcaagagagcaaagaggattggagaaaggatggatagtttattacaagggtttttggatgagcatagagctaacaaagacagattggagtttaagaacaccatgattgctcatttacttgattctcaagaaaaagagcctcataactacagtgatcaaaccatcaaaggtcttatactgatgatggtagtaggaggcacagatacatcggccttaaccgtggaatgggcaatgtcaaatttattgaatcatccacaaatactagagaccacgagacaaaacattgatactcaaatggaaacatcaagtagtcgtcgtttgttgaaagaagaagatttggtaaacatgaactacttgaaaaatgttgtgtcggagacactaagactttaccctgtggcaccacttatggttcctcatgtgccatcttctgactgtgtaatcggtggattcaacgttccacgtgatacgatcgtgttggttaacttgtgggctatacatcgagatccaagcgtgtgggatgatccaacgtcatttaagccggagagatttgaagggagtgatcagtttggacattacaatggtaaaatgatgccgtttgggttaggaagacgggcttgtcctgggttgagtttggctaaccgggttgttgggttattattgggttcgatgattcagtgctttgagtgggaaagcggctcaggaggtcaggttgatatgactgaaggtccaggacttagtttgcctaaggctgaaccattggttgtcacgtgcagaacacgtgagatggcttccgagttgttgttcttcggatcagagccaagcaataagaatgtctag

SEQ ID NO: 79358 - protein, 414 aa, Arabidopsis thaliana
  peptide (1)..(414): Ceres Seq. ID no. 12650965
MGKYVAYDYTSMVTAPYGDHWRNLRRITALEVFSTNRLNASAEIRHDEVKMLLQKLHDLSVERPAKVELRQLLTGLTLNVIMRMMTGKRFFEEDDGGKAGISLEFRELVAEILELSAADNPADFLPALRWFDYKGLVKRAKRIGERMDSLLQGFLDEHRANKDRLEFKNTMIAHLLDSQEKEPHNYSDQTIKGLILMMVVGGTDTSALTVEWAMSNLLNHPQILETTRQNIDTQMETSSSRRLLKEEDLVNMNYLKNVVSETLRLYPVAPLMVPHVPSSDCVIGGFNVPRDTIVLVNLWAIHRDPSVWDDPTSFKPERFEGSDQFGHYNGKMMPFGLGRRACPGLSLANRVVGLLLGSMIQCFEWESGSGGQVDMTEGPGLSLPKAEPLVVTCRTREMASELLFFGSEPSNKNV

SEQ ID NO: 79359 - protein, 403 aa, Arabidopsis thaliana
  peptide (1)..(403): Ceres Seq. ID no. 12650966
MVTAPYGDHWRNLRRITALEVFSTNRLNASAEIRHDEVKMLLQKLHDLSVERPAKVELRQLLTGLTLNVIMRMMTGKRFFEEDDGGKAGISLEFRELVAEILELSAADNPADFLPALRWFDYKGLVKRAKRIGERMDSLLQGFLDEHRANKDRLEFKNTMIAHLLDSQEKEPHNYSDQTIKGLILMMVVGGTDTSALTVEWAMSNLLNHPQILETTRQNIDTQMETSSSRRLLKEEDLVNMNYLKNVVSETLRLYPVAPLMVPHVPSSDCVIGGFNVPRDTIVLVNLWAIHRDPSVWDDPTSFKPERFEGSDQFGHYNGKMMPFGLGRRACPGLSLANRVVGLLLGSMIQCFEWESGSGGQVDMTEGPGLSLPKAEPLVVTCRTREMASELLFFGSEPSNKNV

SEQ ID NO: 79360 - protein, 364 aa, Arabidopsis thaliana
  peptide (1)..(364): Ceres Seq. ID no. 12650967
MLLQKLHDLSVERPAKVELRQLLTGLTLNVIMRMMTGKRFFEEDDGGKAGISLEFRELVAEILELSAADNPADFLPALRWFDYKGLVKRAKRIGERMDSLLQGFLDEHRANKDRLEFKNTMIAHLLDSQEKEPHNYSDQTIKGLILMMVVGGTDTSALTVEWAMSNLLNHPQILETTRQNIDTQMETSSSRRLLKEEDLVNMNYLKNVVSETLRLYPVAPLMVPHVPSSDCVIGGFNVPRDTIVLVNLWAIHRDPSVWDDPTSFKPERFEGSDQFGHYNGKMMPFGLGRRACPGLSLANRVVGLLLGSMIQCFEWESGSGGQVDMTEGPGLSLPKAEPLVVTCRTREMASELLFFGSEPSNKNV

SEQ ID NO: 79361 - DNA, 1604 bp, Arabidopsis thaliana
  misc_feature (1)..(1604): Ceres Seq. ID no. 12650970
  misc_feature (1)..(1604): Ortholog of  Ceres SEQ ID NO 13594151 as cited in SEQ ID NO 58886
catagaagacgagacgcccccactacttagactttttctactacaaacctgagattttagtctgagagaaagagaagagaacactaagatgatgacttctcgttcgattgttcctcaacaatccacggatgatgttgttgtggtagatggcaaaaacgtagcgaaaggaagaaaccgtcaagttcttggtgatataggtaatgttgttcgaggaaattacccaaagaacaacgaaccggaaaagatcaatcatcgtcctcgtacacgatctcaaaatcccacgcttcttgtggaggataatctcaaaaaacctgtagtcaagagaaacgcagtaccaaagccgaagaaagtggctgggaaaccaaaggtagtagacgtgattgagataagttcagacagtgatgaagaacttggtttagttgctgctcgagagaagaaggctactaagaagaaagcgaccacttacacatctgttcttactgctagaagcaaggctgcttgtggtttagagaagaaacagaaagaaaagattgttgatatcgattctgctgatgttgagaatgacctcgcagctgtggaatatgtggaagatatttacagtttttacaagtctgttgagagtgaatggaggccacgagattacatggcatctcagcctgatattaatgaaaagatgagactgatcctggtggagtggttgattgatgtgcatgtccgattcgagctaaacccggaaacattttacctcactgttaacattctggatcggttcttgtcggttaagccagtgcctcgaaaagaactgcagcttgttggtctcagtgctcttctcatgtcggccaagtatgaagaaatttggccaccacaggtggaggatctagttgatattgcagaccatgcatacagtcacaaacagattctggtgatggagaagacaatactgtctacacttgagtggtacttgacagttccgactcattatgtcttcctagctcgtttcatcaaagcttccattgcagacgaaaagatggagaatatggtgcactatttggctgagttaggcgtaatgcattacgatacgatgataatgttcagtccatcaatggtagctgcttctgcaatctacgcagcaagatcttctctccgccaagttcccatatggaccagcactctcaagcatcacactggctattctgagactcagctcatggactgtgcaaagctgttggcgtatcagcaatggaagcaacaagaagaagggagtgagagcagtactaagggagctttacgaaagaaatactccaaggacgaacgcttcgctgtggctttgatccctccggccaaagctttgttgaccggaactgaatctgcttaggagttaggaccctttaagaagacgaagaagctgaagaaccaagcctagtttcattttccttctgaaaatcaagtctagtttcattagataatggtattttgaacaagtctaatgagtcgctttgaaacctagtcctttagcatgattcattcccaaacactgcatatcttgtaagaagtcagtttcttccgagaagtttaatttccttagatataatattctgtggttt

SEQ ID NO: 79362 - protein, 428 aa, Arabidopsis thaliana
  peptide (1)..(428): Ceres Seq. ID no. 12650971
MMTSRSIVPQQSTDDVVVVDGKNVAKGRNRQVLGDIGNVVRGNYPKNNEPEKINHRPRTRSQNPTLLVEDNLKKPVVKRNAVPKPKKVAGKPKVVDVIEISSDSDEELGLVAAREKKATKKKATTYTSVLTARSKAACGLEKKQKEKIVDIDSADVENDLAAVEYVEDIYSFYKSVESEWRPRDYMASQPDINEKMRLILVEWLIDVHVRFELNPETFYLTVNILDRFLSVKPVPRKELQLVGLSALLMSAKYEEIWPPQVEDLVDIADHAYSHKQILVMEKTILSTLEWYLTVPTHYVFLARFIKASIADEKMENMVHYLAELGVMHYDTMIMFSPSMVAASAIYAARSSLRQVPIWTSTLKHHTGYSETQLMDCAKLLAYQQWKQQEEGSESSTKGALRKKYSKDERFAVALIPPAKALLTGTESA

SEQ ID NO: 79363 - protein, 427 aa, Arabidopsis thaliana
  peptide (1)..(427): Ceres Seq. ID no. 12650972
MTSRSIVPQQSTDDVVVVDGKNVAKGRNRQVLGDIGNVVRGNYPKNNEPEKINHRPRTRSQNPTLLVEDNLKKPVVKRNAVPKPKKVAGKPKVVDVIEISSDSDEELGLVAAREKKATKKKATTYTSVLTARSKAACGLEKKQKEKIVDIDSADVENDLAAVEYVEDIYSFYKSVESEWRPRDYMASQPDINEKMRLILVEWLIDVHVRFELNPETFYLTVNILDRFLSVKPVPRKELQLVGLSALLMSAKYEEIWPPQVEDLVDIADHAYSHKQILVMEKTILSTLEWYLTVPTHYVFLARFIKASIADEKMENMVHYLAELGVMHYDTMIMFSPSMVAASAIYAARSSLRQVPIWTSTLKHHTGYSETQLMDCAKLLAYQQWKQQEEGSESSTKGALRKKYSKDERFAVALIPPAKALLTGTESA

SEQ ID NO: 79364 - protein, 243 aa, Arabidopsis thaliana
  peptide (1)..(243): Ceres Seq. ID no. 12650973
MASQPDINEKMRLILVEWLIDVHVRFELNPETFYLTVNILDRFLSVKPVPRKELQLVGLSALLMSAKYEEIWPPQVEDLVDIADHAYSHKQILVMEKTILSTLEWYLTVPTHYVFLARFIKASIADEKMENMVHYLAELGVMHYDTMIMFSPSMVAASAIYAARSSLRQVPIWTSTLKHHTGYSETQLMDCAKLLAYQQWKQQEEGSESSTKGALRKKYSKDERFAVALIPPAKALLTGTESA

SEQ ID NO: 79365 - DNA, 1299 bp, Arabidopsis thaliana
  misc_feature (1)..(1299): Ceres Seq. ID no. 12650990
  misc_feature (1)..(1299): Ortholog of  Ceres SEQ ID NO 13639120 as cited in SEQ ID NO 56708
atgggaaaacccggcggcgcaaagaccagaaccgccgtatgtttatcagacggtgttttctttctcgccggagctttcatgtctctcactctcgtctggtcttacttctcaatcttttcaccttctttcaccagtttacgtcacgacggcaaaccggttcaatgctccggtttagacatgcaattcgacccatccgagcccggtttttacgacgacccggatctaagctactcgatcgagaaaccaatcacaaaatgggacgagaaacgaaaccaatggtttgaatcacacccatctttcaaacccggttcagaaaaccggatcgtaatggtaaccggttcacaatcctcgccgtgtaaaaacccaatcggagaccatttattactccgatgcttcaaaaacaaagtcgattacgctcgaatccatggtcacgacatcttctacagcaattctcttcttcatccgaagatgaattcttattgggcgaaacttccggtggttaaagcggcgatgcttgctcacccagaggcggagtggatttggtgggttgattccgacgctatcttcaccgacatggaatttaaaccgccgcttcaccgttaccgtcaacacaacctcgtcgttcacggttggccaaatataatctacgagaaacagagctggacggcgttaaacgccggcgttttcttaataagaaattgtcaatggtcaatggacttaattgacacgtggaagagtatgggaccagtgagtccagattacaaaaaatggggtcccatccaacggtcgatattcaaagataagttgtttccagagtcagatgatcaaacggctctgatttatttgctttataaacataaagagttgtattatcctaagatatacctcgaagcagagtattatctccaagggtattggattggtgtatttggggatttcgccaacgtgacggaacggtatcttgagatggaacgagaagacgacacgttgcgtaggcgtcacgcggagaaagtgagcgaacgatacggtgcgtttagagaagagcggtttttgaaaggcgagtttggtgggagaggaagtcgcagacgcgcgtttataacgcattttacgggatgtcaaccatgtagcggtgatcataatccgagttacgatggtgacacgtgttggaatgagatgatcagagcccttaattttgctgataatcaggtgatgcgcgtgtatggttacgttcattctgatttgagtaagacttctccgcttcaacctctgccgttcgattatcctaatgaagcttggtga

SEQ ID NO: 79366 - protein, 432 aa, Arabidopsis thaliana
  peptide (1)..(432): Ceres Seq. ID no. 12650991
MGKPGGAKTRTAVCLSDGVFFLAGAFMSLTLVWSYFSIFSPSFTSLRHDGKPVQCSGLDMQFDPSEPGFYDDPDLSYSIEKPITKWDEKRNQWFESHPSFKPGSENRIVMVTGSQSSPCKNPIGDHLLLRCFKNKVDYARIHGHDIFYSNSLLHPKMNSYWAKLPVVKAAMLAHPEAEWIWWVDSDAIFTDMEFKPPLHRYRQHNLVVHGWPNIIYEKQSWTALNAGVFLIRNCQWSMDLIDTWKSMGPVSPDYKKWGPIQRSIFKDKLFPESDDQTALIYLLYKHKELYYPKIYLEAEYYLQGYWIGVFGDFANVTERYLEMEREDDTLRRRHAEKVSERYGAFREERFLKGEFGGRGSRRRAFITHFTGCQPCSGDHNPSYDGDTCWNEMIRALNFADNQVMRVYGYVHSDLSKTSPLQPLPFDYPNEAW

SEQ ID NO: 79367 - protein, 406 aa, Arabidopsis thaliana
  peptide (1)..(406): Ceres Seq. ID no. 12650992
MSLTLVWSYFSIFSPSFTSLRHDGKPVQCSGLDMQFDPSEPGFYDDPDLSYSIEKPITKWDEKRNQWFESHPSFKPGSENRIVMVTGSQSSPCKNPIGDHLLLRCFKNKVDYARIHGHDIFYSNSLLHPKMNSYWAKLPVVKAAMLAHPEAEWIWWVDSDAIFTDMEFKPPLHRYRQHNLVVHGWPNIIYEKQSWTALNAGVFLIRNCQWSMDLIDTWKSMGPVSPDYKKWGPIQRSIFKDKLFPESDDQTALIYLLYKHKELYYPKIYLEAEYYLQGYWIGVFGDFANVTERYLEMEREDDTLRRRHAEKVSERYGAFREERFLKGEFGGRGSRRRAFITHFTGCQPCSGDHNPSYDGDTCWNEMIRALNFADNQVMRVYGYVHSDLSKTSPLQPLPFDYPNEAW

SEQ ID NO: 79368 - protein, 373 aa, Arabidopsis thaliana
  peptide (1)..(373): Ceres Seq. ID no. 12650993
MQFDPSEPGFYDDPDLSYSIEKPITKWDEKRNQWFESHPSFKPGSENRIVMVTGSQSSPCKNPIGDHLLLRCFKNKVDYARIHGHDIFYSNSLLHPKMNSYWAKLPVVKAAMLAHPEAEWIWWVDSDAIFTDMEFKPPLHRYRQHNLVVHGWPNIIYEKQSWTALNAGVFLIRNCQWSMDLIDTWKSMGPVSPDYKKWGPIQRSIFKDKLFPESDDQTALIYLLYKHKELYYPKIYLEAEYYLQGYWIGVFGDFANVTERYLEMEREDDTLRRRHAEKVSERYGAFREERFLKGEFGGRGSRRRAFITHFTGCQPCSGDHNPSYDGDTCWNEMIRALNFADNQVMRVYGYVHSDLSKTSPLQPLPFDYPNEAW

SEQ ID NO: 79369 - DNA, 1761 bp, Arabidopsis thaliana
  misc_feature (1)..(1761): Ceres Seq. ID no. 12651001
  misc_feature (1)..(1761): Ortholog of  Ceres SEQ ID NO 15177320 as cited in SEQ ID NO 52645
  misc_feature (1)..(1761): Ortholog of  Ceres SEQ ID NO 15171359 as cited in SEQ ID NO 57279
  misc_feature (1)..(1761): Ortholog of  Ceres SEQ ID NO 14313840 as cited in SEQ ID NO 59568
  misc_feature (1)..(1761): Ortholog of  Ceres SEQ ID NO 13662245 as cited in SEQ ID NO 62708
  misc_feature (1)..(1761): Ortholog of  Ceres SEQ ID NO 14314084 as cited in SEQ ID NO 63256
  misc_feature (1)..(1761): Ortholog of  Ceres SEQ ID NO 14303091 as cited in SEQ ID NO 66369
aacacttttcttgttgtgagagtaagagggaggttaaaatgagcataatgaggaatttcttgagtatgataattatgctttgcgtatgtctcaattggtgttttgctgaaggagctgagaaaagcgatagtggaaaggtacttgattcttacaccattcaagtcagctctctgttcccttcatcatcatcttgtgtcccttcttcaaaagcatctaataccaagtcgtcgctgcgcgtggtgcacatgcatggtgcgtgctcgcatcttagcagcgatgcgagagtcgaccatgacgaaatcatcagacgcgatcaagcacgtgtggagtccatctactcaaaattgtcaaagaatagcgcaaatgaagtcagcgaagccaagtcaacggagctaccggctaaaagtggaatcacactcggatcaggaaactacatcgtaacaatcggaatcgggacaccgaagcacgatctatcgctggtcttcgacaccggaagtgacctgacatggactcaatgtgagccatgtctaggaagttgctattcacaaaaggaaccaaaatttaacccttcttcgtcttctacttaccaaaacgtctcgtgctcatctccaatgtgtgaagacgctgagagttgttcggcttccaactgcgtatacagtatcgtttacggcgataagtcgtttacccaaggatttcttgcaaaggagaaatttaccctaacgaactctgatgttttggaggatgtttactttggttgcggtgaaaacaaccaaggacttttcgacggtgttgctgggcttctcggccttggccctggcaaactctcactaccggcgcaaacaacaacgacctacaacaatatcttctcctactgtctaccttctttcacaagtaacagtactggccatcttacctttggatccgctggaatctctgaatccgttaaattcacaccgatttcttccttcccaagcgcattcaattatggcatcgatatcataggtatcagtgtaggcgacaaggaattagcgattactccaaactcattctcgaccgaaggtgctataatcgactcaggcacagtgtttactcgcctccctaccaaagtctacgcggaactccgcagtgtttttaaggaaaagatgtcgagttacaagagtacgtcgggatacgggctttttgacacatgttacgatttcactggcttggatacggtgacatacccgacgattgcattctccttcgccggtagcactgtcgtagaacttgatggatcagggatttcgttgccgatcaagatatcacaggtttgtttggcgtttgcagggaatgatgaccttcccgccatctttggaaacgttcagcagacgacgctagatgttgtgtacgacgtggctggtggacgagtcggttttgctcccaatggttgttaattagctacttgaacaaaaagaagaggagagggttttgtaatttgagtaagggtttggctcgtaaatttagctcctatttatatatagtacgtgtgctaagtaaattgccccaaaaataattttgtgtgtgcgcggcaattgctttcttatatatatacgacatgtagatttgctttcttatatacttcaatcctgacttggaagtaagttttttagtaacgtcaaacatgcttcaacatttgcttaatgtacaagtccgatttaagctaccagaatcatctttttccttgagtgtaaccttttttactcgaaaaagcataaattcatt

SEQ ID NO: 79370 - protein, 476 aa, Arabidopsis thaliana
  peptide (1)..(476): Ceres Seq. ID no. 12651002
HFSCCESKREVKMSIMRNFLSMIIMLCVCLNWCFAEGAEKSDSGKVLDSYTIQVSSLFPSSSSCVPSSKASNTKSSLRVVHMHGACSHLSSDARVDHDEIIRRDQARVESIYSKLSKNSANEVSEAKSTELPAKSGITLGSGNYIVTIGIGTPKHDLSLVFDTGSDLTWTQCEPCLGSCYSQKEPKFNPSSSSTYQNVSCSSPMCEDAESCSASNCVYSIVYGDKSFTQGFLAKEKFTLTNSDVLEDVYFGCGENNQGLFDGVAGLLGLGPGKLSLPAQTTTTYNNIFSYCLPSFTSNSTGHLTFGSAGISESVKFTPISSFPSAFNYGIDIIGISVGDKELAITPNSFSTEGAIIDSGTVFTRLPTKVYAELRSVFKEKMSSYKSTSGYGLFDTCYDFTGLDTVTYPTIAFSFAGSTVVELDGSGISLPIKISQVCLAFAGNDDLPAIFGNVQQTTLDVVYDVAGGRVGFAPNGC

SEQ ID NO: 79371 - protein, 464 aa, Arabidopsis thaliana
  peptide (1)..(464): Ceres Seq. ID no. 12651003
MSIMRNFLSMIIMLCVCLNWCFAEGAEKSDSGKVLDSYTIQVSSLFPSSSSCVPSSKASNTKSSLRVVHMHGACSHLSSDARVDHDEIIRRDQARVESIYSKLSKNSANEVSEAKSTELPAKSGITLGSGNYIVTIGIGTPKHDLSLVFDTGSDLTWTQCEPCLGSCYSQKEPKFNPSSSSTYQNVSCSSPMCEDAESCSASNCVYSIVYGDKSFTQGFLAKEKFTLTNSDVLEDVYFGCGENNQGLFDGVAGLLGLGPGKLSLPAQTTTTYNNIFSYCLPSFTSNSTGHLTFGSAGISESVKFTPISSFPSAFNYGIDIIGISVGDKELAITPNSFSTEGAIIDSGTVFTRLPTKVYAELRSVFKEKMSSYKSTSGYGLFDTCYDFTGLDTVTYPTIAFSFAGSTVVELDGSGISLPIKISQVCLAFAGNDDLPAIFGNVQQTTLDVVYDVAGGRVGFAPNGC

SEQ ID NO: 79372 - protein, 461 aa, Arabidopsis thaliana
  peptide (1)..(461): Ceres Seq. ID no. 12651004
MRNFLSMIIMLCVCLNWCFAEGAEKSDSGKVLDSYTIQVSSLFPSSSSCVPSSKASNTKSSLRVVHMHGACSHLSSDARVDHDEIIRRDQARVESIYSKLSKNSANEVSEAKSTELPAKSGITLGSGNYIVTIGIGTPKHDLSLVFDTGSDLTWTQCEPCLGSCYSQKEPKFNPSSSSTYQNVSCSSPMCEDAESCSASNCVYSIVYGDKSFTQGFLAKEKFTLTNSDVLEDVYFGCGENNQGLFDGVAGLLGLGPGKLSLPAQTTTTYNNIFSYCLPSFTSNSTGHLTFGSAGISESVKFTPISSFPSAFNYGIDIIGISVGDKELAITPNSFSTEGAIIDSGTVFTRLPTKVYAELRSVFKEKMSSYKSTSGYGLFDTCYDFTGLDTVTYPTIAFSFAGSTVVELDGSGISLPIKISQVCLAFAGNDDLPAIFGNVQQTTLDVVYDVAGGRVGFAPNGC

SEQ ID NO: 79373 - DNA, 1011 bp, Arabidopsis thaliana
  misc_feature (1)..(1011): Ceres Seq. ID no. 12651056
  misc_feature (1)..(1011): Ortholog of  Ceres SEQ ID NO 14306410 as cited in SEQ ID NO 53870
atggagaagagattcaagatatggacatatagagaaggagaagctcctctgtttcacaagggtccactcaacaacatttacgccattgaaggccaattcatggacgagatcgagaacggaaacagccgttttaaggcggcttcaccggaggaagccactgtgttctacatccccgtagggattgtcaatatcatacgctttgtctatagaccttacactagctatgcacgtgaccgtctccaaaacattgttaaagactacatctctctcatctctaaccgttacccttactggaatcgcagtcgcggtgctgatcacttcttcctctcctgtcacgattgggcacctgatgtctcagctgtggatccagaattatacaagcattttataagagctctctgcaatgccaattcctccgaaggattcaccccaatgagagacgtttcattaccggaaatcaacattccacacagccaattagggtttgtacacaccggagaaccgcctcaaaaccgcaaactcttagcattcttcgcgggcggttctcacggagatgtccgaaaaatacttttccaacactggaaagaaaaagacaaagacgtccttgtctacgagaatctccccaaaaccatgaactacacgaaaatgatggacaaggcaaagttttgtttatgtcctagcggttgggaagtggcgagtccgagaattgtcgagtcactttactccggctgtgttccggtcatcatagctgattattacgtcctcccgttcagcgacgtgttgaattggaagacattctcggttcatattccaatatcaaagatgcctgacataaagaagattctagaagcaataacagaagaagagtacttgaatatgcaaagaagagtgcttgaggttcggaaacactttgtcataaacagaccatcaaagccatatgatatgttgcatatgatcatgcattctatttggttacggaggcttaatgttcgaatccctctttcacagtga

SEQ ID NO: 79374 - protein, 336 aa, Arabidopsis thaliana
  peptide (1)..(336): Ceres Seq. ID no. 12651057
MEKRFKIWTYREGEAPLFHKGPLNNIYAIEGQFMDEIENGNSRFKAASPEEATVFYIPVGIVNIIRFVYRPYTSYARDRLQNIVKDYISLISNRYPYWNRSRGADHFFLSCHDWAPDVSAVDPELYKHFIRALCNANSSEGFTPMRDVSLPEINIPHSQLGFVHTGEPPQNRKLLAFFAGGSHGDVRKILFQHWKEKDKDVLVYENLPKTMNYTKMMDKAKFCLCPSGWEVASPRIVESLYSGCVPVIIADYYVLPFSDVLNWKTFSVHIPISKMPDIKKILEAITEEEYLNMQRRVLEVRKHFVINRPSKPYDMLHMIMHSIWLRRLNVRIPLSQ

SEQ ID NO: 79375 - protein, 303 aa, Arabidopsis thaliana
  peptide (1)..(303): Ceres Seq. ID no. 12651058
MDEIENGNSRFKAASPEEATVFYIPVGIVNIIRFVYRPYTSYARDRLQNIVKDYISLISNRYPYWNRSRGADHFFLSCHDWAPDVSAVDPELYKHFIRALCNANSSEGFTPMRDVSLPEINIPHSQLGFVHTGEPPQNRKLLAFFAGGSHGDVRKILFQHWKEKDKDVLVYENLPKTMNYTKMMDKAKFCLCPSGWEVASPRIVESLYSGCVPVIIADYYVLPFSDVLNWKTFSVHIPISKMPDIKKILEAITEEEYLNMQRRVLEVRKHFVINRPSKPYDMLHMIMHSIWLRRLNVRIPLSQ

SEQ ID NO: 79376 - protein, 192 aa, Arabidopsis thaliana
  peptide (1)..(192): Ceres Seq. ID no. 12651059
MRDVSLPEINIPHSQLGFVHTGEPPQNRKLLAFFAGGSHGDVRKILFQHWKEKDKDVLVYENLPKTMNYTKMMDKAKFCLCPSGWEVASPRIVESLYSGCVPVIIADYYVLPFSDVLNWKTFSVHIPISKMPDIKKILEAITEEEYLNMQRRVLEVRKHFVINRPSKPYDMLHMIMHSIWLRRLNVRIPLSQ

SEQ ID NO: 79377 - DNA, 570 bp, Arabidopsis thaliana
  misc_feature (1)..(570): Ceres Seq. ID no. 12651064
  misc_feature (1)..(570): Ortholog of  Ceres SEQ ID NO 15173624 as cited in SEQ ID NO 60470
atggtacattcgaggaagttccgaggtgtccgccagcgacaatggggttcttgggtctctgagattcgccatcctctattgaagagaagagtgtggcttggaactttcgaaacggcagaagcggctgcaagagcatacgaccaagcggctcttctaatgaacggccaaaacgctaagaccaatttccctgtcgtaaaatcagaggaaggctccgatcacgttaaagatgttaactctccgttgatgtcaccaaagtcattatctgagcttttgaacgctaagctaaggaagagctgcaaagacctaacgccttctttgacgtgtctccgtcttgatactgacagttcccacattggagtttggcagaaacgggccgggtcgaaaacaagtccgacttgggtcatgcgcctcgaacttgggaacgtagtcaacgaaagtgcggttgacttagggttgactacgatgaacaaacaaaacgttgagaaagaagaagaagaagaagaagctattattagtgatgaggatcagttagctatggagatgatcgaggagttgctgaattggagttga

SEQ ID NO: 79378 - protein, 189 aa, Arabidopsis thaliana
  peptide (1)..(189): Ceres Seq. ID no. 12651065
MVHSRKFRGVRQRQWGSWVSEIRHPLLKRRVWLGTFETAEAAARAYDQAALLMNGQNAKTNFPVVKSEEGSDHVKDVNSPLMSPKSLSELLNAKLRKSCKDLTPSLTCLRLDTDSSHIGVWQKRAGSKTSPTWVMRLELGNVVNESAVDLGLTTMNKQNVEKEEEEEEAIISDEDQLAMEMIEELLNWS

SEQ ID NO: 79379 - protein, 137 aa, Arabidopsis thaliana
  peptide (1)..(137): Ceres Seq. ID no. 12651066
MNGQNAKTNFPVVKSEEGSDHVKDVNSPLMSPKSLSELLNAKLRKSCKDLTPSLTCLRLDTDSSHIGVWQKRAGSKTSPTWVMRLELGNVVNESAVDLGLTTMNKQNVEKEEEEEEAIISDEDQLAMEMIEELLNWS

SEQ ID NO: 79380 - protein, 108 aa, Arabidopsis thaliana
  peptide (1)..(108): Ceres Seq. ID no. 12651067
MSPKSLSELLNAKLRKSCKDLTPSLTCLRLDTDSSHIGVWQKRAGSKTSPTWVMRLELGNVVNESAVDLGLTTMNKQNVEKEEEEEEAIISDEDQLAMEMIEELLNWS

SEQ ID NO: 79381 - DNA, 1056 bp, Arabidopsis thaliana
  misc_feature (1)..(1056): Ceres Seq. ID no. 12651072
  misc_feature (1)..(1056): Ortholog of  Ceres SEQ ID NO 13638402 as cited in SEQ ID NO 60300
atggggaaaggtggcgcactaagcgaaagcgtgataaagaacatcgttctctcatacagctacgtagcgatatggatcttcttaagcttcacagtaattgtctacaacaaatacatcctcgacaagaagatgtacaattggccattcccgatctcactcacaatgatccacatgtccttttgttcaaccctagcttttctcatcatcaaggttttcaaattcgtcgagccagttaaaatgactcgcgagacttacctgagatccgtcgtaccgatcggtgctttgtacgctctctcactctggttatcgaattccgcttacatttacctatcagtctcctttatccagatgcttaaagctctcatgcctgtagctgtttactcaatcggtgttctgtttaaaaaggaaggattcaaatctgatactatgatgaacatgttatcgatttcgtttggtgttgcgattgctgcttatggtgaagctaggtttgatgtttggggtgtgattcttcagcttggtgctgttgcttttgaagctactcgtttggttttgattcagatcttgttaggagataaagggattaagcttaatcccattacttcgttatattacgttgctccttgttgtttggccttcttgtttattccatggatctacgttgagtttcctgttcttagagatacgtctagcttccacttggattacgcaattttcggagcgaattcgttttgtgcgtttgcgttgaatcttgctgtgtttcttttggttgggaagacatctgctttgactatgaatgttgctggtgtggttaaggattggctcttgattgctttctcatggtctgtgattaaggatactgtgacacctattaatcttttcgggtacgggattgcgttcttgggagttgcgtattataatcacgccaagttacaggctttgaaggctaaagaggaggagaagaagaagattcagcaagctgatgaggagagtggtcggttgcttgaagagagggaaggtgatgttgaaggtaagaagaatgatcagtctggtaattaa

SEQ ID NO: 79382 - protein, 351 aa, Arabidopsis thaliana
  peptide (1)..(351): Ceres Seq. ID no. 12651073
MGKGGALSESVIKNIVLSYSYVAIWIFLSFTVIVYNKYILDKKMYNWPFPISLTMIHMSFCSTLAFLIIKVFKFVEPVKMTRETYLRSVVPIGALYALSLWLSNSAYIYLSVSFIQMLKALMPVAVYSIGVLFKKEGFKSDTMMNMLSISFGVAIAAYGEARFDVWGVILQLGAVAFEATRLVLIQILLGDKGIKLNPITSLYYVAPCCLAFLFIPWIYVEFPVLRDTSSFHLDYAIFGANSFCAFALNLAVFLLVGKTSALTMNVAGVVKDWLLIAFSWSVIKDTVTPINLFGYGIAFLGVAYYNHAKLQALKAKEEEKKKIQQADEESGRLLEEREGDVEGKKNDQSGN

SEQ ID NO: 79383 - protein, 308 aa, Arabidopsis thaliana
  peptide (1)..(308): Ceres Seq. ID no. 12651074
MYNWPFPISLTMIHMSFCSTLAFLIIKVFKFVEPVKMTRETYLRSVVPIGALYALSLWLSNSAYIYLSVSFIQMLKALMPVAVYSIGVLFKKEGFKSDTMMNMLSISFGVAIAAYGEARFDVWGVILQLGAVAFEATRLVLIQILLGDKGIKLNPITSLYYVAPCCLAFLFIPWIYVEFPVLRDTSSFHLDYAIFGANSFCAFALNLAVFLLVGKTSALTMNVAGVVKDWLLIAFSWSVIKDTVTPINLFGYGIAFLGVAYYNHAKLQALKAKEEEKKKIQQADEESGRLLEEREGDVEGKKNDQSGN

SEQ ID NO: 79384 - protein, 297 aa, Arabidopsis thaliana
  peptide (1)..(297): Ceres Seq. ID no. 12651075
MIHMSFCSTLAFLIIKVFKFVEPVKMTRETYLRSVVPIGALYALSLWLSNSAYIYLSVSFIQMLKALMPVAVYSIGVLFKKEGFKSDTMMNMLSISFGVAIAAYGEARFDVWGVILQLGAVAFEATRLVLIQILLGDKGIKLNPITSLYYVAPCCLAFLFIPWIYVEFPVLRDTSSFHLDYAIFGANSFCAFALNLAVFLLVGKTSALTMNVAGVVKDWLLIAFSWSVIKDTVTPINLFGYGIAFLGVAYYNHAKLQALKAKEEEKKKIQQADEESGRLLEEREGDVEGKKNDQSGN

SEQ ID NO: 79385 - DNA, 1737 bp, Arabidopsis thaliana
  misc_feature (1)..(1737): Ceres Seq. ID no. 12651082
  misc_feature (1)..(1737): Ortholog of  Ceres SEQ ID NO 13594151 as cited in SEQ ID NO 58886
tctctctctctctggagcgttctcttctctccttgagcttctcttaccgccattagagctccttcacaaactcataaacctatttgttgagccaggcttggcttaaccactggcctttttccagactaaattatgtattgctcttcttcgatgcatccaaatgcaaacaaagaaaatatctctacttcagatgtacaggagagttttgtacgaataacgagatcacgagctaaaaaagccatgggaagaggagtatcaatacctccaacaaaaccttcttttaaacagcaaaagagacgtgcagtacttaaggatgtgagtaatacctctgcagatattatttattcagaacttcgaaagggaggcaacatcaaggcaaacagaaaatgtctaaaagagcctaaaaaagcagcaaaggaaggtgctaacagtgccatggatattctggtagatatgcatacagaaaaatcaaaattagcagaagatttgtccaagatcaggatggctgaagcccaagatgtctctctttcaaactttaaagatgaagaaattactgagcaacaagaagatggatcaggtgtcatggagttacttcaagttgtagatattgattccaacgtcgaagatccacagtgttgcagcttgtatgctgctgatatatatgacaacatacatgttgcagagcttcaacaacgacccttggctaattatatggagcttgtgcagcgagatatcgacccagacatgagaaagattctgattgactggcttgtagaagtttctgacgactacaagctggttccagatacgctttaccttacagtgaatcttatcgaccggtttctgtccaacagttacattgaaaggcaaagactccagctccttggtgtctcttgcatgcttatagcttcaaaatatgaagagctttccgcaccaggggtggaggagttttgcttcattacggccaacacatacacaagaccagaagtgctgagcatggagattcaaattctaaattttgtgcactttagattatcggttcctaccaccaaaacatttctgaggcggttcattaaagcagctcaagcttcgtacaaggtgcctttcattgaactggagtatttagcaaactatctcgccgaattgacactggtggaatatagtttcctaaggttcctgccatcactaattgctgcttcagctgttttcctagcccgatggacactcgaccaaactgaccatccttggaaccctactctgcaacactacaccagatatgaggtagctgagctgaagaacacagttctcgccatggaggacttgcagctcaacaccagtggctgtactctcgctgccacccgtgagaaatacaaccaaccaaagtttaagagcgtggcaaagctgacatctcccaaacgagtcacatcactattctcaagatgacaccaagcaacatcgaaaacagagcccaagtcaggtgatcaaaatacctattttcagacattggatgttatgtcgtctctttgccagttttgtctgtctgtaattctgtagctattgtgtggcgccttaattgtaggccattacttgtcacaccacttagctttaaataaatgttatggaatttttctaatcgcattgctacaactatttactatcctgcgggattttgtacctaggagcacttggaaaacgaatacaaaagtgttaattaatataaatttcactgttcatggc

SEQ ID NO: 79386 - protein, 436 aa, Arabidopsis thaliana
  peptide (1)..(436): Ceres Seq. ID no. 12651083
MYCSSSMHPNANKENISTSDVQESFVRITRSRAKKAMGRGVSIPPTKPSFKQQKRRAVLKDVSNTSADIIYSELRKGGNIKANRKCLKEPKKAAKEGANSAMDILVDMHTEKSKLAEDLSKIRMAEAQDVSLSNFKDEEITEQQEDGSGVMELLQVVDIDSNVEDPQCCSLYAADIYDNIHVAELQQRPLANYMELVQRDIDPDMRKILIDWLVEVSDDYKLVPDTLYLTVNLIDRFLSNSYIERQRLQLLGVSCMLIASKYEELSAPGVEEFCFITANTYTRPEVLSMEIQILNFVHFRLSVPTTKTFLRRFIKAAQASYKVPFIELEYLANYLAELTLVEYSFLRFLPSLIAASAVFLARWTLDQTDHPWNPTLQHYTRYEVAELKNTVLAMEDLQLNTSGCTLAATREKYNQPKFKSVAKLTSPKRVTSLFSR

SEQ ID NO: 79387 - protein, 430 aa, Arabidopsis thaliana
  peptide (1)..(430): Ceres Seq. ID no. 12651084
MHPNANKENISTSDVQESFVRITRSRAKKAMGRGVSIPPTKPSFKQQKRRAVLKDVSNTSADIIYSELRKGGNIKANRKCLKEPKKAAKEGANSAMDILVDMHTEKSKLAEDLSKIRMAEAQDVSLSNFKDEEITEQQEDGSGVMELLQVVDIDSNVEDPQCCSLYAADIYDNIHVAELQQRPLANYMELVQRDIDPDMRKILIDWLVEVSDDYKLVPDTLYLTVNLIDRFLSNSYIERQRLQLLGVSCMLIASKYEELSAPGVEEFCFITANTYTRPEVLSMEIQILNFVHFRLSVPTTKTFLRRFIKAAQASYKVPFIELEYLANYLAELTLVEYSFLRFLPSLIAASAVFLARWTLDQTDHPWNPTLQHYTRYEVAELKNTVLAMEDLQLNTSGCTLAATREKYNQPKFKSVAKLTSPKRVTSLFSR

SEQ ID NO: 79388 - protein, 400 aa, Arabidopsis thaliana
  peptide (1)..(400): Ceres Seq. ID no. 12651085
MGRGVSIPPTKPSFKQQKRRAVLKDVSNTSADIIYSELRKGGNIKANRKCLKEPKKAAKEGANSAMDILVDMHTEKSKLAEDLSKIRMAEAQDVSLSNFKDEEITEQQEDGSGVMELLQVVDIDSNVEDPQCCSLYAADIYDNIHVAELQQRPLANYMELVQRDIDPDMRKILIDWLVEVSDDYKLVPDTLYLTVNLIDRFLSNSYIERQRLQLLGVSCMLIASKYEELSAPGVEEFCFITANTYTRPEVLSMEIQILNFVHFRLSVPTTKTFLRRFIKAAQASYKVPFIELEYLANYLAELTLVEYSFLRFLPSLIAASAVFLARWTLDQTDHPWNPTLQHYTRYEVAELKNTVLAMEDLQLNTSGCTLAATREKYNQPKFKSVAKLTSPKRVTSLFSR

SEQ ID NO: 79389 - DNA, 1809 bp, Arabidopsis thaliana
  misc_feature (1)..(1809): Ceres Seq. ID no. 12651086
  misc_feature (1)..(1809): Ortholog of  Ceres SEQ ID NO 13657677 as cited in SEQ ID NO 66119
atgaactctctgttcaccgccttccgccgcaacctcctcttaaaccctaatcctcaccgcaacttctttcttcatagattgttatcatcatctcgccgttcatccccgctcattcccgtcgagcctctcatccaacggatacaatcacccgccgtacccgattctacatgtactccaccgcaacaaaacaccgtctcgaaaaccgatctctctactatatcgaatcttctcgagaacactgatgttgttcccggttcgagtctcgagtcagctttagatgaaaccggaatcgaaccgagtgttgagttggttcacgcgttgttcgatcggttaagttcatcgccgatgttgcttcactcagtgttcaaatgggcggagatgaaacctgggtttacactttctccttcacttttcgattctgttgtcaattctctatgtaaagctcgtgaatttgaaattgcttggtcgttggtttttgatcgagtgagaagcgatgaaggatcgaatttggtttctgcagatacgttcatcgttttgatcagacggtatgctcgtgctggtatggtgcaacaagctatacgagcttttgaattcgctagaagttatgaaccggtttgtaaatcagctacggaacttaggttgcttgaggttttgttagatgcactttgtaaagaaggtcatgttagagaagcttcaatgtatttggagagaataggagggacgatggattcgaattgggttccttctgttcggattttcaacattttattgaatggatggtttcgttcaagaaagctaaagcaggcagagaagttatgggaagagatgaaagcgatgaatgtgaagccgactgttgttacttacggtactcttatcgaagggtattgcaggatgcgtcgtgttcagattgctatggaggttcttgaagaaatgaagatggcagaaatggagattaattttatggtctttaatccgattatcgatggtttaggagaagcggggcggttaagtgaagctctaggtatgatggaaaggttcttcgtttgtgaatcaggtcctactatagtgacttataattcactagtgaagaatttctgcaaggctggagatcttcctggtgctagcaaaatactcaagatgatgatgacacgaggtgttgatcctaccacgactacatacaaccatttcttcaagtatttctcaaagcataacaaaacggaagagggcatgaacttatatttcaagttgattgaagctggacacagtccagaccggttaacgtatcatttgatcttgaaaatgctgtgtgaggatgggaagctgagcttggcgatgcaagtgaacaaggagatgaaaaacagaggaatcgatcctgacttattaacaaccacaatgcttatacatttgctctgcagactcgagatgttagaagaagcctttgaagagtttgacaacgcagtgagacgagggattattccacagtacatcacatttaagatgatcgataacgggttgagatcgaaagggatgagcgatatggcgaagagactatccagcctaatgtcgtctcttcctcactcgaagaagctgccaaatacatacagagaagcagtagatgcaccgcctgataaagatagaaggaagtctattttgcatagagcagaagccatgtctgatgtgttgaaaggttgcaggaacccgagaaaactcgtgaagatgcgtggatcgcacaaaaaagctgttggtgaagacataaacctgatagatgatatcaatgaacgaaatggagatgcaggggattttgagtga

SEQ ID NO: 79390 - protein, 602 aa, Arabidopsis thaliana
  peptide (1)..(602): Ceres Seq. ID no. 12651087
MNSLFTAFRRNLLLNPNPHRNFFLHRLLSSSRRSSPLIPVEPLIQRIQSPAVPDSTCTPPQQNTVSKTDLSTISNLLENTDVVPGSSLESALDETGIEPSVELVHALFDRLSSSPMLLHSVFKWAEMKPGFTLSPSLFDSVVNSLCKAREFEIAWSLVFDRVRSDEGSNLVSADTFIVLIRRYARAGMVQQAIRAFEFARSYEPVCKSATELRLLEVLLDALCKEGHVREASMYLERIGGTMDSNWVPSVRIFNILLNGWFRSRKLKQAEKLWEEMKAMNVKPTVVTYGTLIEGYCRMRRVQIAMEVLEEMKMAEMEINFMVFNPIIDGLGEAGRLSEALGMMERFFVCESGPTIVTYNSLVKNFCKAGDLPGASKILKMMMTRGVDPTTTTYNHFFKYFSKHNKTEEGMNLYFKLIEAGHSPDRLTYHLILKMLCEDGKLSLAMQVNKEMKNRGIDPDLLTTTMLIHLLCRLEMLEEAFEEFDNAVRRGIIPQYITFKMIDNGLRSKGMSDMAKRLSSLMSSLPHSKKLPNTYREAVDAPPDKDRRKSILHRAEAMSDVLKGCRNPRKLVKMRGSHKKAVGEDINLIDDINERNGDAGDFE

SEQ ID NO: 79391 - protein, 487 aa, Arabidopsis thaliana
  peptide (1)..(487): Ceres Seq. ID no. 12651088
MLLHSVFKWAEMKPGFTLSPSLFDSVVNSLCKAREFEIAWSLVFDRVRSDEGSNLVSADTFIVLIRRYARAGMVQQAIRAFEFARSYEPVCKSATELRLLEVLLDALCKEGHVREASMYLERIGGTMDSNWVPSVRIFNILLNGWFRSRKLKQAEKLWEEMKAMNVKPTVVTYGTLIEGYCRMRRVQIAMEVLEEMKMAEMEINFMVFNPIIDGLGEAGRLSEALGMMERFFVCESGPTIVTYNSLVKNFCKAGDLPGASKILKMMMTRGVDPTTTTYNHFFKYFSKHNKTEEGMNLYFKLIEAGHSPDRLTYHLILKMLCEDGKLSLAMQVNKEMKNRGIDPDLLTTTMLIHLLCRLEMLEEAFEEFDNAVRRGIIPQYITFKMIDNGLRSKGMSDMAKRLSSLMSSLPHSKKLPNTYREAVDAPPDKDRRKSILHRAEAMSDVLKGCRNPRKLVKMRGSHKKAVGEDINLIDDINERNGDAGDFE

SEQ ID NO: 79392 - protein, 476 aa, Arabidopsis thaliana
  peptide (1)..(476): Ceres Seq. ID no. 12651089
MKPGFTLSPSLFDSVVNSLCKAREFEIAWSLVFDRVRSDEGSNLVSADTFIVLIRRYARAGMVQQAIRAFEFARSYEPVCKSATELRLLEVLLDALCKEGHVREASMYLERIGGTMDSNWVPSVRIFNILLNGWFRSRKLKQAEKLWEEMKAMNVKPTVVTYGTLIEGYCRMRRVQIAMEVLEEMKMAEMEINFMVFNPIIDGLGEAGRLSEALGMMERFFVCESGPTIVTYNSLVKNFCKAGDLPGASKILKMMMTRGVDPTTTTYNHFFKYFSKHNKTEEGMNLYFKLIEAGHSPDRLTYHLILKMLCEDGKLSLAMQVNKEMKNRGIDPDLLTTTMLIHLLCRLEMLEEAFEEFDNAVRRGIIPQYITFKMIDNGLRSKGMSDMAKRLSSLMSSLPHSKKLPNTYREAVDAPPDKDRRKSILHRAEAMSDVLKGCRNPRKLVKMRGSHKKAVGEDINLIDDINERNGDAGDFE

SEQ ID NO: 79393 - DNA, 711 bp, Arabidopsis thaliana
  misc_feature (1)..(711): Ceres Seq. ID no. 12651114
  misc_feature (1)..(711): Ortholog of  Ceres SEQ ID NO 14304408 as cited in SEQ ID NO 58051
  misc_feature (1)..(711): Ortholog of  Ceres SEQ ID NO 14314759 as cited in SEQ ID NO 59915
  misc_feature (1)..(711): Ortholog of  Ceres SEQ ID NO 13661769 as cited in SEQ ID NO 61435
  misc_feature (1)..(711): Ortholog of  Ceres SEQ ID NO 13600585 as cited in SEQ ID NO 0
atggcagaggaatactacagcctccgctcggagagagtaactcagcttcttgtccctaactcggagtctgactcagtgagtgacaaaagcaaagctgagcaaagcgagaagaagactaaacgtgggagagactccggtaaacaccctgtttatcgcggagtaaggatgaggaactggggaaaatgggtgtcggagattcgtgagccgaggaagaaatcacgtatttggctgggaactttcccgacgccggagatggcggcgcgtgcacacgacgtggcggctctgagcattaaaggaacggccgctatactaaacttccctgaactcgctgactcattccctcgacccgtttcattaagccctcgagacattcagacagcagctcttaaagcagctcacatggaaccgacgacgtcgttttcatcttccacgtcttcgtcgtcgtctttgtcttctacgtcttcgctcgagtctcttgtgttggtgatggacctctcgaggactgagtcggaggagctcggtgagattgtggagcttccaagtctcggggcgagttacgacgtcgactcggctaaccttgggaacgagtttgtcttctatgactcagttgactactgtttatatccgccgccgtggggacagtcgtccgaagataactatggtcacggaattagccctaattttggccatggcttgtcatgggatctctaa

SEQ ID NO: 79394 - protein, 236 aa, Arabidopsis thaliana
  peptide (1)..(236): Ceres Seq. ID no. 12651115
MAEEYYSLRSERVTQLLVPNSESDSVSDKSKAEQSEKKTKRGRDSGKHPVYRGVRMRNWGKWVSEIREPRKKSRIWLGTFPTPEMAARAHDVAALSIKGTAAILNFPELADSFPRPVSLSPRDIQTAALKAAHMEPTTSFSSSTSSSSSLSSTSSLESLVLVMDLSRTESEELGEIVELPSLGASYDVDSANLGNEFVFYDSVDYCLYPPPWGQSSEDNYGHGISPNFGHGLSWDL

SEQ ID NO: 79395 - protein, 181 aa, Arabidopsis thaliana
  peptide (1)..(181): Ceres Seq. ID no. 12651116
MRNWGKWVSEIREPRKKSRIWLGTFPTPEMAARAHDVAALSIKGTAAILNFPELADSFPRPVSLSPRDIQTAALKAAHMEPTTSFSSSTSSSSSLSSTSSLESLVLVMDLSRTESEELGEIVELPSLGASYDVDSANLGNEFVFYDSVDYCLYPPPWGQSSEDNYGHGISPNFGHGLSWDL

SEQ ID NO: 79396 - protein, 152 aa, Arabidopsis thaliana
  peptide (1)..(152): Ceres Seq. ID no. 12651117
MAARAHDVAALSIKGTAAILNFPELADSFPRPVSLSPRDIQTAALKAAHMEPTTSFSSSTSSSSSLSSTSSLESLVLVMDLSRTESEELGEIVELPSLGASYDVDSANLGNEFVFYDSVDYCLYPPPWGQSSEDNYGHGISPNFGHGLSWDL

SEQ ID NO: 79397 - DNA, 762 bp, Arabidopsis thaliana
  misc_feature (1)..(762): Ceres Seq. ID no. 12651125
  misc_feature (1)..(762): Ortholog of  Ceres SEQ ID NO 12608505 as cited in SEQ ID NO 58255
atggagaagaaacgcgaaggagtaatcgaaggaatgagtcggatcgtatcagatccttactacttcctccatttcatggcctttttctcttacctcccgattcgtagctccgccgcaccgtacacttctcatcgactcttcgacagagaaatccaagcatttctagcgtttcttatgttttccgccattaagatggtgagggaggaaacatgggaagctttcgttgctgatagtttactctatgctaagatctttcttattgcggtttcgttgattatggattatcgagtggcggtctggtttagtatcatattttcagttatatatctattagctcaacaaccagcatttagtaaactaggaactgcgaagaagctaacacctatgcagttggaggatttgttatcagatggtaacacaacaaaatactggttgatagaattctttgcatgtagttcatccaagtgtgttcgttctagccgttgctttcctgagctctccatcacgtactcgaataatcttttgtcttttggaactgtcgatcttggacttttccctaatactgcggcaaagtttggaatatctcttgctggtggaatgtctcagcttcccacatacatattgtttgaaaagggtgtcgaagtttctcggttcccagacttttatgttgacgctgcaccttctttacccataaccaagaaacttttgtgtcaacattttgagcttgatcggcttctgctcgactatataaacggaacatag

SEQ ID NO: 79398 - protein, 253 aa, Arabidopsis thaliana
  peptide (1)..(253): Ceres Seq. ID no. 12651126
MEKKREGVIEGMSRIVSDPYYFLHFMAFFSYLPIRSSAAPYTSHRLFDREIQAFLAFLMFSAIKMVREETWEAFVADSLLYAKIFLIAVSLIMDYRVAVWFSIIFSVIYLLAQQPAFSKLGTAKKLTPMQLEDLLSDGNTTKYWLIEFFACSSSKCVRSSRCFPELSITYSNNLLSFGTVDLGLFPNTAAKFGISLAGGMSQLPTYILFEKGVEVSRFPDFYVDAAPSLPITKKLLCQHFELDRLLLDYINGT

SEQ ID NO: 79399 - protein, 242 aa, Arabidopsis thaliana
  peptide (1)..(242): Ceres Seq. ID no. 12651127
MSRIVSDPYYFLHFMAFFSYLPIRSSAAPYTSHRLFDREIQAFLAFLMFSAIKMVREETWEAFVADSLLYAKIFLIAVSLIMDYRVAVWFSIIFSVIYLLAQQPAFSKLGTAKKLTPMQLEDLLSDGNTTKYWLIEFFACSSSKCVRSSRCFPELSITYSNNLLSFGTVDLGLFPNTAAKFGISLAGGMSQLPTYILFEKGVEVSRFPDFYVDAAPSLPITKKLLCQHFELDRLLLDYINGT

SEQ ID NO: 79400 - protein, 228 aa, Arabidopsis thaliana
  peptide (1)..(228): Ceres Seq. ID no. 12651128
MAFFSYLPIRSSAAPYTSHRLFDREIQAFLAFLMFSAIKMVREETWEAFVADSLLYAKIFLIAVSLIMDYRVAVWFSIIFSVIYLLAQQPAFSKLGTAKKLTPMQLEDLLSDGNTTKYWLIEFFACSSSKCVRSSRCFPELSITYSNNLLSFGTVDLGLFPNTAAKFGISLAGGMSQLPTYILFEKGVEVSRFPDFYVDAAPSLPITKKLLCQHFELDRLLLDYINGT

SEQ ID NO: 79401 - DNA, 1015 bp, Arabidopsis thaliana
  misc_feature (1)..(1015): Ceres Seq. ID no. 12651137
  misc_feature (1)..(1015): Ortholog of  Ceres SEQ ID NO 13582893 as cited in SEQ ID NO 62081
ggttagagactcgtttggttatcacaactccacgacgagaggaaaaaaaaaactcagagagacaaatctaaatggcgatgattacgcgcaacaccgccacgcgcctccctctcctcctccaatctcaacgcgccgtcgccgctgcctcggtctctcacctccacacatcccttcccgctctctctccctccacatcaccgacttcctacaccagacctggtcctccttcgacctcccctcctcctcctggtctctctaaagcggccgaatttgtgatctccaaggtcgatgatctcatgaactgggctcgtaccggatcgatctggcctatgacctttggtctcgcttgctgcgccgtcgaaatgatgcataccggtgctgctcgctacgatctcgatcgattcggtatcatcttcaggcctagtcctcgccagtctgattgtatgattgtcgccggtactcttaccaataagatggctccggctcttcgcaaggtttatgaccagatgcctgagccaaggtgggtgatttcaatgggaagttgtgccaatggaggtggatactatcactactcctactcggtggttcgaggatgtgacagaattgtcccagtcgacatatacgtcccggggtgcccaccaaccgctgaggctttgctctatggactactccagcttcagaagaaaatcaacaggcgcaaggatttcttgcattggtggaacaagtgagcttcgaacccgtcctccaatcgtgaaagggacttttttcagacatttttaccaaagtttggggataataaatcgtggacgtttcattgcatatttctttgtggtggagatgccatgtaaaggagtgtgtttctaagtttgttgtggaaacttaataaacttaagatgtttgttgtctgagttcttttatgggctcttttattatatatctctctctaccagttttcagctacatgctgactattgctaaatacctacatatatttatacatacgagtgtgttttgt

SEQ ID NO: 79402 - protein, 218 aa, Arabidopsis thaliana; identical to SEQ ID NO: 29128
  peptide (1)..(218): Ceres Seq. ID no. 12651138

SEQ ID NO: 79403 - protein, 216 aa, Arabidopsis thaliana; identical to SEQ ID NO: 29129
  peptide (1)..(216): Ceres Seq. ID no. 12651139

SEQ ID NO: 79404 - protein, 143 aa, Arabidopsis thaliana; identical to SEQ ID NO: 29130
  peptide (1)..(143): Ceres Seq. ID no. 12651140

SEQ ID NO: 79405 - DNA, 2971 bp, Arabidopsis thaliana
  misc_feature (1)..(2971): Ceres Seq. ID no. 12651160
  misc_feature (1)..(2971): Ortholog of  Ceres SEQ ID NO 13593889 as cited in SEQ ID NO 53305
  misc_feature (1)..(2971): Ortholog of  Ceres SEQ ID NO 13581959 as cited in SEQ ID NO 56156
agagagagaaagaaatagagagagagatcagttcgtcgttgacgatcgatgtcgaagatgaagcatcttctacggaagctccacatcggcggaagtagtggcgtcggcggcggatttgctgaccatcacaggttagacgactcgactagacctatgatcgatcctagccctattcttagtactagccctagccctgcatcgacttcttccgtctcttcctctggttttggtaacgcttccacgacaatgccgagactggatacatttgagcctgttggccgtgatctgacggctgttgatggtgttgatttcaatttgatggaggaggagtaccaagtccagttagctatggcgatcagcgtctctgatcctgatccgagagagaatgcagatacagctcagcttgatgccgctaagaggattagccttggggtttctgctccggtcaccgacgctgattccgccgttgactttctctcgcttcgttattggggacataaggtcattaattatgaccagaaagtcagggatggattttacgatgtgtatgggattacatctaattctctttcacaggggaagatgccacttcttgttgatcttcaagcgatctctatttcagataatgttgattatgaggtcattctagttaacagattgattgatcctgaactacaagagctagagaggagagtattcgctttggcttcggaatgtccagactttgctcctggtcaggtgtcaagtgatttgactcagaaaattgcaaatatagttgtagagcaaatgggtggccccgttgaaaatgctgatgaagcattgagaaggtggatgcttcggagctatgaactaagaaattctttgaacactactattcttccacttggtcgagttaatgttggtcttgcacgacacagggctttgcttttcaaggtccttgctgataggattaatctcccatgtatgctggtaaaaggcagttactacactggaactgatgatggggctgtgaacttgattaaactagatgacaaaagtgaatacattattgatttaatgggtgctccgggtgctctgatcccttctgaggttccaagcagttttcttccagtttcttgcacagatacaagagtatttcctgagaatttggactctttgcaacattcatcccccgtacttgagaaagaaattgaaacgccagcattttcagtttcgaaggaagcagattctagatctggtatggtagcaaacttcttcactggaaaccaggaagaaaacagtgacagatgtgctgttgaaaaacatcaaacagagagatttgagcatgattttgggaagttaatgcactcacagcagatatctggtgaaaatatgccaccattttctgggaaaccgacttgtgcacagaaagttaaagttaaaaatgtctcaaagtatgtcataagtgcagcaaagaaccctgaatttgcgcagaaattacatgctgtgttgttagaaagtggtgcatcacctcccccagatttgtttatggatattaacccacataacttgagggggaagaatttgcttcaagagctccgccaagaaagtagcaattctatggtttctggtattccatgctacccagaaaaggtagctgaacaactgagagaatctgaaaggaaccccacagccgagagttaccaacaatcagtggaggtcgatttgtcaatgaagaggaactttgatttggataatactggtaaagcttcttcatccgaaaatatggaggttggcactgctgatggggagtctgctgtttgtgatagtcatgaccaagggattaatccattgctcggagaagctgcaaagtgggaaattatgtgggaagatcttcagattggcgagcgcattggtattggttcatatggagaagtttatcgtgcagagtggaatggaactgaagtggctgttaagaagtttctggaccaagatttctctggtgatgcattgacacagttcaaatctgaaattgaaataatgttgaggttacggcatccaaacgttgttcttttcatgggagcagttactcgtcccccaaatttctccatcctgacagagttcctacccaggggaagtttgtatagattactccatcggccgaaccatcagcttgatgagaagaggagaatgcggatggctcttgatgtggcaaagggaatgaactacttacacaccagccacccgactgttgtacatagggatttaaaatctccaaaccttcttgttgataaaaattgggttgtgaaggtttgtgattttggattgtcccgcatgaaacaccacacatatttgtcctcgaaatcaactgcaggaacgcctgagtggatggctccagaagtgttgaggaatgaaccggctaatgagaaatgtgacgtgtacagctttggtgtcatattgtgggaattagctacttcacgcgtcccctggaaaggtttgaacccgatgcaagtcgttggagctgtgggattccagaatcgacgccttgaaatcccagatgatatcgatctaactgtggcacagataatccgtgaatgttggcaaacggaaccgcatttacggccatcgtttacacagctgatgcaaagtttgaagcggcttcagggtctaaacataagcaacagagcgaatacgagtgaaagtttgatgtaagatacgttagacagaagatgttgccttacctggtctggttcaaagagccaacgggtggggattgccattcttctttgcttttttttgttctttttgttattacggtcagacgagaggagacaaacaaaaaaagattgatgggttggggaaaagcttgtggagttcaatcgaagtgggagctcaacaagaaaagaaaaagccctattcttaaccctttgtaactattattattatcatcattgttgttgctacttgtaacgataaaattaggtgaatgaac

SEQ ID NO: 79406 - protein, 880 aa, Arabidopsis thaliana
  peptide (1)..(880): Ceres Seq. ID no. 12651161
MSKMKHLLRKLHIGGSSGVGGGFADHHRLDDSTRPMIDPSPILSTSPSPASTSSVSSSGFGNASTTMPRLDTFEPVGRDLTAVDGVDFNLMEEEYQVQLAMAISVSDPDPRENADTAQLDAAKRISLGVSAPVTDADSAVDFLSLRYWGHKVINYDQKVRDGFYDVYGITSNSLSQGKMPLLVDLQAISISDNVDYEVILVNRLIDPELQELERRVFALASECPDFAPGQVSSDLTQKIANIVVEQMGGPVENADEALRRWMLRSYELRNSLNTTILPLGRVNVGLARHRALLFKVLADRINLPCMLVKGSYYTGTDDGAVNLIKLDDKSEYIIDLMGAPGALIPSEVPSSFLPVSCTDTRVFPENLDSLQHSSPVLEKEIETPAFSVSKEADSRSGMVANFFTGNQEENSDRCAVEKHQTERFEHDFGKLMHSQQISGENMPPFSGKPTCAQKVKVKNVSKYVISAAKNPEFAQKLHAVLLESGASPPPDLFMDINPHNLRGKNLLQELRQESSNSMVSGIPCYPEKVAEQLRESERNPTAESYQQSVEVDLSMKRNFDLDNTGKASSSENMEVGTADGESAVCDSHDQGINPLLGEAAKWEIMWEDLQIGERIGIGSYGEVYRAEWNGTEVAVKKFLDQDFSGDALTQFKSEIEIMLRLRHPNVVLFMGAVTRPPNFSILTEFLPRGSLYRLLHRPNHQLDEKRRMRMALDVAKGMNYLHTSHPTVVHRDLKSPNLLVDKNWVVKVCDFGLSRMKHHTYLSSKSTAGTPEWMAPEVLRNEPANEKCDVYSFGVILWELATSRVPWKGLNPMQVVGAVGFQNRRLEIPDDIDLTVAQIIRECWQTEPHLRPSFTQLMQSLKRLQGLNISNRANTSESLM

SEQ ID NO: 79407 - protein, 877 aa, Arabidopsis thaliana
  peptide (1)..(877): Ceres Seq. ID no. 12651162
MKHLLRKLHIGGSSGVGGGFADHHRLDDSTRPMIDPSPILSTSPSPASTSSVSSSGFGNASTTMPRLDTFEPVGRDLTAVDGVDFNLMEEEYQVQLAMAISVSDPDPRENADTAQLDAAKRISLGVSAPVTDADSAVDFLSLRYWGHKVINYDQKVRDGFYDVYGITSNSLSQGKMPLLVDLQAISISDNVDYEVILVNRLIDPELQELERRVFALASECPDFAPGQVSSDLTQKIANIVVEQMGGPVENADEALRRWMLRSYELRNSLNTTILPLGRVNVGLARHRALLFKVLADRINLPCMLVKGSYYTGTDDGAVNLIKLDDKSEYIIDLMGAPGALIPSEVPSSFLPVSCTDTRVFPENLDSLQHSSPVLEKEIETPAFSVSKEADSRSGMVANFFTGNQEENSDRCAVEKHQTERFEHDFGKLMHSQQISGENMPPFSGKPTCAQKVKVKNVSKYVISAAKNPEFAQKLHAVLLESGASPPPDLFMDINPHNLRGKNLLQELRQESSNSMVSGIPCYPEKVAEQLRESERNPTAESYQQSVEVDLSMKRNFDLDNTGKASSSENMEVGTADGESAVCDSHDQGINPLLGEAAKWEIMWEDLQIGERIGIGSYGEVYRAEWNGTEVAVKKFLDQDFSGDALTQFKSEIEIMLRLRHPNVVLFMGAVTRPPNFSILTEFLPRGSLYRLLHRPNHQLDEKRRMRMALDVAKGMNYLHTSHPTVVHRDLKSPNLLVDKNWVVKVCDFGLSRMKHHTYLSSKSTAGTPEWMAPEVLRNEPANEKCDVYSFGVILWELATSRVPWKGLNPMQVVGAVGFQNRRLEIPDDIDLTVAQIIRECWQTEPHLRPSFTQLMQSLKRLQGLNISNRANTSESLM

SEQ ID NO: 79408 - protein, 845 aa, Arabidopsis thaliana
  peptide (1)..(845): Ceres Seq. ID no. 12651163
MIDPSPILSTSPSPASTSSVSSSGFGNASTTMPRLDTFEPVGRDLTAVDGVDFNLMEEEYQVQLAMAISVSDPDPRENADTAQLDAAKRISLGVSAPVTDADSAVDFLSLRYWGHKVINYDQKVRDGFYDVYGITSNSLSQGKMPLLVDLQAISISDNVDYEVILVNRLIDPELQELERRVFALASECPDFAPGQVSSDLTQKIANIVVEQMGGPVENADEALRRWMLRSYELRNSLNTTILPLGRVNVGLARHRALLFKVLADRINLPCMLVKGSYYTGTDDGAVNLIKLDDKSEYIIDLMGAPGALIPSEVPSSFLPVSCTDTRVFPENLDSLQHSSPVLEKEIETPAFSVSKEADSRSGMVANFFTGNQEENSDRCAVEKHQTERFEHDFGKLMHSQQISGENMPPFSGKPTCAQKVKVKNVSKYVISAAKNPEFAQKLHAVLLESGASPPPDLFMDINPHNLRGKNLLQELRQESSNSMVSGIPCYPEKVAEQLRESERNPTAESYQQSVEVDLSMKRNFDLDNTGKASSSENMEVGTADGESAVCDSHDQGINPLLGEAAKWEIMWEDLQIGERIGIGSYGEVYRAEWNGTEVAVKKFLDQDFSGDALTQFKSEIEIMLRLRHPNVVLFMGAVTRPPNFSILTEFLPRGSLYRLLHRPNHQLDEKRRMRMALDVAKGMNYLHTSHPTVVHRDLKSPNLLVDKNWVVKVCDFGLSRMKHHTYLSSKSTAGTPEWMAPEVLRNEPANEKCDVYSFGVILWELATSRVPWKGLNPMQVVGAVGFQNRRLEIPDDIDLTVAQIIRECWQTEPHLRPSFTQLMQSLKRLQGLNISNRANTSESLM

SEQ ID NO: 79409 - DNA, 789 bp, Arabidopsis thaliana
  misc_feature (1)..(789): Ceres Seq. ID no. 12651164
  misc_feature (1)..(789): Ortholog of  Ceres SEQ ID NO 12625265 as cited in SEQ ID NO 62349
  misc_feature (1)..(789): Ortholog of  Ceres SEQ ID NO 13596555 as cited in SEQ ID NO 62840
atggtgtggttgacgaatcaacagatagggagatggaaaaggaaacgaattttggttgtgggatcgttcctctgttggtcaatcatcatgttcatcactcccaaagttcctctcgattcatttcgccatcatatcttcgccgataaacgcaatttcatgggagtgcctaatacattgaatgtgatgaccaactttccctttcttatcgttggagttcttggttttgttctttgcattggaggaagcttcttcaacataagtttaaatggtgagatctggggatggacactgttctacgcaggcattgcaagcttggcttttggttctgctttttatcatctcaaacctgatgacaacagaatcgtctgggacactttgcctatattgattgcgtattcgtcgcttttctctagttttttggttgagagagcgggggagaaagtgggacttagttgcctcatcttgcttctatttatatcatgtctcagtgttgcttacgccagagtgtttaatgatctccggttatgcatgacgttccagttgataccgtgtctggtgattcccgtcatggcggttttgttacctcccaaatatacacactctagattctggctctgggcaacagcggcgtacactattgccaagattgaaggacttgcagacaacaaaatatacaatgcaaatcgatatatcatcagtgggcattcactggagcatttgtgttctgccgtggctacgcttttacttaccattatgcttttgtatagaagcattcggtttaataggtaa

SEQ ID NO: 79410 - protein, 262 aa, Arabidopsis thaliana
  peptide (1)..(262): Ceres Seq. ID no. 12651165
MVWLTNQQIGRWKRKRILVVGSFLCWSIIMFITPKVPLDSFRHHIFADKRNFMGVPNTLNVMTNFPFLIVGVLGFVLCIGGSFFNISLNGEIWGWTLFYAGIASLAFGSAFYHLKPDDNRIVWDTLPILIAYSSLFSSFLVERAGEKVGLSCLILLLFISCLSVAYARVFNDLRLCMTFQLIPCLVIPVMAVLLPPKYTHSRFWLWATAAYTIAKIEGLADNKIYNANRYIISGHSLEHLCSAVATLLLTIMLLYRSIRFNR

SEQ ID NO: 79411 - protein, 233 aa, Arabidopsis thaliana
  peptide (1)..(233): Ceres Seq. ID no. 12651166
MFITPKVPLDSFRHHIFADKRNFMGVPNTLNVMTNFPFLIVGVLGFVLCIGGSFFNISLNGEIWGWTLFYAGIASLAFGSAFYHLKPDDNRIVWDTLPILIAYSSLFSSFLVERAGEKVGLSCLILLLFISCLSVAYARVFNDLRLCMTFQLIPCLVIPVMAVLLPPKYTHSRFWLWATAAYTIAKIEGLADNKIYNANRYIISGHSLEHLCSAVATLLLTIMLLYRSIRFNR

SEQ ID NO: 79412 - protein, 210 aa, Arabidopsis thaliana
  peptide (1)..(210): Ceres Seq. ID no. 12651167
MGVPNTLNVMTNFPFLIVGVLGFVLCIGGSFFNISLNGEIWGWTLFYAGIASLAFGSAFYHLKPDDNRIVWDTLPILIAYSSLFSSFLVERAGEKVGLSCLILLLFISCLSVAYARVFNDLRLCMTFQLIPCLVIPVMAVLLPPKYTHSRFWLWATAAYTIAKIEGLADNKIYNANRYIISGHSLEHLCSAVATLLLTIMLLYRSIRFNR

SEQ ID NO: 79413 - DNA, 1916 bp, Arabidopsis thaliana
  misc_feature (1)..(1916): Ceres Seq. ID no. 12651168
  misc_feature (1)..(1916): Ortholog of  Ceres SEQ ID NO 14313636 as cited in SEQ ID NO 64205
atttgatcttggcaagatctcgagagcatttataaagaaattaaagcaacacatacacacatcaatttcgtaatcgttgcagagtaagaccgatcatcgatggctgatgtaatggaacagaatcttcttcaaaccgctgtgcttaaccggacgtccttccatttccaacctcagagaaattggctcaacgatccaaacgcgccaatgtattacaaaggattctaccatttgttctaccagaataaccctttggctcccgaattcagtaggacaagaatcatatggggacactctgtttcacaagacatggtcaattggatccagctcgaaccagcccttgtcccttctgagtcctttgacatcaacagctgctggtcaggatccgccacgatcctccctgatggcagacctgtaattttgtacactggactcgacgtcaacaacaaacagcaagtcacagttgttgccgaaccaaaggacgtttctgaccctttgcttcgtgagtgggttaagccaaagtacaatcctgtgatggttccgccaagtaatgtcccttttaattgtttccgtgatcccacggaggcgtggaaagggcaagatgggaaatggagagtgctcataggagctaaggagaaagatactgagaaaggaatggcgattttgtaccgaagcgatgattttgtccagtggacaaagtatccggtgcctttacttgagtcagaaggaaccggaatgtgggaatgccctgattttttcccggtttctatcactggtaaagaaggtgttgacacttcggtaaacaatgctagtgtgaggcatgtcttgaaggcgagttttggaggcaatgattgctatgtcattggtaaatactcttctgagactgaagacttttcagcggattatgagttcactaacactagtgcagatttgagatatgatcatggaacgttttatgcctcaaaggcgttcttcgatagtgttaaaaataggaggatcaactggggatgggtcatagagactgatagcaaagaagatgattttaagaaaggatgggctggccttatgactcttcccagggaaatttggatggacacaagtggaaagaagctgatgcaatggccaattgaagaaatcaacaatctccggaccaaaagtgttagccttgatgattgctatgaattcaaaaccggctctacctttgaaatctcaggcatcactgctgcccaagcagatgtagaagtgacttttaatctgcctttcctggaaaataatcccgagatacttgatgctgaccaagttgatgatgcgactctgtttgatcgtgatagctcggttggatgtgtttacgggccttttggattgctagcattggcttccagtgatttatcagaacaaaccgcaatcttctttaaagttattcgtcgcggtaacggatatgcagttgtaatgtgcagcagcgagaagaggtcttcgttgagagacaacataaaaaaatcttcgcatggagcattcctagatattgatccaaggcatgagaagatctcattaagatgtttgatcgatcactcgattatagagagctacggagtaggaggaaaaactgtgataacatctagagtttatccaaaattggcaattggtgaagccgctaagctttatgtcttcaatgatggagaaaatggtgtgatcatgacgtccctggaagcttggagcatgagaaatgcccaaatcaattcaaacccaacttattagttaatcatataatatgataatctttggactgccctaaaacaaattcttatcttgtcatgtattgtggaatgtttaagatttatgcgtcgtttgtattcaagttattggtgtggtttatgctgtcgttccttgggtgaaataatgtaagtcttctcatgtttctt

SEQ ID NO: 79414 - protein, 550 aa, Arabidopsis thaliana
  peptide (1)..(550): Ceres Seq. ID no. 12651169
MADVMEQNLLQTAVLNRTSFHFQPQRNWLNDPNAPMYYKGFYHLFYQNNPLAPEFSRTRIIWGHSVSQDMVNWIQLEPALVPSESFDINSCWSGSATILPDGRPVILYTGLDVNNKQQVTVVAEPKDVSDPLLREWVKPKYNPVMVPPSNVPFNCFRDPTEAWKGQDGKWRVLIGAKEKDTEKGMAILYRSDDFVQWTKYPVPLLESEGTGMWECPDFFPVSITGKEGVDTSVNNASVRHVLKASFGGNDCYVIGKYSSETEDFSADYEFTNTSADLRYDHGTFYASKAFFDSVKNRRINWGWVIETDSKEDDFKKGWAGLMTLPREIWMDTSGKKLMQWPIEEINNLRTKSVSLDDCYEFKTGSTFEISGITAAQADVEVTFNLPFLENNPEILDADQVDDATLFDRDSSVGCVYGPFGLLALASSDLSEQTAIFFKVIRRGNGYAVVMCSSEKRSSLRDNIKKSSHGAFLDIDPRHEKISLRCLIDHSIIESYGVGGKTVITSRVYPKLAIGEAAKLYVFNDGENGVIMTSLEAWSMRNAQINSNPTY

SEQ ID NO: 79415 - protein, 546 aa, Arabidopsis thaliana
  peptide (1)..(546): Ceres Seq. ID no. 12651170
MEQNLLQTAVLNRTSFHFQPQRNWLNDPNAPMYYKGFYHLFYQNNPLAPEFSRTRIIWGHSVSQDMVNWIQLEPALVPSESFDINSCWSGSATILPDGRPVILYTGLDVNNKQQVTVVAEPKDVSDPLLREWVKPKYNPVMVPPSNVPFNCFRDPTEAWKGQDGKWRVLIGAKEKDTEKGMAILYRSDDFVQWTKYPVPLLESEGTGMWECPDFFPVSITGKEGVDTSVNNASVRHVLKASFGGNDCYVIGKYSSETEDFSADYEFTNTSADLRYDHGTFYASKAFFDSVKNRRINWGWVIETDSKEDDFKKGWAGLMTLPREIWMDTSGKKLMQWPIEEINNLRTKSVSLDDCYEFKTGSTFEISGITAAQADVEVTFNLPFLENNPEILDADQVDDATLFDRDSSVGCVYGPFGLLALASSDLSEQTAIFFKVIRRGNGYAVVMCSSEKRSSLRDNIKKSSHGAFLDIDPRHEKISLRCLIDHSIIESYGVGGKTVITSRVYPKLAIGEAAKLYVFNDGENGVIMTSLEAWSMRNAQINSNPTY

SEQ ID NO: 79416 - protein, 515 aa, Arabidopsis thaliana
  peptide (1)..(515): Ceres Seq. ID no. 12651171
MYYKGFYHLFYQNNPLAPEFSRTRIIWGHSVSQDMVNWIQLEPALVPSESFDINSCWSGSATILPDGRPVILYTGLDVNNKQQVTVVAEPKDVSDPLLREWVKPKYNPVMVPPSNVPFNCFRDPTEAWKGQDGKWRVLIGAKEKDTEKGMAILYRSDDFVQWTKYPVPLLESEGTGMWECPDFFPVSITGKEGVDTSVNNASVRHVLKASFGGNDCYVIGKYSSETEDFSADYEFTNTSADLRYDHGTFYASKAFFDSVKNRRINWGWVIETDSKEDDFKKGWAGLMTLPREIWMDTSGKKLMQWPIEEINNLRTKSVSLDDCYEFKTGSTFEISGITAAQADVEVTFNLPFLENNPEILDADQVDDATLFDRDSSVGCVYGPFGLLALASSDLSEQTAIFFKVIRRGNGYAVVMCSSEKRSSLRDNIKKSSHGAFLDIDPRHEKISLRCLIDHSIIESYGVGGKTVITSRVYPKLAIGEAAKLYVFNDGENGVIMTSLEAWSMRNAQINSNPTY

SEQ ID NO: 79417 - DNA, 1839 bp, Arabidopsis thaliana
  misc_feature (1)..(1839): Ceres Seq. ID no. 12651234
  misc_feature (1)..(1839): Ortholog of  Ceres SEQ ID NO 15169603 as cited in SEQ ID NO 65772
  misc_feature (1)..(1839): Ortholog of  Ceres SEQ ID NO 14303087 as cited in SEQ ID NO 66569
atgaatcttagtttttcttcttataatctcacggctactgccgtgtcctcttcttgtttcggaagcgacgaacttctggtttcaaggaggctgttttccctgagagatgttcagattcttgagctctttattgcctttttcgtgtttgcgacaatacattccttgcgccagaagaaacaccaagggatgcccgtttggccgttggttggcatgcttccttcgttgatatccgcggtacgaagcaacatatacgaatggctgtctgatgttcttatcagccaaaacgggacattccggtttagaggtccttggtttagcaccctcaactgcgttgttacctgcgacccaagaaacgttgagcatcttctcaagacccgtttctctatctacccaaagggttcttacttccgtgagaccatgcaagatctactcggagacgggattttcaacaccgatgacggaacgtggcaacgacaaaggaaagcagcaagtgtcgaattccattcggctaaattcagacaattaaccagtcaatcattgcacgaactcgtgcataatcgacttttgccggttctagaaacttccggaaagattgatcttcaggacattttgttaagactaacgttcgacaatgtatgcatgattgctttcggggtcgatccaggctgtcttagtccaaaactacccgaaattccttttgcaaaagccttcgaggacgcaacagaagcaacagttgtgagatttgtgatgcctaaattcgtgtggaagctcatgaggtctcttaatttaggaacggagaagaagctaaaggaatcaataaatggtgtggatgatttcgctgaagaagtaatccggacgaggaagaaagagatgtctctagagactgaaatcgcgaagagacctgatctcttgactatttttatgggtctacgagacgaaaatggacagaaattttcagataagttcttgcgtgatatttgtgtgaacttcatacttgctgggagagacacttcctctgtggctctaagctggtttttctggttaatcgagaagaatccggaagtggaggagaaaattatgatgggaatttgcaagattcttgagcagagggttgatcatggagatacaaagaagaacatggaatatgagcccgtcttcagaccagaagagatcaagaaaatggattatctacaagctgctttgtctgagactcttagattgtatccctctgttccagtcgatcacaaagaggtacttgaagacgatgtatttccagatgggacgaaattaaaaaaaggagaaaaggttatatatgcaatatacgcgatgggacgtatggaaacaatttgggggaaagactgtcgtgagttcaagccagaaaggtggttaagagacggcaggtacatgagtgagtcggcctataagttcacggccttcaatggtggtcctcggctatgtctaggcaaggattttgcgtattaccaaatgagatatgtagcggccgccattatttaccggtataaggttagggttgatgataagggtggtcataaggttgagccaaagatggctctaactatgtacatgaagcatggcttgaaggtgaatatggtcaagaggagtgtctctgagatagaccactactactgctgagtgcctgacataaagggtataaaattggtgtatatatagtggttcgtgttttgagatttatgaattgtaacaggtgattgttttttggtgattttgatttggtagttaagtgggttcatataataattgtaacttgcgatatattgtattctacaaaagagtccatatttttgtcatttctcttat

SEQ ID NO: 79418 - protein, 550 aa, Arabidopsis thaliana
  peptide (1)..(550): Ceres Seq. ID no. 12651235
MNLSFSSYNLTATAVSSSCFGSDELLVSRRLFSLRDVQILELFIAFFVFATIHSLRQKKHQGMPVWPLVGMLPSLISAVRSNIYEWLSDVLISQNGTFRFRGPWFSTLNCVVTCDPRNVEHLLKTRFSIYPKGSYFRETMQDLLGDGIFNTDDGTWQRQRKAASVEFHSAKFRQLTSQSLHELVHNRLLPVLETSGKIDLQDILLRLTFDNVCMIAFGVDPGCLSPKLPEIPFAKAFEDATEATVVRFVMPKFVWKLMRSLNLGTEKKLKESINGVDDFAEEVIRTRKKEMSLETEIAKRPDLLTIFMGLRDENGQKFSDKFLRDICVNFILAGRDTSSVALSWFFWLIEKNPEVEEKIMMGICKILEQRVDHGDTKKNMEYEPVFRPEEIKKMDYLQAALSETLRLYPSVPVDHKEVLEDDVFPDGTKLKKGEKVIYAIYAMGRMETIWGKDCREFKPERWLRDGRYMSESAYKFTAFNGGPRLCLGKDFAYYQMRYVAAAIIYRYKVRVDDKGGHKVEPKMALTMYMKHGLKVNMVKRSVSEIDHYYC

SEQ ID NO: 79419 - protein, 488 aa, Arabidopsis thaliana
  peptide (1)..(488): Ceres Seq. ID no. 12651236
MPVWPLVGMLPSLISAVRSNIYEWLSDVLISQNGTFRFRGPWFSTLNCVVTCDPRNVEHLLKTRFSIYPKGSYFRETMQDLLGDGIFNTDDGTWQRQRKAASVEFHSAKFRQLTSQSLHELVHNRLLPVLETSGKIDLQDILLRLTFDNVCMIAFGVDPGCLSPKLPEIPFAKAFEDATEATVVRFVMPKFVWKLMRSLNLGTEKKLKESINGVDDFAEEVIRTRKKEMSLETEIAKRPDLLTIFMGLRDENGQKFSDKFLRDICVNFILAGRDTSSVALSWFFWLIEKNPEVEEKIMMGICKILEQRVDHGDTKKNMEYEPVFRPEEIKKMDYLQAALSETLRLYPSVPVDHKEVLEDDVFPDGTKLKKGEKVIYAIYAMGRMETIWGKDCREFKPERWLRDGRYMSESAYKFTAFNGGPRLCLGKDFAYYQMRYVAAAIIYRYKVRVDDKGGHKVEPKMALTMYMKHGLKVNMVKRSVSEIDHYYC

SEQ ID NO: 79420 - protein, 480 aa, Arabidopsis thaliana
  peptide (1)..(480): Ceres Seq. ID no. 12651237
MLPSLISAVRSNIYEWLSDVLISQNGTFRFRGPWFSTLNCVVTCDPRNVEHLLKTRFSIYPKGSYFRETMQDLLGDGIFNTDDGTWQRQRKAASVEFHSAKFRQLTSQSLHELVHNRLLPVLETSGKIDLQDILLRLTFDNVCMIAFGVDPGCLSPKLPEIPFAKAFEDATEATVVRFVMPKFVWKLMRSLNLGTEKKLKESINGVDDFAEEVIRTRKKEMSLETEIAKRPDLLTIFMGLRDENGQKFSDKFLRDICVNFILAGRDTSSVALSWFFWLIEKNPEVEEKIMMGICKILEQRVDHGDTKKNMEYEPVFRPEEIKKMDYLQAALSETLRLYPSVPVDHKEVLEDDVFPDGTKLKKGEKVIYAIYAMGRMETIWGKDCREFKPERWLRDGRYMSESAYKFTAFNGGPRLCLGKDFAYYQMRYVAAAIIYRYKVRVDDKGGHKVEPKMALTMYMKHGLKVNMVKRSVSEIDHYYC

SEQ ID NO: 79421 - DNA, 3843 bp, Arabidopsis thaliana
  misc_feature (1)..(3843): Ceres Seq. ID no. 12651245
  misc_feature (1)..(3843): Ortholog of  Ceres SEQ ID NO 12586556 as cited in SEQ ID NO 64667
  misc_feature (1)..(3843): Ortholog of  Ceres SEQ ID NO 13660894 as cited in SEQ ID NO 67475
atggccttctcgagaatcgctcttctttgccaacgattctctagacaacaacaacaacgccaacttcttcacagaccactcactacgaagctagataacaccagattcctccatcccaatcaatccaagcttgcccaaaacctaatcgtgatcttcactagacaacctttttcacctgacgaccctgagctactgatactctctccagagctcaacaccaaggtagtcgaaaccgtcttgaatggattcaaaaggtggggtttggcttatctgttcttcaattgggcttctaaacaggaaggttacagaaacgatatgtatgcttacaatgccatggcttctatcctatcacgtgctcgacaaaatgcctcactgaaagctttggttgtagatgttctgaattctcgttgtttcatgtctcctggagctttcgggtttttcattcggtgtttaggtaatgctgggctagtggatgaagcaagttctgtttttgatcgagttagagagatgggtctttgtgttcctaatgcttatacttataactgtttgttagaagcaatttctaagtcgaattcgagctctgttgagttggttgaggcgaggttgaaggagatgagggattgcggttttcatttcgataaatttactcttacaccagttttgcaggtttattgcaacactggtaagtctgagagagcgttgagtgttttcaatgagattcttagtagaggttggcttgatgaacatatttcaacgattttggttgtttcattttgtaagtggggtcaggtggataaggctttcgagttgattgagatgcttgaagaacgagatattaggttgaactataagacatattgtgttttgatacatggattcgtaaaggagtcacggattgataaagcttttcagttgtttgagaaaatgcgtcggatgggtatgaacgctgatattgcattgtatgatgtgttgataggaggactttgcaagcataaagatcttgagatggcgctgagtttgtatttggagattaagaggtcaggaattccacctgatagaggaatacttgggaagctattatgttcattttccgaagaaagtgaattaagtcgaataacagaagtgatcattggagacatagacaaaaaatctgtgatgcttctttacaaatctttgtttgaggggtttattaggaatgatttggtgcatgaggcttacagttttattcagaatctcatgggaaattatgagtcggatggtgtgtctgagattgttaagcttcttaaggatcataataaagcaatcctcccagattcagattctcttagcattgtgattaattgcttagtcaaagctaacaaggtggatatggcagtgaccttgttacatgatattgtccagaatggccttattccaggtcctatgatgtacaacaacataatagaggggatgtgtaaagaaggaaggtcggaagaaagcttgaaactcttaggagaaatgaaggatgccggagttgaaccaagtcaattcacgcttaattgtatttatggttgcttggctgaacgatgcgattttgtaggagcattggacctgctgaaaaagatgcgtttttatggatttgagccatggataaagcatactacctttcttgtcaaaaaactttgcgagaatggaagggctgttgatgcttgcaagtaccttgatgatgtagctggagaaggtttccttggtcacatggttgcctctactgctgcgattgatggcctcataaaaaatgagggagtagatagaggtttagagttattccgagacatatgtgccaatggtcactgccctgatgtgattgcatatcatgtattgataaaggctctatgtaaagcgtgtcgaactatggaagctgatatcctatttaatgaaatggtatcaaaaggactaaaacctactgttgctacttataacagtatgatagatggatggtgcaaggaaggtgagattgaccggggcctgtcttgtatagtgaggatgtatgaggatgagaaaaaccctgatgttattacttacactagcttaatacatgggctatgcgctagcggaagacctagtgaagcaatctttcgttggaatgaaatgaagggaaaagattgctatccaaatagaattacttttatggcacttattcagggtctttgcaagtgtggctggtctggtgaggccttagtttattttcgtgagatggaagaaaaagaaatggagcctgattcagctgtttacttatcactcgtaagctcttttctgtcaagtgaaaacatcaatgctgggtttgggatattcagagaaatggttcataaaggaagatttccggtttcagtagataggaactatatgcttgctgttaatgttacaagcgacgttgactacgcttacaaattcttgtcaaaactatctgatcctccgaattacggatggaatttcgtaatacgaggtttctccaatagcagaaaccccgagaaatcgatcagcgtctatatccagatgttgaggttcgggttattacctgatcatatgacttatccgtttcttatgaagtcgagttctcgtctctcgaacagaaaacttggtgggtctttgcattgctccgtggttaaatctgggcttgagtgggatttgttcatatgtaatactcttattcatatgtatggttcgttccgagaccaagcttctgcgcgcaagttgttcgatgaaatgcctcataagaacttggttacttggaactctattttagatgcgtatgccaagagcggggatgttgtttcagcaagactggtgtttgatgaaatgagtgagagagatgttgtgacttggagttctatgatcgatggctatgtaaaaagaggtgaatataacaaagcgttggaaattttcgatcagatgatgagaatgggttcatcaaaggcaaatgaagtcactatggttagcgttatatgcgcttgtgctcacttgggtgcgctaaatcgaggaaagactgtacatcgctatatactcgatgtgcatttgccgttaacagttatattgcagacatctcttattgatatgtatgcgaaatgcggatcgataggagacgcttggagcgtgttttatagagcatctgttaaggaaacagatgccttgatgtggaatgctatcattggagggcttgcgagtcacgggttcattagagagtcgctccaactgtttcacaaaatgcgagaatcaaagattgacccggacgagataacattcttgtgcttgcttgctgcttgttcccatggcggattagtgaaagaagcgtggcatttcttcaagagtctcaaggaaagtggtgcggaaccaaagagcgagcattatgcttgtatggttgatgtgctttccagagctggtctagttaaagacgcacatgattttatatctgaaatgccgataaaaccgacgggttcaatgttgggtgctttgcttaacgggtgtataaatcacggaaacttggagcttgcggaaacagttggaaagaagcttatagagttgcaaccacataatgatggacgatatgtcgggctagcaaacgtttatgcgatcaacaagcagtttagggcagctcggtctatgagagaagcaatggagaagaaaggagtgaagaaaattgcagggcacagtatacttgatttggatggaacacgacatagattcatcgctcatgacaaaacacattttcactccgacaagatctatgcagtgttacagctgactggagcttggatgaatctcgatgttgactatgatgatcaagacaatcattgtttttgttcttga

SEQ ID NO: 79422 - protein, 1280 aa, Arabidopsis thaliana
  peptide (1)..(1280): Ceres Seq. ID no. 12651246
MAFSRIALLCQRFSRQQQQRQLLHRPLTTKLDNTRFLHPNQSKLAQNLIVIFTRQPFSPDDPELLILSPELNTKVVETVLNGFKRWGLAYLFFNWASKQEGYRNDMYAYNAMASILSRARQNASLKALVVDVLNSRCFMSPGAFGFFIRCLGNAGLVDEASSVFDRVREMGLCVPNAYTYNCLLEAISKSNSSSVELVEARLKEMRDCGFHFDKFTLTPVLQVYCNTGKSERALSVFNEILSRGWLDEHISTILVVSFCKWGQVDKAFELIEMLEERDIRLNYKTYCVLIHGFVKESRIDKAFQLFEKMRRMGMNADIALYDVLIGGLCKHKDLEMALSLYLEIKRSGIPPDRGILGKLLCSFSEESELSRITEVIIGDIDKKSVMLLYKSLFEGFIRNDLVHEAYSFIQNLMGNYESDGVSEIVKLLKDHNKAILPDSDSLSIVINCLVKANKVDMAVTLLHDIVQNGLIPGPMMYNNIIEGMCKEGRSEESLKLLGEMKDAGVEPSQFTLNCIYGCLAERCDFVGALDLLKKMRFYGFEPWIKHTTFLVKKLCENGRAVDACKYLDDVAGEGFLGHMVASTAAIDGLIKNEGVDRGLELFRDICANGHCPDVIAYHVLIKALCKACRTMEADILFNEMVSKGLKPTVATYNSMIDGWCKEGEIDRGLSCIVRMYEDEKNPDVITYTSLIHGLCASGRPSEAIFRWNEMKGKDCYPNRITFMALIQGLCKCGWSGEALVYFREMEEKEMEPDSAVYLSLVSSFLSSENINAGFGIFREMVHKGRFPVSVDRNYMLAVNVTSDVDYAYKFLSKLSDPPNYGWNFVIRGFSNSRNPEKSISVYIQMLRFGLLPDHMTYPFLMKSSSRLSNRKLGGSLHCSVVKSGLEWDLFICNTLIHMYGSFRDQASARKLFDEMPHKNLVTWNSILDAYAKSGDVVSARLVFDEMSERDVVTWSSMIDGYVKRGEYNKALEIFDQMMRMGSSKANEVTMVSVICACAHLGALNRGKTVHRYILDVHLPLTVILQTSLIDMYAKCGSIGDAWSVFYRASVKETDALMWNAIIGGLASHGFIRESLQLFHKMRESKIDPDEITFLCLLAACSHGGLVKEAWHFFKSLKESGAEPKSEHYACMVDVLSRAGLVKDAHDFISEMPIKPTGSMLGALLNGCINHGNLELAETVGKKLIELQPHNDGRYVGLANVYAINKQFRAARSMREAMEKKGVKKIAGHSILDLDGTRHRFIAHDKTHFHSDKIYAVLQLTGAWMNLDVDYDDQDNHCFCS

SEQ ID NO: 79423 - protein, 1175 aa, Arabidopsis thaliana
  peptide (1)..(1175): Ceres Seq. ID no. 12651247
MYAYNAMASILSRARQNASLKALVVDVLNSRCFMSPGAFGFFIRCLGNAGLVDEASSVFDRVREMGLCVPNAYTYNCLLEAISKSNSSSVELVEARLKEMRDCGFHFDKFTLTPVLQVYCNTGKSERALSVFNEILSRGWLDEHISTILVVSFCKWGQVDKAFELIEMLEERDIRLNYKTYCVLIHGFVKESRIDKAFQLFEKMRRMGMNADIALYDVLIGGLCKHKDLEMALSLYLEIKRSGIPPDRGILGKLLCSFSEESELSRITEVIIGDIDKKSVMLLYKSLFEGFIRNDLVHEAYSFIQNLMGNYESDGVSEIVKLLKDHNKAILPDSDSLSIVINCLVKANKVDMAVTLLHDIVQNGLIPGPMMYNNIIEGMCKEGRSEESLKLLGEMKDAGVEPSQFTLNCIYGCLAERCDFVGALDLLKKMRFYGFEPWIKHTTFLVKKLCENGRAVDACKYLDDVAGEGFLGHMVASTAAIDGLIKNEGVDRGLELFRDICANGHCPDVIAYHVLIKALCKACRTMEADILFNEMVSKGLKPTVATYNSMIDGWCKEGEIDRGLSCIVRMYEDEKNPDVITYTSLIHGLCASGRPSEAIFRWNEMKGKDCYPNRITFMALIQGLCKCGWSGEALVYFREMEEKEMEPDSAVYLSLVSSFLSSENINAGFGIFREMVHKGRFPVSVDRNYMLAVNVTSDVDYAYKFLSKLSDPPNYGWNFVIRGFSNSRNPEKSISVYIQMLRFGLLPDHMTYPFLMKSSSRLSNRKLGGSLHCSVVKSGLEWDLFICNTLIHMYGSFRDQASARKLFDEMPHKNLVTWNSILDAYAKSGDVVSARLVFDEMSERDVVTWSSMIDGYVKRGEYNKALEIFDQMMRMGSSKANEVTMVSVICACAHLGALNRGKTVHRYILDVHLPLTVILQTSLIDMYAKCGSIGDAWSVFYRASVKETDALMWNAIIGGLASHGFIRESLQLFHKMRESKIDPDEITFLCLLAACSHGGLVKEAWHFFKSLKESGAEPKSEHYACMVDVLSRAGLVKDAHDFISEMPIKPTGSMLGALLNGCINHGNLELAETVGKKLIELQPHNDGRYVGLANVYAINKQFRAARSMREAMEKKGVKKIAGHSILDLDGTRHRFIAHDKTHFHSDKIYAVLQLTGAWMNLDVDYDDQDNHCFCS

SEQ ID NO: 79424 - protein, 1169 aa, Arabidopsis thaliana
  peptide (1)..(1169): Ceres Seq. ID no. 12651248
MASILSRARQNASLKALVVDVLNSRCFMSPGAFGFFIRCLGNAGLVDEASSVFDRVREMGLCVPNAYTYNCLLEAISKSNSSSVELVEARLKEMRDCGFHFDKFTLTPVLQVYCNTGKSERALSVFNEILSRGWLDEHISTILVVSFCKWGQVDKAFELIEMLEERDIRLNYKTYCVLIHGFVKESRIDKAFQLFEKMRRMGMNADIALYDVLIGGLCKHKDLEMALSLYLEIKRSGIPPDRGILGKLLCSFSEESELSRITEVIIGDIDKKSVMLLYKSLFEGFIRNDLVHEAYSFIQNLMGNYESDGVSEIVKLLKDHNKAILPDSDSLSIVINCLVKANKVDMAVTLLHDIVQNGLIPGPMMYNNIIEGMCKEGRSEESLKLLGEMKDAGVEPSQFTLNCIYGCLAERCDFVGALDLLKKMRFYGFEPWIKHTTFLVKKLCENGRAVDACKYLDDVAGEGFLGHMVASTAAIDGLIKNEGVDRGLELFRDICANGHCPDVIAYHVLIKALCKACRTMEADILFNEMVSKGLKPTVATYNSMIDGWCKEGEIDRGLSCIVRMYEDEKNPDVITYTSLIHGLCASGRPSEAIFRWNEMKGKDCYPNRITFMALIQGLCKCGWSGEALVYFREMEEKEMEPDSAVYLSLVSSFLSSENINAGFGIFREMVHKGRFPVSVDRNYMLAVNVTSDVDYAYKFLSKLSDPPNYGWNFVIRGFSNSRNPEKSISVYIQMLRFGLLPDHMTYPFLMKSSSRLSNRKLGGSLHCSVVKSGLEWDLFICNTLIHMYGSFRDQASARKLFDEMPHKNLVTWNSILDAYAKSGDVVSARLVFDEMSERDVVTWSSMIDGYVKRGEYNKALEIFDQMMRMGSSKANEVTMVSVICACAHLGALNRGKTVHRYILDVHLPLTVILQTSLIDMYAKCGSIGDAWSVFYRASVKETDALMWNAIIGGLASHGFIRESLQLFHKMRESKIDPDEITFLCLLAACSHGGLVKEAWHFFKSLKESGAEPKSEHYACMVDVLSRAGLVKDAHDFISEMPIKPTGSMLGALLNGCINHGNLELAETVGKKLIELQPHNDGRYVGLANVYAINKQFRAARSMREAMEKKGVKKIAGHSILDLDGTRHRFIAHDKTHFHSDKIYAVLQLTGAWMNLDVDYDDQDNHCFCS

SEQ ID NO: 79425 - DNA, 1383 bp, Arabidopsis thaliana
  misc_feature (1)..(1383): Ceres Seq. ID no. 12651257
  misc_feature (1)..(1383): Ortholog of  Ceres SEQ ID NO 15176353 as cited in SEQ ID NO 54509
acagtaacgagatcgacaaggaaaaaaaatgtacgaaaataatctcttaacgctctcttcatgcaccatgaatctcaatttcgctttctccccattccttgtctctcagagacaaccattctcttcccacaagcgtaatcttcacactctcgttgctgtttctgctaattccgacaacctcgccggtgaagataacggcggaatttcggcggcaaataaaggttctgggactacagcgagaggaaggagattactcaaggttagagaagagaagcgaaaacgcgactacgatcgtcttcacgattacccatcttgggccaagtacttgtttctttccttttcttttgcactccaggtgtttgtgtttttgcctaagtcacgagaaagtgtgaacctttttttggtgaatgataaatgcagggtactggaaagtgcgtgtaaagatgatgaagagcttcgagctgttcttggtgatagcataggaaatcctgagctcatgagaaagaaggttgaagaaagagttaggaagaagggaaaagatttccagaaacagaagactggttctgtgctttctttcaaagttaacttcagagatttcaatcctgtagattccttcatatggtttgagctctatggaacgccttcagatcgagatgttgatctcattggaagtgttatacaggcatggtatgttatggggcgattgggcgctttcaatacatccaacttgcagctagcaaacacatccctagaatatgatcctctctatgacgcagagaagggcttcaaagtgatgccttcatcgtttcatgacattagcgatgtcgaatttcaagacaactggggtcgtgtgtgggttgatcttggtacttccgatatcttcgcccttgatgtgcttctcaactgtttgacagttatgagttcagagtacttgggcattcaacaagtagtatttggtggtaaacgaatgggagattgggaagagggaatgacaaatcctgattttgggtataagtacttcaagatctgaatcttctacaaaacagttttgttaaatataggcttcttttttgtgctcttaagaacaaatagctaaacagtgtggaagaaatgataacctagatcaatacaacaaccgaaatggctctttacacaccaagttagcttgaaacgagagacagtaccgtatccatacgcaaggcaaaggttacggacccgagcagtggccatacgcaatacgcgagggttagttagtcttccatagactctattggttagcttggtagagttaggctttagtactgttaaactccacattggaaccaaatccacatccaaaaagtatcacgatgaaacttcttgaaatgttaagttgagttcatg

SEQ ID NO: 79426 - protein, 333 aa, Arabidopsis thaliana
  peptide (1)..(333): Ceres Seq. ID no. 12651258
MYENNLLTLSSCTMNLNFAFSPFLVSQRQPFSSHKRNLHTLVAVSANSDNLAGEDNGGISAANKGSGTTARGRRLLKVREEKRKRDYDRLHDYPSWAKYLFLSFSFALQVFVFLPKSRESVNLFLVNDKCRVLESACKDDEELRAVLGDSIGNPELMRKKVEERVRKKGKDFQKQKTGSVLSFKVNFRDFNPVDSFIWFELYGTPSDRDVDLIGSVIQAWYVMGRLGAFNTSNLQLANTSLEYDPLYDAEKGFKVMPSSFHDISDVEFQDNWGRVWVDLGTSDIFALDVLLNCLTVMSSEYLGIQQVVFGGKRMGDWEEGMTNPDFGYKYFKI

SEQ ID NO: 79427 - protein, 320 aa, Arabidopsis thaliana
  peptide (1)..(320): Ceres Seq. ID no. 12651259
MNLNFAFSPFLVSQRQPFSSHKRNLHTLVAVSANSDNLAGEDNGGISAANKGSGTTARGRRLLKVREEKRKRDYDRLHDYPSWAKYLFLSFSFALQVFVFLPKSRESVNLFLVNDKCRVLESACKDDEELRAVLGDSIGNPELMRKKVEERVRKKGKDFQKQKTGSVLSFKVNFRDFNPVDSFIWFELYGTPSDRDVDLIGSVIQAWYVMGRLGAFNTSNLQLANTSLEYDPLYDAEKGFKVMPSSFHDISDVEFQDNWGRVWVDLGTSDIFALDVLLNCLTVMSSEYLGIQQVVFGGKRMGDWEEGMTNPDFGYKYFKI

SEQ ID NO: 79428 - protein, 177 aa, Arabidopsis thaliana
  peptide (1)..(177): Ceres Seq. ID no. 12651260
MRKKVEERVRKKGKDFQKQKTGSVLSFKVNFRDFNPVDSFIWFELYGTPSDRDVDLIGSVIQAWYVMGRLGAFNTSNLQLANTSLEYDPLYDAEKGFKVMPSSFHDISDVEFQDNWGRVWVDLGTSDIFALDVLLNCLTVMSSEYLGIQQVVFGGKRMGDWEEGMTNPDFGYKYFKI

SEQ ID NO: 79429 - DNA, 1998 bp, Arabidopsis thaliana
  misc_feature (1)..(1998): Ceres Seq. ID no. 12651269
  misc_feature (1)..(1998): Ortholog of  Ceres SEQ ID NO 14311361 as cited in SEQ ID NO 54033
aatctcagcttgaatcacactgacgaaggcatcttcctgcgattatggcgtcgccggcaggtgaaacagcagcggttgttgagggcggagatgggcagcagcaacgacaagctggtgggtttgggcagacaattaccggaatcataagaatcgccgtcttctgttactttgcttctaagttcttttctcccaaacaaaaacctgcggatccttccaagcctactcatctcatgtccaatctatttcagaggggcgagcccatagatatgtggttttatctttcggagcatgagaaattcaatgacttcggcaatgaaggtgcgcttatttggcatgagacaaacataccttatgctgtgtggaaaccagagagcactaggaccttgtcaatgacgtactatccttccgaggcactgaagaataatggaagtctgtatgctcatgtcttctttgctctatctggttatcctatagatcttagtgatcctgaataccagcctctcaactgctttggcaggactcaccctgttgcaacttacttaccaaagcgaaaagcagataagaagaagagtctgttgggaaatcccaaagactctgatgaatcccatgtggaagttgaggaggttgatggtaaggactcggatctcaaggatgagggccctgtggaatgggtatcctactggaaaccaaatgtcacaattaacctagtcgatgactttactcgctatccacagcatggtgtaccaccaaacatttatccttacttactggtggaacctagtacaataaactactaccctacagttttcttcaatgagttttggttgctaagggacaagttgattttaatcaatgagacggtctcagagctgccacttaatctggaagtaagccccataagcatgacaaagtggcagctgtttcagcagattgatcagtctttccagattcaccgtagctatggaagcatgcttgatggtgaatctgacgaactaaagagggtgtttttggaaggaaatccctatctgttgggcgtcactatgtttgtttcgatgcttcattctgtattcgacttccttgcattcaaaaatgatatccagttttggaacaagaacaaatctatggaaggactgtctgcgaagtctgtcgtactaaactttatctgtcagtttatcatcttcctctacctgcttgacaacgacacttcatggatgatactggctagctctggagttggtgtctgcatcgagttctggaaaattgggaaagccatgcgcattgaggttgatcgaagtgggatgattccaagattgaggttccacgaccgtgaatcctatgcaagcaacaagaccaaggagtatgacgacattgccatcaaattcttatcctatgtgctcctccttcttgttgtgggtttctccatatattcacttgcctatgaacgccacaagagctggtactcatggatcctatcttcactaacgagctgcgtctacatgtttggtttcataatgatgtgtcctcaattgttcatcaactataagctgaagtcagtagcacatttaccatggaggcaaatgacatataagttcctcaacacaatcatcgacgatctctttgcttttgtcatcaaaatgccaatgttgcatcgcctttctgtcttccgagatgatgtgatattcttaatatacttgtaccagagatgggtttatcctgtggacaaaacacgtgtcaacgagtttggttttggaggtgaggatgagtctgtggatacaaagaagatctctgaccaagaagatgacaagaaaacaaactaattagctttgtgcttttgtttttccctaacaattttgagtttttttgggtctgctttagtaagttttgttaatgctacttatatccaaaagtaatttcgttttagggtaatataaaaaaaaaagtgttaaagaatatcacttagttataattttgttttgtttatatgtaactttagttctc

SEQ ID NO: 79430 - protein, 590 aa, Arabidopsis thaliana
  peptide (1)..(590): Ceres Seq. ID no. 12651270
MASPAGETAAVVEGGDGQQQRQAGGFGQTITGIIRIAVFCYFASKFFSPKQKPADPSKPTHLMSNLFQRGEPIDMWFYLSEHEKFNDFGNEGALIWHETNIPYAVWKPESTRTLSMTYYPSEALKNNGSLYAHVFFALSGYPIDLSDPEYQPLNCFGRTHPVATYLPKRKADKKKSLLGNPKDSDESHVEVEEVDGKDSDLKDEGPVEWVSYWKPNVTINLVDDFTRYPQHGVPPNIYPYLLVEPSTINYYPTVFFNEFWLLRDKLILINETVSELPLNLEVSPISMTKWQLFQQIDQSFQIHRSYGSMLDGESDELKRVFLEGNPYLLGVTMFVSMLHSVFDFLAFKNDIQFWNKNKSMEGLSAKSVVLNFICQFIIFLYLLDNDTSWMILASSGVGVCIEFWKIGKAMRIEVDRSGMIPRLRFHDRESYASNKTKEYDDIAIKFLSYVLLLLVVGFSIYSLAYERHKSWYSWILSSLTSCVYMFGFIMMCPQLFINYKLKSVAHLPWRQMTYKFLNTIIDDLFAFVIKMPMLHRLSVFRDDVIFLIYLYQRWVYPVDKTRVNEFGFGGEDESVDTKKISDQEDDKKTN

SEQ ID NO: 79431 - protein, 528 aa, Arabidopsis thaliana
  peptide (1)..(528): Ceres Seq. ID no. 12651271
MSNLFQRGEPIDMWFYLSEHEKFNDFGNEGALIWHETNIPYAVWKPESTRTLSMTYYPSEALKNNGSLYAHVFFALSGYPIDLSDPEYQPLNCFGRTHPVATYLPKRKADKKKSLLGNPKDSDESHVEVEEVDGKDSDLKDEGPVEWVSYWKPNVTINLVDDFTRYPQHGVPPNIYPYLLVEPSTINYYPTVFFNEFWLLRDKLILINETVSELPLNLEVSPISMTKWQLFQQIDQSFQIHRSYGSMLDGESDELKRVFLEGNPYLLGVTMFVSMLHSVFDFLAFKNDIQFWNKNKSMEGLSAKSVVLNFICQFIIFLYLLDNDTSWMILASSGVGVCIEFWKIGKAMRIEVDRSGMIPRLRFHDRESYASNKTKEYDDIAIKFLSYVLLLLVVGFSIYSLAYERHKSWYSWILSSLTSCVYMFGFIMMCPQLFINYKLKSVAHLPWRQMTYKFLNTIIDDLFAFVIKMPMLHRLSVFRDDVIFLIYLYQRWVYPVDKTRVNEFGFGGEDESVDTKKISDQEDDKKTN

SEQ ID NO: 79432 - protein, 516 aa, Arabidopsis thaliana
  peptide (1)..(516): Ceres Seq. ID no. 12651272
MWFYLSEHEKFNDFGNEGALIWHETNIPYAVWKPESTRTLSMTYYPSEALKNNGSLYAHVFFALSGYPIDLSDPEYQPLNCFGRTHPVATYLPKRKADKKKSLLGNPKDSDESHVEVEEVDGKDSDLKDEGPVEWVSYWKPNVTINLVDDFTRYPQHGVPPNIYPYLLVEPSTINYYPTVFFNEFWLLRDKLILINETVSELPLNLEVSPISMTKWQLFQQIDQSFQIHRSYGSMLDGESDELKRVFLEGNPYLLGVTMFVSMLHSVFDFLAFKNDIQFWNKNKSMEGLSAKSVVLNFICQFIIFLYLLDNDTSWMILASSGVGVCIEFWKIGKAMRIEVDRSGMIPRLRFHDRESYASNKTKEYDDIAIKFLSYVLLLLVVGFSIYSLAYERHKSWYSWILSSLTSCVYMFGFIMMCPQLFINYKLKSVAHLPWRQMTYKFLNTIIDDLFAFVIKMPMLHRLSVFRDDVIFLIYLYQRWVYPVDKTRVNEFGFGGEDESVDTKKISDQEDDKKTN

SEQ ID NO: 79433 - DNA, 1567 bp, Arabidopsis thaliana
  misc_feature (1)..(1567): Ceres Seq. ID no. 12651277
  misc_feature (1)..(1567): Ortholog of  Ceres SEQ ID NO 13638441 as cited in SEQ ID NO 58066
attcctctttctctctctctccttcaagttgctgcaatcccttgaaaacccaataaacccccaattttccatttctcataaagttcacatttttccttcttcttcttctgccaattctctgattccctcgtttcaatctccgttttgctttgcctatcagataaatttcttcttgctttcctttctatctcataacgataagttgaattaatctttgcgtcttagttcatcagtagagagagtagggttttttccgcttatttttagggaatttcattttgttggaggtgagaatctctattcgagtccccaagattctctttatatccctagtttagttgtatggttgggttttgattggaatatcaaggggtagtttttagctaggttcactgatacttggaagatctgagttctttgggattctgttaagtttgtggagatctaaaagacacgaaatttgtagaaatctggttgatatcccagacttttagagggattagggtagattctatagaatttgaggcgggtttgattggaattatgacggtggaggaagttagtgatggttctgtgtggagtagggaggatgatattgcctttgagagagctctagccaataataccgatgaatcagaggaacggtgggagaagattgctgcagacgttccaggcaaaagtgttgaacagattaaagaacattacgagcttttagttgaagatgttactaggattgaatcaggatgtgtgcctcttcctgcctatgggtctcctgaaggatcgaatggccatgctggtgatgaaggagcaagtagtaagaaaggaggtaacagtcatgcgggagagtctaaccaagcaggtaaatcaaagtccgatcaagaacgacgaaagggtatcgcgtggacagaagatgagcacaggttatttcttcttggtttggataagtacgggaaaggtgattggcgtagcatttctcgcaactttgtagtaacaagaacaccgacccaagttgcgagccatgctcaaaagtatttcattcgtctaaattcaatgaacaaagacagaaggcgatcaagcattcacgacatcactagtgttggcaacgcagatgtctcaacgccacaaggaccaatcactggtcagaacaacagcaataacaacaacaacaacaacaacaacaacagttctcctgctgttgctggaggaggaaacaaatcagccaagcaagccgtctctcaagcaccacctggacctcctatgtatggaacacccgccataggtcagccagcagttggaacaccagtgaacctcccagctccacctcacatggcttatggagttcatgcggctccagtccctggctcagtggttcctggtgcagcaatgaacattggtcaaatgccgtacaccatgccgcgtacaccaacggctcataggtaactcgaaagcacctttgctgtcatagtgcactttgtttttaggtgtaagaaagaagatgtgtaaaggatttagtgaatattcaagcttgttccttgagtgagttttttttattacttagtttgtgggg

SEQ ID NO: 79434 - protein, 298 aa, Arabidopsis thaliana
  peptide (1)..(298): Ceres Seq. ID no. 12651278
MTVEEVSDGSVWSREDDIAFERALANNTDESEERWEKIAADVPGKSVEQIKEHYELLVEDVTRIESGCVPLPAYGSPEGSNGHAGDEGASSKKGGNSHAGESNQAGKSKSDQERRKGIAWTEDEHRLFLLGLDKYGKGDWRSISRNFVVTRTPTQVASHAQKYFIRLNSMNKDRRRSSIHDITSVGNADVSTPQGPITGQNNSNNNNNNNNNNSSPAVAGGGNKSAKQAVSQAPPGPPMYGTPAIGQPAVGTPVNLPAPPHMAYGVHAAPVPGSVVPGAAMNIGQMPYTMPRTPTAHR

SEQ ID NO: 79435 - DNA, 1971 bp, Arabidopsis thaliana
  misc_feature (1)..(1971): Ceres Seq. ID no. 12651294
  misc_feature (1)..(1971): Ortholog of  Ceres SEQ ID NO 15176685 as cited in SEQ ID NO 58334
atggggagtttttgctccaagagccttggaatcaattttggcagcgagtattctggttctagtgtggctgatgatggtcgagaacctgattttggccactcacaaccaaatgggcaaaccagtttgattgttcctggtatgaggcagcttatggttaaagacgtcaaggaacaaaatcaattaaaagatgttttctctttccgcgaaagggaagctgaagataatttctatgatggaattccgacgtatactatggctccatcacagaaaattcggtctgcaaaatcaactcaaaccgctgtttcaaaggttacagaggcaagtaagcttttaggcaaagcggggttaggtagagcaaaagatgttttggatacccttggaagtagcatgacagatcttagtagcggtggatttacttctggagttgcaactaaaggcaatgaacttgggatcttagcttttgaagtagcaaacacaattgtcaaaagctcaaatctcattgaatccctttctaagaggaacatcgagcatttaaaaggaactatcctttattctgagggtgttcaaaacctagtctcgaatgatttcgatgaactactcagacttgttgcagctgataagaggcaggagctgcaagttttctcgggggaagtggttcggtttggaaaccgatccaaagattttcagtggcataatttacagcgctatttcgataggatcagcaaagaattaacccctcaaaggcagttaaaggaagacgcggtgttggttgttgaccaactgatggttctagtgcagtatactgctgaactataccaagaactccaagtattgtatcgattggagaaagactatgagcaaaagcgtcgagaagaagagaactcagctaatagcagtaagggtgatggccttgcaatcttaaaaacggaacttaaagcccagagaaaggtagtgaaaagcttaaagaaaaagtcgttgtggtccagaggttttgaagaggtgatggagaaactagtagacattgtacatttcttgttgctagagattcataatatcttcggtggtgccgatgatcaaccatcgaagaaaggagctgcagaatatgataaaagattgggacctgctggtcttgctttacattatgcaaatataattgtgcagattgacacacttgtcgctcgtgcaagctctataacttcaaatgcaagggattctctttaccaaagcttaccacctggtataaaattggctcttcgttccaagattaaatctttcaatgtcgataaggagctttcggttacacaaattaaggatgagatggagaggacactgcattggcttgtccctgttgcaggcaatacaacaaaagcgcatcatggttttggctgggttggagagtgggcaaatacagggactgatttcactagtaagcctagtggtggagatatactacgtattgaaacactctatcacgctagtaaagaaaagacagagatctacattcttggacagataatttggttacaacatttggttacaaaagctaagagcgacgctcgaggaggtcctagactttcttctatcaagtctccattggatactacgaaccagcaattgatatctgaaccactcagtgtcccaatagtaacagatgaggagcaaaagatgttacaagaggcaagcaagagaaagagaactccatgtgttagcaagagtcaggattttgattctgagtactcgcgggcaagaaagtgtgaccctttgagcaaaagcagtgagtattttcgtggagtgagaagaagcaaatcagctgcagtaaagcggtattcttcgggttttccgcttcttgactttgctattgacaaggaaaaagtgttggatgtgatcgatcgggttgatgtgccaagagattataaagcattgttaaaagaagagcataaaagaaagggtatggaagaagctgtaatgtga

SEQ ID NO: 79436 - protein, 656 aa, Arabidopsis thaliana
  peptide (1)..(656): Ceres Seq. ID no. 12651295
MGSFCSKSLGINFGSEYSGSSVADDGREPDFGHSQPNGQTSLIVPGMRQLMVKDVKEQNQLKDVFSFREREAEDNFYDGIPTYTMAPSQKIRSAKSTQTAVSKVTEASKLLGKAGLGRAKDVLDTLGSSMTDLSSGGFTSGVATKGNELGILAFEVANTIVKSSNLIESLSKRNIEHLKGTILYSEGVQNLVSNDFDELLRLVAADKRQELQVFSGEVVRFGNRSKDFQWHNLQRYFDRISKELTPQRQLKEDAVLVVDQLMVLVQYTAELYQELQVLYRLEKDYEQKRREEENSANSSKGDGLAILKTELKAQRKVVKSLKKKSLWSRGFEEVMEKLVDIVHFLLLEIHNIFGGADDQPSKKGAAEYDKRLGPAGLALHYANIIVQIDTLVARASSITSNARDSLYQSLPPGIKLALRSKIKSFNVDKELSVTQIKDEMERTLHWLVPVAGNTTKAHHGFGWVGEWANTGTDFTSKPSGGDILRIETLYHASKEKTEIYILGQIIWLQHLVTKAKSDARGGPRLSSIKSPLDTTNQQLISEPLSVPIVTDEEQKMLQEASKRKRTPCVSKSQDFDSEYSRARKCDPLSKSSEYFRGVRRSKSAAVKRYSSGFPLLDFAIDKEKVLDVIDRVDVPRDYKALLKEEHKRKGMEEAVM

SEQ ID NO: 79437 - protein, 610 aa, Arabidopsis thaliana
  peptide (1)..(610): Ceres Seq. ID no. 12651296
MRQLMVKDVKEQNQLKDVFSFREREAEDNFYDGIPTYTMAPSQKIRSAKSTQTAVSKVTEASKLLGKAGLGRAKDVLDTLGSSMTDLSSGGFTSGVATKGNELGILAFEVANTIVKSSNLIESLSKRNIEHLKGTILYSEGVQNLVSNDFDELLRLVAADKRQELQVFSGEVVRFGNRSKDFQWHNLQRYFDRISKELTPQRQLKEDAVLVVDQLMVLVQYTAELYQELQVLYRLEKDYEQKRREEENSANSSKGDGLAILKTELKAQRKVVKSLKKKSLWSRGFEEVMEKLVDIVHFLLLEIHNIFGGADDQPSKKGAAEYDKRLGPAGLALHYANIIVQIDTLVARASSITSNARDSLYQSLPPGIKLALRSKIKSFNVDKELSVTQIKDEMERTLHWLVPVAGNTTKAHHGFGWVGEWANTGTDFTSKPSGGDILRIETLYHASKEKTEIYILGQIIWLQHLVTKAKSDARGGPRLSSIKSPLDTTNQQLISEPLSVPIVTDEEQKMLQEASKRKRTPCVSKSQDFDSEYSRARKCDPLSKSSEYFRGVRRSKSAAVKRYSSGFPLLDFAIDKEKVLDVIDRVDVPRDYKALLKEEHKRKGMEEAVM

SEQ ID NO: 79438 - protein, 606 aa, Arabidopsis thaliana
  peptide (1)..(606): Ceres Seq. ID no. 12651297
MVKDVKEQNQLKDVFSFREREAEDNFYDGIPTYTMAPSQKIRSAKSTQTAVSKVTEASKLLGKAGLGRAKDVLDTLGSSMTDLSSGGFTSGVATKGNELGILAFEVANTIVKSSNLIESLSKRNIEHLKGTILYSEGVQNLVSNDFDELLRLVAADKRQELQVFSGEVVRFGNRSKDFQWHNLQRYFDRISKELTPQRQLKEDAVLVVDQLMVLVQYTAELYQELQVLYRLEKDYEQKRREEENSANSSKGDGLAILKTELKAQRKVVKSLKKKSLWSRGFEEVMEKLVDIVHFLLLEIHNIFGGADDQPSKKGAAEYDKRLGPAGLALHYANIIVQIDTLVARASSITSNARDSLYQSLPPGIKLALRSKIKSFNVDKELSVTQIKDEMERTLHWLVPVAGNTTKAHHGFGWVGEWANTGTDFTSKPSGGDILRIETLYHASKEKTEIYILGQIIWLQHLVTKAKSDARGGPRLSSIKSPLDTTNQQLISEPLSVPIVTDEEQKMLQEASKRKRTPCVSKSQDFDSEYSRARKCDPLSKSSEYFRGVRRSKSAAVKRYSSGFPLLDFAIDKEKVLDVIDRVDVPRDYKALLKEEHKRKGMEEAVM

SEQ ID NO: 79439 - DNA, 1014 bp, Arabidopsis thaliana
  misc_feature (1)..(1014): Ceres Seq. ID no. 12651337
  misc_feature (1)..(1014): Ortholog of  Ceres SEQ ID NO 15177654 as cited in SEQ ID NO 59933
  misc_feature (1)..(1014): Ortholog of  Ceres SEQ ID NO 14303600 as cited in SEQ ID NO 64632
  misc_feature (1)..(1014): Ortholog of  Ceres SEQ ID NO 14302776 as cited in SEQ ID NO 66919
atgggcttcaaaccatttcttgaaggtggcatcgccgcaatcatcgccggagctctgactcacccattagacctcatcaaagtccgtatgcagcttcaaggcgaacattctttctcgctcgaccaaaaccctaaccctaatcttagccttgatcataatcttcccgtgaaaccttaccgacccgttttcgctcttgactctctcatcggcagcatttccttattacccttacacattcacgcgccgtcttcttccacgcgctccgtcatgacccctttcgccgtaggggcacacattgtcaaaaccgaaggacccgccgctctcttctccggcgtctccgccaccatcctccgtcagatgctttactctgccacccgtatgggtatatacgactttcttaaacgaaggtggactgatcaactcaccggtaacttcccattggtaaccaagatcacagctggactcatcgcaggagccgttggatcagtcgtcgggaatcctgctgacgtggcgatggtgagaatgcaagccgacggaagcttgccgttaaaccgtcgcagaaactacaagagcgtcgtggacgcgatcgacaggatcgcaaggcaagaaggcgtttcaagtttatggcgtggctcatggctaaccgtgaaccgtgccatgatcgtgacagcttctcagctcgctacgtatgatcacgtcaaagaaatcttggtagctggtggccgtggaacgccgggagggataggaacgcatgtagcggcgagttttgcggcggggatcgtcgcggcggtggcgtcgaatcccatcgacgttgtgaagacgaggatgatgaatgcggataaggagatttacggtggaccgttggattgtgcggtgaagatggtggcagaggaaggaccaatggctttgtacaaagggcttgttccgacggcgacgaggcaaggaccgttcacgatgatcttgttccttaccttggaacaagttcgtggtctgttaaaagacgttaaattttga

SEQ ID NO: 79440 - protein, 337 aa, Arabidopsis thaliana
  peptide (1)..(337): Ceres Seq. ID no. 12651338
MGFKPFLEGGIAAIIAGALTHPLDLIKVRMQLQGEHSFSLDQNPNPNLSLDHNLPVKPYRPVFALDSLIGSISLLPLHIHAPSSSTRSVMTPFAVGAHIVKTEGPAALFSGVSATILRQMLYSATRMGIYDFLKRRWTDQLTGNFPLVTKITAGLIAGAVGSVVGNPADVAMVRMQADGSLPLNRRRNYKSVVDAIDRIARQEGVSSLWRGSWLTVNRAMIVTASQLATYDHVKEILVAGGRGTPGGIGTHVAASFAAGIVAAVASNPIDVVKTRMMNADKEIYGGPLDCAVKMVAEEGPMALYKGLVPTATRQGPFTMILFLTLEQVRGLLKDVKF

SEQ ID NO: 79441 - protein, 308 aa, Arabidopsis thaliana
  peptide (1)..(308): Ceres Seq. ID no. 12651339
MQLQGEHSFSLDQNPNPNLSLDHNLPVKPYRPVFALDSLIGSISLLPLHIHAPSSSTRSVMTPFAVGAHIVKTEGPAALFSGVSATILRQMLYSATRMGIYDFLKRRWTDQLTGNFPLVTKITAGLIAGAVGSVVGNPADVAMVRMQADGSLPLNRRRNYKSVVDAIDRIARQEGVSSLWRGSWLTVNRAMIVTASQLATYDHVKEILVAGGRGTPGGIGTHVAASFAAGIVAAVASNPIDVVKTRMMNADKEIYGGPLDCAVKMVAEEGPMALYKGLVPTATRQGPFTMILFLTLEQVRGLLKDVKF

SEQ ID NO: 79442 - protein, 248 aa, Arabidopsis thaliana
  peptide (1)..(248): Ceres Seq. ID no. 12651340
MTPFAVGAHIVKTEGPAALFSGVSATILRQMLYSATRMGIYDFLKRRWTDQLTGNFPLVTKITAGLIAGAVGSVVGNPADVAMVRMQADGSLPLNRRRNYKSVVDAIDRIARQEGVSSLWRGSWLTVNRAMIVTASQLATYDHVKEILVAGGRGTPGGIGTHVAASFAAGIVAAVASNPIDVVKTRMMNADKEIYGGPLDCAVKMVAEEGPMALYKGLVPTATRQGPFTMILFLTLEQVRGLLKDVKF

SEQ ID NO: 79443 - DNA, 1230 bp, Arabidopsis thaliana
  misc_feature (1)..(1230): Ceres Seq. ID no. 12651372
  misc_feature (1)..(1230): Ortholog of  Ceres SEQ ID NO 14314319 as cited in SEQ ID NO 57500
atgaggagcgatgatctttacatcaccaccgtcccttgtttcttcaaatgtccaatttcacttgatgtgatgaaatctccggtgagtctctccaccggcgttacatacgaccgagttagcatccaacgttggctcgatgatggtaacaatacttgtcccgcgacgatgcagattcttcagaacaaagaattcgtacctaacctaactcttcaccgtctcattgatcactggtccgactccatcaaccgtcgagccgattctgagtctccggaatccgatactccgacgcgagacgaaattaacgctgcgattgagagattccggatcgagaatgatgctcgttcgaagattctccggttcgcgagagaatctgatgagaacagagagtttctcgccgggaaagatgatttcgtagcgatgcttgtggatctcattagcgattccagaaacttctctgattctcaattgctactcgttggagaagcggtgaagattctgagcatgattcgtcggaaaatcttcgatcggagacggttatcgaatctgatcttaacgaacggtggtgattgcttgacttccttcttcctattgattaaacgcgggaatccaaaattgaagatcgattgctccgccgtgcttgagtttatcgccgtcgacgcagagtcaaagcttataatcgccaagggagaaggattggtcaccgagattattaaattgataagctcagattccgactcaagcttaatcgaagcgaatttatctttattaatcgcgattgcgtcttcaaaacgcgtgaaactcgcattaatcagagaaaagctagtcacgaaactcacgagtttgttaacagatccaactacgagcgtttcagtgacggaaaaatgcttaaagcttctcgaagctatttcgtcttgtaaagaaggtcgatcggagatttgtgatggtgtgtgcgtggagacggtggtgaataagctgatgaaagtgtcgacggcggcgactgaacacgccgttacggttttgtggagcgtctgttatcttttcaaggaaaagaaggcgcaagatgccgttattagaattaacggcgttacgaagatactgttacttttacagagtaattgctcgcttaccgttaggcatatgctaacggatcttcttaaggtgttcaaggtgaactcaagatcttgcctttcggtatacgaaaccaaaacgacacatattatgccgttttga

SEQ ID NO: 79444 - protein, 409 aa, Arabidopsis thaliana
  peptide (1)..(409): Ceres Seq. ID no. 12651373
MRSDDLYITTVPCFFKCPISLDVMKSPVSLSTGVTYDRVSIQRWLDDGNNTCPATMQILQNKEFVPNLTLHRLIDHWSDSINRRADSESPESDTPTRDEINAAIERFRIENDARSKILRFARESDENREFLAGKDDFVAMLVDLISDSRNFSDSQLLLVGEAVKILSMIRRKIFDRRRLSNLILTNGGDCLTSFFLLIKRGNPKLKIDCSAVLEFIAVDAESKLIIAKGEGLVTEIIKLISSDSDSSLIEANLSLLIAIASSKRVKLALIREKLVTKLTSLLTDPTTSVSVTEKCLKLLEAISSCKEGRSEICDGVCVETVVNKLMKVSTAATEHAVTVLWSVCYLFKEKKAQDAVIRINGVTKILLLLQSNCSLTVRHMLTDLLKVFKVNSRSCLSVYETKTTHIMPF

SEQ ID NO: 79445 - protein, 386 aa, Arabidopsis thaliana
  peptide (1)..(386): Ceres Seq. ID no. 12651374
MKSPVSLSTGVTYDRVSIQRWLDDGNNTCPATMQILQNKEFVPNLTLHRLIDHWSDSINRRADSESPESDTPTRDEINAAIERFRIENDARSKILRFARESDENREFLAGKDDFVAMLVDLISDSRNFSDSQLLLVGEAVKILSMIRRKIFDRRRLSNLILTNGGDCLTSFFLLIKRGNPKLKIDCSAVLEFIAVDAESKLIIAKGEGLVTEIIKLISSDSDSSLIEANLSLLIAIASSKRVKLALIREKLVTKLTSLLTDPTTSVSVTEKCLKLLEAISSCKEGRSEICDGVCVETVVNKLMKVSTAATEHAVTVLWSVCYLFKEKKAQDAVIRINGVTKILLLLQSNCSLTVRHMLTDLLKVFKVNSRSCLSVYETKTTHIMPF

SEQ ID NO: 79446 - protein, 354 aa, Arabidopsis thaliana
  peptide (1)..(354): Ceres Seq. ID no. 12651375
MQILQNKEFVPNLTLHRLIDHWSDSINRRADSESPESDTPTRDEINAAIERFRIENDARSKILRFARESDENREFLAGKDDFVAMLVDLISDSRNFSDSQLLLVGEAVKILSMIRRKIFDRRRLSNLILTNGGDCLTSFFLLIKRGNPKLKIDCSAVLEFIAVDAESKLIIAKGEGLVTEIIKLISSDSDSSLIEANLSLLIAIASSKRVKLALIREKLVTKLTSLLTDPTTSVSVTEKCLKLLEAISSCKEGRSEICDGVCVETVVNKLMKVSTAATEHAVTVLWSVCYLFKEKKAQDAVIRINGVTKILLLLQSNCSLTVRHMLTDLLKVFKVNSRSCLSVYETKTTHIMPF

SEQ ID NO: 79447 - DNA, 1956 bp, Arabidopsis thaliana
  misc_feature (1)..(1956): Ceres Seq. ID no. 12651380
  misc_feature (1)..(1956): Ortholog of  Ceres SEQ ID NO 13654490 as cited in SEQ ID NO 68540
aaaaaaagtaaacgccattattgaaagaaaaacactcacatctctctctctctctctctagagctgttcatctccccaaccacaacaaaccaacttgcttagctttgctctgtccagggcaaagagcatcatccctcaataaagcaattcccattttcttcttttacttttgtcctaaaactgttaattgattctgtctgaatattatttttattaacggaccaaacaaaaaaaaacttgcagaagaatgaaagaaaaagcaataaccctccaaaccaaattctaaagcctcaaatttggaatattccctttcttcttcattcccttttttttttttaatttgccatttactcattattgatcttatgtgagacgacctcctctgtttctttcttcctcgtaacagtaaagggtcttcctttttaatctgaatttaccaatctgattcttctgttttttgttttttttatttgtctatcttttaaactatttgaaatctaaactttgtttggttcttcacgatttttaatctccgatgaatcaaattcatcaaaagattcatcttttagatctggttacgtaattcgatttgctctgttttttgtttttcgttttgaattctttattaagtaaccaaatttggggaagaaggaggagtgtgggtgataatggatttggatgatttccgatcggttatggataacgcaggtgttgatgtttggacatttatcgatacggcgattcttgttgcgtctcttgactatggtcaagaactgaaacgtcggagagataacatcgtcgagcgtctctacgctacgtcgatggctaacaagtgtagaaactgcgattttggcggcggtggtaacgttacggaggcggcgattggtagggttaataatgggagggttcacgaggagacggaggaggaagatgaagaaggagtaacagcagcagcagaagaagaagttagagagaaatctgttaatgttgaagacgatgacgatttcgatccctttgctggtttgtttgatgatgagcagaagagtattgttgaaatcaaggagaaacttgaagatcctgatctgtctgaagaatctttggttgagttgcttcagaatctggaagatatggatataacattccaagctcttcaggaaactgatattgggaggcatgtgaatcgagttcggaagcatccttcgaacaatgttcgaagattagctaaacagcttgtcaaaaaatggaaggaaacagtagatgaatgggtcaaatttaaccagcctggtgatcttgaacctccaagtttgatagccgatgaggattcaccggtgcagaaagctcttcataatggtagtcgccaacaggtccctgatttcggatattcaccggttcctcagaatgggtattccagttcaagcaagaacagtaacattactgagccagaaagaaaaccaagacctgttgctcctcaacctaggagagaatctccttctccagcaaaaccttctcgcccttctccttctcaacaaaccattccgagggacaaagagcataaagaagttgatttcgacacggccaggaaaaggctacaacaaaactacagacaagccgagaatgcaaaaaagcaaaggactatacaggtgatggacattcatgacattcctaaacctaagaaaggtggatttttcccaagaaaaggcgggagttctcaaggtggtagacactggtaaattgagaaagatgagagttaagtgaggaagagaaaaaaagacagagaacaaagctctgtttctgagacacaagaagacagtgaattctaaaaatgtttcaagaatttggaattaagttggtgggtacacttgttttctattttgttgttactactacgtatatttttttctgataaagaacataatttttcttggattttattaaataatagattcgaaaaaaatc

SEQ ID NO: 79448 - protein, 353 aa, Arabidopsis thaliana
  peptide (1)..(353): Ceres Seq. ID no. 12651381
MDLDDFRSVMDNAGVDVWTFIDTAILVASLDYGQELKRRRDNIVERLYATSMANKCRNCDFGGGGNVTEAAIGRVNNGRVHEETEEEDEEGVTAAAEEEVREKSVNVEDDDDFDPFAGLFDDEQKSIVEIKEKLEDPDLSEESLVELLQNLEDMDITFQALQETDIGRHVNRVRKHPSNNVRRLAKQLVKKWKETVDEWVKFNQPGDLEPPSLIADEDSPVQKALHNGSRQQVPDFGYSPVPQNGYSSSSKNSNITEPERKPRPVAPQPRRESPSPAKPSRPSPSQQTIPRDKEHKEVDFDTARKRLQQNYRQAENAKKQRTIQVMDIHDIPKPKKGGFFPRKGGSSQGGRHW

SEQ ID NO: 79449 - protein, 344 aa, Arabidopsis thaliana
  peptide (1)..(344): Ceres Seq. ID no. 12651382
MDNAGVDVWTFIDTAILVASLDYGQELKRRRDNIVERLYATSMANKCRNCDFGGGGNVTEAAIGRVNNGRVHEETEEEDEEGVTAAAEEEVREKSVNVEDDDDFDPFAGLFDDEQKSIVEIKEKLEDPDLSEESLVELLQNLEDMDITFQALQETDIGRHVNRVRKHPSNNVRRLAKQLVKKWKETVDEWVKFNQPGDLEPPSLIADEDSPVQKALHNGSRQQVPDFGYSPVPQNGYSSSSKNSNITEPERKPRPVAPQPRRESPSPAKPSRPSPSQQTIPRDKEHKEVDFDTARKRLQQNYRQAENAKKQRTIQVMDIHDIPKPKKGGFFPRKGGSSQGGRHW

SEQ ID NO: 79450 - protein, 302 aa, Arabidopsis thaliana
  peptide (1)..(302): Ceres Seq. ID no. 12651383
MANKCRNCDFGGGGNVTEAAIGRVNNGRVHEETEEEDEEGVTAAAEEEVREKSVNVEDDDDFDPFAGLFDDEQKSIVEIKEKLEDPDLSEESLVELLQNLEDMDITFQALQETDIGRHVNRVRKHPSNNVRRLAKQLVKKWKETVDEWVKFNQPGDLEPPSLIADEDSPVQKALHNGSRQQVPDFGYSPVPQNGYSSSSKNSNITEPERKPRPVAPQPRRESPSPAKPSRPSPSQQTIPRDKEHKEVDFDTARKRLQQNYRQAENAKKQRTIQVMDIHDIPKPKKGGFFPRKGGSSQGGRHW

SEQ ID NO: 79451 - DNA, 2037 bp, Arabidopsis thaliana
  misc_feature (1)..(2037): Ceres Seq. ID no. 12651400
  misc_feature (1)..(2037): Ortholog of  Ceres SEQ ID NO 13623192 as cited in SEQ ID NO 1286
  misc_feature (1)..(2037): Ortholog of  Ceres SEQ ID NO 13594171 as cited in SEQ ID NO 60359
  misc_feature (1)..(2037): Ortholog of  Ceres SEQ ID NO 14301866 as cited in SEQ ID NO 60955
  misc_feature (1)..(2037): Ortholog of  Ceres SEQ ID NO 13590645 as cited in SEQ ID NO 62109
atggtattaacgacgaatctctatagcttaaaccttcgttcgaccttcttcttcactaatactattacttgccctacacttttcaccttcaaactctcctctgtttctaaccctagacgagtattccccaatattagagctcacgtttccgcagccagctccaattcagagctcgaatctctcttatctaccgatcggaagctgatcagtaagcaatcaaacaatggtgcgtcttcgatttcgtcgggagtgagacttgagaacattagtaagagctatgaaggcattacggtgctaaaggatgtgacttgggaagtgaagaaaggagaaaaagtagggttaatcggcgtcaacggtgcagggaagacgacacagctcaggatcataacgggtcaagaagaacctgattcaggaaacgtgatttgggccaaacccaatttgaaagttgctttcttgagtcaagagttcgaggtttcaatggggaagacagtgaaggaagagttcatgtgtacgtttaaggaagagatggaaatagcgaggaagcttgagaacttgcagaaggcgattgaagaagctgttgatgatttagaactaatgggaaagttactagacgaattcgatttgttgcagagacgagctcaagaggttgatttggattctatccatgctaaaatcagtaagctgatgtcggaattagggtttgtgtcggaggatgctgataggcttgtggcttcttttagcagtggatggcaaatgagaatgtcacttgggaagattttgcttcagaatccagatttactgcttttggatgagccaacgaatcatttggatcttgatactattgagtggcttgaaggttacttgattaagcaagatgtgcctatggtcataatatcacatgacagggcgtttcttgatcagttgtgtactaaaattgtggaaaccgaaatgggagtttcgaggactttcgatggtaattactctcagtatgtaatttcaaaggcagagttggttgaagctcagtatgctgcttgggagaagcaacagaaagagattgaagcaacaaaggatttgattagtaggctaagtgctggagcaaattctggtcgagcttcttcagcagaaaagaaactggagaagcttcaggaagaggagctaatagagaagccatttcagcggaaacaaatgaaaatccggtttccggaatgtggattaagtggaagatctgtagtcactgttaagaatcttgtatttggttttgatgataagatgttatttaacaaggcgaatctagctatagaaagaggagagaaagtcgctataattggtccaaacgggtgcggaaagagtacattgctgaaacttattatgggtttggagaagcctatgagaggtgaggtgatacttggggagcacaatgtattgccaaactacttcgagcagaatcaggcagaggctcaagatttggataaaacggtgattgagacagttgttgaagctgctgtagattggagaattgatgatataaaagctcttcttggtcggtgcaacttcaaagctgacatgttggatagaaaggtctctcttttgagtggtggtgagaaggcacgccttgctttctgcaaattcatggtgaaaccatccactctacttgtgttggacgaacccaccaatcacttagacataccttcaaaagaaatgcttgaggaagctataaatgagtacaaaggcacggtcatcacagtctcacacgatagatacttcattaaacagattgttaacagagttattgaagtcagagatggtggtttaatggactatgcaggagactacaattatttcctggagaagaatgttgaagctagagcaagggagctggagagggaagcagaattggaagaaaaagctccaaaagtgaaagcaaagtcaaagatgtcaaaggctgagagagaagcacggaagaagcaaaagatgaaagcgtttcaagcttccaaaaagaagtcaaagtccagcaaaaatgccaagagatggaattaa

SEQ ID NO: 79452 - protein, 678 aa, Arabidopsis thaliana
  peptide (1)..(678): Ceres Seq. ID no. 12651401
MVLTTNLYSLNLRSTFFFTNTITCPTLFTFKLSSVSNPRRVFPNIRAHVSAASSNSELESLLSTDRKLISKQSNNGASSISSGVRLENISKSYEGITVLKDVTWEVKKGEKVGLIGVNGAGKTTQLRIITGQEEPDSGNVIWAKPNLKVAFLSQEFEVSMGKTVKEEFMCTFKEEMEIARKLENLQKAIEEAVDDLELMGKLLDEFDLLQRRAQEVDLDSIHAKISKLMSELGFVSEDADRLVASFSSGWQMRMSLGKILLQNPDLLLLDEPTNHLDLDTIEWLEGYLIKQDVPMVIISHDRAFLDQLCTKIVETEMGVSRTFDGNYSQYVISKAELVEAQYAAWEKQQKEIEATKDLISRLSAGANSGRASSAEKKLEKLQEEELIEKPFQRKQMKIRFPECGLSGRSVVTVKNLVFGFDDKMLFNKANLAIERGEKVAIIGPNGCGKSTLLKLIMGLEKPMRGEVILGEHNVLPNYFEQNQAEAQDLDKTVIETVVEAAVDWRIDDIKALLGRCNFKADMLDRKVSLLSGGEKARLAFCKFMVKPSTLLVLDEPTNHLDIPSKEMLEEAINEYKGTVITVSHDRYFIKQIVNRVIEVRDGGLMDYAGDYNYFLEKNVEARARELEREAELEEKAPKVKAKSKMSKAEREARKKQKMKAFQASKKKSKSSKNAKRWN

SEQ ID NO: 79453 - protein, 519 aa, Arabidopsis thaliana
  peptide (1)..(519): Ceres Seq. ID no. 12651402
MGKTVKEEFMCTFKEEMEIARKLENLQKAIEEAVDDLELMGKLLDEFDLLQRRAQEVDLDSIHAKISKLMSELGFVSEDADRLVASFSSGWQMRMSLGKILLQNPDLLLLDEPTNHLDLDTIEWLEGYLIKQDVPMVIISHDRAFLDQLCTKIVETEMGVSRTFDGNYSQYVISKAELVEAQYAAWEKQQKEIEATKDLISRLSAGANSGRASSAEKKLEKLQEEELIEKPFQRKQMKIRFPECGLSGRSVVTVKNLVFGFDDKMLFNKANLAIERGEKVAIIGPNGCGKSTLLKLIMGLEKPMRGEVILGEHNVLPNYFEQNQAEAQDLDKTVIETVVEAAVDWRIDDIKALLGRCNFKADMLDRKVSLLSGGEKARLAFCKFMVKPSTLLVLDEPTNHLDIPSKEMLEEAINEYKGTVITVSHDRYFIKQIVNRVIEVRDGGLMDYAGDYNYFLEKNVEARARELEREAELEEKAPKVKAKSKMSKAEREARKKQKMKAFQASKKKSKSSKNAKRWN

SEQ ID NO: 79454 - protein, 510 aa, Arabidopsis thaliana
  peptide (1)..(510): Ceres Seq. ID no. 12651403
MCTFKEEMEIARKLENLQKAIEEAVDDLELMGKLLDEFDLLQRRAQEVDLDSIHAKISKLMSELGFVSEDADRLVASFSSGWQMRMSLGKILLQNPDLLLLDEPTNHLDLDTIEWLEGYLIKQDVPMVIISHDRAFLDQLCTKIVETEMGVSRTFDGNYSQYVISKAELVEAQYAAWEKQQKEIEATKDLISRLSAGANSGRASSAEKKLEKLQEEELIEKPFQRKQMKIRFPECGLSGRSVVTVKNLVFGFDDKMLFNKANLAIERGEKVAIIGPNGCGKSTLLKLIMGLEKPMRGEVILGEHNVLPNYFEQNQAEAQDLDKTVIETVVEAAVDWRIDDIKALLGRCNFKADMLDRKVSLLSGGEKARLAFCKFMVKPSTLLVLDEPTNHLDIPSKEMLEEAINEYKGTVITVSHDRYFIKQIVNRVIEVRDGGLMDYAGDYNYFLEKNVEARARELEREAELEEKAPKVKAKSKMSKAEREARKKQKMKAFQASKKKSKSSKNAKRWN

SEQ ID NO: 79455 - DNA, 2158 bp, Arabidopsis thaliana
  misc_feature (1)..(2158): Ceres Seq. ID no. 12651404
  misc_feature (1)..(2158): Ortholog of  Ceres SEQ ID NO 13594209 as cited in SEQ ID NO 59089
  misc_feature (1)..(2158): Ortholog of  Ceres SEQ ID NO 14307964 as cited in SEQ ID NO 66191
  misc_feature (1)..(2158): Ortholog of  Ceres SEQ ID NO 13502874 as cited in SEQ ID NO 66298
  misc_feature (1)..(2158): Ortholog of  Ceres SEQ ID NO 12614124 as cited in SEQ ID NO 68392
atttcaaaaccgacgtctttcttcccatgcattgcgcatttaattaacgctgccaaaacatacatgtggatatatatatagtttttttatatatagatgtacctttaccttcaacttctccattgttcttctccaagtacttctctcttcaaccaaaaaaaaagagtactttccttctcataggatttttttgctttctcttgaaaaaccttttgttattgttattggttcgtacgttgttcattatttgacaagaaacaagattacaaaaaaaaaaagtacatcaacccaaaataatggagttgatgaatttggcttcaaaagaaacaagctattggatgattgcactgcctgccggttttggatcccaaaacctacatgatgtttccaccctaggctatctattccttgccgtcgtttttctctctatagtcacgtgggctctcgccggaggcggtggtgtcgcttggaagaacggccgtaaccggttgggtcgtgtcgcgatccctggtcctcgtggcataccagtattcggcagtcttttcactctcagccgaggcttggctcatcggacgttagcagccatggcttggagccgagccaacactgagattatggcttttagccttggttcaacgccggttatcgtggcttctgaaccaaacatagctcgtgagattctgatgtcgcctcacttcgcggaccggccggttaagcagtctgctaagagcctcatgttcagccgagccataggtttcgccccaaacgggacttactggcgcatgttaagaaggatcgcatcgactcacctatttgctcctcggcgtatcttagcacacgaagctgggcgccagctagactgcgctgaaatggtgaaagctgtgtcagtggagcaaaacggcgctggatcagtcgttttaaggaaacacttacaactagccgccttgaacaacatcatgggaagtgtttttgggagaagatacgatcctctggctcagaaagaggatcttgatgagcttacatcaatggttagggaagggttcgagcttttgggtgcttttaattggtctgattatcttccatggctcggttatttctacgactcaattcgtttaaaccaacgttgctcagatctcgtccctcgaattagaaccctcgtcaagaaaatcatcgacgaacatcgagttagtaactctgagaagaaaagagacattggagattttgttgatgtcttattgtctttagacggtgatgagaaacttcaagaagatgacatgatcgccgttttatgggagatgatttttcgagggacagatacaacggcgttattaacggagtggaccatggccgagctagtactgaaccctaacgtgcaaaccaagttacgagacgagattttaactgctgtgggcgacggcgccgacggagacgtggcagatgctgacctggcaaaactcccgtacctaaacgcagtggtgaaggaaactctaaggctgcatcctcctggaccactgctttcatgggctcgtctttccacgtcagacgtccagctcagcaatggcatggtgattccaaagggaactacagcgatggtcaacatgtgggctataacccacgaccagactgtatggtccgacccgctaaagtttgacccggagagattcactgggaatgctgacatggatattcgtggtggggatctaaggcttgcaccgtttggagccggtaggagagtgtgtccggggaagaacatggggctagctactgtgactcggtgggtggctgagttggtacgacggttcgagtggggtcaggatcagaccgagccagttgatcttggtgaggtcttgaagctttcttgtgagatggagcatccgttacgtgccgttgtaacggaaatattttaagtcaaaaaagggctaagtagggttttgatttttgtcaacgttttggttacttataatttttaatttaacgtttttttgttgtcgagaggtatgaattgcagaatgcttgccgttttagtattttatcgagagtttttttttctttcaattggtgacatagtgatttggtttgatatgtagtatcaatgtaccattatcttgtgggtctaaaatctaaatggagtaatgagtaagagatatcaattttggtc

SEQ ID NO: 79456 - protein, 536 aa, Arabidopsis thaliana
  peptide (1)..(536): Ceres Seq. ID no. 12651405
MELMNLASKETSYWMIALPAGFGSQNLHDVSTLGYLFLAVVFLSIVTWALAGGGGVAWKNGRNRLGRVAIPGPRGIPVFGSLFTLSRGLAHRTLAAMAWSRANTEIMAFSLGSTPVIVASEPNIAREILMSPHFADRPVKQSAKSLMFSRAIGFAPNGTYWRMLRRIASTHLFAPRRILAHEAGRQLDCAEMVKAVSVEQNGAGSVVLRKHLQLAALNNIMGSVFGRRYDPLAQKEDLDELTSMVREGFELLGAFNWSDYLPWLGYFYDSIRLNQRCSDLVPRIRTLVKKIIDEHRVSNSEKKRDIGDFVDVLLSLDGDEKLQEDDMIAVLWEMIFRGTDTTALLTEWTMAELVLNPNVQTKLRDEILTAVGDGADGDVADADLAKLPYLNAVVKETLRLHPPGPLLSWARLSTSDVQLSNGMVIPKGTTAMVNMWAITHDQTVWSDPLKFDPERFTGNADMDIRGGDLRLAPFGAGRRVCPGKNMGLATVTRWVAELVRRFEWGQDQTEPVDLGEVLKLSCEMEHPLRAVVTEIF

SEQ ID NO: 79457 - protein, 533 aa, Arabidopsis thaliana
  peptide (1)..(533): Ceres Seq. ID no. 12651406
MNLASKETSYWMIALPAGFGSQNLHDVSTLGYLFLAVVFLSIVTWALAGGGGVAWKNGRNRLGRVAIPGPRGIPVFGSLFTLSRGLAHRTLAAMAWSRANTEIMAFSLGSTPVIVASEPNIAREILMSPHFADRPVKQSAKSLMFSRAIGFAPNGTYWRMLRRIASTHLFAPRRILAHEAGRQLDCAEMVKAVSVEQNGAGSVVLRKHLQLAALNNIMGSVFGRRYDPLAQKEDLDELTSMVREGFELLGAFNWSDYLPWLGYFYDSIRLNQRCSDLVPRIRTLVKKIIDEHRVSNSEKKRDIGDFVDVLLSLDGDEKLQEDDMIAVLWEMIFRGTDTTALLTEWTMAELVLNPNVQTKLRDEILTAVGDGADGDVADADLAKLPYLNAVVKETLRLHPPGPLLSWARLSTSDVQLSNGMVIPKGTTAMVNMWAITHDQTVWSDPLKFDPERFTGNADMDIRGGDLRLAPFGAGRRVCPGKNMGLATVTRWVAELVRRFEWGQDQTEPVDLGEVLKLSCEMEHPLRAVVTEIF

SEQ ID NO: 79458 - protein, 522 aa, Arabidopsis thaliana
  peptide (1)..(522): Ceres Seq. ID no. 12651407
MIALPAGFGSQNLHDVSTLGYLFLAVVFLSIVTWALAGGGGVAWKNGRNRLGRVAIPGPRGIPVFGSLFTLSRGLAHRTLAAMAWSRANTEIMAFSLGSTPVIVASEPNIAREILMSPHFADRPVKQSAKSLMFSRAIGFAPNGTYWRMLRRIASTHLFAPRRILAHEAGRQLDCAEMVKAVSVEQNGAGSVVLRKHLQLAALNNIMGSVFGRRYDPLAQKEDLDELTSMVREGFELLGAFNWSDYLPWLGYFYDSIRLNQRCSDLVPRIRTLVKKIIDEHRVSNSEKKRDIGDFVDVLLSLDGDEKLQEDDMIAVLWEMIFRGTDTTALLTEWTMAELVLNPNVQTKLRDEILTAVGDGADGDVADADLAKLPYLNAVVKETLRLHPPGPLLSWARLSTSDVQLSNGMVIPKGTTAMVNMWAITHDQTVWSDPLKFDPERFTGNADMDIRGGDLRLAPFGAGRRVCPGKNMGLATVTRWVAELVRRFEWGQDQTEPVDLGEVLKLSCEMEHPLRAVVTEIF

SEQ ID NO: 79459 - DNA, 1845 bp, Arabidopsis thaliana
  misc_feature (1)..(1845): Ceres Seq. ID no. 12651429
  misc_feature (1)..(1845): Ortholog of  Ceres SEQ ID NO 15177304 as cited in SEQ ID NO 52668
attcagaagcactcgagcaaacataatatatctctctcttcctctctctctcaagcatcaattaattctcaaagtcttccttaggcaaaaatgttcatcgaaagcttcaaggttgaatctccgaacgtgaagtacaccgagaatgagatccactcagtgtacgactaccaaaccactgagcttgttcatgagaacaaaaacggtgcttttcaatggactgtgaagccaaagactgtgaagtatgagtttaagaccgacactcatgttcccaaacttggagtaatgctcgttggttggggaggcaacaatggttctacacttaccgctggtgttatcgccaatcgtgagggaatatcttgggctacaaaggagaaagtgcaacaagctaattatttcgggtcattaacccaagcatcttctattcgggtcgggtcatttaatggtgaagaaatctatgctcctttcaaaagtcttctccccatggtgaatccggaagaaattgtgtttggaggatgggacataagtgacatgaacttagcagacgcaatggcacgagccaaggtcctagacatcgaccttcaaaagcagatgcgtccgttcatggaacacatggttccactccccggaatcttcgacccagatttcatcgcagctaaccaagggtcacgtgctaaccacgtgatcaaaggcaccaagaaacaacaactcgaacaagtcatcaaggacatcagggagttcaaagagaaaaacaaagtggataaagtggtggtactgtggacggcaaacacagaaagatacagcaatgtggtggttggtcttaacgacacgacggagaatctcatgtcatctttggacaaggatgaggctgagatttctccttctacactttacgccattgcttgtgttcttgagaacgttccttttatcaatggaagtccacaaaacacttttgtccctgggcttattgaattagccataaagagaaactgcttgatcggtggtgatgacttcaagagtggtcagaccaagatgaagtctgtcctcgtcgatttccttgttggcgccggaatcaaaccgacgtcgattgtcagttacaaccatcttgggaacaacgacggcatgaacttgtcagcacctcaaacattccggtcaaaggagatatcgaagagcaatgtcgtggacgatatggttggtagcaacggaattttgtacgagcctggtgaacaccctgaccacgttgtggtcattaagtatgtgccatgtgtaggagacagcaagagagcaatggatgaatacacatcagagatattcatgggagggaagaacacgattgtgatgcacaacacttgtgaagactctctcttggctgctccaattattttggaccttgttcttcttgctgagctcactactcggatccagttcatgagtgaaaacgagggaaagtttcattctttccatccggtggctactctcctaagttacctctcaaaggcaccactggttcctcctggcacgccagttgttaatgctttgtcgaaacagcgtgcaatgcttgagaacgtactcagagcttgtgttggacttgctcctgagaacaacatgattctcgagtacaagtgatcaaagagaccaattcaagaccccctttcttagctatgttgctttctatgtttaataaataattacatttctaaaatgtaagtgttcttttctttgtctttctctcatttacaaatgtcatctatgtggtttcgttatcttccccagccaaatatgtaatggtatctcgcgctgaattgggattgtctttcatctcatttcaaactataatatatatttggg

SEQ ID NO: 79460 - protein, 510 aa, Arabidopsis thaliana
  peptide (1)..(510): Ceres Seq. ID no. 12651430
MFIESFKVESPNVKYTENEIHSVYDYQTTELVHENKNGAFQWTVKPKTVKYEFKTDTHVPKLGVMLVGWGGNNGSTLTAGVIANREGISWATKEKVQQANYFGSLTQASSIRVGSFNGEEIYAPFKSLLPMVNPEEIVFGGWDISDMNLADAMARAKVLDIDLQKQMRPFMEHMVPLPGIFDPDFIAANQGSRANHVIKGTKKQQLEQVIKDIREFKEKNKVDKVVVLWTANTERYSNVVVGLNDTTENLMSSLDKDEAEISPSTLYAIACVLENVPFINGSPQNTFVPGLIELAIKRNCLIGGDDFKSGQTKMKSVLVDFLVGAGIKPTSIVSYNHLGNNDGMNLSAPQTFRSKEISKSNVVDDMVGSNGILYEPGEHPDHVVVIKYVPCVGDSKRAMDEYTSEIFMGGKNTIVMHNTCEDSLLAAPIILDLVLLAELTTRIQFMSENEGKFHSFHPVATLLSYLSKAPLVPPGTPVVNALSKQRAMLENVLRACVGLAPENNMILEYK

SEQ ID NO: 79461 - protein, 446 aa, Arabidopsis thaliana
  peptide (1)..(446): Ceres Seq. ID no. 12651431
MLVGWGGNNGSTLTAGVIANREGISWATKEKVQQANYFGSLTQASSIRVGSFNGEEIYAPFKSLLPMVNPEEIVFGGWDISDMNLADAMARAKVLDIDLQKQMRPFMEHMVPLPGIFDPDFIAANQGSRANHVIKGTKKQQLEQVIKDIREFKEKNKVDKVVVLWTANTERYSNVVVGLNDTTENLMSSLDKDEAEISPSTLYAIACVLENVPFINGSPQNTFVPGLIELAIKRNCLIGGDDFKSGQTKMKSVLVDFLVGAGIKPTSIVSYNHLGNNDGMNLSAPQTFRSKEISKSNVVDDMVGSNGILYEPGEHPDHVVVIKYVPCVGDSKRAMDEYTSEIFMGGKNTIVMHNTCEDSLLAAPIILDLVLLAELTTRIQFMSENEGKFHSFHPVATLLSYLSKAPLVPPGTPVVNALSKQRAMLENVLRACVGLAPENNMILEYK

SEQ ID NO: 79462 - protein, 380 aa, Arabidopsis thaliana
  peptide (1)..(380): Ceres Seq. ID no. 12651432
MVNPEEIVFGGWDISDMNLADAMARAKVLDIDLQKQMRPFMEHMVPLPGIFDPDFIAANQGSRANHVIKGTKKQQLEQVIKDIREFKEKNKVDKVVVLWTANTERYSNVVVGLNDTTENLMSSLDKDEAEISPSTLYAIACVLENVPFINGSPQNTFVPGLIELAIKRNCLIGGDDFKSGQTKMKSVLVDFLVGAGIKPTSIVSYNHLGNNDGMNLSAPQTFRSKEISKSNVVDDMVGSNGILYEPGEHPDHVVVIKYVPCVGDSKRAMDEYTSEIFMGGKNTIVMHNTCEDSLLAAPIILDLVLLAELTTRIQFMSENEGKFHSFHPVATLLSYLSKAPLVPPGTPVVNALSKQRAMLENVLRACVGLAPENNMILEYK

SEQ ID NO: 79463 - DNA, 1004 bp, Arabidopsis thaliana
  misc_feature (1)..(1004): Ceres Seq. ID no. 12651433
  misc_feature (1)..(1004): Ortholog of  Ceres SEQ ID NO 12484482 as cited in SEQ ID NO 53324
  misc_feature (1)..(1004): Ortholog of  Ceres SEQ ID NO 15176234 as cited in SEQ ID NO 54949
  misc_feature (1)..(1004): Ortholog of  Ceres SEQ ID NO 14314507 as cited in SEQ ID NO 59337
catacagaaatttcacttgttcgaaaaatggcttctctcaaagttcccgccactgttcctcttcccgaagaagacgctgagcaactctacaaagcctttaaaggatggggaaccaatgagaggatgatcatatcaatcttggctcacagaaatgcaacgcaacgtagtttcattcgtgccgtttatgctgctaactacaataaggatcttctcaaggaattagacagagagctttccggtgactttgagcgagctgtgatgttgtggacttttgaaccagcggagagagatgcttatttggcaaaagaatctaccaaaatgttcaccaaaaacaattgggttcttgtcgaaatcgcttgtactagatctgctcttgaactctttaatgccaagcaagcataccaagcccgctacaagacctccctcgaggaagacgtcgcataccacacatctggagacattcgaaagctcttggtacctcttgtgagcacttttaggtacgatggagatgaagtgaacatgacgttagctaggtccgaggctaagatacttcacgagaagatcaaggaaaaggcttatgctgatgatgatctcataagaatcttgacaaccaggagcaaagcacaaatcagcgcaactctcaatcactacaaaaacaatttcggaacttccatgagcaaatacctaaaggaggattcggaaaacgaatacattcaattgctcaaagccgtgatcaaatgcttgacatatccagagaagtattttgagaaagttctacgtcaagccatcaacaaattgggaacagatgagtggggactaacgagagtggtcactacacgagcagagtttgacatggaacggatcaaagaggaatatatacgtagaaacagtgttcctcttgatcgagccattgctaaagacactcatggtgactatgaggatatacttctcgctcttctcggacatgaccatgcttgaaataacatttgcaagttttgtttaag

SEQ ID NO: 79464 - protein, 325 aa, Arabidopsis thaliana
  peptide (1)..(325): Ceres Seq. ID no. 12651434
HTEISLVRKMASLKVPATVPLPEEDAEQLYKAFKGWGTNERMIISILAHRNATQRSFIRAVYAANYNKDLLKELDRELSGDFERAVMLWTFEPAERDAYLAKESTKMFTKNNWVLVEIACTRSALELFNAKQAYQARYKTSLEEDVAYHTSGDIRKLLVPLVSTFRYDGDEVNMTLARSEAKILHEKIKEKAYADDDLIRILTTRSKAQISATLNHYKNNFGTSMSKYLKEDSENEYIQLLKAVIKCLTYPEKYFEKVLRQAINKLGTDEWGLTRVVTTRAEFDMERIKEEYIRRNSVPLDRAIAKDTHGDYEDILLALLGHDHA

SEQ ID NO: 79465 - protein, 316 aa, Arabidopsis thaliana
  peptide (1)..(316): Ceres Seq. ID no. 12651435
MASLKVPATVPLPEEDAEQLYKAFKGWGTNERMIISILAHRNATQRSFIRAVYAANYNKDLLKELDRELSGDFERAVMLWTFEPAERDAYLAKESTKMFTKNNWVLVEIACTRSALELFNAKQAYQARYKTSLEEDVAYHTSGDIRKLLVPLVSTFRYDGDEVNMTLARSEAKILHEKIKEKAYADDDLIRILTTRSKAQISATLNHYKNNFGTSMSKYLKEDSENEYIQLLKAVIKCLTYPEKYFEKVLRQAINKLGTDEWGLTRVVTTRAEFDMERIKEEYIRRNSVPLDRAIAKDTHGDYEDILLALLGHDHA

SEQ ID NO: 79466 - protein, 284 aa, Arabidopsis thaliana
  peptide (1)..(284): Ceres Seq. ID no. 12651436
MIISILAHRNATQRSFIRAVYAANYNKDLLKELDRELSGDFERAVMLWTFEPAERDAYLAKESTKMFTKNNWVLVEIACTRSALELFNAKQAYQARYKTSLEEDVAYHTSGDIRKLLVPLVSTFRYDGDEVNMTLARSEAKILHEKIKEKAYADDDLIRILTTRSKAQISATLNHYKNNFGTSMSKYLKEDSENEYIQLLKAVIKCLTYPEKYFEKVLRQAINKLGTDEWGLTRVVTTRAEFDMERIKEEYIRRNSVPLDRAIAKDTHGDYEDILLALLGHDHA

SEQ ID NO: 79467 - DNA, 624 bp, Arabidopsis thaliana
  misc_feature (1)..(624): Ceres Seq. ID no. 12651437
  misc_feature (1)..(624): Ortholog of  Ceres SEQ ID NO 12608945 as cited in SEQ ID NO 51209
  misc_feature (1)..(624): Ortholog of  Ceres SEQ ID NO 14316444 as cited in SEQ ID NO 59233
  misc_feature (1)..(624): Ortholog of  Ceres SEQ ID NO 12619999 as cited in SEQ ID NO 66123
  misc_feature (1)..(624): Ortholog of  Ceres SEQ ID NO 13656436 as cited in SEQ ID NO 69154
atggcgagtgtgtcaccattagcaaagtacaagctcgtgttccttggagatcaatccgttggcaagaccagcatcatcactcgtttcatgtacgacaaattcgataccacttatcaggcaaccattggaattgattttttgtcaaaaacaatgtaccttgaggataggactgttcgtctccaactatgggatactgcaggacaggagagatttcgaagtctaataccaagttatatcagagattcttctgttgctgtaattgtctatgatgttgcaaataggcagtcattcttgaacacatccaagtggattgaggatgttcgtacagagagaggtagcgatgtcatcattgttctggttggtaacaaaacagatctcgtcgacaaaaggcaagtgtcgattgaggaaggtgataacaaagctcgtgattatggagtaatattcattgagaccagtgcaaaagcaggatttaacatcaagccactttttcgcaagattgcagcagcgttaccaggaatggaaacactttcttcaacgaaacaagaggatatggttgatgtgaatctaaagacttcgagcaattcggctcaaggggagcaacaacgaggtggttgtgcttgttaa

SEQ ID NO: 79468 - protein, 207 aa, Arabidopsis thaliana
  peptide (1)..(207): Ceres Seq. ID no. 12651438
MASVSPLAKYKLVFLGDQSVGKTSIITRFMYDKFDTTYQATIGIDFLSKTMYLEDRTVRLQLWDTAGQERFRSLIPSYIRDSSVAVIVYDVANRQSFLNTSKWIEDVRTERGSDVIIVLVGNKTDLVDKRQVSIEEGDNKARDYGVIFIETSAKAGFNIKPLFRKIAAALPGMETLSSTKQEDMVDVNLKTSSNSAQGEQQRGGCAC

SEQ ID NO: 79469 - protein, 178 aa, Arabidopsis thaliana
  peptide (1)..(178): Ceres Seq. ID no. 12651439
MYDKFDTTYQATIGIDFLSKTMYLEDRTVRLQLWDTAGQERFRSLIPSYIRDSSVAVIVYDVANRQSFLNTSKWIEDVRTERGSDVIIVLVGNKTDLVDKRQVSIEEGDNKARDYGVIFIETSAKAGFNIKPLFRKIAAALPGMETLSSTKQEDMVDVNLKTSSNSAQGEQQRGGCAC

SEQ ID NO: 79470 - protein, 157 aa, Arabidopsis thaliana
  peptide (1)..(157): Ceres Seq. ID no. 12651440
MYLEDRTVRLQLWDTAGQERFRSLIPSYIRDSSVAVIVYDVANRQSFLNTSKWIEDVRTERGSDVIIVLVGNKTDLVDKRQVSIEEGDNKARDYGVIFIETSAKAGFNIKPLFRKIAAALPGMETLSSTKQEDMVDVNLKTSSNSAQGEQQRGGCAC

SEQ ID NO: 79471 - DNA, 2205 bp, Arabidopsis thaliana
  misc_feature (1)..(2205): Ceres Seq. ID no. 12651445
  misc_feature (1)..(2205): Ortholog of  Ceres SEQ ID NO 15179672 as cited in SEQ ID NO 0
gagagtgataattgcgaaattgccaaaaaacgcaaagtctaccactagacaagaaaatcgaagcttttcactttctcttttttctgttttgttgtctttggttctactctccgcactgaatctttcgatcagcgataattgtttccttcttttgggattttctccttggatggaaccagctcaattaatgagatgagatgagaatgttcagcttgcagaagatggctatggcttttactctcttgttttttgcctgtttatgctcatttgtgtctccagatgctcaaggggatgcactgtttgcgttgaggatctccttacgtgcattaccgaatcagctaagtgactggaatcagaaccaagttaatccttgcacttggtcccaagttatttgtgatgacaaaaactttgtcacttctcttacattgtcagatatgaacttctcgggaaccttgtcttcaagagtaggaatcctagaaaatctcaagactcttactttaaagggaaatggaattacgggtgaaataccagaagactttggaaatctgactagcttgactagtttggatttggaggacaatcagctaactggtcgtataccatccactatcggtaatctcaagaaacttcagttcttgaccttgagtaggaacaaacttaatgggactattccggagtcactcactggtcttccaaacctgttaaacctgctgcttgattccaatagtctcagtggtcagattcctcaaagtctgtttgagatcccaaaatataatttcacgtcaaacaacttgaattgtggcggtcgtcaacctcacccttgtgtatccgcggttgcccattcaggtgattcaagcaagcctaaaactggcattattgctggagttgttgctggagttacagttgttctctttggaatcttgttgtttctgttctgcaaggataggcataaaggatatagacgtgatgtgtttgtggatgttgcaggtgaagtggacaggagaattgcatttggacagttgaaaaggtttgcatggagagagctccagttagcgacagataacttcagcgaaaagaatgtacttggtcaaggaggctttgggaaagtttacaaaggagtgcttccggataacaccaaagttgctgtgaagagattgacggatttcgaaagtcctggtggagatgctgctttccaaagggaagtagagatgataagtgtagctgttcataggaatctactccgtcttatcgggttctgcaccacacaaacagaacgccttttggtttatcccttcatgcagaatctaagtcttgcacatcgtctgagagagatcaaagcaggcgacccggttctagattgggagacgaggaaacggattgccttaggagcagcgcgtggttttgagtatcttcatgaacattgcaatccgaagatcatacatcgtgatgtgaaagcagctaatgtgttactagatgaagattttgaagcagtggttggtgattttggtttagccaagctagtagatgttagaaggactaatgtgactactcaagttcgaggaacaatgggtcacattgcaccagaatatttatcaacagggaaatcatcagagagaaccgatgttttcgggtatggaattatgcttcttgagcttgttacaggacaacgcgcaatagacttttcacgtttggaggaagaagatgatgtcttgttacttgaccacgtgaagaaactggaaagagagaagagattaggagcaatcgtagataagaatttggatggagagtatataaaagaagaagtagagatgatgatacaagtggctttgctttgtacacaaggttcaccagaagaccgaccagtgatgtctgaagttgtgaggatgttagaaggagaagggcttgcggagagatgggaagagtggcaaaacgtggaagtcacgagacgtcatgagtttgaacggttgcagaggagatttgattggggtgaagattctatgcataaccaagatgccattgaattatctggtggaagatgaccaaaaacatcaaaccttgagtttactgtaaagttgccaacttcacttttttgttttgttcttcggtgaagaagtaaaatcagttgtataaatcttgtttttgtttcatgatgtatcttttgactttaataaattctgtgaatgaaaagaactatgatgttttgtt

SEQ ID NO: 79472 - protein, 613 aa, Arabidopsis thaliana
  peptide (1)..(613): Ceres Seq. ID no. 12651446
MRMFSLQKMAMAFTLLFFACLCSFVSPDAQGDALFALRISLRALPNQLSDWNQNQVNPCTWSQVICDDKNFVTSLTLSDMNFSGTLSSRVGILENLKTLTLKGNGITGEIPEDFGNLTSLTSLDLEDNQLTGRIPSTIGNLKKLQFLTLSRNKLNGTIPESLTGLPNLLNLLLDSNSLSGQIPQSLFEIPKYNFTSNNLNCGGRQPHPCVSAVAHSGDSSKPKTGIIAGVVAGVTVVLFGILLFLFCKDRHKGYRRDVFVDVAGEVDRRIAFGQLKRFAWRELQLATDNFSEKNVLGQGGFGKVYKGVLPDNTKVAVKRLTDFESPGGDAAFQREVEMISVAVHRNLLRLIGFCTTQTERLLVYPFMQNLSLAHRLREIKAGDPVLDWETRKRIALGAARGFEYLHEHCNPKIIHRDVKAANVLLDEDFEAVVGDFGLAKLVDVRRTNVTTQVRGTMGHIAPEYLSTGKSSERTDVFGYGIMLLELVTGQRAIDFSRLEEEDDVLLLDHVKKLEREKRLGAIVDKNLDGEYIKEEVEMMIQVALLCTQGSPEDRPVMSEVVRMLEGEGLAERWEEWQNVEVTRRHEFERLQRRFDWGEDSMHNQDAIELSGGR

SEQ ID NO: 79473 - protein, 611 aa, Arabidopsis thaliana
  peptide (1)..(611): Ceres Seq. ID no. 12651447
MFSLQKMAMAFTLLFFACLCSFVSPDAQGDALFALRISLRALPNQLSDWNQNQVNPCTWSQVICDDKNFVTSLTLSDMNFSGTLSSRVGILENLKTLTLKGNGITGEIPEDFGNLTSLTSLDLEDNQLTGRIPSTIGNLKKLQFLTLSRNKLNGTIPESLTGLPNLLNLLLDSNSLSGQIPQSLFEIPKYNFTSNNLNCGGRQPHPCVSAVAHSGDSSKPKTGIIAGVVAGVTVVLFGILLFLFCKDRHKGYRRDVFVDVAGEVDRRIAFGQLKRFAWRELQLATDNFSEKNVLGQGGFGKVYKGVLPDNTKVAVKRLTDFESPGGDAAFQREVEMISVAVHRNLLRLIGFCTTQTERLLVYPFMQNLSLAHRLREIKAGDPVLDWETRKRIALGAARGFEYLHEHCNPKIIHRDVKAANVLLDEDFEAVVGDFGLAKLVDVRRTNVTTQVRGTMGHIAPEYLSTGKSSERTDVFGYGIMLLELVTGQRAIDFSRLEEEDDVLLLDHVKKLEREKRLGAIVDKNLDGEYIKEEVEMMIQVALLCTQGSPEDRPVMSEVVRMLEGEGLAERWEEWQNVEVTRRHEFERLQRRFDWGEDSMHNQDAIELSGGR

SEQ ID NO: 79474 - protein, 605 aa, Arabidopsis thaliana
  peptide (1)..(605): Ceres Seq. ID no. 12651448
MAMAFTLLFFACLCSFVSPDAQGDALFALRISLRALPNQLSDWNQNQVNPCTWSQVICDDKNFVTSLTLSDMNFSGTLSSRVGILENLKTLTLKGNGITGEIPEDFGNLTSLTSLDLEDNQLTGRIPSTIGNLKKLQFLTLSRNKLNGTIPESLTGLPNLLNLLLDSNSLSGQIPQSLFEIPKYNFTSNNLNCGGRQPHPCVSAVAHSGDSSKPKTGIIAGVVAGVTVVLFGILLFLFCKDRHKGYRRDVFVDVAGEVDRRIAFGQLKRFAWRELQLATDNFSEKNVLGQGGFGKVYKGVLPDNTKVAVKRLTDFESPGGDAAFQREVEMISVAVHRNLLRLIGFCTTQTERLLVYPFMQNLSLAHRLREIKAGDPVLDWETRKRIALGAARGFEYLHEHCNPKIIHRDVKAANVLLDEDFEAVVGDFGLAKLVDVRRTNVTTQVRGTMGHIAPEYLSTGKSSERTDVFGYGIMLLELVTGQRAIDFSRLEEEDDVLLLDHVKKLEREKRLGAIVDKNLDGEYIKEEVEMMIQVALLCTQGSPEDRPVMSEVVRMLEGEGLAERWEEWQNVEVTRRHEFERLQRRFDWGEDSMHNQDAIELSGGR

SEQ ID NO: 79475 - DNA, 1804 bp, Arabidopsis thaliana
  misc_feature (1)..(1804): Ceres Seq. ID no. 12651457
  misc_feature (1)..(1804): Ortholog of  Ceres SEQ ID NO 13657138 as cited in SEQ ID NO 65923
  misc_feature (1)..(1804): Ortholog of  Ceres SEQ ID NO 13584744 as cited in SEQ ID NO 69137
agcaaaagctgactcttcttctaactttctatttcttccaagaataacaaacttttttctcataagaaacaaaacaagaattctacaaaacttctcattaaacctctgttttcttgtttctcttctgctctgtattttcgataattctctctgttttgtatcctttcttattttctgtgaatctgtttttttatggaaatttaattcaaaggcttattagaggaagaaagaaagaaaaagaaaaaaaaacccactggagctatggctgttgaagataacaagaacagtgaaagcaaaaatcatcaagaggtagagcttcataggaacgacttaggcctcgaagattcatcatcgccaagaggtgttctcggaatggtttcagattccgacaacagcagcagtagttgcagctcttgttcctctgatgataaatcatcatcaacatcgtcaccattttcaaatactactaaaaccgtttcgtcttctcaccatggtcttcaatggaacaaaatgattgaatctatcaagaagaagtccatgagacgattctctgtcattcctcttcttgcaagttacgaactcacccgtaaaaacttgcgtcgtaagcaacctaagctaactccctctgagagtgctttcacctgtgaagccttctttatggctaaaccctcttggagaaacttcacttacgaagagctcgctgtagccaccgattatttcaatcctgagaacatgattggtaagggaggacatgcggaggtatacaaaggggttttgattaatggtgagacggtggcgattaagaagctgatgagtcacgccaaggaagaagaagaaagagtgagcgatttcctttcagagctcggtataatcgcacatgtaaaccacccaaacgcagctaggcttcgcggtttcagcagtgatcgcggtttgcattttgttcttgagtacgctccctatggcagcctcgcttctatgctttttggatcagaggaatgtctagagtggaagataaggtataaagtggctctaggtatagctgatggtctgagttatcttcataatgcttgtccaagaaggatcattcaccgtgacatcaaagcttctaacatattgctcaaccacgattacgaagctcagatttcagatttcggacttgcaaaatggctcccagagaactggcctcaccatgttgtattccccattgaaggaacattcggatatctagctccagagtatttcatgcacggcattgttgatgagaagattgatgtgtttgcctttggagtattgcttctagagatcataaccagtcgccgagctgttgatacagcaagcaggcagagcattgttgcatgggcaaaaccttttcttgagaaaaatagcatggaggacattgtggatcctcggctaggaaatatgtttaatccaacagagatgcaacgagtgatgctaacagcttcaatgtgtgtacatcatattgccgcaatgcgacctgacatgactcggttggtgcagctgttacgtggagaagacggaccagctgagctacagcagaaggcaggtgaaagaacaatgagcgtgaacgcttgtgatctacaagatcacacctcttcctcatacctcaacgaactccgccgccataggcaactcttaatggagtgagtagaagcaataacatcaacttaaagaactgtttatcaacctctttctttttagatttttattttcttgacttgagttttgcttgttattctccattggttgcttttttttcttgtccaaccaaactgtgaatatcttc

SEQ ID NO: 79476 - protein, 467 aa, Arabidopsis thaliana
  peptide (1)..(467): Ceres Seq. ID no. 12651458
MAVEDNKNSESKNHQEVELHRNDLGLEDSSSPRGVLGMVSDSDNSSSSCSSCSSDDKSSSTSSPFSNTTKTVSSSHHGLQWNKMIESIKKKSMRRFSVIPLLASYELTRKNLRRKQPKLTPSESAFTCEAFFMAKPSWRNFTYEELAVATDYFNPENMIGKGGHAEVYKGVLINGETVAIKKLMSHAKEEEERVSDFLSELGIIAHVNHPNAARLRGFSSDRGLHFVLEYAPYGSLASMLFGSEECLEWKIRYKVALGIADGLSYLHNACPRRIIHRDIKASNILLNHDYEAQISDFGLAKWLPENWPHHVVFPIEGTFGYLAPEYFMHGIVDEKIDVFAFGVLLLEIITSRRAVDTASRQSIVAWAKPFLEKNSMEDIVDPRLGNMFNPTEMQRVMLTASMCVHHIAAMRPDMTRLVQLLRGEDGPAELQQKAGERTMSVNACDLQDHTSSSYLNELRRHRQLLME

SEQ ID NO: 79477 - protein, 430 aa, Arabidopsis thaliana
  peptide (1)..(430): Ceres Seq. ID no. 12651459
MVSDSDNSSSSCSSCSSDDKSSSTSSPFSNTTKTVSSSHHGLQWNKMIESIKKKSMRRFSVIPLLASYELTRKNLRRKQPKLTPSESAFTCEAFFMAKPSWRNFTYEELAVATDYFNPENMIGKGGHAEVYKGVLINGETVAIKKLMSHAKEEEERVSDFLSELGIIAHVNHPNAARLRGFSSDRGLHFVLEYAPYGSLASMLFGSEECLEWKIRYKVALGIADGLSYLHNACPRRIIHRDIKASNILLNHDYEAQISDFGLAKWLPENWPHHVVFPIEGTFGYLAPEYFMHGIVDEKIDVFAFGVLLLEIITSRRAVDTASRQSIVAWAKPFLEKNSMEDIVDPRLGNMFNPTEMQRVMLTASMCVHHIAAMRPDMTRLVQLLRGEDGPAELQQKAGERTMSVNACDLQDHTSSSYLNELRRHRQLLME

SEQ ID NO: 79478 - protein, 384 aa, Arabidopsis thaliana
  peptide (1)..(384): Ceres Seq. ID no. 12651460
MIESIKKKSMRRFSVIPLLASYELTRKNLRRKQPKLTPSESAFTCEAFFMAKPSWRNFTYEELAVATDYFNPENMIGKGGHAEVYKGVLINGETVAIKKLMSHAKEEEERVSDFLSELGIIAHVNHPNAARLRGFSSDRGLHFVLEYAPYGSLASMLFGSEECLEWKIRYKVALGIADGLSYLHNACPRRIIHRDIKASNILLNHDYEAQISDFGLAKWLPENWPHHVVFPIEGTFGYLAPEYFMHGIVDEKIDVFAFGVLLLEIITSRRAVDTASRQSIVAWAKPFLEKNSMEDIVDPRLGNMFNPTEMQRVMLTASMCVHHIAAMRPDMTRLVQLLRGEDGPAELQQKAGERTMSVNACDLQDHTSSSYLNELRRHRQLLME

SEQ ID NO: 79479 - DNA, 1063 bp, Arabidopsis thaliana
  misc_feature (1)..(1063): Ceres Seq. ID no. 12651465
  misc_feature (1)..(1063): Ortholog of  Ceres SEQ ID NO 15169045 as cited in SEQ ID NO 58372
  misc_feature (1)..(1063): Ortholog of  Ceres SEQ ID NO 13597361 as cited in SEQ ID NO 63638
  misc_feature (1)..(1063): Ortholog of  Ceres SEQ ID NO 13595945 as cited in SEQ ID NO 68157
atggaaacggaattgacgcaattgagaaaacaagaaagcaacaatctcaacggcgttaatggaggattcatggcgattgaccaattcgtcccaaatgattggaacttcgattacctctgtttcaacaatcttctccaagaagacgacaacattgatcatccttcttcttcttctttgatgaatctaatttctcagccacctccattgcttcatcaaccaccacaaccgtcgtcacctctttatgattctccgccgctctcctccgctttcgactatccttttctcgaggatatcatacactcctcttattctcctcctccattgatccttccggcttcgcaagagaacaccaacaattactcaccattgatggaggaaagcaagagcttcataagcatcggagagactaacaagaaaaggagtaacaagaagcttgaaggtcagccttcgaagaatcttatggcggagagacggcggaggaaacggttaaatgaccgactctccctgctccgatccattgtccctaaaatcaccaagatggataggacatcgatactaggagatgcaatagattacatgaaggagcttttggacaagattaacaagttgcaagaagacgaacaagaacttggaagcaactctcatctaagcaccctcattacaaacgaatctatggtcagaaactccctaaagtttgaagtagatcaaagggaagttaatacgcatattgatatatgttgtcctacgaaaccgggtttggttgtatcaacggttagtacattggagactctaggattagagattgaacaatgtgtcattagctgcttcagtgacttctcattgcaggcttcttgttttgaggttggtgagcagagatacatggttacttcggaagctactaaacaagcactaatcagaaacgcaggttatggaggaagatgtctgtaggggagcttcaaaattgcaatgttttttaatgatgataatattttccggttcttcttattctcttgtgatgagtatgatatttcataaggagatagataaatgggaaaatcaaagg

SEQ ID NO: 79480 - protein, 315 aa, Arabidopsis thaliana
  peptide (1)..(315): Ceres Seq. ID no. 12651466
METELTQLRKQESNNLNGVNGGFMAIDQFVPNDWNFDYLCFNNLLQEDDNIDHPSSSSLMNLISQPPPLLHQPPQPSSPLYDSPPLSSAFDYPFLEDIIHSSYSPPPLILPASQENTNNYSPLMEESKSFISIGETNKKRSNKKLEGQPSKNLMAERRRRKRLNDRLSLLRSIVPKITKMDRTSILGDAIDYMKELLDKINKLQEDEQELGSNSHLSTLITNESMVRNSLKFEVDQREVNTHIDICCPTKPGLVVSTVSTLETLGLEIEQCVISCFSDFSLQASCFEVGEQRYMVTSEATKQALIRNAGYGGRCL

SEQ ID NO: 79481 - protein, 292 aa, Arabidopsis thaliana
  peptide (1)..(292): Ceres Seq. ID no. 12651467
MAIDQFVPNDWNFDYLCFNNLLQEDDNIDHPSSSSLMNLISQPPPLLHQPPQPSSPLYDSPPLSSAFDYPFLEDIIHSSYSPPPLILPASQENTNNYSPLMEESKSFISIGETNKKRSNKKLEGQPSKNLMAERRRRKRLNDRLSLLRSIVPKITKMDRTSILGDAIDYMKELLDKINKLQEDEQELGSNSHLSTLITNESMVRNSLKFEVDQREVNTHIDICCPTKPGLVVSTVSTLETLGLEIEQCVISCFSDFSLQASCFEVGEQRYMVTSEATKQALIRNAGYGGRCL

SEQ ID NO: 79482 - protein, 256 aa, Arabidopsis thaliana
  peptide (1)..(256): Ceres Seq. ID no. 12651468
MNLISQPPPLLHQPPQPSSPLYDSPPLSSAFDYPFLEDIIHSSYSPPPLILPASQENTNNYSPLMEESKSFISIGETNKKRSNKKLEGQPSKNLMAERRRRKRLNDRLSLLRSIVPKITKMDRTSILGDAIDYMKELLDKINKLQEDEQELGSNSHLSTLITNESMVRNSLKFEVDQREVNTHIDICCPTKPGLVVSTVSTLETLGLEIEQCVISCFSDFSLQASCFEVGEQRYMVTSEATKQALIRNAGYGGRCL

SEQ ID NO: 79483 - DNA, 1861 bp, Arabidopsis thaliana
  misc_feature (1)..(1861): Ceres Seq. ID no. 12651469
  misc_feature (1)..(1861): Ortholog of  Ceres SEQ ID NO 15177343 as cited in SEQ ID NO 51182
gctccacgttttttgttaattctcacagacggcgcagagtaatctctcggcaaaggaaaaaaataaagggaaagtgtttctttgattcatggatggatgtgctggtaaacgatctgttgaccggttggttgtgcctcggaaagccagtggtcttaccctgcgtgagaatatgaacaagacagatggtaagaatgttcctttctgcagccgagttggttgtactgcaaaggtaacttctaccaagagatctcggattggctctacggataacaatacaaaagttggtctgcctccggttccatctaccttaaatagaaaggaaattgttgggagctcatctcgtactcctggtggatttggatacttgagaaagccagccaaagttactgcaagaagacagccgtcatctagtttagacactgaatcttcggaaacgagttgtattcatgatgatccagctgcaacagagcccacacttccacgccaaaagactaaaagagtcacaatcaatgttcatcctcaaagcgctgtctctagagaagttgtaataacaaaggcaggaagctcaagtagaggaaccagcagaattagtcatccaaagtctgaattgggtacccgcgatgctctgacgggtccttctgtttctacatcttctggtaacagtgagcacactgtaagaggcggtttgagtaggcatagattgaggaacttgagctgcaattctgtgtctgatgttcttccaactaactcaaactcagcaacaaaaatcagtgtgactaaaaagaaaaacgctgatggagagagcagcttatctagcaaaggtagtaagactagtgtgttggttccaaaggtaaggaatcaaatttcttctcatggcaatggcgtcacagtttctgataacagaagaaatcgagtagtaccaagtattagggacagcagtactgttgtttcaaatggttgtaggagagctggttattttggtagatcagagcgacttggagctactgcatcctctgctacttctcgacaaatgcctcatcctacaacaccaaccgatcccaatccttctctttcgttttgtccatcaaatatatacagtagtactggacgcgtacatagcaatatgcctggtagccccacggaagctgacccttcaagctctttggtgaaccgggatggtttgagtcactacaacatgaatggaattgcagaggtattgttggccctggaaaggattgaacatgatgaagagcttacatatgagcaactggcttctatagagaccaatctattctcaagtggtatgttcagattctatgatcagcatagagatatgaggcttgacatcgataacatgtcatatgaggagttactagctttgggggataaaatgggtacagtgagcacagctctaagcgaagaagcactctcaagaagccttaagcaaagcatttatcaggagacagatgaaaccggttccatctctctgtataaggatgatgatatcaagtgcagtatttgccaggaagagtatgttgatggagatgaattagggactattccatgtcaacatatgtaccatgtgagctgtgtacaacaatggctgcggatgaagaattggtgcccaatctgcaaaacctctgcggaagaagagaagtcgatttagtgaataatgccaacagcagttttagctttgtgggatgattccaagatgatgcagatacattgctattttcttcaccaagtgcttgtctctacatcatcttgctctctcttctcttttcttttgtacatataacagtatctttcttttgacctaattgggtacaaatgggtaaataagatcaggtgaccattttct

SEQ ID NO: 79484 - protein, 525 aa, Arabidopsis thaliana
  peptide (1)..(525): Ceres Seq. ID no. 12651470
MDGCAGKRSVDRLVVPRKASGLTLRENMNKTDGKNVPFCSRVGCTAKVTSTKRSRIGSTDNNTKVGLPPVPSTLNRKEIVGSSSRTPGGFGYLRKPAKVTARRQPSSSLDTESSETSCIHDDPAATEPTLPRQKTKRVTINVHPQSAVSREVVITKAGSSSRGTSRISHPKSELGTRDALTGPSVSTSSGNSEHTVRGGLSRHRLRNLSCNSVSDVLPTNSNSATKISVTKKKNADGESSLSSKGSKTSVLVPKVRNQISSHGNGVTVSDNRRNRVVPSIRDSSTVVSNGCRRAGYFGRSERLGATASSATSRQMPHPTTPTDPNPSLSFCPSNIYSSTGRVHSNMPGSPTEADPSSSLVNRDGLSHYNMNGIAEVLLALERIEHDEELTYEQLASIETNLFSSGMFRFYDQHRDMRLDIDNMSYEELLALGDKMGTVSTALSEEALSRSLKQSIYQETDETGSISLYKDDDIKCSICQEEYVDGDELGTIPCQHMYHVSCVQQWLRMKNWCPICKTSAEEEKSI

SEQ ID NO: 79485 - protein, 498 aa, Arabidopsis thaliana
  peptide (1)..(498): Ceres Seq. ID no. 12651471
MNKTDGKNVPFCSRVGCTAKVTSTKRSRIGSTDNNTKVGLPPVPSTLNRKEIVGSSSRTPGGFGYLRKPAKVTARRQPSSSLDTESSETSCIHDDPAATEPTLPRQKTKRVTINVHPQSAVSREVVITKAGSSSRGTSRISHPKSELGTRDALTGPSVSTSSGNSEHTVRGGLSRHRLRNLSCNSVSDVLPTNSNSATKISVTKKKNADGESSLSSKGSKTSVLVPKVRNQISSHGNGVTVSDNRRNRVVPSIRDSSTVVSNGCRRAGYFGRSERLGATASSATSRQMPHPTTPTDPNPSLSFCPSNIYSSTGRVHSNMPGSPTEADPSSSLVNRDGLSHYNMNGIAEVLLALERIEHDEELTYEQLASIETNLFSSGMFRFYDQHRDMRLDIDNMSYEELLALGDKMGTVSTALSEEALSRSLKQSIYQETDETGSISLYKDDDIKCSICQEEYVDGDELGTIPCQHMYHVSCVQQWLRMKNWCPICKTSAEEEKSI

SEQ ID NO: 79486 - DNA, 480 bp, Arabidopsis thaliana
  misc_feature (1)..(480): Ceres Seq. ID no. 12651519
  misc_feature (1)..(480): Ortholog of  Ceres SEQ ID NO 15180781 as cited in SEQ ID NO 0
atgcatcgactgctactggaatcccacggcggcgggaacgagacgagcggaagcggcgggggagatgggtacacgagggacatgaacttcgacgcaaacatggtgatcatacttgcggctcttctctgcgcgctgatactagcgcttgggctgaattcgattctccggtgcgcgatgcgatgcggtttcgggttatcatcctctgcggcggcggggacggtggccgacagagctggattaaagaagagagaactgaagaagtttccagtagctgagtacgggtcgggggaagtgaagatagcggcgacggagtgcgcaatctgtctgggggaattcgcggacggcgagagagtgcgagtactgccgccgtgtaatcacagtttccacatgtcatgcatcgacacgtggcttgtctctcactcttcatgtcccaattgtcggcattcactcatcgaggtccacgtggcggggtctgagtga

SEQ ID NO: 79487 - protein, 159 aa, Arabidopsis thaliana
  peptide (1)..(159): Ceres Seq. ID no. 12651520
MHRLLLESHGGGNETSGSGGGDGYTRDMNFDANMVIILAALLCALILALGLNSILRCAMRCGFGLSSSAAAGTVADRAGLKKRELKKFPVAEYGSGEVKIAATECAICLGEFADGERVRVLPPCNHSFHMSCIDTWLVSHSSCPNCRHSLIEVHVAGSE

SEQ ID NO: 79488 - protein, 132 aa, Arabidopsis thaliana
  peptide (1)..(132): Ceres Seq. ID no. 12651521
MNFDANMVIILAALLCALILALGLNSILRCAMRCGFGLSSSAAAGTVADRAGLKKRELKKFPVAEYGSGEVKIAATECAICLGEFADGERVRVLPPCNHSFHMSCIDTWLVSHSSCPNCRHSLIEVHVAGSE

SEQ ID NO: 79489 - protein, 126 aa, Arabidopsis thaliana
  peptide (1)..(126): Ceres Seq. ID no. 12651522
MVIILAALLCALILALGLNSILRCAMRCGFGLSSSAAAGTVADRAGLKKRELKKFPVAEYGSGEVKIAATECAICLGEFADGERVRVLPPCNHSFHMSCIDTWLVSHSSCPNCRHSLIEVHVAGSE

SEQ ID NO: 79490 - DNA, 619 bp, Arabidopsis thaliana
  misc_feature (1)..(619): Ceres Seq. ID no. 12651535
  misc_feature (1)..(619): Ortholog of  Ceres SEQ ID NO 12623263 as cited in SEQ ID NO 60988
  misc_feature (1)..(619): Ortholog of  Ceres SEQ ID NO 12635807 as cited in SEQ ID NO 0
ataatcctcaaaaatctcaactttatctcccaaaacacaaaacaaaaaaaaatggcttccactgctctctcaagcgccatcgtcggaacttcattcatccgtcgttccccagctccaatcagtctccgttcccttccatcagccaacacacaatccctcttcggtctcaaatcaggcaccgctcgtggtggacgtgtcacagccatggctacatacaaggtgagctagaggttgagtgtgacgacgacgtctacgttcttgatgctgctgaggaagctggaatcgatttgccttactcttgccgtgctggttcttgttcgagctgtgctggtaaagttgtgtctggatctgttgatcagtctgaccagagtttccttgatgatgaacagattggtgaagggtttgttctcacttgtgctgcttaccctacctctgatgttaccattgaaacccacaaagaagaagacattgtttaagcctcacctactcaccagcttttgatggtttaaaaatcatgtctttataaatttcacattttgggttgagtttgttgttactaaaaactattgttatctgttgttattgttcctggtttggctcaccatcaatcgatgacatt

SEQ ID NO: 79491 - protein, 157 aa, Arabidopsis thaliana
  peptide (1)..(157): Ceres Seq. ID no. 12651536
NPQKSQLYLPKHKTKKNGFHCSLKRHRRNFIHPSFPSSNQSPFPSISQHTIPLRSQIRHRSWWTCHSHGYIQGELEVECDDDVYVLDAAEEAGIDLPYSCRAGSCSSCAGKVVSGSVDQSDQSFLDDEQIGEGFVLTCAAYPTSDVTIETHKEEDIV

SEQ ID NO: 79492 - protein, 79 aa, Arabidopsis thaliana
  peptide (1)..(79): Ceres Seq. ID no. 12651537
MLLRKLESICLTLAVLVLVRAVLVKLCLDLLISLTRVSLMMNRLVKGLFSLVLLTLPLMLPLKPTKKKTLFKPHLLTSF

SEQ ID NO: 79493 - DNA, 1520 bp, Arabidopsis thaliana
  misc_feature (1)..(1520): Ceres Seq. ID no. 12651552
  misc_feature (1)..(1520): Ortholog of  Ceres SEQ ID NO 15172274 as cited in SEQ ID NO 59703
acttatgctcttcatatcacatacaacaaactcatatatataaaaactttaaccttcgtatagcaacgatctagtagaaagcttatactaaaactttctgattctcttaatatggcggaggagtttaaagctacggcatcgatttgtggtggcggaggtggcgcgtggtggaactcgccaaggagcgttatgtctccttcggatcatttcttgtcaccatgcttcggagcggctatcacttccaatgattttagctcgcaagagaatcatctcaaatctaggatgacttgtacggacaacaacaacatcgttttcgggcagcgagaggcggattctgacagtggaggaagtaccgtgacgatggactcgacgttgcagatgatgggtctagggttttcctcaaattgttcttcagattggaaccaaaccattttacaagaagacttaaactcaagcttcataaggagctcacaagatcaagatcatggccaaggattcttatccacaactacttcaccttatatacttaatccagcttgttcttcatctccatcaacttcttcgtcctcaagcttgatacgaaccttttacgatcccgaaccaagtccatacaactttgtctccaccacaagtggttcaatcaacgatcctcaactttcttgggctaataagacaaatcctcatcatcaagtagcttatggactaattaacagcttctctaacaacgcaaactctcgacccttttggaattcttcatcaaccactaacttaaacaacacgacgccgagcaattttgtaaccactccgcagataatatctactcgtttggaggacaaaaccaagaatctgaagacaagagctcagagtgagtctttgaagagagcaaaggataatgaatctgcggcgaagaaaccgagagtcaccacgccttcaccgttgccaactttcaaggtgagaaaagagaatctaagggaccagataacttcattacaacaactagtttcacctttcggaaagacagatactgcatctgttctccaagaagctatagagtacatcaagttccttcacgaccaagtcactgttctaagcactccatacatgaaacaaggtgcctcgaaccaacaacaacagcagatatctggtaaatcgaagagtcaagatgaaaatgagaatcacgaactaagaggacatggtctatgtctcgtcccaatatcaagcacgtttccggtggctaacgaaacaacagccgatttttggacaccaacgtttgggggcaacaatttcaggtgattaaagagagagggttgtggttgtcaagacggatgggaacatatgctaaattcagcttggagactctaaagcataacaataatttttaatgtattttcttcttctttcaatattttaaggggggtttattgctgaatttagcatatatgggttgtttttatgttgaataaccttttgttcctgtcattgttcttgaatatatatatatacatatttttgtcgttggt

SEQ ID NO: 79494 - protein, 393 aa, Arabidopsis thaliana; identical to SEQ ID NO: 43463
  peptide (1)..(393): Ceres Seq. ID no. 12651553

SEQ ID NO: 79495 - protein, 367 aa, Arabidopsis thaliana; identical to SEQ ID NO: 43464
  peptide (1)..(367): Ceres Seq. ID no. 12651554

SEQ ID NO: 79496 - protein, 336 aa, Arabidopsis thaliana; identical to SEQ ID NO: 43465
  peptide (1)..(336): Ceres Seq. ID no. 12651555

SEQ ID NO: 79497 - DNA, 686 bp, Arabidopsis thaliana
  misc_feature (1)..(686): Ceres Seq. ID no. 12651560
  misc_feature (1)..(686): Ortholog of  Ceres SEQ ID NO 15172274 as cited in SEQ ID NO 59703
ccgttgccaactttcaaggtgagaaaagagaatctaagggaccagataacttcattacaacaactagtttcacctttcggaaagacagatactgcatctgttctccaagaagctatagagtacatcaagttccttcacgaccaagtcactgttctaagcactccatacatgaaacaaggtgcctcgaaccaacaacaacagcaggttcaatacacgatctagtgttttagttttgtccaagttggagtcttcgtgctataatcatggttaaataagtactaatttcagtatggattcatgtagatatctggtaaatcgaagagtcaagatgaaaatgagaatcacgaactaagaggacatggtctatgtctcgtcccaatatcaagcacgtttccggtggctaacgaaacaacagccgatttttggacaccaacgtttgggggcaacaatttcaggtgattaaagagagagggttgtggttgtcaagacggatgggaacatatgctaaattcagcttggagactctaaagcataacaataatttttaatgtattttcttcttctttcaatattttaaggggggtttattgctgaatttagcatatatgggttgtttttatgttgaataaccttttgttcctgtcattgttcttgaatatatatatatacatatttttgtcgttggt

SEQ ID NO: 79498 - protein, 75 aa, Arabidopsis thaliana
  peptide (1)..(75): Ceres Seq. ID no. 12651561
VANFQGEKRESKGPDNFITTTSFTFRKDRYCICSPRSYRVHQVPSRPSHCSKHSIHETRCLEPTTTAGSIHDLVF

SEQ ID NO: 79499 - protein, 73 aa, Arabidopsis thaliana
  peptide (1)..(73): Ceres Seq. ID no. 12651562
PLPTFKVRKENLRDQITSLQQLVSPFGKTDTASVLQEAIEYIKFLHDQVTVLSTPYMKQGASNQQQQQVQYTI

SEQ ID NO: 79500 - DNA, 2521 bp, Arabidopsis thaliana
  misc_feature (1)..(2521): Ceres Seq. ID no. 12651567
  misc_feature (1)..(2521): Ortholog of  Ceres SEQ ID NO 13600220 as cited in SEQ ID NO 0
acaagagaatcaagaacaatgaaaaatttaaccagtttcgtaattgttatcttactacaaagcttattgtttcatgtatatggtcgtcatcaaagttcttcgaagaacattttagtagattcatctccatttccttctgatttcctctttggtacagcttcttccgcttaccagtatgaaggtgcgttcttgactgatggaaaaagtttgaacaattgggatgtctttacgcataaaaatcctggtatgtattttattttggtttccatttggtttattttctatttgaaatagtttaagattagtttaagatttttatttttttttaattcacttattctattgacaagtatatatattggaactgcagggaaaatacttgacaagaacaatgcagatagagctgtggaccaatataatcgatttttggttattttcttatgataattatttctttctatttttgttcttgtcaacttcttttatcatattatattctcatattatttgatgttgttatttattttatattatcttctatgcttaggaggacatccaattaatgtcttttcttggagtgaacagttataggttttcaatttcttggtgtagaatcttacctagtaagtccttctttagttaaatcagcagtattattaatactacattgcattgcatggtaaaaaaaagaaaatattcgattgcatctcatatactaaccagagttgataaattaaaatactgaaactcaatcgacgaatagttatttagatttagcttattatttgtgagacaggaggaagatttggagagattaattatttggggataaagtattacaacatatttatcgatgctctcattagtagaggtacttttttgtctttccggtttataataatttaagtttttttttaaaatattgtaatctcataaagttaatgaaaatacataattgtatcaactaatcactatccagggattaaaccatttgtgacgttgaaccatgtcgactatcctcaagaactcgaggaccggtttcaaagttggttaaaccccgagatgcagaaggaatttggttatttagccgatatatgtttcaagcattttggaaaccgagttaaatactggaccacgcttaacgaaccaaatcaacaattaatcttaggctatctaacaggtaaatttccaccctctcgttgctcctcgccatacgggaactgtagccaggggaattcagaaaccgaacctttcatagccgcacataacatgatccttgcacacgcaaaagcggttaacatatacaagaccaaatatcagaaagaacaaaagggaagcattggcattgtggtacaaacatcatggtttgaacccattagtgattccaatgcggataaagaagctgctgagagagctcaatcattttactctaattggtatgttatattactatatatgttgagatcatatttgtagatatgaagtatagtacttcacccacatatggaatatatattgttttatctatttgtattctaacatgtactaggattctagatcccgttatatatgggaaatatccaaaagaaatggtagatattcttggaccagccttgccacaattttcgagcaatgaagtgaagaacttagagaagtcgagggcagatttcgttggtattaatcactatacaagttacttcattcaagattgtttgacctctgcttgtaatactggacatggagcttttaaggccgaaggatatgctctcaagttagaccggaaaggcaatgttactataggagaacttgtaagtacattcattcagtttcttatattcaatattttacgactatattcaaatgttttagtaaattttattgtttattgaccatgtttctattgttagaccgatgtaaattggcagcatattgatcccacaggattccacaagatgctgaattatttaaaagataggtacccaaacatgccaatgttcataactgaaaacggtacaagacctcaaatttgatcaatgatcgagtcatcaaccatatttgaaattatcatgaaaaattattattaatggcttgaaggttttggagacttgcaaaaacctgaaacaacggataaagaacttctaaatgatacaaaaaggatccaatacatgagtggatacttagaagctttacaagcagcaatgagggatggagcaaatgtgaagggttattttgtgtggtcactattagacaattttgagtggttgttcggatacaaggttcggtttggtctattccatgtggatctaacaactcttaaaaggtcaccgaaacaatcagcttcatggtacaaaaattatatcgaagaacacgtgaatcgaagagatatcgtagataattattaaacacatttatttttaattcgtattcactgccaaagaaagtcaaaaattacaaaagcatttaaaattgatacttatcattgttgttgattgttgaatgattaaatttgtcttttcctcct

SEQ ID NO: 79501 - protein, 137 aa, Arabidopsis thaliana
  peptide (1)..(137): Ceres Seq. ID no. 12651568
MQKEFGYLADICFKHFGNRVKYWTTLNEPNQQLILGYLTGKFPPSRCSSPYGNCSQGNSETEPFIAAHNMILAHAKAVNIYKTKYQKEQKGSIGIVVQTSWFEPISDSNADKEAAERAQSFYSNWYVILLYMLRSYL

SEQ ID NO: 79502 - protein, 136 aa, Arabidopsis thaliana
  peptide (1)..(136): Ceres Seq. ID no. 12651569
MKYSTSPTYGIYIVLSICILTCTRILDPVIYGKYPKEMVDILGPALPQFSSNEVKNLEKSRADFVGINHYTSYFIQDCLTSACNTGHGAFKAEGYALKLDRKGNVTIGELVSTFIQFLIFNILRLYSNVLVNFIVY

SEQ ID NO: 79503 - protein, 99 aa, Arabidopsis thaliana
  peptide (1)..(99): Ceres Seq. ID no. 12651570
MVDILGPALPQFSSNEVKNLEKSRADFVGINHYTSYFIQDCLTSACNTGHGAFKAEGYALKLDRKGNVTIGELVSTFIQFLIFNILRLYSNVLVNFIVY

SEQ ID NO: 79504 - DNA, 1584 bp, Arabidopsis thaliana
  misc_feature (1)..(1584): Ceres Seq. ID no. 12651581
  misc_feature (1)..(1584): Ortholog of  Ceres SEQ ID NO 15171152 as cited in SEQ ID NO 60275
ataccaattggcaaatcattagggtttatgaaattttgagtgattttcagagaagtttgaggatgactgtgtgattctacttctcgaattgaaatagatagttgggtcataatcgcatatccttgtcttctgtcatgtattctctgattcgccatggaagaagtttggtcgagttacagaaatggcgtcatttgagagttttagtgcaaaaggcgtctcctttgtccaattccttctcctctgcttctgctgcgcgtttgagtcctagagttggtcgaaaaggtaagagctttacagtctcttacctcgttgattcattgggtttacccaaaaagctcgctgaatcggtctcaaggaaggttagcttcgaggacaaggacaaccctgactctgttctgaatcttttgagaagtcatgggttcactgattctcagatctccaccatcgttacggattatccacaattgcttgtagctgatgctgagaaatcacttgctcccaagcttcagtttttgcagtctagaggagcttcaagctctgagctcactgagattgtttctacagttcctaaaatcttgggaaagagaggccacaaaactatcagcgtattctatgatttcatcaaagaaactttacttgataagagttccaagtccgaaaagtcatgtcaaccttttccacagggtaatctggagaacaagatcagaaatttatctgttttgagagaattggggatgcctcacaagttgttattccccttgctcatctcttgtgacgtacctgtcttcggtaaagaaaaatttgaagaatccctcaagaaagttgttgagatgggttttgatccatccacctcaaagtttgtggaagctttgtgcgttgttcaaagattgagcgacaaaaacatagaagataaagtcaatgcgtataaaaggttaggctttgatgtggaatatgtatggacagtgttcaagaggtggccaaactttctgacacactcggagaagaagatattgaacaccattgaaacatttctaggcctagggttcagcagagatgagtttagcgtgttaattaagcgctttcctcagggcattggattatccgcggagatggttaaaaagaagactgagtttttggtaaagaagatgaattggccactaaaggctcttgtttcaaaccctgcggtgcttggatacagcctagagaagaggactgtcccaaggggtaacgtagttcaagctctcatctccaagggattgatcggaagtgaactcccttcgatatcgcgtgtcttcgtatgtaccgatcaggtgttcttaaacaggtatgtgaagaggcatgaggacaagcagctggagactgagttgatggctatctatcgtgcttcatagatcacaaggctgatcaaggattttggtttctatctttaaatatctgaaatcctcaatttagactttagttctcaatttcatatcgatccaaactgtttgtctctctctatagatgcttgaaattgtaagttttgaatccattttctgctatattactgaagttaaattccaaattctttgtgaccttgttcgg

SEQ ID NO: 79505 - protein, 418 aa, Arabidopsis thaliana
  peptide (1)..(418): Ceres Seq. ID no. 12651582
MYSLIRHGRSLVELQKWRHLRVLVQKASPLSNSFSSASAARLSPRVGRKGKSFTVSYLVDSLGLPKKLAESVSRKVSFEDKDNPDSVLNLLRSHGFTDSQISTIVTDYPQLLVADAEKSLAPKLQFLQSRGASSSELTEIVSTVPKILGKRGHKTISVFYDFIKETLLDKSSKSEKSCQPFPQGNLENKIRNLSVLRELGMPHKLLFPLLISCDVPVFGKEKFEESLKKVVEMGFDPSTSKFVEALCVVQRLSDKNIEDKVNAYKRLGFDVEYVWTVFKRWPNFLTHSEKKILNTIETFLGLGFSRDEFSVLIKRFPQGIGLSAEMVKKKTEFLVKKMNWPLKALVSNPAVLGYSLEKRTVPRGNVVQALISKGLIGSELPSISRVFVCTDQVFLNRYVKRHEDKQLETELMAIYRAS

SEQ ID NO: 79506 - protein, 218 aa, Arabidopsis thaliana
  peptide (1)..(218): Ceres Seq. ID no. 12651583
MPHKLLFPLLISCDVPVFGKEKFEESLKKVVEMGFDPSTSKFVEALCVVQRLSDKNIEDKVNAYKRLGFDVEYVWTVFKRWPNFLTHSEKKILNTIETFLGLGFSRDEFSVLIKRFPQGIGLSAEMVKKKTEFLVKKMNWPLKALVSNPAVLGYSLEKRTVPRGNVVQALISKGLIGSELPSISRVFVCTDQVFLNRYVKRHEDKQLETELMAIYRAS

SEQ ID NO: 79507 - DNA, 1907 bp, Arabidopsis thaliana
  misc_feature (1)..(1907): Ceres Seq. ID no. 12651584
  misc_feature (1)..(1907): Ortholog of  Ceres SEQ ID NO 12613725 as cited in SEQ ID NO 68196
atttgcttttctcaatagctttaaaatggtgaattcgaatgaagaagacgaaaggagaattcttgacgttgaagaatctcttcttacacaggaggaagtgaacaatcacttgaccggattgtcttctacagctgaagatggttctattgacatttatggaaacccaccatcgaagaagaagacaggaaactggaaagcttgtccctttattcttggaaacgaatgttgtgagagattagcttactatggaattgccaagaatctaatcacttactacacaagtgaattacacgagtccaatgtttctgcagctagtgacgttatgatttggcaaggaacttgctatatcacacctctcattggagctgttatagctgattcttactggggaagatactggaccattgcttctttctctgctatttatttcattggaatggctttgttgacactctcggcttcacttccggttttaaagccagcggcatgtgctggcgttgctgcggctctatgctcaccagcaacaacggttcagtatgcggttttctttacagggctttaccttattgctcttggtactggaggtatcaaaccatgtgtatcatcttttggtgctgatcagtttgatgatactgacccgagggaacgagttagaaaagcttctttctttaactggttttacttctccatcaacattggttcatttatctcatccactttgttagtttgggttcaagaaaatgtcgggtggggactcggtttcttgattcccaccgtgtttatgggagtctctattgcgagtttcttcattggaactccgctttatcggtttcagaaaccgggaggtagtccgattactagagtttgccaagttcttgtagctgcataccgtaaattgaagcttaatctccctgaagatatctcatttctgtatgaaacacgagagaaaaactccatgattgctggaagcaggaagattcaacacactgacggttacaagtttcttgacaaagctgctgttatctcagaatatgaatctaaatccggtgctttttccaacccatggaagctatgtactgtaactcaagtcgaagaagttaagactctaatccgtatgtttccaatctgggcctcggggatcgtctactcggtcctatattcacagatttccactctattcgtgcaacaaggacggtccatgaaccgaataatccgttctttcgagatccctcctgcttcattcggggttttcgacacacttatcgtgctcatatccatcccaatatatgaccgtttcctcgtaccctttgtaagacggttcacagggataccaaaagggttaactgatctgcagcgaatgggcattggtctttttctctctgtcctaagcattgcagctgcagctattgttgagacagtgcggttgcagcttgctcaagactttgttgcaatgagcatattttggcagatccctcagtacatactaatgggaatagcagaggtctttttcttcattggtcgagttgagtttttctatgatgaatctcctgatgcaatgagaagtgtatgcagcgctttggcactactcaataccgcagtcggaagctacctgagctcgttgatcctcactcttgtggcgtatttcacagctcttggaggtaaagatggttgggttccagacgaccttaataaaggacatcttgactacttcttctggcttttggtctctcttggacttgtcaacattcctgtttatgccttgatttgtgttaagcacacaaagaagaaggctttgtaagctatttttgtaacaagctatgttgttttggttcatcatattcatggtatactctgtatattgtaatctgtactagtagattttcttaaaaatatgaataatgtttccg

SEQ ID NO: 79508 - protein, 598 aa, Arabidopsis thaliana
  peptide (1)..(598): Ceres Seq. ID no. 12651585
FAFLNSFKMVNSNEEDERRILDVEESLLTQEEVNNHLTGLSSTAEDGSIDIYGNPPSKKKTGNWKACPFILGNECCERLAYYGIAKNLITYYTSELHESNVSAASDVMIWQGTCYITPLIGAVIADSYWGRYWTIASFSAIYFIGMALLTLSASLPVLKPAACAGVAAALCSPATTVQYAVFFTGLYLIALGTGGIKPCVSSFGADQFDDTDPRERVRKASFFNWFYFSINIGSFISSTLLVWVQENVGWGLGFLIPTVFMGVSIASFFIGTPLYRFQKPGGSPITRVCQVLVAAYRKLKLNLPEDISFLYETREKNSMIAGSRKIQHTDGYKFLDKAAVISEYESKSGAFSNPWKLCTVTQVEEVKTLIRMFPIWASGIVYSVLYSQISTLFVQQGRSMNRIIRSFEIPPASFGVFDTLIVLISIPIYDRFLVPFVRRFTGIPKGLTDLQRMGIGLFLSVLSIAAAAIVETVRLQLAQDFVAMSIFWQIPQYILMGIAEVFFFIGRVEFFYDESPDAMRSVCSALALLNTAVGSYLSSLILTLVAYFTALGGKDGWVPDDLNKGHLDYFFWLLVSLGLVNIPVYALICVKHTKKKAL

SEQ ID NO: 79509 - protein, 590 aa, Arabidopsis thaliana
  peptide (1)..(590): Ceres Seq. ID no. 12651586
MVNSNEEDERRILDVEESLLTQEEVNNHLTGLSSTAEDGSIDIYGNPPSKKKTGNWKACPFILGNECCERLAYYGIAKNLITYYTSELHESNVSAASDVMIWQGTCYITPLIGAVIADSYWGRYWTIASFSAIYFIGMALLTLSASLPVLKPAACAGVAAALCSPATTVQYAVFFTGLYLIALGTGGIKPCVSSFGADQFDDTDPRERVRKASFFNWFYFSINIGSFISSTLLVWVQENVGWGLGFLIPTVFMGVSIASFFIGTPLYRFQKPGGSPITRVCQVLVAAYRKLKLNLPEDISFLYETREKNSMIAGSRKIQHTDGYKFLDKAAVISEYESKSGAFSNPWKLCTVTQVEEVKTLIRMFPIWASGIVYSVLYSQISTLFVQQGRSMNRIIRSFEIPPASFGVFDTLIVLISIPIYDRFLVPFVRRFTGIPKGLTDLQRMGIGLFLSVLSIAAAAIVETVRLQLAQDFVAMSIFWQIPQYILMGIAEVFFFIGRVEFFYDESPDAMRSVCSALALLNTAVGSYLSSLILTLVAYFTALGGKDGWVPDDLNKGHLDYFFWLLVSLGLVNIPVYALICVKHTKKKAL

SEQ ID NO: 79510 - protein, 491 aa, Arabidopsis thaliana
  peptide (1)..(491): Ceres Seq. ID no. 12651587
MIWQGTCYITPLIGAVIADSYWGRYWTIASFSAIYFIGMALLTLSASLPVLKPAACAGVAAALCSPATTVQYAVFFTGLYLIALGTGGIKPCVSSFGADQFDDTDPRERVRKASFFNWFYFSINIGSFISSTLLVWVQENVGWGLGFLIPTVFMGVSIASFFIGTPLYRFQKPGGSPITRVCQVLVAAYRKLKLNLPEDISFLYETREKNSMIAGSRKIQHTDGYKFLDKAAVISEYESKSGAFSNPWKLCTVTQVEEVKTLIRMFPIWASGIVYSVLYSQISTLFVQQGRSMNRIIRSFEIPPASFGVFDTLIVLISIPIYDRFLVPFVRRFTGIPKGLTDLQRMGIGLFLSVLSIAAAAIVETVRLQLAQDFVAMSIFWQIPQYILMGIAEVFFFIGRVEFFYDESPDAMRSVCSALALLNTAVGSYLSSLILTLVAYFTALGGKDGWVPDDLNKGHLDYFFWLLVSLGLVNIPVYALICVKHTKKKAL

SEQ ID NO: 79511 - DNA, 1958 bp, Arabidopsis thaliana
  misc_feature (1)..(1958): Ceres Seq. ID no. 12651610
  misc_feature (1)..(1958): Ortholog of  Ceres SEQ ID NO 14316459 as cited in SEQ ID NO 57754
aatgtccattacaaacaacaacagcatcataaatctcatcacgacgaactttcttctctttctccgtcgattcaatcctccacttcccgattccttcctccgccgccggagaaaccttcacaacctccgtctcaaacctaaccatctcctcaatcccaaactccttagcgaaatctttcaaatacgccaaaacttcgccatgactcggaaacctcctcggatctctagacacaccggaacgaaccacgaacgggaaatctctgtatccggtacactctcgtgtaccgttgattcgtagagatctatagacgcttgaatgaacaacggatcgggtcgggtcaacacttaacggatccgattcgacttcatcggtgtagatccaggttcctccgacttgtttttgtttctcgaaaacgaccaccgagtgaccttctcgtcgaagctctcgtgccgctactagacctgcaggtccagcaccgataaccgccacgtggtgtgatctgaagcaggtattgaagcaattggagccatggtgtgaacttaaagataaagtggttcttgtgacaggtgcttcatctggtatagggagagagatctgtcttgatctatgcaaagctggttgtaagattgtagcagcagctcgtcgtgttgatcgtctcaactctctctgttctgaaatcaacagctttggtgcaatcggagtccaagccgcagctcttgagctagacgtttcatcagacgcagacactattcgaaaagcggttaaagaagcttgggaaatctttggaacgatcgatgttttgattaacaatgctggaatcagaggcaatgtcaagtctagtttggatttatcaaaagaagaatgggacaaagtctttagaaccaacttgaccggatcttggttaatatccaaatacgtctgccttttgatgcgtgacgctaagcgtgggggctcggtgattaacgtctcgtcgatctctgggcttcatcgcggtttgttgcgcggtggactagcgtatgcttgttccaaaggtggtgttgacaccatgacgaggatgatggctattgagttagctgtttataagatcagagtgaactcgatcgcacctgggattttcaggtcagagatcacacaaggtcttttccagaaagagtggctcgagaaggtaacggaaaagattgtaccattaaagatgcaacagactgtggatccggggcttacatctctcgttcgctatctcattcacgattcttcccaatatgtcaccgggaatacatacatagtcgattccggagctacactccccggtgtgcccattttttcttctctttctccgtagattcaattctccatttcccgcttccttcttccgccgccggagcaaccttcacaaccgccgtatcaaaccgaatcatctcctcaatcgcaaactccttagcgaaatcttgcaaatacgccaaaacttcaccatgactcggaaacctcctcggatctctagattccgatacatcggaacgaatcacgaacgggaagtccctgtatcccatacactcacgggggagattagttcggagagatccatagacgctcgaatgaacaacggatcgggtcgggtcaacgcttaatggatcgggttcaatatgatcggtgtaaatccaggttcctccgacttgtttttgtctctcgaagacgaccaccgagtgaccttcccgacgaagctctcgcgccgcgactaatccggcggctccggcgccgataactgccacgtggtgtgatctgattggtgataaggaaggcgccattgggtttttttacgagattcgttaacgatggtgaatatactacggcctctttataaatatgtggcccaaaaactcatgaaccacacacaccacgacacaatgttaaaaaaacaaaaacaaattcctgagaaattgtttaaacgctgcgttttatc

SEQ ID NO: 79512 - protein, 136 aa, Arabidopsis thaliana
  peptide (1)..(136): Ceres Seq. ID no. 12651611
MRDAKRGGSVINVSSISGLHRGLLRGGLAYACSKGGVDTMTRMMAIELAVYKIRVNSIAPGIFRSEITQGLFQKEWLEKVTEKIVPLKMQQTVDPGLTSLVRYLIHDSSQYVTGNTYIVDSGATLPGVPIFSSLSP

SEQ ID NO: 79513 - protein, 98 aa, Arabidopsis thaliana
  peptide (1)..(98): Ceres Seq. ID no. 12651612
MSITNNNSIINLITTNFLLFLRRFNPPLPDSFLRRRRNLHNLRLKPNHLLNPKLLSEIFQIRQNFAMTRKPPRISRHTGTNHEREISVSGTLSCTVDS

SEQ ID NO: 79514 - protein, 97 aa, Arabidopsis thaliana
  peptide (1)..(97): Ceres Seq. ID no. 12651613
MTRMMAIELAVYKIRVNSIAPGIFRSEITQGLFQKEWLEKVTEKIVPLKMQQTVDPGLTSLVRYLIHDSSQYVTGNTYIVDSGATLPGVPIFSSLSP

SEQ ID NO: 79515 - DNA, 931 bp, Arabidopsis thaliana
  misc_feature (1)..(931): Ceres Seq. ID no. 12651622
  misc_feature (1)..(931): Ortholog of  Ceres SEQ ID NO 13594248 as cited in SEQ ID NO 57340
aaaattagggtcgccttcttcttcttcttctctgacatcgtcattttgacatcggaagaatcttcagtgccgagaaagataaacaaaatggcggcaatcagaacgatgacgaacatgattctacgcgagttcatccatcatccacttctccttcactcttcatcgaaatcgtgtcaatctcttttaccatgtctccgtctcactcccctaatttctccaattcactctaattcccggctcgtatccgtccgatgtgcggcatcgacctccggtggaagcggtggtgatcggaaagtctcttcacggttgtcgcaggtgcaacagatgcttcatgaagccgaagagagagctagttccgctggcaatgagcctactcctcaaatcactctagacaatgttacacttaactttgctagaagtggtggtcctggaggccagaatgtgaacaaattgaataccaaagtagatatgcgcttcaatgttaagaacgcgtattggctgagtgacaggatcagagagaaaatcttactgacggagaagaatcggatcaacaaggatggtgaacttgtgatatcttctaccaaaaccagaacgcagaaaggtaacatcgacgatgcacttgaaaaactacaggcgataattgatgcggcttcatatgttccacctccaccatcagaagaacaaaagaagaaaatagtaaagctcgctgcgaaagctgacaataaacgacttaaaagcaaaaaagttctgtcagacaagaaatctgcgagaagaagccgcggtagttacgatgattaaacttaaaaccatacaatggagtccaggttgattctaaagcttttaacttaaaatgattgttattttcttggaatttaatgtaacacaacaatcaaatcatccaataaaaatttgcagtatattggattttatg

SEQ ID NO: 79516 - protein, 265 aa, Arabidopsis thaliana
  peptide (1)..(265): Ceres Seq. ID no. 12651623
KIRVAFFFFFSDIVILTSEESSVPRKINKMAAIRTMTNMILREFIHHPLLLHSSSKSCQSLLPCLRLTPLISPIHSNSRLVSVRCAASTSGGSGGDRKVSSRLSQVQQMLHEAEERASSAGNEPTPQITLDNVTLNFARSGGPGGQNVNKLNTKVDMRFNVKNAYWLSDRIREKILLTEKNRINKDGELVISSTKTRTQKGNIDDALEKLQAIIDAASYVPPPPSEEQKKKIVKLAAKADNKRLKSKKVLSDKKSARRSRGSYDD

SEQ ID NO: 79517 - protein, 236 aa, Arabidopsis thaliana; identical to SEQ ID NO: 26577
  peptide (1)..(236): Ceres Seq. ID no. 12651624

SEQ ID NO: 79518 - protein, 230 aa, Arabidopsis thaliana; identical to SEQ ID NO: 26578
  peptide (1)..(230): Ceres Seq. ID no. 12651625

SEQ ID NO: 79519 - DNA, 1958 bp, Arabidopsis thaliana
  misc_feature (1)..(1958): Ceres Seq. ID no. 12651626
  misc_feature (1)..(1958): Ortholog of  Ceres SEQ ID NO 14316459 as cited in SEQ ID NO 57754
aatgtccattacaaacaacaacagcatcataaatctcatcacgacgaactttcttctctttctccgtcgattcaatcctccacttcccgattccttcctccgccgccggagaaaccttcacaacctccgtctcaaacctaaccatctcctcaatcccaaactccttagcgaaatctttcaaatacgccaaaacttcgccatgactcggaaacctcctccgatctctagacacaccggaacgaaccacgaacgggaaatctctgtatccggtacactctcgtgtaccgttgattcgtagagatctatagacgcttgaatgaacaacggatcgggtcgggtcaacacttaacggatccgattcgacttcatcggtgtaaatccaggttcctcccacttgtttttgtttctcgaaaacgaccactgagtgaccttctcgtcgaagctctcgtgccgctactagtccggcgggtccagcaccgataaccgccacgtggtgtgatctgaagcaggtattgaagcaattggagccatggtgtgaacttaaagataaagtggttcttgtgacaggtgcttcctctggtatagggagagagatctgtcttgatctatgcaaagctggttgtaagattgtagcagcagctcgtcgtgttgatcgtctcaactctctctgttctgaaatcaacagctttggtgctatcggagtccaagccgtagcacttgagctagacgtttcatcagaagcagacactattcgaaaagcggttaaagaagcttgggaaacctttggaaagatcgatgttttgatcaataatgccggaatcagaggcaatgtcaagtcgagtttggatttgtcagaagaagaatgggacaaagtctttagaaccaacttaaccggatcttggttaatatccaaatacgtctgccttttgatgcgtgacgctgagcgcgggggctcggtgattaacgtctcgtcgatctctgggcttcatcgcggtttgttgcgcggtggactagcgtatgcttgttccaaaggtggtgttgacaccatgacgaggatgatggctattgagttagctgtttataagatcagagtgaactcgatcgcaccggggattttcaggtcagagatcacacaaggtcttttccagaaagagtggctcaagaaggttacggaaaaggttgtaccattaaagatgcaacagactgtggatccggggcttacatctcttgttcgctatctcattcacgattcttctcaatatgtcaccgggaatacatacattgtcgattccggaactacactgcccggtgtgcccattttttcttctctttctccgtagattcaattctccatttcccgcttccttcttccgccgccggagcaaccttcacaaccgccgtatcaaaccgaatcatctcctcgatcgcaaactccttagcgaaatcttgtaaatacgccaaaacttcaccatgactcggaaacctcctcggatctctagattccgatacaccggaacgaaccacgaacgggaagtccctgtatcccatacactcacgggggagattagttcggagagagccataaacgctcgaatgaacaacggatcgggtcgggtcaacgcttaatggatcgggttcgatatgatcggtgtatatccaggttcctccgacttgtttttgtctctcgaagacgaccaccgagtgaccttcccgtcgaagctctcgcgccgctactaatccggcggctccggcgccgataactgccacgtggtgtgatctgattggtgataaggaaggcgccattggtttttttaacgagattcgttaacgatggtgaatatactacggcctttttataaatatgtggcccaaaaactcatgatccacacacaccacgacacaatgttaaaaaaacaaaaacaaattcctgagaaattatctaaacgctgcgttttatc

SEQ ID NO: 79520 - protein, 136 aa, Arabidopsis thaliana
  peptide (1)..(136): Ceres Seq. ID no. 12651627
MRDAERGGSVINVSSISGLHRGLLRGGLAYACSKGGVDTMTRMMAIELAVYKIRVNSIAPGIFRSEITQGLFQKEWLKKVTEKVVPLKMQQTVDPGLTSLVRYLIHDSSQYVTGNTYIVDSGTTLPGVPIFSSLSP

SEQ ID NO: 79521 - protein, 98 aa, Arabidopsis thaliana
  peptide (1)..(98): Ceres Seq. ID no. 12651628
MSITNNNSIINLITTNFLLFLRRFNPPLPDSFLRRRRNLHNLRLKPNHLLNPKLLSEIFQIRQNFAMTRKPPPISRHTGTNHEREISVSGTLSCTVDS

SEQ ID NO: 79522 - protein, 97 aa, Arabidopsis thaliana
  peptide (1)..(97): Ceres Seq. ID no. 12651629
MTRMMAIELAVYKIRVNSIAPGIFRSEITQGLFQKEWLKKVTEKVVPLKMQQTVDPGLTSLVRYLIHDSSQYVTGNTYIVDSGTTLPGVPIFSSLSP

SEQ ID NO: 79523 - DNA, 2277 bp, Arabidopsis thaliana
  misc_feature (1)..(2277): Ceres Seq. ID no. 12651630
  misc_feature (1)..(2277): Ortholog of  Ceres SEQ ID NO 12608463 as cited in SEQ ID NO 60238
aaacctagagctctcacttctcatatcaccaactttaaaacttaccgtccggttatcggaaaactccacgtggcaactttaacgcttcttctcttcctaatcgccgccggtattgccgtcacttcctctctatggcttaacaagacgacaaaagcatttgatcgaccgacattagtagcaacaaaaccagaaccggagctagagccaccgcatgaaaccggagtattggtaaattgcacaagtttcttgaatcaaaaccggtccggttcttgctcaagaacacctctacttaacaagaaaaaaccatctcatcgaccgacaataacaacaataaaaccggtcccggtacgtgtatcagagaagaaatcaccggaggaaaccggaagctcggtagattgctcaagtttcttgaatcaaaaccggtctggttcttgctcaagaacactgcaatcgggttataatcaaaaccaaaccgaatctaaccggtcttgtcctgattacttcaagtggattcacgaggatctaaaaccatggagagaaacagggataacaaaagaaatggtggaaagaggcaaaactacagcacatttcaggttagttattttaaacggcaaggtgttcgtcgaaaactacaagaagtctatacaaactagagatgcgttcacactatgggggattcttcagctgctgagaaagtatccagggaagttacctgacgtggatctcatgtttgactgtgatgatcgaccagtcattagatcggacggttataatatattgaatcgtacggttgagaatgcgccacctccgttgtttagatattgcggtgataggtggacggtggatatcgtctttcctgattggtcattctggggatggtaagtactagaatataatctcttctcactttctccttttttcttcttttgtctgaactctgaagctaacgtgtatggttgttaaggtacacttgtccccacttgatcacatgccggagaaaagttaccgggtccattttttcatttatacacaaatagattctttcgtgattcttaatagattcattttgttgtattatatcttcttaagagtatagtagtatagctagttagtggctaaaattatagtaatttaaagggacgaaaaggtaagtccaaaaacaatattatccctccacgcaatgccactacaatttaaatatgtggttgtaagttgtttatcacttattatgctttaactaaagtgtttcactaaagtaactttaatttcttgtgtcattcaatctttccagcaaaacatgaagtgtaaaaccaaaaccatattggtagtttcataactattcatttaaacatgttttctatcaaattaagttcttattttttgaatgaaattgaaatgaaatggaataattttggtgggtgaaggcaggagataaacataagggagtggagcaaagtgttgaaagaaatggaagaaggaaagaagaagaagaaatttatggaaagagacgcctatgcatattggaaagggaacccttttgttgcatctccttcaagagaagatctcctcacttgcaatttatcctcactacatgattggaatgctagaattttcattcaggattggatatcagaaggacaaagaggatttgagaattcgaatgtagcaaatcaatgcacttacagaactcttcaacctctccaacactattggcccattagggataaagataaatgtagatccatcaaatttgctgttgattggcttaataatcacactcaaaaggctcaagagataggaagagaagcaagtgagttcatgcaaagagatctatcaatggaaaatgtttatgattacatgttccatctgttgaatgaatactccaagcttcttaagtacaagcctcaagttccaaagaatagtgttgagctatgcacagaagccttggtgtgcccttctgaaggggaagatgttaatggggttgataagaaatttatgataggctctttagttagtaggcctcatgcttctggcccatgttcacttcctcctccttttgattccaatggtcttgagaagttccataggaagaaattgaatctcatccggcaagtggagaaatgggaagactcttactggcaaaaggttctgtaaagtgatataatctaaatttgatgatctaagtttagttggggatttttatagtacctttttttatctattggataacgttagattgattataattttgaggaattaaaattctttcttataaac

SEQ ID NO: 79524 - protein, 293 aa, Arabidopsis thaliana
  peptide (1)..(293): Ceres Seq. ID no. 12651631
KPRALTSHITNFKTYRPVIGKLHVATLTLLLFLIAAGIAVTSSLWLNKTTKAFDRPTLVATKPEPELEPPHETGVLVNCTSFLNQNRSGSCSRTPLLNKKKPSHRPTITTIKPVPVRVSEKKSPEETGSSVDCSSFLNQNRSGSCSRTLQSGYNQNQTESNRSCPDYFKWIHEDLKPWRETGITKEMVERGKTTAHFRLVILNGKVFVENYKKSIQTRDAFTLWGILQLLRKYPGKLPDVDLMFDCDDRPVIRSDGYNILNRTVENAPPPLFRYCGDRWTVDIVFPDWSFWGW

SEQ ID NO: 79525 - protein, 228 aa, Arabidopsis thaliana
  peptide (1)..(228): Ceres Seq. ID no. 12651632
MEEGKKKKKFMERDAYAYWKGNPFVASPSREDLLTCNLSSLHDWNARIFIQDWISEGQRGFENSNVANQCTYRTLQPLQHYWPIRDKDKCRSIKFAVDWLNNHTQKAQEIGREASEFMQRDLSMENVYDYMFHLLNEYSKLLKYKPQVPKNSVELCTEALVCPSEGEDVNGVDKKFMIGSLVSRPHASGPCSLPPPFDSNGLEKFHRKKLNLIRQVEKWEDSYWQKVL

SEQ ID NO: 79526 - protein, 218 aa, Arabidopsis thaliana
  peptide (1)..(218): Ceres Seq. ID no. 12651633
MERDAYAYWKGNPFVASPSREDLLTCNLSSLHDWNARIFIQDWISEGQRGFENSNVANQCTYRTLQPLQHYWPIRDKDKCRSIKFAVDWLNNHTQKAQEIGREASEFMQRDLSMENVYDYMFHLLNEYSKLLKYKPQVPKNSVELCTEALVCPSEGEDVNGVDKKFMIGSLVSRPHASGPCSLPPPFDSNGLEKFHRKKLNLIRQVEKWEDSYWQKVL

SEQ ID NO: 79527 - DNA, 3765 bp, Arabidopsis thaliana
  misc_feature (1)..(3765): Ceres Seq. ID no. 12651701
  misc_feature (1)..(3765): Ortholog of  Ceres SEQ ID NO 14303487 as cited in SEQ ID NO 54521
  misc_feature (1)..(3765): Ortholog of  Ceres SEQ ID NO 13659710 as cited in SEQ ID NO 60808
atgggagtcggagatcctcttccacttccgccggaaaagaaccgtcgggaggttaataaaccgccggatattgcgtcgacttcctcctcctccgcttcggcggtgaataatgctcggttgtccgatgctccgattcttttgtttgtttatttccataaggctttccgtgcgcagctagcggagctccagtttctggccggtgatacagtccggtccggttctgatctggccgtggagctccgctctaagtttgagtttcttaagcttgtatataagtatcattccgcagctgaagatgaggttatattttcagcgttggacactcgtgtgaagaacattgtttttaattactcgcttgaacatgatgccacagatgatcttttcacttcagtttttcattggctgaatgttcttgaagaggaacaagggaacagagccgatgtacttcgtgaagttgttttatgcattggaaccattcagtcatccatatgtcaacatatgcttaaagaagaacgacaggtgtttcctttgatgattgagaacttctcctttgaagaacaggcatcgttagtgtggcaattcatttgtagtgttccagtgatggtgctggaagagattttcccatggatgacgtctttactctctcccaaggagaaatctgaagttgagacttgcttcaaagaagttgtcccaaatgaactctctttgcaactggtcataaactcttggctgattgatgacagtcaatcttctttgacggctcttacaaagattatgaaaggagttcagtctgtagaagtgtctgaaaatatgaccaactctcagacaaattcatcatcaagtggtgtgtttcaacgtttttggcagtggagtaaaaaaatgtctttttctagtccaaatacaggacacattttggttcatggtatccatctttggcataatgcaattagaaaagatttggtagacattcaaaaaggactatgccaattgacatttccaagcctttcattggacctcaatgttctggtggttcggctaaacttccttgctgatgtccttatcttttatagcaatgcatttaagacgttcttttacccagtgtttgaagatatggtggatcaacaacactcttcctcttccaaacaattcaccatagatggacatgtggaaaacttcaagaagtcactagaccttgaaactagagcagggagtgacaattttgtcataacccttcaggagaaactggagtctcttatattgacagtagctaagcagttctctatagaggaaacagaggtattcccgatcatcagcaagaactgcaacattgaaatgcagaggcaactactatatagaagcatccatttcctgcctcttggattgcttaagtgtgtcataatgtggttctctgctcagttaccagaagatgaatgtcaatcaattattcactacttaagctctgaagattcctttcccaacaaaccttttgcgcacctcttgttgcagtggtttcgcttcggttattcaggcaaaacaccagttgaaagtttctggaatgagctgtcctttatgttcaaaccaagatgttcttttgaagaggaactcactgaagaagcttctggatctttctttcaacaatcaccgcagaaactattcaaagtatccgatccctattctatggatccacctgctggttacatgaatgagacaccttactcaagtgcgatgaatcagcaaatacttatcccaggaaagctcaggccacttctgcatcttcctgatctttttggtgacaagactattggtgaacacttaactatggacttgaaaccaatcgatctgattttctacttccacaaggcaatgaagaaagatctagactaccttgtacgtggttcagctcggctcgcaacagattatagcttccttggagaatttcaacagcggtttcatcttataaagttcttgtatcagatacattcagatgcagaagatgagattgcatttccagctttggaggcaaagggtaaactacaaaacattagtcagtcatacagtatcgatcacgaactcgaagttgagcacctcaataaagtatcattccttttgaatgagttggcagaattgaacatgctggtactagaccacaagaatgtgaagtatgagaagttgtgtatgagcctccaggatatatgcaaatccattcacaagctattgtctgagcatctccaccgagaagaaactgagctttggtgtttattcagagactgcttcactattgaagaacaagaaaagatcatagcatgcatgcttggaagaataagtggagaaatattgcaagatatgattccatggctaatggaatctttgatccctgatgaacaacatgctgtgatgtccttgtggagacaagcaacaaggaaaactatgtttggtgaatggctaacagaatggtacaattctcatgctgtcgaggaggaaacagaggaagcaaataaggatccatctgagaattcagatccattagacgttgtctggagttatctctttgaaggagctgctgatgagtacaaagggagcatttgcagcaaacctctggaagagacagagttaaaaggtatcatgaataagcctcttggaaaggctgctcctaataacaaggtagaatttggaaacaaagaggagaatcatcttgagatctcaggaagtaaaaaggtgtgtacaggagctgatgaaacgaagtacaaagaacaaactgacagcaacgcgcaagcttttcagatgtcgcataatactagccaatctggccaagacagtagatatgagtgtctgttatcaatgagtcaagaggatgtggaagctacaattcgaagaatatctcgagattcttccctggatcctcagaagaaatcgtatatcattcaaaacttgttaatgagccgttggattgctacacaacggatatataatcttgaaccatccattctctcaagcaatagggaagcagttccggggcagaatccatcttatcgagatcctcacaaactgatctttggttgcaaacactacaagagaagttgcaaacttcttgctccttgttgcaacaagctctacacatgtatacgatgccatgatgaagaggttgatcacttattggatagaaaacagatcacaaagatgatgtgcatgaaatgcatgataattcagccagtaggtgctagttgctcaaatatttcatgtagttcatcaatgggaaaatattactgtaaaatatgcaagttgtttgacgatgatagggaaatctatcattgtccatactgcaatctctgccggctaggaaaaggactgagcatagactactttcattgcatgaaatgtaatgcttgtatgtcgcgactcatagtagaacatgtatgcagagaaaagtgcttagaagataattgtccgatttgtcatgaatacatatttacctcaaattctccggtgaaggctcttccatgcggtcacgtgatgcattcaacatgctttcaggagtacacatgttcgcattacacatgccctatttgcagcaagtcgctcggggatatgcaggtttactttagaatgttagacgcactgcttgcagaacaaaagatgccagatgaatacttaaaccaaactcaggtaatactgtgtaatgactgtggaagaaaggggaatgctccttaccattggctctatcacaagtgttcttcttgtgcctcctacaacaccagacttttctag

SEQ ID NO: 79528 - protein, 1254 aa, Arabidopsis thaliana
  peptide (1)..(1254): Ceres Seq. ID no. 12651702
MGVGDPLPLPPEKNRREVNKPPDIASTSSSSASAVNNARLSDAPILLFVYFHKAFRAQLAELQFLAGDTVRSGSDLAVELRSKFEFLKLVYKYHSAAEDEVIFSALDTRVKNIVFNYSLEHDATDDLFTSVFHWLNVLEEEQGNRADVLREVVLCIGTIQSSICQHMLKEERQVFPLMIENFSFEEQASLVWQFICSVPVMVLEEIFPWMTSLLSPKEKSEVETCFKEVVPNELSLQLVINSWLIDDSQSSLTALTKIMKGVQSVEVSENMTNSQTNSSSSGVFQRFWQWSKKMSFSSPNTGHILVHGIHLWHNAIRKDLVDIQKGLCQLTFPSLSLDLNVLVVRLNFLADVLIFYSNAFKTFFYPVFEDMVDQQHSSSSKQFTIDGHVENFKKSLDLETRAGSDNFVITLQEKLESLILTVAKQFSIEETEVFPIISKNCNIEMQRQLLYRSIHFLPLGLLKCVIMWFSAQLPEDECQSIIHYLSSEDSFPNKPFAHLLLQWFRFGYSGKTPVESFWNELSFMFKPRCSFEEELTEEASGSFFQQSPQKLFKVSDPYSMDPPAGYMNETPYSSAMNQQILIPGKLRPLLHLPDLFGDKTIGEHLTMDLKPIDLIFYFHKAMKKDLDYLVRGSARLATDYSFLGEFQQRFHLIKFLYQIHSDAEDEIAFPALEAKGKLQNISQSYSIDHELEVEHLNKVSFLLNELAELNMLVLDHKNVKYEKLCMSLQDICKSIHKLLSEHLHREETELWCLFRDCFTIEEQEKIIACMLGRISGEILQDMIPWLMESLIPDEQHAVMSLWRQATRKTMFGEWLTEWYNSHAVEEETEEANKDPSENSDPLDVVWSYLFEGAADEYKGSICSKPLEETELKGIMNKPLGKAAPNNKVEFGNKEENHLEISGSKKVCTGADETKYKEQTDSNAQAFQMSHNTSQSGQDSRYECLLSMSQEDVEATIRRISRDSSLDPQKKSYIIQNLLMSRWIATQRIYNLEPSILSSNREAVPGQNPSYRDPHKLIFGCKHYKRSCKLLAPCCNKLYTCIRCHDEEVDHLLDRKQITKMMCMKCMIIQPVGASCSNISCSSSMGKYYCKICKLFDDDREIYHCPYCNLCRLGKGLSIDYFHCMKCNACMSRLIVEHVCREKCLEDNCPICHEYIFTSNSPVKALPCGHVMHSTCFQEYTCSHYTCPICSKSLGDMQVYFRMLDALLAEQKMPDEYLNQTQVILCNDCGRKGNAPYHWLYHKCSSCASYNTRLF

SEQ ID NO: 79529 - protein, 1088 aa, Arabidopsis thaliana
  peptide (1)..(1088): Ceres Seq. ID no. 12651703
MLKEERQVFPLMIENFSFEEQASLVWQFICSVPVMVLEEIFPWMTSLLSPKEKSEVETCFKEVVPNELSLQLVINSWLIDDSQSSLTALTKIMKGVQSVEVSENMTNSQTNSSSSGVFQRFWQWSKKMSFSSPNTGHILVHGIHLWHNAIRKDLVDIQKGLCQLTFPSLSLDLNVLVVRLNFLADVLIFYSNAFKTFFYPVFEDMVDQQHSSSSKQFTIDGHVENFKKSLDLETRAGSDNFVITLQEKLESLILTVAKQFSIEETEVFPIISKNCNIEMQRQLLYRSIHFLPLGLLKCVIMWFSAQLPEDECQSIIHYLSSEDSFPNKPFAHLLLQWFRFGYSGKTPVESFWNELSFMFKPRCSFEEELTEEASGSFFQQSPQKLFKVSDPYSMDPPAGYMNETPYSSAMNQQILIPGKLRPLLHLPDLFGDKTIGEHLTMDLKPIDLIFYFHKAMKKDLDYLVRGSARLATDYSFLGEFQQRFHLIKFLYQIHSDAEDEIAFPALEAKGKLQNISQSYSIDHELEVEHLNKVSFLLNELAELNMLVLDHKNVKYEKLCMSLQDICKSIHKLLSEHLHREETELWCLFRDCFTIEEQEKIIACMLGRISGEILQDMIPWLMESLIPDEQHAVMSLWRQATRKTMFGEWLTEWYNSHAVEEETEEANKDPSENSDPLDVVWSYLFEGAADEYKGSICSKPLEETELKGIMNKPLGKAAPNNKVEFGNKEENHLEISGSKKVCTGADETKYKEQTDSNAQAFQMSHNTSQSGQDSRYECLLSMSQEDVEATIRRISRDSSLDPQKKSYIIQNLLMSRWIATQRIYNLEPSILSSNREAVPGQNPSYRDPHKLIFGCKHYKRSCKLLAPCCNKLYTCIRCHDEEVDHLLDRKQITKMMCMKCMIIQPVGASCSNISCSSSMGKYYCKICKLFDDDREIYHCPYCNLCRLGKGLSIDYFHCMKCNACMSRLIVEHVCREKCLEDNCPICHEYIFTSNSPVKALPCGHVMHSTCFQEYTCSHYTCPICSKSLGDMQVYFRMLDALLAEQKMPDEYLNQTQVILCNDCGRKGNAPYHWLYHKCSSCASYNTRLF

SEQ ID NO: 79530 - protein, 1077 aa, Arabidopsis thaliana
  peptide (1)..(1077): Ceres Seq. ID no. 12651704
MIENFSFEEQASLVWQFICSVPVMVLEEIFPWMTSLLSPKEKSEVETCFKEVVPNELSLQLVINSWLIDDSQSSLTALTKIMKGVQSVEVSENMTNSQTNSSSSGVFQRFWQWSKKMSFSSPNTGHILVHGIHLWHNAIRKDLVDIQKGLCQLTFPSLSLDLNVLVVRLNFLADVLIFYSNAFKTFFYPVFEDMVDQQHSSSSKQFTIDGHVENFKKSLDLETRAGSDNFVITLQEKLESLILTVAKQFSIEETEVFPIISKNCNIEMQRQLLYRSIHFLPLGLLKCVIMWFSAQLPEDECQSIIHYLSSEDSFPNKPFAHLLLQWFRFGYSGKTPVESFWNELSFMFKPRCSFEEELTEEASGSFFQQSPQKLFKVSDPYSMDPPAGYMNETPYSSAMNQQILIPGKLRPLLHLPDLFGDKTIGEHLTMDLKPIDLIFYFHKAMKKDLDYLVRGSARLATDYSFLGEFQQRFHLIKFLYQIHSDAEDEIAFPALEAKGKLQNISQSYSIDHELEVEHLNKVSFLLNELAELNMLVLDHKNVKYEKLCMSLQDICKSIHKLLSEHLHREETELWCLFRDCFTIEEQEKIIACMLGRISGEILQDMIPWLMESLIPDEQHAVMSLWRQATRKTMFGEWLTEWYNSHAVEEETEEANKDPSENSDPLDVVWSYLFEGAADEYKGSICSKPLEETELKGIMNKPLGKAAPNNKVEFGNKEENHLEISGSKKVCTGADETKYKEQTDSNAQAFQMSHNTSQSGQDSRYECLLSMSQEDVEATIRRISRDSSLDPQKKSYIIQNLLMSRWIATQRIYNLEPSILSSNREAVPGQNPSYRDPHKLIFGCKHYKRSCKLLAPCCNKLYTCIRCHDEEVDHLLDRKQITKMMCMKCMIIQPVGASCSNISCSSSMGKYYCKICKLFDDDREIYHCPYCNLCRLGKGLSIDYFHCMKCNACMSRLIVEHVCREKCLEDNCPICHEYIFTSNSPVKALPCGHVMHSTCFQEYTCSHYTCPICSKSLGDMQVYFRMLDALLAEQKMPDEYLNQTQVILCNDCGRKGNAPYHWLYHKCSSCASYNTRLF

SEQ ID NO: 79531 - DNA, 1602 bp, Arabidopsis thaliana
  misc_feature (1)..(1602): Ceres Seq. ID no. 12651745
  misc_feature (1)..(1602): Ortholog of  Ceres SEQ ID NO 13581563 as cited in SEQ ID NO 58942
  misc_feature (1)..(1602): Ortholog of  Ceres SEQ ID NO 13658707 as cited in SEQ ID NO 66286
  misc_feature (1)..(1602): Ortholog of  Ceres SEQ ID NO 13654528 as cited in SEQ ID NO 68080
atggtggagaatttgtttccttctcgatttcaatttcatcttcagagacttgacccgaagcgtcgtcttacttctctccttgcttctcacaaaacactcttcacatttctctggatcactgcctttggttccgtctttctatggcagcgaacggcttacatcgaaggcggctctggaactggtcctgtcggaggaaagttcacaattttcggtaagatcaaaccgattcagccaattccccgattgagacctgtggtgtttgatttgaaggattttggaggtgttggagatgggtttacgcttaacactgaagcattcgagagagctgtgatttcaatctctaagcttgggggaagtagcggcggaggtcagctgaatgtgccgcctggacggtggcttacggcgccgtttaatctcactagccatatgactctgtttctcgcagaggattccgagattcttggtgttgaggaacataatttaggagattttgagactttgcgtgatggatgtgtgcgtcttgtttacttaacgtgtcactttaattgtcaggatgagaagtattggcctttaatgccaccattgccttcatatggttacggtagagagcgtccgggacctcgttatgggagcttaatccatggtcaaaacctcaaagatattgtgataactggtcataatggaacaataaacgggcaaggacaatcgtggtggaagaagcatcaaagaagacttctcaactatacgagagggcctttagttcaaattatgtggtctagtgacatagttatcgctaacattacaatgcgtgactcaccgttctggactctgcatccatatgactgcaaaaatgtaacaataaggaatgtcaccatcttggctcctgtaaccggagcaccaaacactgatggaattgatccagattcgtgcgaggatatggtaattgaggactgttacattagcaccggggatgatgcgatcgcgataaagagtggatgggatcagtttgggattgcatatggacgaccttcaacaaacattcttattcgtaatctcgttgttcgctctgttatcagtgctggtgtatcaatcggaagcgaaatgtctggtggaatatctaatgtgacgatcgagaaccttctgatctggaactcacgccgtggaatcagaattaaaacggctccaggacgaggcggttacatcagaaacataacctacaaaaacctaacactagacaatgttcgggttgggatagtgatcaaaacggattacaacgagcatgcagacgataattatgatcggaaagcatacccgatactttcgggattcagtttcgcgggaatccacggacaaggagtgcgagtgccggtccggatccatggaagcgaacagattccggtaaggaatgtgacgtttcgggacatgtccgttgggttaacgtacaagaagaaacatatattccaatgttcgttcgtgaaaggacgagtgttcggttcgatatttcctcgaccttgcgagaattttgatgtttacgacgaggaaggtcgtctggttaagcctgcagctgagtccaatgtggcggacattgactacgacatttga

SEQ ID NO: 79532 - protein, 533 aa, Arabidopsis thaliana
  peptide (1)..(533): Ceres Seq. ID no. 12651746
MVENLFPSRFQFHLQRLDPKRRLTSLLASHKTLFTFLWITAFGSVFLWQRTAYIEGGSGTGPVGGKFTIFGKIKPIQPIPRLRPVVFDLKDFGGVGDGFTLNTEAFERAVISISKLGGSSGGGQLNVPPGRWLTAPFNLTSHMTLFLAEDSEILGVEEHNLGDFETLRDGCVRLVYLTCHFNCQDEKYWPLMPPLPSYGYGRERPGPRYGSLIHGQNLKDIVITGHNGTINGQGQSWWKKHQRRLLNYTRGPLVQIMWSSDIVIANITMRDSPFWTLHPYDCKNVTIRNVTILAPVTGAPNTDGIDPDSCEDMVIEDCYISTGDDAIAIKSGWDQFGIAYGRPSTNILIRNLVVRSVISAGVSIGSEMSGGISNVTIENLLIWNSRRGIRIKTAPGRGGYIRNITYKNLTLDNVRVGIVIKTDYNEHADDNYDRKAYPILSGFSFAGIHGQGVRVPVRIHGSEQIPVRNVTFRDMSVGLTYKKKHIFQCSFVKGRVFGSIFPRPCENFDVYDEEGRLVKPAAESNVADIDYDI

SEQ ID NO: 79533 - protein, 391 aa, Arabidopsis thaliana
  peptide (1)..(391): Ceres Seq. ID no. 12651747
MTLFLAEDSEILGVEEHNLGDFETLRDGCVRLVYLTCHFNCQDEKYWPLMPPLPSYGYGRERPGPRYGSLIHGQNLKDIVITGHNGTINGQGQSWWKKHQRRLLNYTRGPLVQIMWSSDIVIANITMRDSPFWTLHPYDCKNVTIRNVTILAPVTGAPNTDGIDPDSCEDMVIEDCYISTGDDAIAIKSGWDQFGIAYGRPSTNILIRNLVVRSVISAGVSIGSEMSGGISNVTIENLLIWNSRRGIRIKTAPGRGGYIRNITYKNLTLDNVRVGIVIKTDYNEHADDNYDRKAYPILSGFSFAGIHGQGVRVPVRIHGSEQIPVRNVTFRDMSVGLTYKKKHIFQCSFVKGRVFGSIFPRPCENFDVYDEEGRLVKPAAESNVADIDYDI

SEQ ID NO: 79534 - protein, 342 aa, Arabidopsis thaliana
  peptide (1)..(342): Ceres Seq. ID no. 12651748
MPPLPSYGYGRERPGPRYGSLIHGQNLKDIVITGHNGTINGQGQSWWKKHQRRLLNYTRGPLVQIMWSSDIVIANITMRDSPFWTLHPYDCKNVTIRNVTILAPVTGAPNTDGIDPDSCEDMVIEDCYISTGDDAIAIKSGWDQFGIAYGRPSTNILIRNLVVRSVISAGVSIGSEMSGGISNVTIENLLIWNSRRGIRIKTAPGRGGYIRNITYKNLTLDNVRVGIVIKTDYNEHADDNYDRKAYPILSGFSFAGIHGQGVRVPVRIHGSEQIPVRNVTFRDMSVGLTYKKKHIFQCSFVKGRVFGSIFPRPCENFDVYDEEGRLVKPAAESNVADIDYDI

SEQ ID NO: 79535 - DNA, 903 bp, Arabidopsis thaliana
  misc_feature (1)..(903): Ceres Seq. ID no. 12651770
  misc_feature (1)..(903): Ortholog of  Ceres SEQ ID NO 14313599 as cited in SEQ ID NO 54989
  misc_feature (1)..(903): Ortholog of  Ceres SEQ ID NO 15176204 as cited in SEQ ID NO 55608
  misc_feature (1)..(903): Ortholog of  Ceres SEQ ID NO 14313064 as cited in SEQ ID NO 59543
  misc_feature (1)..(903): Ortholog of  Ceres SEQ ID NO 13661001 as cited in SEQ ID NO 67531
  misc_feature (1)..(903): Ortholog of  Ceres SEQ ID NO 15178920 as cited in SEQ ID NO 0
tgtccattccgagaactctctccctcattaattaaaatctttctcagagcaatcttctcacaagtttctaagaatctcaaagcatgaatataagtagaacagaattcgcaaactgtaaaacccttataaatcataaagaagaagtcgaagaagtcgagaaaaagatggaaatagaaataaggagaggtccatggactgtggaagaagacatgaagctcgtcagttacatttctcttcacggtgaaggaagatggaactccctctctcgttctgctggactgaatagaacggggaaaagttgcagattgcggtggctaaattatctccggccggatatccgccgtggagacatatcccttcaagaacaatttatcatccttgaactccattctcgttggggaaatcggtggtcaaagattgctcaacatttaccgggaagaacagataacgagataaagaattattggagaacacgtgttcaaaagcatgcaaaacttctaaaatgtgacgtgaacagcaagcaattcaaagacaccatcaaacatctctggatgcctcgtctcatcgagagaatcgccgccactcaaagtgtccaatttacctctaaccactactcgcctgagaactccagcgtcgccaccgccacgtcatcaacgtcgtcgtctgaggctgtgagatcgagtttctacggtggtgatcaggtggaatttggaacgttggatcatatgacaaatggtggttattggttcaacggcggagatacgtttgaaactttgtgtagttttgacgagctcaacaagtggctcatacagtaggcatttcatgggtttattaatgaatgtaatgtataataaacataaactaatcattcaaaacaaaattaaaggttttccgggttttttt

SEQ ID NO: 79536 - protein, 243 aa, Arabidopsis thaliana
  peptide (1)..(243): Ceres Seq. ID no. 12651771
MNISRTEFANCKTLINHKEEVEEVEKKMEIEIRRGPWTVEEDMKLVSYISLHGEGRWNSLSRSAGLNRTGKSCRLRWLNYLRPDIRRGDISLQEQFIILELHSRWGNRWSKIAQHLPGRTDNEIKNYWRTRVQKHAKLLKCDVNSKQFKDTIKHLWMPRLIERIAATQSVQFTSNHYSPENSSVATATSSTSSSEAVRSSFYGGDQVEFGTLDHMTNGGYWFNGGDTFETLCSFDELNKWLIQ

SEQ ID NO: 79537 - protein, 216 aa, Arabidopsis thaliana
  peptide (1)..(216): Ceres Seq. ID no. 12651772
MEIEIRRGPWTVEEDMKLVSYISLHGEGRWNSLSRSAGLNRTGKSCRLRWLNYLRPDIRRGDISLQEQFIILELHSRWGNRWSKIAQHLPGRTDNEIKNYWRTRVQKHAKLLKCDVNSKQFKDTIKHLWMPRLIERIAATQSVQFTSNHYSPENSSVATATSSTSSSEAVRSSFYGGDQVEFGTLDHMTNGGYWFNGGDTFETLCSFDELNKWLIQ

SEQ ID NO: 79538 - protein, 201 aa, Arabidopsis thaliana
  peptide (1)..(201): Ceres Seq. ID no. 12651773
MKLVSYISLHGEGRWNSLSRSAGLNRTGKSCRLRWLNYLRPDIRRGDISLQEQFIILELHSRWGNRWSKIAQHLPGRTDNEIKNYWRTRVQKHAKLLKCDVNSKQFKDTIKHLWMPRLIERIAATQSVQFTSNHYSPENSSVATATSSTSSSEAVRSSFYGGDQVEFGTLDHMTNGGYWFNGGDTFETLCSFDELNKWLIQ

SEQ ID NO: 79539 - DNA, 1299 bp, Arabidopsis thaliana
  misc_feature (1)..(1299): Ceres Seq. ID no. 12651823
  misc_feature (1)..(1299): Ortholog of  Ceres SEQ ID NO 13596509 as cited in SEQ ID NO 62004
  misc_feature (1)..(1299): Ortholog of  Ceres SEQ ID NO 13659971 as cited in SEQ ID NO 67565
  misc_feature (1)..(1299): Ortholog of  Ceres SEQ ID NO 13500385 as cited in SEQ ID NO 67583
atggtgataaagggaatgcgtgttggtaagtacgagcttgggaggacactcggagagggaaattccgcaaaagttaaatttgctatagatactcttaccggcgaatcattcgccatcaaaatcatcgagaagtcgtgtatcacacgtcttaacgtctcttttcagattaagagagagattcgaacactcaaagttttgaagcatccaaacattgtccgattacatgaggtcttggctagcaaaaccaagatttacatggttctggaatgtgtcactggaggagacttatttgacagaattgtctcgaaaggaaagctttcggaaacacaaggacgaaaaatgtttcagcagttgattgatggagtcagctattgtcataacaagggcgtttttcacagggatctcaagctagagaatgttcttcttgatgcaaagggtcacattaagatcactgattttggccttagtgctctgtctcaacattatagggaagatgggttgctacatacaacttgtggtagtcctaactatgtcgcgcctgaggttctagctaatgagggctatgatggtgcagcatcagatatatggtcatgtggagtaatcttgtatgttattcttacgggatgtctcccttttgatgatgcaaaccttgcagttatttgccggaagatattcaaaggggatcccccaatacctagatggatatcactgggagctaaaactatgatcaagagaatgcttgatcctaatccagtcacgagggtgacaatcgcaggtataaaggctcatgattggtttaaacatgactacactccttcaaactacgatgacgacgatgatgtatacttgatccaagaagatgtttttatgatgaaggaatatgaagaagagaagagccctgattctccaaccattatcaacgcttttcagttgattggaatgtcctcgtttctcgacctctcaggtttctttgagacagagaaattatcagagaggcagataagattcacgtcaaatagtttagctaaagatttgttggagaacatcgaaacgattttcacggagatgggcttttgtttacagaagaaacatgcaaagttaaaagcaatcaaagaagaaagcactcaaaaaaggcaatgcggtttatcggtaacggctgaggttttcgagataagtccgtccctgaatgtggttgaactaagaaaatcacatggcgattcgtctctatataaacagttgtacgagcgattattgaatgagctgggctcatcatcacaagtacaggagcttttagcgtag

SEQ ID NO: 79540 - protein, 432 aa, Arabidopsis thaliana
  peptide (1)..(432): Ceres Seq. ID no. 12651824
MVIKGMRVGKYELGRTLGEGNSAKVKFAIDTLTGESFAIKIIEKSCITRLNVSFQIKREIRTLKVLKHPNIVRLHEVLASKTKIYMVLECVTGGDLFDRIVSKGKLSETQGRKMFQQLIDGVSYCHNKGVFHRDLKLENVLLDAKGHIKITDFGLSALSQHYREDGLLHTTCGSPNYVAPEVLANEGYDGAASDIWSCGVILYVILTGCLPFDDANLAVICRKIFKGDPPIPRWISLGAKTMIKRMLDPNPVTRVTIAGIKAHDWFKHDYTPSNYDDDDDVYLIQEDVFMMKEYEEEKSPDSPTIINAFQLIGMSSFLDLSGFFETEKLSERQIRFTSNSLAKDLLENIETIFTEMGFCLQKKHAKLKAIKEESTQKRQCGLSVTAEVFEISPSLNVVELRKSHGDSSLYKQLYERLLNELGSSSQVQELLA

SEQ ID NO: 79541 - protein, 427 aa, Arabidopsis thaliana
  peptide (1)..(427): Ceres Seq. ID no. 12651825
MRVGKYELGRTLGEGNSAKVKFAIDTLTGESFAIKIIEKSCITRLNVSFQIKREIRTLKVLKHPNIVRLHEVLASKTKIYMVLECVTGGDLFDRIVSKGKLSETQGRKMFQQLIDGVSYCHNKGVFHRDLKLENVLLDAKGHIKITDFGLSALSQHYREDGLLHTTCGSPNYVAPEVLANEGYDGAASDIWSCGVILYVILTGCLPFDDANLAVICRKIFKGDPPIPRWISLGAKTMIKRMLDPNPVTRVTIAGIKAHDWFKHDYTPSNYDDDDDVYLIQEDVFMMKEYEEEKSPDSPTIINAFQLIGMSSFLDLSGFFETEKLSERQIRFTSNSLAKDLLENIETIFTEMGFCLQKKHAKLKAIKEESTQKRQCGLSVTAEVFEISPSLNVVELRKSHGDSSLYKQLYERLLNELGSSSQVQELLA

SEQ ID NO: 79542 - protein, 347 aa, Arabidopsis thaliana
  peptide (1)..(347): Ceres Seq. ID no. 12651826
MVLECVTGGDLFDRIVSKGKLSETQGRKMFQQLIDGVSYCHNKGVFHRDLKLENVLLDAKGHIKITDFGLSALSQHYREDGLLHTTCGSPNYVAPEVLANEGYDGAASDIWSCGVILYVILTGCLPFDDANLAVICRKIFKGDPPIPRWISLGAKTMIKRMLDPNPVTRVTIAGIKAHDWFKHDYTPSNYDDDDDVYLIQEDVFMMKEYEEEKSPDSPTIINAFQLIGMSSFLDLSGFFETEKLSERQIRFTSNSLAKDLLENIETIFTEMGFCLQKKHAKLKAIKEESTQKRQCGLSVTAEVFEISPSLNVVELRKSHGDSSLYKQLYERLLNELGSSSQVQELLA

SEQ ID NO: 79543 - DNA, 858 bp, Arabidopsis thaliana
  misc_feature (1)..(858): Ceres Seq. ID no. 12651831
  misc_feature (1)..(858): Ortholog of  Ceres SEQ ID NO 14311249 as cited in SEQ ID NO 53778
atggagaaggagaagaaggcgttgaagaagaaggcgaaagttcttaaaagtctttctaagaacttggatatgttctctagtatagggtttggtcttgatcctgaagctggtttggttggtgagattcagaccaagacaatctcggaagctacagagatattggttaagcagctggagcagttgaaagcagaggagaagatattgaagaaacagaggaaagaagagaaggctaaagccaaagccatgaagaagatgactgaaatggactctgaatcatcttcttcgtctgaatcaagtgatagtgattgtgataaaggcaaagttgtggacatgagctctttaagaaacaaggctaaaccggttcttgagccgttacaaccagaagccacagtagcaacccttcctaggatccaagaggatgcaatttcttgcaagaacaccagtgaagcattgcagattgctctacaaacatccacaatttttccttcaatggccaatcctggacagacattgaagacggtagaagcggtttcagtggttggattaccattgaatagagtagaagtgtgtatgggagggaagtgtaagagatcaggaggagctttgttgttggatgagtttcaaagggcgatgacgggtttcgaaggatctgctgtggcttgcaagtgcatggggaagtgtcgtgatggcccaaacgttagagttgtgaaggagactgatgctgtgatgactgattcagttaggacaccatccaagaccctttgtgtaggagttggattgcaggatgtggaaactattgtgacaagtttctttgatgaagaatgtagcagagaaggactcggttctgtctcatattga

SEQ ID NO: 79544 - protein, 285 aa, Arabidopsis thaliana; identical to SEQ ID NO: 49788
  peptide (1)..(285): Ceres Seq. ID no. 12651832

SEQ ID NO: 79545 - protein, 262 aa, Arabidopsis thaliana; identical to SEQ ID NO: 49789
  peptide (1)..(262): Ceres Seq. ID no. 12651833

SEQ ID NO: 79546 - protein, 204 aa, Arabidopsis thaliana
  peptide (1)..(204): Ceres Seq. ID no. 12651834
MKKMTEMDSESSSSSESSDSDCDKGKVVDMSSLRNKAKPVLEPLQPEATVATLPRIQEDAISCKNTSEALQIALQTSTIFPSMANPGQTLKTVEAVSVVGLPLNRVEVCMGGKCKRSGGALLLDEFQRAMTGFEGSAVACKCMGKCRDGPNVRVVKETDAVMTDSVRTPSKTLCVGVGLQDVETIVTSFFDEECSREGLGSVSY

SEQ ID NO: 79547 - DNA, 1309 bp, Arabidopsis thaliana
  misc_feature (1)..(1309): Ceres Seq. ID no. 12651843
  misc_feature (1)..(1309): Ortholog of  Ceres SEQ ID NO 14307631 as cited in SEQ ID NO 20399
  misc_feature (1)..(1309): Ortholog of  Ceres SEQ ID NO 14307261 as cited in SEQ ID NO 53982
gacaaagacatttaaaagaagaattttcgaagaaaaattagagagagtagaagaagcagaagcagtaatggtacgagcttcatcgtcgaagaaaggaggatcaaaaggaggagacaaagacgacgcagagtcaaaacagaggaagagattaaaaaccctagctctcgataaccaattgctctctgattctccggcgaaatctcattcctctctcaaaccttcaaagcaagttctcaaacaccatggcaccgacatcatccgcaaatctcagcgcaagaatcgctttctcttctccttccctggtcttctcgctcctatctccgccgctaccatcggcgatctcgatcgattatctaccaaaaaccctgtcctctaccttaatttcccacagggtcgtatgaaactttttggaacgattttgtatccgaagaacagatacttgactcttcaattctctagaggaggcaaaaatgtcttatgtgatgattattttgataacatgattgtgttctctgagtcatggtggattgggacaaaagaggagaatccagaagaagctcgtcttgatttccctaaagaactagctcaggcagagaatactgagtttgatttccaaggcggtgctggaggagcagcttcggtgaagaagctggcgagtcctgaaattggtagccaaccaacagagacagactcacctgaagttgacaacgaggatgttttgtctgaggatggagaattcttggacgataagatccaagtaacaccaccagttcaattaacaccaccagtccaagtaactccggtccgacagtctcagagaaattctgggaagaaattcaactttgcagaaacttcctcagaggcctcctctggtgaaagtgaaggcaatacatctgatgaagatgagaaacctctgttggaacctgaatcttcaacaagaagtcgtgaggaatctcaagatggtaatggtattactgcatctgcaagcaagttgcctgaagaacttccggctaaaagggaaaaactaaagagcaaagacagtaagctcgttcaagctactttgtctaaccttttcaagaaagctgaggagaaaacagctggaacttccaaggctaaatcatcctcaaaagcttaaagaaatcttttccagaagaaaatagaggtctgttgtttctttgctgtgagaatgaacagtttttagttcttttaggtatgtttgtgtgagaaattgctacaagactgatgtattcatcatgcagttggataatgtattcattatgcttattcgatagtttgtgttcatcgagct

SEQ ID NO: 79548 - protein, 377 aa, Arabidopsis thaliana
  peptide (1)..(377): Ceres Seq. ID no. 12651844
TKTFKRRIFEEKLERVEEAEAVMVRASSSKKGGSKGGDKDDAESKQRKRLKTLALDNQLLSDSPAKSHSSLKPSKQVLKHHGTDIIRKSQRKNRFLFSFPGLLAPISAATIGDLDRLSTKNPVLYLNFPQGRMKLFGTILYPKNRYLTLQFSRGGKNVLCDDYFDNMIVFSESWWIGTKEENPEEARLDFPKELAQAENTEFDFQGGAGGAASVKKLASPEIGSQPTETDSPEVDNEDVLSEDGEFLDDKIQVTPPVQLTPPVQVTPVRQSQRNSGKKFNFAETSSEASSGESEGNTSDEDEKPLLEPESSTRSREESQDGNGITASASKLPEELPAKREKLKSKDSKLVQATLSNLFKKAEEKTAGTSKAKSSSKA

SEQ ID NO: 79549 - protein, 355 aa, Arabidopsis thaliana
  peptide (1)..(355): Ceres Seq. ID no. 12651845
MVRASSSKKGGSKGGDKDDAESKQRKRLKTLALDNQLLSDSPAKSHSSLKPSKQVLKHHGTDIIRKSQRKNRFLFSFPGLLAPISAATIGDLDRLSTKNPVLYLNFPQGRMKLFGTILYPKNRYLTLQFSRGGKNVLCDDYFDNMIVFSESWWIGTKEENPEEARLDFPKELAQAENTEFDFQGGAGGAASVKKLASPEIGSQPTETDSPEVDNEDVLSEDGEFLDDKIQVTPPVQLTPPVQVTPVRQSQRNSGKKFNFAETSSEASSGESEGNTSDEDEKPLLEPESSTRSREESQDGNGITASASKLPEELPAKREKLKSKDSKLVQATLSNLFKKAEEKTAGTSKAKSSSKA

SEQ ID NO: 79550 - protein, 245 aa, Arabidopsis thaliana
  peptide (1)..(245): Ceres Seq. ID no. 12651846
MKLFGTILYPKNRYLTLQFSRGGKNVLCDDYFDNMIVFSESWWIGTKEENPEEARLDFPKELAQAENTEFDFQGGAGGAASVKKLASPEIGSQPTETDSPEVDNEDVLSEDGEFLDDKIQVTPPVQLTPPVQVTPVRQSQRNSGKKFNFAETSSEASSGESEGNTSDEDEKPLLEPESSTRSREESQDGNGITASASKLPEELPAKREKLKSKDSKLVQATLSNLFKKAEEKTAGTSKAKSSSKA

SEQ ID NO: 79551 - DNA, 1023 bp, Arabidopsis thaliana
  misc_feature (1)..(1023): Ceres Seq. ID no. 12651854
  misc_feature (1)..(1023): Ortholog of  Ceres SEQ ID NO 15177475 as cited in SEQ ID NO 0
atggaatcgaaagcaatttgcttagggtttcttcctccaagacttcgattttcatctccacgtttactctctcttcctccttctcctcctgcttcttccacatttgcgacgcgtcacaaacttgattccagacaaaccctcctttggaacaaaccgcaattgagccgagttcgtgtagcgtgttcttcttctcaatctgactcaagacctgagaagaagcaatcggataagagtaactatgctcgagctgagctgttccgtgggaaatcaggttctgtttctttcaatggtctgactcatcagctggttgaagaaagtaaactggtttcagctccgtttcaagaagagaaaggttctttcttgtgggttttggctcctgttgttttgatttcttcgttgattcttcctcagttctttctaagtggtatcattgaagctaccttcaaaaacgacactgttgctgaaattgttacttctttttgctttgagacggtgttttatgctggtcttgcgatattcctgtctgtgactgaccgagtgcagaggccgtacttagacttcagctccaagagatggggtctgatcactggactgaggggataccttacgtctgcattcctcacgatgggtttaaaagttgtagttcccgtatttgctgtttacatgacttggccagctcttggaatagatgctttgattgcagtgcttcctttcttggttggctgtgcagttcaaagagttttcgaggctcggcttgaaagacgtggctcatcctgttggcccattgttccaatagtctttgaggtgtataggctgtatcaggtgacaagagcagcgacttttgttcagaggctgatgtttatgatgaaagatgcggcaacgactgctgaaataacagagcgaggagttgcactagttggtttggttgtgactttgcagtttctagctgttatgtgtctctggtcgtttatcacttttcttatgcgcctctttccttctagacctgtaggtgaaaactactag

SEQ ID NO: 79552 - protein, 340 aa, Arabidopsis thaliana
  peptide (1)..(340): Ceres Seq. ID no. 12651855
MESKAICLGFLPPRLRFSSPRLLSLPPSPPASSTFATRHKLDSRQTLLWNKPQLSRVRVACSSSQSDSRPEKKQSDKSNYARAELFRGKSGSVSFNGLTHQLVEESKLVSAPFQEEKGSFLWVLAPVVLISSLILPQFFLSGIIEATFKNDTVAEIVTSFCFETVFYAGLAIFLSVTDRVQRPYLDFSSKRWGLITGLRGYLTSAFLTMGLKVVVPVFAVYMTWPALGIDALIAVLPFLVGCAVQRVFEARLERRGSSCWPIVPIVFEVYRLYQVTRAATFVQRLMFMMKDAATTAEITERGVALVGLVVTLQFLAVMCLWSFITFLMRLFPSRPVGENY

SEQ ID NO: 79553 - DNA, 1562 bp, Arabidopsis thaliana
  misc_feature (1)..(1562): Ceres Seq. ID no. 12651864
  misc_feature (1)..(1562): Ortholog of  Ceres SEQ ID NO 14307534 as cited in SEQ ID NO 55715
  misc_feature (1)..(1562): Ortholog of  Ceres SEQ ID NO 14307548 as cited in SEQ ID NO 58859
actaaaacctcacttatagtcgtctctggtgaaatcttgccggagagatctcaataaaatgtcatcttccagaatattcctagtcggtaattccatattccgacctcacaaaccatcctttcctctctctttcaatcgttttccatctgtatctctccgcttccgatgcttctccagtgacgccgccgccgcagtagcaaccaccgtggattcggattcgccgtctctcactcctcatccatggccagagtggataactttcgtcgatcgcttaaagacgaaaggatatttcaccaaagacaccgaagatgatactgtttatcaggaaatgattctcgttaaagatgcttgtctcagcttcgctcgtgatcgttacgacgttctcagatccttatcatcaggagatgtacaagctcttgtggagcgtggatgccctaatctcttcagaaaaactgtgaattcttccaaaaggattcgagctcatgttaagttaaacgaaggagatgtttgtggttcttgtgatcttcgtagctcgtgtgatagagcttatgtgatacttaaggatacagaagctgatgctcgaactgttgatgttatgcgtttactattgttcaatgcgcttgattctatagttatctctcgaggtgaagttccacctggtaaagaacttgttcatgagtctgcaagaagacttcttttagagttggttgagtttagtgagaagcctttaatccctgctttaccaaaaccttcttcaaaggaatcttctttgccttcgaaagagagagcttttaagtcgaggaatgatgagccttctcagcgtgtggcttttaaatcgaggaatgatgatccttctcaacgtgtggcttttaaatcgaggaatgatgagccttctcaccgtgtggcttttaaatcgcggaacgatgagtcttctcaacgtgatcgacctctttacagtgcagattgggcttgtcctaaatgcgactttgtaaactttgccagaaatgaaagatgccgagagtgcaatgaagtcgctgacagacgacctgttgctgctgttgtcaaggaaggtgactggctatgtcctgagtgtagtttcttaaacttcacaagaaaccagagctgtctgaaatgcaaagcaaagggaccaaagaaaacttcaatggtgaatattgttgaaatgaagaaaggagactggaactgcactgggtgtggatatatgaactttgctagcaacaaacagtgtcgagagtgccgagaacaacgtcacaagacgctagctgagcctggagattgggaatgcccctcatgcgacttcgtgaactttaggagaaacgatgcttgcaagaaatgcgagtgcaaacgacctagccaagccaataacgatcaagaagaccatacatggaaacgacccgccttagtgtaaacttatgcttttgtacttgcaagattcactgcttgctatttcctttcaacttgttgtttcttcttctcttgttgagttcccaaatttctaaacagataacaattttgaagcagaaaatggaaacctagtttgtagt

SEQ ID NO: 79554 - protein, 455 aa, Arabidopsis thaliana
  peptide (1)..(455): Ceres Seq. ID no. 12651865
MSSSRIFLVGNSIFRPHKPSFPLSFNRFPSVSLRFRCFSSDAAAAVATTVDSDSPSLTPHPWPEWITFVDRLKTKGYFTKDTEDDTVYQEMILVKDACLSFARDRYDVLRSLSSGDVQALVERGCPNLFRKTVNSSKRIRAHVKLNEGDVCGSCDLRSSCDRAYVILKDTEADARTVDVMRLLLFNALDSIVISRGEVPPGKELVHESARRLLLELVEFSEKPLIPALPKPSSKESSLPSKERAFKSRNDEPSQRVAFKSRNDDPSQRVAFKSRNDEPSHRVAFKSRNDESSQRDRPLYSADWACPKCDFVNFARNERCRECNEVADRRPVAAVVKEGDWLCPECSFLNFTRNQSCLKCKAKGPKKTSMVNIVEMKKGDWNCTGCGYMNFASNKQCRECREQRHKTLAEPGDWECPSCDFVNFRRNDACKKCECKRPSQANNDQEDHTWKRPALV

SEQ ID NO: 79555 - protein, 365 aa, Arabidopsis thaliana
  peptide (1)..(365): Ceres Seq. ID no. 12651866
MILVKDACLSFARDRYDVLRSLSSGDVQALVERGCPNLFRKTVNSSKRIRAHVKLNEGDVCGSCDLRSSCDRAYVILKDTEADARTVDVMRLLLFNALDSIVISRGEVPPGKELVHESARRLLLELVEFSEKPLIPALPKPSSKESSLPSKERAFKSRNDEPSQRVAFKSRNDDPSQRVAFKSRNDEPSHRVAFKSRNDESSQRDRPLYSADWACPKCDFVNFARNERCRECNEVADRRPVAAVVKEGDWLCPECSFLNFTRNQSCLKCKAKGPKKTSMVNIVEMKKGDWNCTGCGYMNFASNKQCRECREQRHKTLAEPGDWECPSCDFVNFRRNDACKKCECKRPSQANNDQEDHTWKRPALV

SEQ ID NO: 79556 - protein, 276 aa, Arabidopsis thaliana
  peptide (1)..(276): Ceres Seq. ID no. 12651867
MRLLLFNALDSIVISRGEVPPGKELVHESARRLLLELVEFSEKPLIPALPKPSSKESSLPSKERAFKSRNDEPSQRVAFKSRNDDPSQRVAFKSRNDEPSHRVAFKSRNDESSQRDRPLYSADWACPKCDFVNFARNERCRECNEVADRRPVAAVVKEGDWLCPECSFLNFTRNQSCLKCKAKGPKKTSMVNIVEMKKGDWNCTGCGYMNFASNKQCRECREQRHKTLAEPGDWECPSCDFVNFRRNDACKKCECKRPSQANNDQEDHTWKRPALV

SEQ ID NO: 79557 - DNA, 1578 bp, Arabidopsis thaliana
  misc_feature (1)..(1578): Ceres Seq. ID no. 12651876
  misc_feature (1)..(1578): Ortholog of  Ceres SEQ ID NO 15177463 as cited in SEQ ID NO 0
atgatgaatccaagtttaaatctgatggatctggaggagctaacatcgaatgcaaagcagatacaagaagacgtattggaagagatactcacacttaatgccaacactgaatatcttcaccgcttcctccacgggagctctgataaagtgcttttcaaaaagaacgtaccggtggttacctatgatgatgttaagccttatatcgaacgtgttgcgaatggagagccctcggatgtgatttctggtggacctatcactatgttcctccgtagcaccggaacttcaggagggaaacaaaaggtatttccagtgaacgataagtacattgaaaagttgggatacgttattgctctacgatctctcgctatgtccaagcattttgatagcggtggcgagcaaggaaaagcgatggagtttcattgcactaaaccgccatcggcaacaccctctggtttaccgcgagatgaggttgtgagagtaggtgcagcctttgcttttgtcttggttcgagccatcgattttcttgagaaacactggaaggaattgtgtagcaatatccgatcaggtcatgttagtgagtggatcactgaccttgagggcagaaacgctgtctccaccattcttcgaggacctgattcaatattggctgatgttattgaacaagaatgcagccacaagtcctgggaaggtattattacacgactttggcccaaagccaaatatattgattgtattataacaggacaaatgtctcaatacattccaatgttggagttttattccaacaagctgcctatagtttccacaacatatgggtcttctgaaagtacatttgggatgaatgtggatcctctatgcaaaccacaagatacctcctacacatgtgcgccgaacatctcctacttcgagtttctacctgttgatcacaagggagacatggcaagcattgttgatcttgtcgacgtcaagttagggtgctactatgaaccggtggtcactaattattttggtctacacagatatcttattggagatattctacaggttactggattttacaataacacacctcaatttagatttgtacatagaaagaatgtggttttaagcgtgagatcggagacaacaactgaagaagacattttaaaggcgttgaatcatgtgggactggttcttgaatcttcagatttaatgttgatgggcttcacatgctatgcagatatctccacatttccaggtcactacgttttttactgggaactcaaagctaaagacgttcaagatgttttcgagcttgaggagaaagtaatggtgaaatgttgctctttattagaggagtcatttgatgaagtatatagaaaaaataggagtaaagatgagtgtatcggacctctagagataagagttgtgcaacaaggaacattcgattccctcatggaatatttcatctcccaaggaggttcgattgctcaatacaagacacccatatgtatcaactcttctgaagccttagcagttcttgaaaacaaggttcttgctcgattctttagcgaaaaatctcctcctcttgactcatag

SEQ ID NO: 79558 - protein, 525 aa, Arabidopsis thaliana
  peptide (1)..(525): Ceres Seq. ID no. 12651877
MMNPSLNLMDLEELTSNAKQIQEDVLEEILTLNANTEYLHRFLHGSSDKVLFKKNVPVVTYDDVKPYIERVANGEPSDVISGGPITMFLRSTGTSGGKQKVFPVNDKYIEKLGYVIALRSLAMSKHFDSGGEQGKAMEFHCTKPPSATPSGLPRDEVVRVGAAFAFVLVRAIDFLEKHWKELCSNIRSGHVSEWITDLEGRNAVSTILRGPDSILADVIEQECSHKSWEGIITRLWPKAKYIDCIITGQMSQYIPMLEFYSNKLPIVSTTYGSSESTFGMNVDPLCKPQDTSYTCAPNISYFEFLPVDHKGDMASIVDLVDVKLGCYYEPVVTNYFGLHRYLIGDILQVTGFYNNTPQFRFVHRKNVVLSVRSETTTEEDILKALNHVGLVLESSDLMLMGFTCYADISTFPGHYVFYWELKAKDVQDVFELEEKVMVKCCSLLEESFDEVYRKNRSKDECIGPLEIRVVQQGTFDSLMEYFISQGGSIAQYKTPICINSSEALAVLENKVLARFFSEKSPPLDS

SEQ ID NO: 79559 - protein, 524 aa, Arabidopsis thaliana
  peptide (1)..(524): Ceres Seq. ID no. 12651878
MNPSLNLMDLEELTSNAKQIQEDVLEEILTLNANTEYLHRFLHGSSDKVLFKKNVPVVTYDDVKPYIERVANGEPSDVISGGPITMFLRSTGTSGGKQKVFPVNDKYIEKLGYVIALRSLAMSKHFDSGGEQGKAMEFHCTKPPSATPSGLPRDEVVRVGAAFAFVLVRAIDFLEKHWKELCSNIRSGHVSEWITDLEGRNAVSTILRGPDSILADVIEQECSHKSWEGIITRLWPKAKYIDCIITGQMSQYIPMLEFYSNKLPIVSTTYGSSESTFGMNVDPLCKPQDTSYTCAPNISYFEFLPVDHKGDMASIVDLVDVKLGCYYEPVVTNYFGLHRYLIGDILQVTGFYNNTPQFRFVHRKNVVLSVRSETTTEEDILKALNHVGLVLESSDLMLMGFTCYADISTFPGHYVFYWELKAKDVQDVFELEEKVMVKCCSLLEESFDEVYRKNRSKDECIGPLEIRVVQQGTFDSLMEYFISQGGSIAQYKTPICINSSEALAVLENKVLARFFSEKSPPLDS

SEQ ID NO: 79560 - protein, 517 aa, Arabidopsis thaliana
  peptide (1)..(517): Ceres Seq. ID no. 12651879
MDLEELTSNAKQIQEDVLEEILTLNANTEYLHRFLHGSSDKVLFKKNVPVVTYDDVKPYIERVANGEPSDVISGGPITMFLRSTGTSGGKQKVFPVNDKYIEKLGYVIALRSLAMSKHFDSGGEQGKAMEFHCTKPPSATPSGLPRDEVVRVGAAFAFVLVRAIDFLEKHWKELCSNIRSGHVSEWITDLEGRNAVSTILRGPDSILADVIEQECSHKSWEGIITRLWPKAKYIDCIITGQMSQYIPMLEFYSNKLPIVSTTYGSSESTFGMNVDPLCKPQDTSYTCAPNISYFEFLPVDHKGDMASIVDLVDVKLGCYYEPVVTNYFGLHRYLIGDILQVTGFYNNTPQFRFVHRKNVVLSVRSETTTEEDILKALNHVGLVLESSDLMLMGFTCYADISTFPGHYVFYWELKAKDVQDVFELEEKVMVKCCSLLEESFDEVYRKNRSKDECIGPLEIRVVQQGTFDSLMEYFISQGGSIAQYKTPICINSSEALAVLENKVLARFFSEKSPPLDS

SEQ ID NO: 79561 - DNA, 1182 bp, Arabidopsis thaliana
  misc_feature (1)..(1182): Ceres Seq. ID no. 12651897
  misc_feature (1)..(1182): Ortholog of  Ceres SEQ ID NO 15170698 as cited in SEQ ID NO 58326
  misc_feature (1)..(1182): Ortholog of  Ceres SEQ ID NO 14302279 as cited in SEQ ID NO 68864
atggcgttggacggtgacgaaacagtcgcaggtggagattctcaaccaccggtgactactgcagcggcgactacagaggagaaggctatcgcgaggctgagtccgtttcctaacatggagcacatttctgataactacggagatctggaactggaatatagctctgccatgttaagctcgctagagaagtacttgccgccggaaatgctcacggcgactagagaagagaaggccaaattcatgtctgacattttgcgcaagtacatttcccgcgacgaatgttccaaagctaaatggtgcaagaactattggcagaagataaaatctaattatcagccactttctagggagttgtataattttgatcccgaattgtttctgcttccctctttccgaaaggcgatcagcgaaaacacaaaggaaagcttcagacgtatcatttctgaaccgtttcctggtgttcttgtctttcaaatgtttcagcctgacttcattcagaaattgatagtagaggtagaaaatatcggaaagtgggttcatgagacaaatttcccaatcaggagaccgtaccacatgagtaaatacggtgttgcgtttgtcgactttggcctggatatcatgcttcagcaactcatggaggaatttctctttcctatttgcaaaggcaaggcatattttttacttagaaagacttttattgtattcttccctgaagagtgtggagcaatgtttgactctcaccatggatattatattgaaaatggtgaagatagggatcctccattaggctatcatttagatgattcggaaataacattgaatgtttgtgtgaggaaacaatttgagggaggggaaatatctttcataggcacacgatgcttgagacataagcgaacagacgtaaagccagaggaagtttttcattactgtcattcaccgggtcaagctatacttcatcgtggccgccaccgccatggtcccagagccaacacaccatcttgttctcgggccaatatgattctttgttgcagaaactctttgtttagagagatggaaaaatatgagaaagatttcccagagtggtgcaatgaatgcgcccatgaaaagaaagaaaaggaaagccagagtcttgatgccaaaagaaaggggatgattcgaattgcgactggaggcaaagcatga

SEQ ID NO: 79562 - protein, 393 aa, Arabidopsis thaliana
  peptide (1)..(393): Ceres Seq. ID no. 12651898
MALDGDETVAGGDSQPPVTTAAATTEEKAIARLSPFPNMEHISDNYGDLELEYSSAMLSSLEKYLPPEMLTATREEKAKFMSDILRKYISRDECSKAKWCKNYWQKIKSNYQPLSRELYNFDPELFLLPSFRKAISENTKESFRRIISEPFPGVLVFQMFQPDFIQKLIVEVENIGKWVHETNFPIRRPYHMSKYGVAFVDFGLDIMLQQLMEEFLFPICKGKAYFLLRKTFIVFFPEECGAMFDSHHGYYIENGEDRDPPLGYHLDDSEITLNVCVRKQFEGGEISFIGTRCLRHKRTDVKPEEVFHYCHSPGQAILHRGRHRHGPRANTPSCSRANMILCCRNSLFREMEKYEKDFPEWCNECAHEKKEKESQSLDAKRKGMIRIATGGKA

SEQ ID NO: 79563 - protein, 355 aa, Arabidopsis thaliana
  peptide (1)..(355): Ceres Seq. ID no. 12651899
MEHISDNYGDLELEYSSAMLSSLEKYLPPEMLTATREEKAKFMSDILRKYISRDECSKAKWCKNYWQKIKSNYQPLSRELYNFDPELFLLPSFRKAISENTKESFRRIISEPFPGVLVFQMFQPDFIQKLIVEVENIGKWVHETNFPIRRPYHMSKYGVAFVDFGLDIMLQQLMEEFLFPICKGKAYFLLRKTFIVFFPEECGAMFDSHHGYYIENGEDRDPPLGYHLDDSEITLNVCVRKQFEGGEISFIGTRCLRHKRTDVKPEEVFHYCHSPGQAILHRGRHRHGPRANTPSCSRANMILCCRNSLFREMEKYEKDFPEWCNECAHEKKEKESQSLDAKRKGMIRIATGGKA

SEQ ID NO: 79564 - protein, 337 aa, Arabidopsis thaliana
  peptide (1)..(337): Ceres Seq. ID no. 12651900
MLSSLEKYLPPEMLTATREEKAKFMSDILRKYISRDECSKAKWCKNYWQKIKSNYQPLSRELYNFDPELFLLPSFRKAISENTKESFRRIISEPFPGVLVFQMFQPDFIQKLIVEVENIGKWVHETNFPIRRPYHMSKYGVAFVDFGLDIMLQQLMEEFLFPICKGKAYFLLRKTFIVFFPEECGAMFDSHHGYYIENGEDRDPPLGYHLDDSEITLNVCVRKQFEGGEISFIGTRCLRHKRTDVKPEEVFHYCHSPGQAILHRGRHRHGPRANTPSCSRANMILCCRNSLFREMEKYEKDFPEWCNECAHEKKEKESQSLDAKRKGMIRIATGGKA

SEQ ID NO: 79565 - DNA, 2271 bp, Arabidopsis thaliana
  misc_feature (1)..(2271): Ceres Seq. ID no. 12651926
  misc_feature (1)..(2271): Ortholog of  Ceres SEQ ID NO 15178007 as cited in SEQ ID NO 54186
  misc_feature (1)..(2271): Ortholog of  Ceres SEQ ID NO 14314100 as cited in SEQ ID NO 68860
atggatactcgtcgcggagctcttgcggttcctaaagtccgtcgagtaggtttcttcacatcaatcgagccgcctccagaatcatcattacaacgaccaaatcgaagccaatccggtccagtagatgcaaccacctcttcttctcctctctccgattcaccttccggtaacttaatttctccggtcttaattccaccgtcgcgtcaccattccgacaatttaacctctcgcgttgctgctgctgctgctgctcctgtgcccgtccctggacctgccgctttccgccgatacttaactcctgaacggactcttcttcacgttggtagttacaatcctccggattcgcttctcgggacatcatcaccctcgagtaacggagggctttctgaggattcggcttctctgtttgggttccaacggagtgattcgacgaaattatcagcaagcttacctaatggaggctttgatttgactctagctgttagagctcctcaggaatctgaaaccaaaattgcgaccacgtctgcttctcaagggaaaaagaagatcgccgaagtttctgagacctttgtggtgaattgtgatccccaagtaacatcggatgaggcagcctgtagtgccgtagggactggagttttagggagaccttatagcggtatttggagaatgtttaaagttgagtttggtttagaagtctgctgttgtggacctgtggtctgtgtgaaatgcatacgtttgcggaggtggtacaacatactcccaaatcaagcacgtcaaggaagctgcatctctataatgggaagaataaatcctgcaggaaagagtgagtctgcgaccacaaaaccccagaaggaaaaggaaccaaaagcattgaaagataaaaccactaaagcagaaagacgtgccatccaagaggcacaacgggcagcaaaagctgctgcaaaaggcgaaggaagcaggcgtgcagatgagtctggtagagctaatcctggcaaggctgccataaagccccaaccaaagaaagaaagacttcccgtcacgtcctctgtttctgaaaaaacagctgtagcagtagaaaaagagaagaggatggatgtccctcagacacaaatgcagtatgatgataaaagccgagtggataaagctaagaggcgagctgtggttgaacagaccgagagcaagaacaaagttgaattatttctccatcttcctcaatacgaacgcagcaatcagcttcccaatttaagctccaattttttcacactcgattccatacaccatgcagtctataaggtgggtttgcaacatttggctggagatatatctggggacaatgcacgatgtattgccatgctccaagcatttcaagaagctatagaagattacagtacacctcctatgaaagacctgaccatggacttgacagccaagataaacggttatgtttcattcttgatagaatgtcgtcccctctccatgagcatgggaaacgcaatcaggttcctgaagaaccaaatcagaaaactacctgtaaacctgtcagaatcagaggcaaaaagttccctctgttctgacattggccggttcatagacgagaagacaattattgcagataaggcaatcgtgcaacacgccgtaacaaaaatcagagacggagaagttcttcttacatatggattctcttgtgtggttgaaatgattctcctatacgcccatgagattgggaaaaagttccgcgtagtgattgtagactcacgccctaaccttgaagggcaaaagctactccgtagacttgtgactcgtggcctcgactgtacctacactcatataaatgccatttcctacatcatgcgtgaggctacacgtgtttttctcggtgcttcatcaatatactcgaatggaactctttacgcaagagttggcacatcctgcattgcaatggttgcaaacgcatttagtgttcctgtaattgtttgttgtgaagcttacaagttccatgaaagagtcctacttgattcaatctgctccaacgaacttggcgatcctgacgccgtagccaacataccatcatttagaaccaatgcaaagcattcaaagacaatggacaacaacaaaaaccttcagtttctgaatctaatgtatgattctactccttcagaatatatatctatgattgtttcggattatggaatgagcaatttccatttagtgtctgatacatttgtgatttgtgtatgtgtgaatagattcctccgacgagtataccagtga

SEQ ID NO: 79566 - protein, 756 aa, Arabidopsis thaliana
  peptide (1)..(756): Ceres Seq. ID no. 12651927
MDTRRGALAVPKVRRVGFFTSIEPPPESSLQRPNRSQSGPVDATTSSSPLSDSPSGNLISPVLIPPSRHHSDNLTSRVAAAAAAPVPVPGPAAFRRYLTPERTLLHVGSYNPPDSLLGTSSPSSNGGLSEDSASLFGFQRSDSTKLSASLPNGGFDLTLAVRAPQESETKIATTSASQGKKKIAEVSETFVVNCDPQVTSDEAACSAVGTGVLGRPYSGIWRMFKVEFGLEVCCCGPVVCVKCIRLRRWYNILPNQARQGSCISIMGRINPAGKSESATTKPQKEKEPKALKDKTTKAERRAIQEAQRAAKAAAKGEGSRRADESGRANPGKAAIKPQPKKERLPVTSSVSEKTAVAVEKEKRMDVPQTQMQYDDKSRVDKAKRRAVVEQTESKNKVELFLHLPQYERSNQLPNLSSNFFTLDSIHHAVYKVGLQHLAGDISGDNARCIAMLQAFQEAIEDYSTPPMKDLTMDLTAKINGYVSFLIECRPLSMSMGNAIRFLKNQIRKLPVNLSESEAKSSLCSDIGRFIDEKTIIADKAIVQHAVTKIRDGEVLLTYGFSCVVEMILLYAHEIGKKFRVVIVDSRPNLEGQKLLRRLVTRGLDCTYTHINAISYIMREATRVFLGASSIYSNGTLYARVGTSCIAMVANAFSVPVIVCCEAYKFHERVLLDSICSNELGDPDAVANIPSFRTNAKHSKTMDNNKNLQFLNLMYDSTPSEYISMIVSDYGMSNFHLVSDTFVICVCVNRFLRRVYQ

SEQ ID NO: 79567 - protein, 534 aa, Arabidopsis thaliana
  peptide (1)..(534): Ceres Seq. ID no. 12651928
MFKVEFGLEVCCCGPVVCVKCIRLRRWYNILPNQARQGSCISIMGRINPAGKSESATTKPQKEKEPKALKDKTTKAERRAIQEAQRAAKAAAKGEGSRRADESGRANPGKAAIKPQPKKERLPVTSSVSEKTAVAVEKEKRMDVPQTQMQYDDKSRVDKAKRRAVVEQTESKNKVELFLHLPQYERSNQLPNLSSNFFTLDSIHHAVYKVGLQHLAGDISGDNARCIAMLQAFQEAIEDYSTPPMKDLTMDLTAKINGYVSFLIECRPLSMSMGNAIRFLKNQIRKLPVNLSESEAKSSLCSDIGRFIDEKTIIADKAIVQHAVTKIRDGEVLLTYGFSCVVEMILLYAHEIGKKFRVVIVDSRPNLEGQKLLRRLVTRGLDCTYTHINAISYIMREATRVFLGASSIYSNGTLYARVGTSCIAMVANAFSVPVIVCCEAYKFHERVLLDSICSNELGDPDAVANIPSFRTNAKHSKTMDNNKNLQFLNLMYDSTPSEYISMIVSDYGMSNFHLVSDTFVICVCVNRFLRRVYQ

SEQ ID NO: 79568 - protein, 491 aa, Arabidopsis thaliana
  peptide (1)..(491): Ceres Seq. ID no. 12651929
MGRINPAGKSESATTKPQKEKEPKALKDKTTKAERRAIQEAQRAAKAAAKGEGSRRADESGRANPGKAAIKPQPKKERLPVTSSVSEKTAVAVEKEKRMDVPQTQMQYDDKSRVDKAKRRAVVEQTESKNKVELFLHLPQYERSNQLPNLSSNFFTLDSIHHAVYKVGLQHLAGDISGDNARCIAMLQAFQEAIEDYSTPPMKDLTMDLTAKINGYVSFLIECRPLSMSMGNAIRFLKNQIRKLPVNLSESEAKSSLCSDIGRFIDEKTIIADKAIVQHAVTKIRDGEVLLTYGFSCVVEMILLYAHEIGKKFRVVIVDSRPNLEGQKLLRRLVTRGLDCTYTHINAISYIMREATRVFLGASSIYSNGTLYARVGTSCIAMVANAFSVPVIVCCEAYKFHERVLLDSICSNELGDPDAVANIPSFRTNAKHSKTMDNNKNLQFLNLMYDSTPSEYISMIVSDYGMSNFHLVSDTFVICVCVNRFLRRVYQ

SEQ ID NO: 79569 - DNA, 1974 bp, Arabidopsis thaliana
  misc_feature (1)..(1974): Ceres Seq. ID no. 12651963
  misc_feature (1)..(1974): Ortholog of  Ceres SEQ ID NO 13623497 as cited in SEQ ID NO 0
atgtcgaatgcttccgccaagaagaagagaaaactcgaggaaaccgtagatacgccaccgactagggttgatgacaaaaccctagttcttatttctgattcgaaaaaacccaaatcagatagggttaccaaactgaagagcaaaattgggttgctgaagaagaagccaactgaaagtggcaggattgtcatcactcatattctgtgtaacatgttgagaaccgttatcgccactactcctgatgatttgctacctactgtttatcttgctgcaaatgagattgcccctgctcatgaaggtattaaattgggaatgggtaagggttcctacattattaaggcaatctctgaagcttttggtagaactgagtcccacgttgagcagcaatatacgcaactgggagacttggggcttgtagcaaatgggagccgttcctctcagactatgattttcatgcccaaaccattaactgttgtcaaggttgctgatacacttcgcctaattgctaaggaatctggaaaaggtagtaaggataagaagaaggatctaatgaaggcacttcttgtggcaactacagattgtgaacctctttacttaactcgtttacttcaggataatttgcggttagggttctcacgtcaaactgttttagctgccttgggacaggctgctgtatataacgaagagcattctaagccgcccccaaatatcaagaatcctttagatgaggctgcaacgattgttaaagaagtattctcaatgcttcctgtctatgacattattgttggtgctcttctaactagtggtgtatggaatcttcctaaaacttgtaacctcacactcggtgttccagttaggcccatgcttgcaaaagcaactacaagagtagatctcatacttgagaaattcaaggacactgttttcacagctgaatacaaatatgatggtgaacgtgcacagatatattatatggaggatggtacagtcgagatattcagtagacatgctgaaagaaacactggcaagtaccctgatgttgctcttgtgttatcaaggttaaagaagcccactgtgaaatcttttattctggattgcgaggttgtcaccttcaacagagaaaaagagaaaattcttccactccagagtacacgagcccataaaaatgtgaatgtcagtgatatcaaggttggcgtatgcgtctttgcttttgatatattatacctaaatggccaactacttatccatgagaatctgaacattcgccgagagaagctacacgattcatttgaggaagatcttgggtatttccagtttgcaactgctctaacatccaacgatattggtgaattacaagagtttcttaaagcttctattgacataggatgtgaaggtttaatgataaagtcattgtactcaaatgcaacctatgagcctgcaaagagatcaaataattggctaaaactgaagaaggactatatggacaacattggagattccgtggatcttgtaccaatagctacgttccatggacgtgggaaacgcacaggtttctttggtgcatatttactagcgtgctacgatgttgataaggaagaattccagagcatttgtaaaattggtactgaattttctgatgtggagcttcaagatttgtcttccagtctttgctctaaagtgattgctactccgaaacaatactaccaagtcgataacgatctcaatccagatgtctggttggagcccaccgaggtgtgggaagtgaaagcagctgacttgacagttagccctgtatatcgtgaagctattggaattgtggaccctgacaagggaatttctctacgatttcctcgtctagtccgtatacggaaagacaagaatccagaggaagcaacaacatctgaccagattgctgaaatgtatcaagctcagaaacacaatcaaccaagcaatcaaggcaaagtggacgacgattga

SEQ ID NO: 79570 - protein, 657 aa, Arabidopsis thaliana
  peptide (1)..(657): Ceres Seq. ID no. 12651964
MSNASAKKKRKLEETVDTPPTRVDDKTLVLISDSKKPKSDRVTKLKSKIGLLKKKPTESGRIVITHILCNMLRTVIATTPDDLLPTVYLAANEIAPAHEGIKLGMGKGSYIIKAISEAFGRTESHVEQQYTQLGDLGLVANGSRSSQTMIFMPKPLTVVKVADTLRLIAKESGKGSKDKKKDLMKALLVATTDCEPLYLTRLLQDNLRLGFSRQTVLAALGQAAVYNEEHSKPPPNIKNPLDEAATIVKEVFSMLPVYDIIVGALLTSGVWNLPKTCNLTLGVPVRPMLAKATTRVDLILEKFKDTVFTAEYKYDGERAQIYYMEDGTVEIFSRHAERNTGKYPDVALVLSRLKKPTVKSFILDCEVVTFNREKEKILPLQSTRAHKNVNVSDIKVGVCVFAFDILYLNGQLLIHENLNIRREKLHDSFEEDLGYFQFATALTSNDIGELQEFLKASIDIGCEGLMIKSLYSNATYEPAKRSNNWLKLKKDYMDNIGDSVDLVPIATFHGRGKRTGFFGAYLLACYDVDKEEFQSICKIGTEFSDVELQDLSSSLCSKVIATPKQYYQVDNDLNPDVWLEPTEVWEVKAADLTVSPVYREAIGIVDPDKGISLRFPRLVRIRKDKNPEEATTSDQIAEMYQAQKHNQPSNQGKVDDD

SEQ ID NO: 79571 - protein, 587 aa, Arabidopsis thaliana
  peptide (1)..(587): Ceres Seq. ID no. 12651965
MLRTVIATTPDDLLPTVYLAANEIAPAHEGIKLGMGKGSYIIKAISEAFGRTESHVEQQYTQLGDLGLVANGSRSSQTMIFMPKPLTVVKVADTLRLIAKESGKGSKDKKKDLMKALLVATTDCEPLYLTRLLQDNLRLGFSRQTVLAALGQAAVYNEEHSKPPPNIKNPLDEAATIVKEVFSMLPVYDIIVGALLTSGVWNLPKTCNLTLGVPVRPMLAKATTRVDLILEKFKDTVFTAEYKYDGERAQIYYMEDGTVEIFSRHAERNTGKYPDVALVLSRLKKPTVKSFILDCEVVTFNREKEKILPLQSTRAHKNVNVSDIKVGVCVFAFDILYLNGQLLIHENLNIRREKLHDSFEEDLGYFQFATALTSNDIGELQEFLKASIDIGCEGLMIKSLYSNATYEPAKRSNNWLKLKKDYMDNIGDSVDLVPIATFHGRGKRTGFFGAYLLACYDVDKEEFQSICKIGTEFSDVELQDLSSSLCSKVIATPKQYYQVDNDLNPDVWLEPTEVWEVKAADLTVSPVYREAIGIVDPDKGISLRFPRLVRIRKDKNPEEATTSDQIAEMYQAQKHNQPSNQGKVDDD

SEQ ID NO: 79572 - protein, 553 aa, Arabidopsis thaliana
  peptide (1)..(553): Ceres Seq. ID no. 12651966
MGKGSYIIKAISEAFGRTESHVEQQYTQLGDLGLVANGSRSSQTMIFMPKPLTVVKVADTLRLIAKESGKGSKDKKKDLMKALLVATTDCEPLYLTRLLQDNLRLGFSRQTVLAALGQAAVYNEEHSKPPPNIKNPLDEAATIVKEVFSMLPVYDIIVGALLTSGVWNLPKTCNLTLGVPVRPMLAKATTRVDLILEKFKDTVFTAEYKYDGERAQIYYMEDGTVEIFSRHAERNTGKYPDVALVLSRLKKPTVKSFILDCEVVTFNREKEKILPLQSTRAHKNVNVSDIKVGVCVFAFDILYLNGQLLIHENLNIRREKLHDSFEEDLGYFQFATALTSNDIGELQEFLKASIDIGCEGLMIKSLYSNATYEPAKRSNNWLKLKKDYMDNIGDSVDLVPIATFHGRGKRTGFFGAYLLACYDVDKEEFQSICKIGTEFSDVELQDLSSSLCSKVIATPKQYYQVDNDLNPDVWLEPTEVWEVKAADLTVSPVYREAIGIVDPDKGISLRFPRLVRIRKDKNPEEATTSDQIAEMYQAQKHNQPSNQGKVDDD

SEQ ID NO: 79573 - DNA, 2100 bp, Arabidopsis thaliana
  misc_feature (1)..(2100): Ceres Seq. ID no. 12651967
  misc_feature (1)..(2100): Ortholog of  Ceres SEQ ID NO 13655640 as cited in SEQ ID NO 63844
  misc_feature (1)..(2100): Ortholog of  Ceres SEQ ID NO 13584744 as cited in SEQ ID NO 69137
atggcggaggggcaatccccggagaactcaccgccagctcctcctcctccttctcctccgtcacctccctcttccaacgatcaacaaacaacatctcctcctccttccgacaatcaagaaacaacatctcctcctcctccatcttcacctgacatagctcctccacctcaacaacaacaagaatcaccacctcctcctttgccggaaaattcctccgatggttcttcctcgtcgtctccaccaccaccgtctgactcatcctcacaatcacaatctccacctcctccttcaacgtccccgccacagcagagtgacaacaatggcaacaaaggaaacaacaatgagaacaacaaaggtaatgatggaagcagcggcgatggaggaaacaagaacatgtctcatactcctccaccaccttctaagacttcggaccatagctctcactcgcaaccaagatcgctggcgccgcctacaagcaacagtggctcaaattcgtcaagtaatgatggtttgaacattggtgctgttataggacttgtggctgcagctggaattttattcattgtcatgatcttgttatgtgtctgttgttttcggaagaagaagaagaaatcaaagcttgatcagatgccgtactacggaagcaatgcttaccccgcaggaaaaactgggggtgatcaatactacaaccaaaatgctgctacacaacaacaacaacattacaaccaaaatgatcacattgtgaatctgcctccacctcctggatcaatgggaacaaactgggtgagttcaccgccaccaccacctccaggaaattggcagccaatgccgtcgccaccagcaccagtgtcaggaggcgcaaatgtgatccaaagcggcgaaatgagctcaaatttctcatcaggtccatacgctccatctctaccaccacctcacccttcagtggctctgggattcaacaatagcacattcacttatgaggagctagcatccgcaactcaaggtttctcaaaagaccggttgttgggacaaggcggtttcggatatgttcacaaaggaatcttgccaaatggtaaggagatagcggtgaagagccttaaagcgggtagcgggcaaggcgagagagagttccaggcagaggtggagatcatcagccgcgttcatcatcgacatctcgtgtctcttgtgggatactgcagtaatgcgggaggacagaggttgttggtctatgagtttctccctaatgacacacttgagttccaccttcatgggaaaagtgggactgtgatggattggccaaccagactcaagattgccttaggatcagcaaaaggtcttgcttatctacatgaagattgtcatccaaaaatcatccatagagacattaaagcttcaaacattctccttgaccataacttcgaagccaaggttgcagattttggtttggccaagctctcccaagacaacaatacacatgtatcgactcgtgttatgggaacattcggatacttagctcctgaatatgcatcgagtgggaaactaactgagaaatcagatgttttctcttttggagttatgcttcttgagctcataaccggacgcggaccggttgatctaagtggtgacatggaagacagtttagtcgattgggcgagaccattgtgcatgagggtagcgcaagatggagaatatggggaattggttgacccattccttgagcaccaatacgagccttatgagatggcacgcatggtggcttgtgctgctgcagccgtaagacattctggtcgtcgccgcccaaagatgagtcagattgttaggacgttggagggtgatgcctcgctggatgacttagacgatggtgtgaaaccgaaacagagttcaagcggaggtgaaggcagctcagactatgagatgggcacatatggtgctgagatgaggaagtttcggaaagtgacattggaaagtcgggattacggggcaagtagcgaatacggtgccacaagcgagtacgggcttgacccatcctcttcaagcagcgaggagatgcacattggaggaagcaccagcaaaactactactactaaccgtgggatttaa

SEQ ID NO: 79574 - protein, 699 aa, Arabidopsis thaliana
  peptide (1)..(699): Ceres Seq. ID no. 12651968
MAEGQSPENSPPAPPPPSPPSPPSSNDQQTTSPPPSDNQETTSPPPPSSPDIAPPPQQQQESPPPPLPENSSDGSSSSSPPPPSDSSSQSQSPPPPSTSPPQQSDNNGNKGNNNENNKGNDGSSGDGGNKNMSHTPPPPSKTSDHSSHSQPRSLAPPTSNSGSNSSSNDGLNIGAVIGLVAAAGILFIVMILLCVCCFRKKKKKSKLDQMPYYGSNAYPAGKTGGDQYYNQNAATQQQQHYNQNDHIVNLPPPPGSMGTNWVSSPPPPPPGNWQPMPSPPAPVSGGANVIQSGEMSSNFSSGPYAPSLPPPHPSVALGFNNSTFTYEELASATQGFSKDRLLGQGGFGYVHKGILPNGKEIAVKSLKAGSGQGEREFQAEVEIISRVHHRHLVSLVGYCSNAGGQRLLVYEFLPNDTLEFHLHGKSGTVMDWPTRLKIALGSAKGLAYLHEDCHPKIIHRDIKASNILLDHNFEAKVADFGLAKLSQDNNTHVSTRVMGTFGYLAPEYASSGKLTEKSDVFSFGVMLLELITGRGPVDLSGDMEDSLVDWARPLCMRVAQDGEYGELVDPFLEHQYEPYEMARMVACAAAAVRHSGRRRPKMSQIVRTLEGDASLDDLDDGVKPKQSSSGGEGSSDYEMGTYGAEMRKFRKVTLESRDYGASSEYGATSEYGLDPSSSSSEEMHIGGSTSKTTTTNRGI

SEQ ID NO: 79575 - protein, 568 aa, Arabidopsis thaliana
  peptide (1)..(568): Ceres Seq. ID no. 12651969
MSHTPPPPSKTSDHSSHSQPRSLAPPTSNSGSNSSSNDGLNIGAVIGLVAAAGILFIVMILLCVCCFRKKKKKSKLDQMPYYGSNAYPAGKTGGDQYYNQNAATQQQQHYNQNDHIVNLPPPPGSMGTNWVSSPPPPPPGNWQPMPSPPAPVSGGANVIQSGEMSSNFSSGPYAPSLPPPHPSVALGFNNSTFTYEELASATQGFSKDRLLGQGGFGYVHKGILPNGKEIAVKSLKAGSGQGEREFQAEVEIISRVHHRHLVSLVGYCSNAGGQRLLVYEFLPNDTLEFHLHGKSGTVMDWPTRLKIALGSAKGLAYLHEDCHPKIIHRDIKASNILLDHNFEAKVADFGLAKLSQDNNTHVSTRVMGTFGYLAPEYASSGKLTEKSDVFSFGVMLLELITGRGPVDLSGDMEDSLVDWARPLCMRVAQDGEYGELVDPFLEHQYEPYEMARMVACAAAAVRHSGRRRPKMSQIVRTLEGDASLDDLDDGVKPKQSSSGGEGSSDYEMGTYGAEMRKFRKVTLESRDYGASSEYGATSEYGLDPSSSSSEEMHIGGSTSKTTTTNRGI

SEQ ID NO: 79576 - protein, 510 aa, Arabidopsis thaliana
  peptide (1)..(510): Ceres Seq. ID no. 12651970
MILLCVCCFRKKKKKSKLDQMPYYGSNAYPAGKTGGDQYYNQNAATQQQQHYNQNDHIVNLPPPPGSMGTNWVSSPPPPPPGNWQPMPSPPAPVSGGANVIQSGEMSSNFSSGPYAPSLPPPHPSVALGFNNSTFTYEELASATQGFSKDRLLGQGGFGYVHKGILPNGKEIAVKSLKAGSGQGEREFQAEVEIISRVHHRHLVSLVGYCSNAGGQRLLVYEFLPNDTLEFHLHGKSGTVMDWPTRLKIALGSAKGLAYLHEDCHPKIIHRDIKASNILLDHNFEAKVADFGLAKLSQDNNTHVSTRVMGTFGYLAPEYASSGKLTEKSDVFSFGVMLLELITGRGPVDLSGDMEDSLVDWARPLCMRVAQDGEYGELVDPFLEHQYEPYEMARMVACAAAAVRHSGRRRPKMSQIVRTLEGDASLDDLDDGVKPKQSSSGGEGSSDYEMGTYGAEMRKFRKVTLESRDYGASSEYGATSEYGLDPSSSSSEEMHIGGSTSKTTTTNRGI

SEQ ID NO: 79577 - DNA, 843 bp, Arabidopsis thaliana
  misc_feature (1)..(843): Ceres Seq. ID no. 12651975
  misc_feature (1)..(843): Ortholog of  Ceres SEQ ID NO 14310864 as cited in SEQ ID NO 53602
atggcttctacttttaggctctctattagcttcctcactctcatcctcttctctctgtgggtagtggaggcacacacgtctagaaagttgatatcaatcaaggaaaaagaaggtcaagatattagtcatttgctcaaagatggtgaatttgatgacccttcgttgtacatgtatttcacactcaatgatctcaaactaggaaccaaattgctgatttacttctacaaaaacgatcttcaaaagcttcctccacttctcacaagacaacaagccgatctcattcctttcactaagtcaaagcttgacttccttctcgaccacttctctatcaccaaagactctcctcaagggaaagccataaaggagactttgggacattgtgatgctaaagctattgaaggagagcataagttttgtggaacttctttggagtcattgatcgatcttgtgaagaaaacaatggggtataatgttgacctcaaggtcatgacgactaaagtaatggtaccggcccaaaattcgataagctacgctttgcataactacacattcgtcgaggctccaaaggaacttgttgggattaagatgttgggatgtcacagaatgccttacccttatgctgtttactattgccatggacataaaggtggaagtagagtctttgaagttaatttggtgacggatgatgggagacaacgggtagtaggacccgctgtctgccacatggacacatccacgtgggacgcggatcatgtagcttttaaggtgttgaagatggagccgaggtcagcaccggtttgccatttcttccctcttgataacattgtgtgggtaacaaagtaa

SEQ ID NO: 79578 - protein, 280 aa, Arabidopsis thaliana
  peptide (1)..(280): Ceres Seq. ID no. 12651976
MASTFRLSISFLTLILFSLWVVEAHTSRKLISIKEKEGQDISHLLKDGEFDDPSLYMYFTLNDLKLGTKLLIYFYKNDLQKLPPLLTRQQADLIPFTKSKLDFLLDHFSITKDSPQGKAIKETLGHCDAKAIEGEHKFCGTSLESLIDLVKKTMGYNVDLKVMTTKVMVPAQNSISYALHNYTFVEAPKELVGIKMLGCHRMPYPYAVYYCHGHKGGSRVFEVNLVTDDGRQRVVGPAVCHMDTSTWDADHVAFKVLKMEPRSAPVCHFFPLDNIVWVTK

SEQ ID NO: 79579 - protein, 224 aa, Arabidopsis thaliana
  peptide (1)..(224): Ceres Seq. ID no. 12651977
MYFTLNDLKLGTKLLIYFYKNDLQKLPPLLTRQQADLIPFTKSKLDFLLDHFSITKDSPQGKAIKETLGHCDAKAIEGEHKFCGTSLESLIDLVKKTMGYNVDLKVMTTKVMVPAQNSISYALHNYTFVEAPKELVGIKMLGCHRMPYPYAVYYCHGHKGGSRVFEVNLVTDDGRQRVVGPAVCHMDTSTWDADHVAFKVLKMEPRSAPVCHFFPLDNIVWVTK

SEQ ID NO: 79580 - DNA, 1047 bp, Arabidopsis thaliana
  misc_feature (1)..(1047): Ceres Seq. ID no. 12651990
  misc_feature (1)..(1047): Ortholog of  Ceres SEQ ID NO 12582113 as cited in SEQ ID NO 58349
  misc_feature (1)..(1047): Ortholog of  Ceres SEQ ID NO 12615466 as cited in SEQ ID NO 62761
  misc_feature (1)..(1047): Ortholog of  Ceres SEQ ID NO 14314080 as cited in SEQ ID NO 63105
  misc_feature (1)..(1047): Ortholog of  Ceres SEQ ID NO 13597295 as cited in SEQ ID NO 63743
  misc_feature (1)..(1047): Ortholog of  Ceres SEQ ID NO 12617090 as cited in SEQ ID NO 64005
  misc_feature (1)..(1047): Ortholog of  Ceres SEQ ID NO 13597439 as cited in SEQ ID NO 64081
  misc_feature (1)..(1047): Ortholog of  Ceres SEQ ID NO 13597233 as cited in SEQ ID NO 64370
  misc_feature (1)..(1047): Ortholog of  Ceres SEQ ID NO 13598327 as cited in SEQ ID NO 68040
  misc_feature (1)..(1047): Ortholog of  Ceres SEQ ID NO 13599438 as cited in SEQ ID NO 0
atggagaagccaaagttcaagactgtccaagaggtggttgcagccggtcaaggactaccggagagatatctccatgcaccaaccggcgaaggcgaaagtcaaccacttaacggtgcggtgccggagatggatattccggccatcgatctcagtcttctcttctcttcctctgtagacggtcaagaagagatgaagaaacttcactcagcactctctacatggggcgttgttcaggtgatgaatcatggaattactgaagcttttcttgacaagatttacaagctaaccaagcagttctttgcgcttccgaccgaagagaaacacaagtgtgctagagagacaggtaatatccaaggatatggtaacgatatgattctgtctgataatcaagttcttgattggatcgaccgtttgtttctcactacttaccctgaagataagcgtcaacttaaattctggcctcaagtccctgtcggattcagcgagacgttagatgaatacacaatgaagcaacgggtattgattgagaaattctttaaggctatggctagatcattggaattggaagagaattgttttctagaaatgtatggagaaaatgctgtaatgaattcaagattcaacttctttcctccatgtccaaggccagacaaggttattgggattaaaccgcatgctgatggttcagctatcactcttctcttacccgacaaagatgtcgaagggcttcagtttcttaaagatgggaagtggtataaagctccaatagttcctgatacaattcttatcactttaggtgatcaaatggagataatgagtaatgggatatataagagcccggttcatcgagtggtgaccaacagagagaaggaaaggatatctgtggcaacgttttgtgtaccgggtctagacaaagagattcaccctgcagatgggcttgtgactgaggcaagaccaagattgtataaaacagttaccaagtatgtggatctccactacaagtactatcaacagggtcgaagaactattgaagctgcattaatctga

SEQ ID NO: 79581 - protein, 348 aa, Arabidopsis thaliana
  peptide (1)..(348): Ceres Seq. ID no. 12651991
MEKPKFKTVQEVVAAGQGLPERYLHAPTGEGESQPLNGAVPEMDIPAIDLSLLFSSSVDGQEEMKKLHSALSTWGVVQVMNHGITEAFLDKIYKLTKQFFALPTEEKHKCARETGNIQGYGNDMILSDNQVLDWIDRLFLTTYPEDKRQLKFWPQVPVGFSETLDEYTMKQRVLIEKFFKAMARSLELEENCFLEMYGENAVMNSRFNFFPPCPRPDKVIGIKPHADGSAITLLLPDKDVEGLQFLKDGKWYKAPIVPDTILITLGDQMEIMSNGIYKSPVHRVVTNREKERISVATFCVPGLDKEIHPADGLVTEARPRLYKTVTKYVDLHYKYYQQGRRTIEAALI

SEQ ID NO: 79582 - protein, 306 aa, Arabidopsis thaliana
  peptide (1)..(306): Ceres Seq. ID no. 12651992
MDIPAIDLSLLFSSSVDGQEEMKKLHSALSTWGVVQVMNHGITEAFLDKIYKLTKQFFALPTEEKHKCARETGNIQGYGNDMILSDNQVLDWIDRLFLTTYPEDKRQLKFWPQVPVGFSETLDEYTMKQRVLIEKFFKAMARSLELEENCFLEMYGENAVMNSRFNFFPPCPRPDKVIGIKPHADGSAITLLLPDKDVEGLQFLKDGKWYKAPIVPDTILITLGDQMEIMSNGIYKSPVHRVVTNREKERISVATFCVPGLDKEIHPADGLVTEARPRLYKTVTKYVDLHYKYYQQGRRTIEAALI

SEQ ID NO: 79583 - protein, 285 aa, Arabidopsis thaliana
  peptide (1)..(285): Ceres Seq. ID no. 12651993
MKKLHSALSTWGVVQVMNHGITEAFLDKIYKLTKQFFALPTEEKHKCARETGNIQGYGNDMILSDNQVLDWIDRLFLTTYPEDKRQLKFWPQVPVGFSETLDEYTMKQRVLIEKFFKAMARSLELEENCFLEMYGENAVMNSRFNFFPPCPRPDKVIGIKPHADGSAITLLLPDKDVEGLQFLKDGKWYKAPIVPDTILITLGDQMEIMSNGIYKSPVHRVVTNREKERISVATFCVPGLDKEIHPADGLVTEARPRLYKTVTKYVDLHYKYYQQGRRTIEAALI

SEQ ID NO: 79584 - DNA, 1828 bp, Arabidopsis thaliana
  misc_feature (1)..(1828): Ceres Seq. ID no. 12652001
  misc_feature (1)..(1828): Ortholog of  Ceres SEQ ID NO 15171438 as cited in SEQ ID NO 51665
  misc_feature (1)..(1828): Ortholog of  Ceres SEQ ID NO 15170804 as cited in SEQ ID NO 52653
  misc_feature (1)..(1828): Ortholog of  Ceres SEQ ID NO 15170203 as cited in SEQ ID NO 53291
  misc_feature (1)..(1828): Ortholog of  Ceres SEQ ID NO 14303083 as cited in SEQ ID NO 66573
acatgctcttatttcacaatcccaccaaaacaaatctcaagaacatttcaagattcagaaaaaagaaactcgcaaacttttttcttttgtttctgtcaacgttcaaataatcaagcgattgttttttttaacctagaaaaattatggctatagaagaaaaccgaagtcacaacgattatcttaggaggatgacttttgcagcgttcttgaaatctggttctctcgccgccgaggaagaaacttaccacagcgacggtgatcatcataaccaaagcacctttagcagcaacagcgattctcagcggccaagcaacgcttcaagtgctagtagcgattcgtcatcaccaatctacccattatctccatggaaccaaacttactacccaagcaacgacaacacgacgtcgttttcatctgttactcaatcaccatggaaccaaacttactctccgtaccacaaatctccatggatttaccaaaccaggaacagtgatttcgaggatgatcctgataacggtttgatcggtacggtcgtgagacaagaaggacacgtgtactctctcgctgcttcaggtgatcttcttttcaccggttctgattccaagaacattcgggtttggaaagatcttaaagatttctccgggtttaaatccacaagcggttttgttaaagccattgtagtaaccagagataaccgggttttcaccggtcatcaggatggtaaaatccgggtatggagaggatcaaagaagaaccccgagaaatattcacgagtcggaagtttaccaactcttaaagaatttctcaccaaatcggtaaatcctagaaactacgtcgaagtccgtcgccggaaaaacgttttgaagatccgacatttcgacgctgtgtcttgtctgagcttaaacgaagatctcggtttgctctactccggttcttgggacaagactcttaaggtctggagattgtccgattcaaaatgtttagaatcaatcgaagctcacgacgatgccgttaacacggtggtttccggtttcgacgatttggtatttaccggttcagccgacggaacgttgaaagtatggaaacgtgaggtacaaggcaaagagatgaagcatgttttggtacaagtgttaatgaaacaagagaacgcagtaacggcgttagctgttaatttaacggacgctgttgtttactgtggttcgtctgacggaaccgttaacttctgggaacggcaaaagtatttgactcacaaagggacgattcacggccaccgtatggcggttttgtgtctcgccaccgccgggagtttgcttttgagcggtggagctgataagaatatttgcgtttggaaaagaaacggggacggatcgcatacgtgtctctctgttttgatggatcatgaaggaccggttaagtgtttagcggcggtggaagaggcggaggaagatcataacgacggagacgacggtggagagaaaggggatcaacggtggatagtgtatagtgggagtttagacaactccgttaaagtgtggcgcgtgacggattacgcttcgtaagcgcgtgaagaagtatacgtgtggacgacgtaggagcgtgaaggaatgtttcccggccatgtggttgtatagcgttttatcgtcaaaggaggaattgattgggaggcaactagtaggtagatttggtacttgtgatgaccaatagtgtattgtcacgtatcatgtgactttgtcatcttctttggaagtgtgaaaaagtcttttgttgttgcgttagatcttttattgtctcttgtaatggcatgcacttattttaaatcatgtgaaac

SEQ ID NO: 79585 - protein, 471 aa, Arabidopsis thaliana
  peptide (1)..(471): Ceres Seq. ID no. 12652002
MAIEENRSHNDYLRRMTFAAFLKSGSLAAEEETYHSDGDHHNQSTFSSNSDSQRPSNASSASSDSSSPIYPLSPWNQTYYPSNDNTTSFSSVTQSPWNQTYSPYHKSPWIYQTRNSDFEDDPDNGLIGTVVRQEGHVYSLAASGDLLFTGSDSKNIRVWKDLKDFSGFKSTSGFVKAIVVTRDNRVFTGHQDGKIRVWRGSKKNPEKYSRVGSLPTLKEFLTKSVNPRNYVEVRRRKNVLKIRHFDAVSCLSLNEDLGLLYSGSWDKTLKVWRLSDSKCLESIEAHDDAVNTVVSGFDDLVFTGSADGTLKVWKREVQGKEMKHVLVQVLMKQENAVTALAVNLTDAVVYCGSSDGTVNFWERQKYLTHKGTIHGHRMAVLCLATAGSLLLSGGADKNICVWKRNGDGSHTCLSVLMDHEGPVKCLAAVEEAEEDHNDGDDGGEKGDQRWIVYSGSLDNSVKVWRVTDYAS

SEQ ID NO: 79586 - protein, 456 aa, Arabidopsis thaliana
  peptide (1)..(456): Ceres Seq. ID no. 12652003
MTFAAFLKSGSLAAEEETYHSDGDHHNQSTFSSNSDSQRPSNASSASSDSSSPIYPLSPWNQTYYPSNDNTTSFSSVTQSPWNQTYSPYHKSPWIYQTRNSDFEDDPDNGLIGTVVRQEGHVYSLAASGDLLFTGSDSKNIRVWKDLKDFSGFKSTSGFVKAIVVTRDNRVFTGHQDGKIRVWRGSKKNPEKYSRVGSLPTLKEFLTKSVNPRNYVEVRRRKNVLKIRHFDAVSCLSLNEDLGLLYSGSWDKTLKVWRLSDSKCLESIEAHDDAVNTVVSGFDDLVFTGSADGTLKVWKREVQGKEMKHVLVQVLMKQENAVTALAVNLTDAVVYCGSSDGTVNFWERQKYLTHKGTIHGHRMAVLCLATAGSLLLSGGADKNICVWKRNGDGSHTCLSVLMDHEGPVKCLAAVEEAEEDHNDGDDGGEKGDQRWIVYSGSLDNSVKVWRVTDYAS

SEQ ID NO: 79587 - DNA, 2544 bp, Arabidopsis thaliana
  misc_feature (1)..(2544): Ceres Seq. ID no. 12652004
  misc_feature (1)..(2544): Ortholog of  Ceres SEQ ID NO 15177969 as cited in SEQ ID NO 58823
atggagaggccctttggctgcttcttcatcctccttcttatctcctataccgtcgttgccacctttgacgatgaaccttctttccccgaaaacgccgatctcacaaaagatctagaacaaaaatgttttagcatcaataaagttgatcctaacctcaaatttgaaaatgatcgtctcaaaagagcttacattgctcttcaagcatggaaaaaagccatttactctgatccatttaaaactacggccaattgggttggttctgatgtgtgttcatacaatggagtttattgtgcacctgctctagatgatgatagtctcacggtcgtagctggagttgaccttaaccatgcagatatagccggacatttaccaccagagcttggccttatgacggacctagctttatttcacatcaattcgaatcggttttgtgggatcatccccaaaagtttatcgaaactcgctttgatgtacgaattcgatgttagcaacaatcgattcgttggtcagttccctgaagtttcactctcatggccttctttgaagtttcttgatctaagatacaacgaatttgaaggaagcttgccatcagaaatctttgataaagatcttgatgcaattttcttgaacaacaatcggtttgaatcggttatccccggtacaattgggaaatcgaaagcatcggttgtgacattcgcaaacaataaattcagtggttgtatcccaaaatcgattggtaatatgaagaacctcaatgagattgtcttcactggaaacaatttaaccggttgtttcccaaacgagattggtttgcttaacaatgtgacggtgtttgatgcaagcaagaacggttttgtcggtagtttaccgtcaaccttgtccggtttagctagcgttgagcagttagatttatcgcataataagctcaccggatttgttgttgacaaattttgcaagttgcctaatttggacagcttcaagttttcttacaattttttcaatggagaagctgagagctgtgttccagggagaaacaatgggaaacaatttgatgataccaacaattgcttgcaaaatagaccgagccaaaagccggctaaacaatgtttgccggtggttagtcgtcctgtggattgtagcaaggacaaatgctctggcggtagcaatggtggctctagcccatcaccaaatccaccaaggacgtccgagccaaagccatcaaaaccagagccggttatgcctaaacctagtgattcatcaaaacccgagacaccaaaaacacctgaacaaccttcacctaaacctcagccaccaaagcatgaatctcctaaaccggaagaaccggaaaacaagcatgagctaccaaaacaaaaggagtctcctaaaccacaaccgtctaaacctgaagattctcctaaaccagaacaaccaaaaccagaggagtcacctaagcctgaacaaccacagatacctgagcctactaaaccggtttcaccaccaaatgaagcacaaggaccaacaccggatgatccatatgatgcatctccggttaaaaatcgtcgttctccgccaccacccaaggtagaggatacacgtgtaccaccaccacaaccaccaatgccttccccatcaccaccatcaccgatttactcaccaccaccaccggttcactcaccgccgcctccggtttattcatcaccaccaccaccacatgtctactctccacctccaccagttgcttctcctccaccgccatcaccaccaccaccagttcactctcctccaccaccaccggttttctctccaccaccaccagttttctctccaccaccaccatcaccagtatactcaccaccgcctccaagccactcaccaccaccaccagtatattctccgcctccaccaactttctcaccaccaccaacacataatacaaaccaaccaccaatgggagctccaacaccgactcaagcaccaacaccatcctctgaaacaacccaagtgccaactccatcatcagaatcagatcaatcacaaattttgtcaccagttcaagctccaacaccggttcaatcctcaaccccatcctctgaaccaacccaagtgccaactccatcatcatcagaatcatatcaagcaccaaatttgtcaccagttcaagctccaacaccggttcaagccccaaccacatcctctgaaacatctcaagtaccaactccatcatcagaatcaaaccagtcaccaagtcaagctccaacaccaattcttgaaccggttcatgccccaacaccaaactctaaaccggtccaatcaccaacaccatcaagcgaaccggtctcatcaccagaacaatcagaagaagttgaagcaccagaaccaacacccgtcaatccatcatcagtaccatcatcttctccttccactgacacatctattccaccaccggaaaacaacgacgatgatgatgatggggatttcgtcctaccaccacacattggattccaatatgcatcgccaccaccaccaatgttccaaggatattaa

SEQ ID NO: 79588 - protein, 847 aa, Arabidopsis thaliana
  peptide (1)..(847): Ceres Seq. ID no. 12652005
MERPFGCFFILLLISYTVVATFDDEPSFPENADLTKDLEQKCFSINKVDPNLKFENDRLKRAYIALQAWKKAIYSDPFKTTANWVGSDVCSYNGVYCAPALDDDSLTVVAGVDLNHADIAGHLPPELGLMTDLALFHINSNRFCGIIPKSLSKLALMYEFDVSNNRFVGQFPEVSLSWPSLKFLDLRYNEFEGSLPSEIFDKDLDAIFLNNNRFESVIPGTIGKSKASVVTFANNKFSGCIPKSIGNMKNLNEIVFTGNNLTGCFPNEIGLLNNVTVFDASKNGFVGSLPSTLSGLASVEQLDLSHNKLTGFVVDKFCKLPNLDSFKFSYNFFNGEAESCVPGRNNGKQFDDTNNCLQNRPSQKPAKQCLPVVSRPVDCSKDKCSGGSNGGSSPSPNPPRTSEPKPSKPEPVMPKPSDSSKPETPKTPEQPSPKPQPPKHESPKPEEPENKHELPKQKESPKPQPSKPEDSPKPEQPKPEESPKPEQPQIPEPTKPVSPPNEAQGPTPDDPYDASPVKNRRSPPPPKVEDTRVPPPQPPMPSPSPPSPIYSPPPPVHSPPPPVYSSPPPPHVYSPPPPVASPPPPSPPPPVHSPPPPPVFSPPPPVFSPPPPSPVYSPPPPSHSPPPPVYSPPPPTFSPPPTHNTNQPPMGAPTPTQAPTPSSETTQVPTPSSESDQSQILSPVQAPTPVQSSTPSSEPTQVPTPSSSESYQAPNLSPVQAPTPVQAPTTSSETSQVPTPSSESNQSPSQAPTPILEPVHAPTPNSKPVQSPTPSSEPVSSPEQSEEVEAPEPTPVNPSSVPSSSPSTDTSIPPPENNDDDDDGDFVLPPHIGFQYASPPPPMFQGY

SEQ ID NO: 79589 - protein, 718 aa, Arabidopsis thaliana
  peptide (1)..(718): Ceres Seq. ID no. 12652006
MTDLALFHINSNRFCGIIPKSLSKLALMYEFDVSNNRFVGQFPEVSLSWPSLKFLDLRYNEFEGSLPSEIFDKDLDAIFLNNNRFESVIPGTIGKSKASVVTFANNKFSGCIPKSIGNMKNLNEIVFTGNNLTGCFPNEIGLLNNVTVFDASKNGFVGSLPSTLSGLASVEQLDLSHNKLTGFVVDKFCKLPNLDSFKFSYNFFNGEAESCVPGRNNGKQFDDTNNCLQNRPSQKPAKQCLPVVSRPVDCSKDKCSGGSNGGSSPSPNPPRTSEPKPSKPEPVMPKPSDSSKPETPKTPEQPSPKPQPPKHESPKPEEPENKHELPKQKESPKPQPSKPEDSPKPEQPKPEESPKPEQPQIPEPTKPVSPPNEAQGPTPDDPYDASPVKNRRSPPPPKVEDTRVPPPQPPMPSPSPPSPIYSPPPPVHSPPPPVYSSPPPPHVYSPPPPVASPPPPSPPPPVHSPPPPPVFSPPPPVFSPPPPSPVYSPPPPSHSPPPPVYSPPPPTFSPPPTHNTNQPPMGAPTPTQAPTPSSETTQVPTPSSESDQSQILSPVQAPTPVQSSTPSSEPTQVPTPSSSESYQAPNLSPVQAPTPVQAPTTSSETSQVPTPSSESNQSPSQAPTPILEPVHAPTPNSKPVQSPTPSSEPVSSPEQSEEVEAPEPTPVNPSSVPSSSPSTDTSIPPPENNDDDDDGDFVLPPHIGFQYASPPPPMFQGY

SEQ ID NO: 79590 - protein, 691 aa, Arabidopsis thaliana
  peptide (1)..(691): Ceres Seq. ID no. 12652007
MYEFDVSNNRFVGQFPEVSLSWPSLKFLDLRYNEFEGSLPSEIFDKDLDAIFLNNNRFESVIPGTIGKSKASVVTFANNKFSGCIPKSIGNMKNLNEIVFTGNNLTGCFPNEIGLLNNVTVFDASKNGFVGSLPSTLSGLASVEQLDLSHNKLTGFVVDKFCKLPNLDSFKFSYNFFNGEAESCVPGRNNGKQFDDTNNCLQNRPSQKPAKQCLPVVSRPVDCSKDKCSGGSNGGSSPSPNPPRTSEPKPSKPEPVMPKPSDSSKPETPKTPEQPSPKPQPPKHESPKPEEPENKHELPKQKESPKPQPSKPEDSPKPEQPKPEESPKPEQPQIPEPTKPVSPPNEAQGPTPDDPYDASPVKNRRSPPPPKVEDTRVPPPQPPMPSPSPPSPIYSPPPPVHSPPPPVYSSPPPPHVYSPPPPVASPPPPSPPPPVHSPPPPPVFSPPPPVFSPPPPSPVYSPPPPSHSPPPPVYSPPPPTFSPPPTHNTNQPPMGAPTPTQAPTPSSETTQVPTPSSESDQSQILSPVQAPTPVQSSTPSSEPTQVPTPSSSESYQAPNLSPVQAPTPVQAPTTSSETSQVPTPSSESNQSPSQAPTPILEPVHAPTPNSKPVQSPTPSSEPVSSPEQSEEVEAPEPTPVNPSSVPSSSPSTDTSIPPPENNDDDDDGDFVLPPHIGFQYASPPPPMFQGY

SEQ ID NO: 79591 - DNA, 1821 bp, Arabidopsis thaliana
  misc_feature (1)..(1821): Ceres Seq. ID no. 12652024
  misc_feature (1)..(1821): Ortholog of  Ceres SEQ ID NO 13659971 as cited in SEQ ID NO 67565
  misc_feature (1)..(1821): Ortholog of  Ceres SEQ ID NO 13500385 as cited in SEQ ID NO 67583
atgggaggctgtacttccaaaccctccacttcctccggcagacctaaccctttcgctcccggtaatgactatcctcaaattgacgattttgcccctgaccatcccggtaaatcaccaattcctactccttccgccgcaaaggcctctcctttcttccccttttacacgccgagccctgctcgccaccgccgcaataagagccgcgacgtcggcggaggaggagagagcaagagtttgactagcacgcctctccgtcaattacgccgtgcgtttcaccctccgtctccggcgaaacacatacgggcggcgctacggcggaggaaagggaaaaaggaagctgctttatctggggtgacgcagctaacgacggaggtaccgcagcgtgaggaggaagaggaagtagggcttgacaaaagatttggtttttctaaagagtttcacagtagagtagagttaggggaagaaattggacgaggacattttgggtacacttgctctgctaagttcaagaaaggagagctcaaaggtcaagtggttgctgtcaaaatcatcccaaaatcgaagatgacaactgcaattgctatagaagatgtgagaagggaagtgaaaattctacaggctttatctggacataagaatctggtacaattctatgatgcatttgaggacaatgcaaacgtctacattgcaatggagctatgtgaaggtggtgagcttcttgacagaatactagcaaggggagggaaatactcagagaatgacgcaaaaccagtgattatacaaattctgaatgtggtagctttctgtcatttccaaggagttgttcatcgagaccttaaaccagagaacttcttgtacacttccaaggaggagaattctcagcttaaagcgatagactttggcttatcagactttgtcagaccagatgagagactaaacgatatagtgggaagtgcatactatgtagctcccgaagttctacacagatcatatacaacagaagcggatgtgtggagcatcggagtcatagcatacattctactatgtggtagccgtccgttttgggcaagaactgaatccggaatttttagagctgttcttaaagctgacccgagtttcgatgaacctccttggcccttcttgtcttctgacgctaaagactttgttaagcggttattgtttaaggatccccggcgaagaatgtcagcctcccaagccttgatgcatccttggatccgagcttataatacggacatgaatatccctttcgatatcttgatctttaggcagatgaaggcgtacttgcgatcttcttcattacgcaaagctgctttgagggcgctatcgaagacgttaatcaaggatgaaattctttacctgaaaactcaattttctcttctcgcaccaaacaaagatggcctaatcacaatggataccattagaatggcacttgcaagcaatgcaacagaagcaatgaaagaatctcggatcccagagtttcttgctttgctaaatggacttcaatacagaggaatggattttgaagagttttgtgcagctgctataaacgttcatcagcacgagtcgcttgattgttgggaacagagcattcgacatgcttatgagcttttcgacaagaatggaaaccgagctattgtcatcgaagaacttgcctctgaacttggtgttggaccatctataccggtacattcagttctacatgattggatcagacacactgatggaaagcttagcttcttcgggtttgttaaactgttacatggagtctctgttcgagcctcggggaaaactacccggtga

SEQ ID NO: 79592 - protein, 606 aa, Arabidopsis thaliana
  peptide (1)..(606): Ceres Seq. ID no. 12652025
MGGCTSKPSTSSGRPNPFAPGNDYPQIDDFAPDHPGKSPIPTPSAAKASPFFPFYTPSPARHRRNKSRDVGGGGESKSLTSTPLRQLRRAFHPPSPAKHIRAALRRRKGKKEAALSGVTQLTTEVPQREEEEEVGLDKRFGFSKEFHSRVELGEEIGRGHFGYTCSAKFKKGELKGQVVAVKIIPKSKMTTAIAIEDVRREVKILQALSGHKNLVQFYDAFEDNANVYIAMELCEGGELLDRILARGGKYSENDAKPVIIQILNVVAFCHFQGVVHRDLKPENFLYTSKEENSQLKAIDFGLSDFVRPDERLNDIVGSAYYVAPEVLHRSYTTEADVWSIGVIAYILLCGSRPFWARTESGIFRAVLKADPSFDEPPWPFLSSDAKDFVKRLLFKDPRRRMSASQALMHPWIRAYNTDMNIPFDILIFRQMKAYLRSSSLRKAALRALSKTLIKDEILYLKTQFSLLAPNKDGLITMDTIRMALASNATEAMKESRIPEFLALLNGLQYRGMDFEEFCAAAINVHQHESLDCWEQSIRHAYELFDKNGNRAIVIEELASELGVGPSIPVHSVLHDWIRHTDGKLSFFGFVKLLHGVSVRASGKTTR

SEQ ID NO: 79593 - protein, 418 aa, Arabidopsis thaliana
  peptide (1)..(418): Ceres Seq. ID no. 12652026
MTTAIAIEDVRREVKILQALSGHKNLVQFYDAFEDNANVYIAMELCEGGELLDRILARGGKYSENDAKPVIIQILNVVAFCHFQGVVHRDLKPENFLYTSKEENSQLKAIDFGLSDFVRPDERLNDIVGSAYYVAPEVLHRSYTTEADVWSIGVIAYILLCGSRPFWARTESGIFRAVLKADPSFDEPPWPFLSSDAKDFVKRLLFKDPRRRMSASQALMHPWIRAYNTDMNIPFDILIFRQMKAYLRSSSLRKAALRALSKTLIKDEILYLKTQFSLLAPNKDGLITMDTIRMALASNATEAMKESRIPEFLALLNGLQYRGMDFEEFCAAAINVHQHESLDCWEQSIRHAYELFDKNGNRAIVIEELASELGVGPSIPVHSVLHDWIRHTDGKLSFFGFVKLLHGVSVRASGKTTR

SEQ ID NO: 79594 - protein, 376 aa, Arabidopsis thaliana
  peptide (1)..(376): Ceres Seq. ID no. 12652027
MELCEGGELLDRILARGGKYSENDAKPVIIQILNVVAFCHFQGVVHRDLKPENFLYTSKEENSQLKAIDFGLSDFVRPDERLNDIVGSAYYVAPEVLHRSYTTEADVWSIGVIAYILLCGSRPFWARTESGIFRAVLKADPSFDEPPWPFLSSDAKDFVKRLLFKDPRRRMSASQALMHPWIRAYNTDMNIPFDILIFRQMKAYLRSSSLRKAALRALSKTLIKDEILYLKTQFSLLAPNKDGLITMDTIRMALASNATEAMKESRIPEFLALLNGLQYRGMDFEEFCAAAINVHQHESLDCWEQSIRHAYELFDKNGNRAIVIEELASELGVGPSIPVHSVLHDWIRHTDGKLSFFGFVKLLHGVSVRASGKTTR

SEQ ID NO: 79595 - DNA, 948 bp, Arabidopsis thaliana
  misc_feature (1)..(948): Ceres Seq. ID no. 12652035
  misc_feature (1)..(948): Ortholog of  Ceres SEQ ID NO 12608276 as cited in SEQ ID NO 57871
  misc_feature (1)..(948): Ortholog of  Ceres SEQ ID NO 14316312 as cited in SEQ ID NO 60042
  misc_feature (1)..(948): Ortholog of  Ceres SEQ ID NO 13598492 as cited in SEQ ID NO 63882
  misc_feature (1)..(948): Ortholog of  Ceres SEQ ID NO 13657914 as cited in SEQ ID NO 66230
  misc_feature (1)..(948): Ortholog of  Ceres SEQ ID NO 13595877 as cited in SEQ ID NO 67702
  misc_feature (1)..(948): Ortholog of  Ceres SEQ ID NO 13622667 as cited in SEQ ID NO 0
atggaatctgatctaaccacagagcatcatctaccattcatccgaattcataagaacggccgagtcgagcggcttagcggcaacgacatcaaaccaacgtctttaaacccacaaaacgatgtcgtttcgaaagacgtcatgtactcatcggaccacaacctctccgtccgtatgtttctccccaacaaatctagaaaactcgacaccgccggtaacaaaatacctctactcatctactttcacggcggagcttacatcatacaatctcctttctctccggtttaccataactacctcacggaggttgttataaccgctaactgcctagccgtgtcggttcagtaccgtcttgcgccagagcatccggttccggcggcttacgacgattcatggtctgcgattcagtggatcttttctcattctgatgattggattaatgaatacgctgatttcgacagagtttttatcgccggagatagtgccggagccaatatatcgcatcacatgggaataagagctggtaaggagaagcttagccctacaatcaaagggattgttatggtgcatccaggtttttgggggaaagaaccgatcgacgaacacgatgtacaagacggagaagtcagaaacaagatcgcatatatttgggaaaatatcgttagcccgaatagtgttgatggagtgaatgatccgtggtttaatgttgttggatccggatcggatgtttccgagatgggatgtgaaaaggttttggttgcggttgccggaaaagatgtgttttggcggcaaggattggcttatgcggcgaagctggagaagagtcagtggaaaggaagtgttgaggtgattgaggaagaagaggaaggacactgcttccatctccataaccataattctcaaaatgcttcgaaattgatgcagaagtttttggagtttatcataagttga

SEQ ID NO: 79596 - protein, 315 aa, Arabidopsis thaliana
  peptide (1)..(315): Ceres Seq. ID no. 12652036
MESDLTTEHHLPFIRIHKNGRVERLSGNDIKPTSLNPQNDVVSKDVMYSSDHNLSVRMFLPNKSRKLDTAGNKIPLLIYFHGGAYIIQSPFSPVYHNYLTEVVITANCLAVSVQYRLAPEHPVPAAYDDSWSAIQWIFSHSDDWINEYADFDRVFIAGDSAGANISHHMGIRAGKEKLSPTIKGIVMVHPGFWGKEPIDEHDVQDGEVRNKIAYIWENIVSPNSVDGVNDPWFNVVGSGSDVSEMGCEKVLVAVAGKDVFWRQGLAYAAKLEKSQWKGSVEVIEEEEEGHCFHLHNHNSQNASKLMQKFLEFIIS

SEQ ID NO: 79597 - protein, 269 aa, Arabidopsis thaliana
  peptide (1)..(269): Ceres Seq. ID no. 12652037
MYSSDHNLSVRMFLPNKSRKLDTAGNKIPLLIYFHGGAYIIQSPFSPVYHNYLTEVVITANCLAVSVQYRLAPEHPVPAAYDDSWSAIQWIFSHSDDWINEYADFDRVFIAGDSAGANISHHMGIRAGKEKLSPTIKGIVMVHPGFWGKEPIDEHDVQDGEVRNKIAYIWENIVSPNSVDGVNDPWFNVVGSGSDVSEMGCEKVLVAVAGKDVFWRQGLAYAAKLEKSQWKGSVEVIEEEEEGHCFHLHNHNSQNASKLMQKFLEFIIS

SEQ ID NO: 79598 - protein, 258 aa, Arabidopsis thaliana
  peptide (1)..(258): Ceres Seq. ID no. 12652038
MFLPNKSRKLDTAGNKIPLLIYFHGGAYIIQSPFSPVYHNYLTEVVITANCLAVSVQYRLAPEHPVPAAYDDSWSAIQWIFSHSDDWINEYADFDRVFIAGDSAGANISHHMGIRAGKEKLSPTIKGIVMVHPGFWGKEPIDEHDVQDGEVRNKIAYIWENIVSPNSVDGVNDPWFNVVGSGSDVSEMGCEKVLVAVAGKDVFWRQGLAYAAKLEKSQWKGSVEVIEEEEEGHCFHLHNHNSQNASKLMQKFLEFIIS

SEQ ID NO: 79599 - DNA, 2204 bp, Arabidopsis thaliana
  misc_feature (1)..(2204): Ceres Seq. ID no. 12652041
  misc_feature (1)..(2204): Ortholog of  Ceres SEQ ID NO 13654989 as cited in SEQ ID NO 63117
  misc_feature (1)..(2204): Ortholog of  Ceres SEQ ID NO 13584744 as cited in SEQ ID NO 69137
ctctctggttgctcttggccatggttgtgaatagtcaagctttcttgttggcattaattgcattacttgctacccaattgccttcactaatggctgcagattgtccattagatttcagtggatcaaatttcactctagtagctactgtgtgctccaacataaccaacagaggcaaatgttgccgctacatgaacgcttttgttgcggtgtccgtggctcgttacgcgaacttgtcaactaatcttggagtcacatcagatttatctgaaacctgcattgcttccatctctagagccatggagggctacggagtctcgagaaacgccactagtttctgcggtttgggaaccaagatccttgttaagtatgactgtgacggtcgaaccactgttacacaaatgcatcagtctccgggatttggacatgtttcaagaaactgcagactcccattttcgccgggacaccaatgcagaaagtgtttgaactctggcatcacttaccttcgtaatctcataggtgcagagactaataacattactctgtgtacttgtcgtgatgcgacttatgctacattagcaagccgaatagacgatacatcagctcttgaactccttagttgtttctttcaagtgacagagcttaacattccttcagagtcattttcaccagtggcaagtccagaaccttctccaagcacggttggtggtattagcccaagcaacagtgattctcaaatgactacaagtagaagcaccaatccatatcacttaacaatggttccaaccattgggattgttgttacagctgttgctcttacgatgcttgtagtcttggtaattcttatccgtagaaagaaccgggaactggatgaatctgagagcttggatagaaagtcaacaaaatcagttccttcttcccttcctgtattcaagattcatgaagatgattcttcctcagctttcagaaagttcagctacaaggaaatgacaaatgcaacaaatgatttcaacacggttatcggtcagggaggttttggtactgtttacaaagccgagttcaacgatggtctgattgcagcggtaaaaaagatgaacaaagtctctgaacaagctgaacaagatttttgtagagagatagggcttttagctaagctgcatcaccgtaacctcgttgctttgaaaggcttttgcatcaacaagaaagaaaggttcttggtctacgactatatgaaaaatggcagcttaaaagatcacttacatgccattggaaagcctccacctagttggggaacaagaatgaaaattgcaattgatgtggcaaatgctttggtaaatattccaaagtctttcatctacattttctctgtaaactgatttgataatatatcttttacagtttttggttcttggctgcacgttgttctctcctccaggaatatcttcatttctactgtgatcctcctctctgtcatagagatattaaatcaagcaatatattactcgatgagaacttcgtcgctaagctttcagattttggccttgcacattcgtctagagatggctctgtttgctttgagcctgtgaataccgatatccgtggaactccaggttatgtagatccggaatatgtagtaacgcaagagttgacagagaagagtgatgtgtacagctacggagttgtgttgctggagctcataaccgggagaagagcagttgatgaaggtaggaaccttgtggaaatgtctcagcggtttttgttggcgaaatcaaaacacctcgagttggtagacccgagaatcaaagactctattaatgatgctggaggaaaacaacttgatgcagttgtgacggttgtgagattgtgtaccgagaaagaaggccggtctaggccatcaattaagcaagtcttgaggctgttgtgtgaaagctgtgatccggtgcatagcgcatttgctaaagcggttgaagaagagataggctgggatagtaggaagagaagcaatttgagaattcaaagaggtgattcccggatctttggtccatcgtctagtactacttccaggtcacattacagccggagtttacctcactctccaattaacggattttctttctgagttagtcacatcttctctatagctaaatctgaaagttttacatatgtttatgaaaattatgaattcatattgaaagctctcatactct

SEQ ID NO: 79600 - protein, 456 aa, Arabidopsis thaliana
  peptide (1)..(456): Ceres Seq. ID no. 12652042
LWLLLAMVVNSQAFLLALIALLATQLPSLMAADCPLDFSGSNFTLVATVCSNITNRGKCCRYMNAFVAVSVARYANLSTNLGVTSDLSETCIASISRAMEGYGVSRNATSFCGLGTKILVKYDCDGRTTVTQMHQSPGFGHVSRNCRLPFSPGHQCRKCLNSGITYLRNLIGAETNNITLCTCRDATYATLASRIDDTSALELLSCFFQVTELNIPSESFSPVASPEPSPSTVGGISPSNSDSQMTTSRSTNPYHLTMVPTIGIVVTAVALTMLVVLVILIRRKNRELDESESLDRKSTKSVPSSLPVFKIHEDDSSSAFRKFSYKEMTNATNDFNTVIGQGGFGTVYKAEFNDGLIAAVKKMNKVSEQAEQDFCREIGLLAKLHHRNLVALKGFCINKKERFLVYDYMKNGSLKDHLHAIGKPPPSWGTRMKIAIDVANALVNIPKSFIYIFSVN

SEQ ID NO: 79601 - protein, 450 aa, Arabidopsis thaliana
  peptide (1)..(450): Ceres Seq. ID no. 12652043
MVVNSQAFLLALIALLATQLPSLMAADCPLDFSGSNFTLVATVCSNITNRGKCCRYMNAFVAVSVARYANLSTNLGVTSDLSETCIASISRAMEGYGVSRNATSFCGLGTKILVKYDCDGRTTVTQMHQSPGFGHVSRNCRLPFSPGHQCRKCLNSGITYLRNLIGAETNNITLCTCRDATYATLASRIDDTSALELLSCFFQVTELNIPSESFSPVASPEPSPSTVGGISPSNSDSQMTTSRSTNPYHLTMVPTIGIVVTAVALTMLVVLVILIRRKNRELDESESLDRKSTKSVPSSLPVFKIHEDDSSSAFRKFSYKEMTNATNDFNTVIGQGGFGTVYKAEFNDGLIAAVKKMNKVSEQAEQDFCREIGLLAKLHHRNLVALKGFCINKKERFLVYDYMKNGSLKDHLHAIGKPPPSWGTRMKIAIDVANALVNIPKSFIYIFSVN

SEQ ID NO: 79602 - protein, 427 aa, Arabidopsis thaliana
  peptide (1)..(427): Ceres Seq. ID no. 12652044
MAADCPLDFSGSNFTLVATVCSNITNRGKCCRYMNAFVAVSVARYANLSTNLGVTSDLSETCIASISRAMEGYGVSRNATSFCGLGTKILVKYDCDGRTTVTQMHQSPGFGHVSRNCRLPFSPGHQCRKCLNSGITYLRNLIGAETNNITLCTCRDATYATLASRIDDTSALELLSCFFQVTELNIPSESFSPVASPEPSPSTVGGISPSNSDSQMTTSRSTNPYHLTMVPTIGIVVTAVALTMLVVLVILIRRKNRELDESESLDRKSTKSVPSSLPVFKIHEDDSSSAFRKFSYKEMTNATNDFNTVIGQGGFGTVYKAEFNDGLIAAVKKMNKVSEQAEQDFCREIGLLAKLHHRNLVALKGFCINKKERFLVYDYMKNGSLKDHLHAIGKPPPSWGTRMKIAIDVANALVNIPKSFIYIFSVN

SEQ ID NO: 79603 - DNA, 1612 bp, Arabidopsis thaliana
  misc_feature (1)..(1612): Ceres Seq. ID no. 12652097
  misc_feature (1)..(1612): Ortholog of  Ceres SEQ ID NO 14314755 as cited in SEQ ID NO 59919
  misc_feature (1)..(1612): Ortholog of  Ceres SEQ ID NO 13597574 as cited in SEQ ID NO 64677
  misc_feature (1)..(1612): Ortholog of  Ceres SEQ ID NO 13597843 as cited in SEQ ID NO 64850
  misc_feature (1)..(1612): Ortholog of  Ceres SEQ ID NO 13597678 as cited in SEQ ID NO 65375
  misc_feature (1)..(1612): Ortholog of  Ceres SEQ ID NO 13596180 as cited in SEQ ID NO 67941
  misc_feature (1)..(1612): Ortholog of  Ceres SEQ ID NO 13591190 as cited in SEQ ID NO 68044
  misc_feature (1)..(1612): Ortholog of  Ceres SEQ ID NO 13595961 as cited in SEQ ID NO 68223
acggcaaaaatacaaccccaaatctatccatctctctctctatctatcttttttttcctcggcaatggcggaagctaaacccagaaatctgagaatcgtgatgttccctttcatgggacaaggccatatcatcccgtttgtagctttagcccttcgtttagagaagattatgattatgaacagagccaacaaaaccaccatctctatgatcaatactccttcgaacatccccaaaatacgctccaatcttccacctgaatcctccataagtctcatagagttacctttcaacagctctgatcatggccttcctcacgacggcgagaatttcgattctcttccttactctctcgtcatcagccttcttgaagcttctaggtcgcttcgtgagccctttcgagacttcatgacgaagatcttgaaggaagaagggcagagctcggttatagtgatcggtgatttcttcttgggttggatcggtaaggtttgcaaagaggttggtgtttattcagtgatctttagtgcttctggtgcttttggtttaggttgttatagatccatatggttaaacttgccacataaagaaaccaaacaagatcagtttctcttagatgatttccctgaagcaggggagattgagaaaactcagttgaattctttcatgttagaagctgatggaaccgatgattggtctgttttcatgaagaagattatacctggatggtctgacttcgatggattcttgttcaacacggttgctgaaatcgatcagatgggattatcctacttccgtagaataaccggtgttccggtttggccagttgggccggttttgaagtctccggataagaaggtgggatcgaggtcgacagaggaagcagtgaagtcatggcttgactcaaaaccggaccattcggttgtgtacgtatgtttcggttcaatgaactcgattttgcaaacgcatatgttagaattggctatggcattagagagtagcgagaagaacttcatatgggtggtgaggccgcccataggtgtggaggtgaagagtgagtttgatgtgaaagggtatctaccggaaggatttgaggaaagaataacaagatcggaaagagggttacttgtgaagaaatgggcaccacaagttgatatattgtcacacaaggcaacatgtgtgtttttgagtcattgcggatggaactcgatactcgaatcacttagccacggtgtgccactgctcggatggcccatggcagccgagcagttcttcaattccatattgatggagaaacatattggggtatcggttgaggtggcgcgtgggaagagatgtgagatcaaatgtgatgacattgtttctaagatcaaactggtgatggaggagactgaagtagggaaagagattaggaagaaggctagagaggtgaaggagttagtgaggagagcaatggtagatggagttaaaggttcctccgtcattggtttggaagagtttcttgaccaagcaatggtcaagaaagtggagaattgagatagtagatggtatatgtaaacgtcttatttgaaatcacatattgatgaaatgaataaaaccatgtccggtaattatacc

SEQ ID NO: 79604 - protein, 509 aa, Arabidopsis thaliana
  peptide (1)..(509): Ceres Seq. ID no. 12652098
RQKYNPKSIHLSLYLSFFSSAMAEAKPRNLRIVMFPFMGQGHIIPFVALALRLEKIMIMNRANKTTISMINTPSNIPKIRSNLPPESSISLIELPFNSSDHGLPHDGENFDSLPYSLVISLLEASRSLREPFRDFMTKILKEEGQSSVIVIGDFFLGWIGKVCKEVGVYSVIFSASGAFGLGCYRSIWLNLPHKETKQDQFLLDDFPEAGEIEKTQLNSFMLEADGTDDWSVFMKKIIPGWSDFDGFLFNTVAEIDQMGLSYFRRITGVPVWPVGPVLKSPDKKVGSRSTEEAVKSWLDSKPDHSVVYVCFGSMNSILQTHMLELAMALESSEKNFIWVVRPPIGVEVKSEFDVKGYLPEGFEERITRSERGLLVKKWAPQVDILSHKATCVFLSHCGWNSILESLSHGVPLLGWPMAAEQFFNSILMEKHIGVSVEVARGKRCEIKCDDIVSKIKLVMEETEVGKEIRKKAREVKELVRRAMVDGVKGSSVIGLEEFLDQAMVKKVEN

SEQ ID NO: 79605 - protein, 488 aa, Arabidopsis thaliana
  peptide (1)..(488): Ceres Seq. ID no. 12652099
MAEAKPRNLRIVMFPFMGQGHIIPFVALALRLEKIMIMNRANKTTISMINTPSNIPKIRSNLPPESSISLIELPFNSSDHGLPHDGENFDSLPYSLVISLLEASRSLREPFRDFMTKILKEEGQSSVIVIGDFFLGWIGKVCKEVGVYSVIFSASGAFGLGCYRSIWLNLPHKETKQDQFLLDDFPEAGEIEKTQLNSFMLEADGTDDWSVFMKKIIPGWSDFDGFLFNTVAEIDQMGLSYFRRITGVPVWPVGPVLKSPDKKVGSRSTEEAVKSWLDSKPDHSVVYVCFGSMNSILQTHMLELAMALESSEKNFIWVVRPPIGVEVKSEFDVKGYLPEGFEERITRSERGLLVKKWAPQVDILSHKATCVFLSHCGWNSILESLSHGVPLLGWPMAAEQFFNSILMEKHIGVSVEVARGKRCEIKCDDIVSKIKLVMEETEVGKEIRKKAREVKELVRRAMVDGVKGSSVIGLEEFLDQAMVKKVEN

SEQ ID NO: 79606 - protein, 476 aa, Arabidopsis thaliana
  peptide (1)..(476): Ceres Seq. ID no. 12652100
MFPFMGQGHIIPFVALALRLEKIMIMNRANKTTISMINTPSNIPKIRSNLPPESSISLIELPFNSSDHGLPHDGENFDSLPYSLVISLLEASRSLREPFRDFMTKILKEEGQSSVIVIGDFFLGWIGKVCKEVGVYSVIFSASGAFGLGCYRSIWLNLPHKETKQDQFLLDDFPEAGEIEKTQLNSFMLEADGTDDWSVFMKKIIPGWSDFDGFLFNTVAEIDQMGLSYFRRITGVPVWPVGPVLKSPDKKVGSRSTEEAVKSWLDSKPDHSVVYVCFGSMNSILQTHMLELAMALESSEKNFIWVVRPPIGVEVKSEFDVKGYLPEGFEERITRSERGLLVKKWAPQVDILSHKATCVFLSHCGWNSILESLSHGVPLLGWPMAAEQFFNSILMEKHIGVSVEVARGKRCEIKCDDIVSKIKLVMEETEVGKEIRKKAREVKELVRRAMVDGVKGSSVIGLEEFLDQAMVKKVEN

SEQ ID NO: 79607 - DNA, 396 bp, Arabidopsis thaliana
  misc_feature (1)..(396): Ceres Seq. ID no. 12652101
  misc_feature (1)..(396): Ortholog of  Ceres SEQ ID NO 13581889 as cited in SEQ ID NO 50900
  misc_feature (1)..(396): Ortholog of  Ceres SEQ ID NO 13581902 as cited in SEQ ID NO 52223
atggctcgttcgaaccagacagctcgtaaggcaacaggaggtaaggctccacacttcgccatgagagtatggcaacactcaactccgccgcttaagaaaccatatagatacaagccaggaacagtggcactcagggagatcaggaagtaccagaagaccacagacttagttataagaaaactccctttccaaagactggtgaaagagatagctcagagtctcaaggcagatctaaggttccagaccggtgctgtttccgctcttcaagaagccgctgaagcttttatggttggaatgtttgaggacaccaatttgtgtgccatgcatgccaaaagatcaactatcatgcctaaggatatccagctcgctaaaaggcttcgaggcgatagggtttga

SEQ ID NO: 79608 - protein, 131 aa, Arabidopsis thaliana
  peptide (1)..(131): Ceres Seq. ID no. 12652102
MARSNQTARKATGGKAPHFAMRVWQHSTPPLKKPYRYKPGTVALREIRKYQKTTDLVIRKLPFQRLVKEIAQSLKADLRFQTGAVSALQEAAEAFMVGMFEDTNLCAMHAKRSTIMPKDIQLAKRLRGDRV

SEQ ID NO: 79609 - protein, 111 aa, Arabidopsis thaliana
  peptide (1)..(111): Ceres Seq. ID no. 12652103
MRVWQHSTPPLKKPYRYKPGTVALREIRKYQKTTDLVIRKLPFQRLVKEIAQSLKADLRFQTGAVSALQEAAEAFMVGMFEDTNLCAMHAKRSTIMPKDIQLAKRLRGDRV

SEQ ID NO: 79610 - DNA, 2111 bp, Arabidopsis thaliana
  misc_feature (1)..(2111): Ceres Seq. ID no. 12652125
  misc_feature (1)..(2111): Ortholog of  Ceres SEQ ID NO 14311305 as cited in SEQ ID NO 53731
  misc_feature (1)..(2111): Ortholog of  Ceres SEQ ID NO 13501807 as cited in SEQ ID NO 67558
atctcaaaaggttctcttatttgcagtatcgccccttaaatcctttttcgatgtttcttatgttcatcattattttttaactaaaaatctcatctttagacaacaattcaatttgccatctctctgttgtatctttgacgatggcggctttgtcttcctccgtcaccacccgatcatatcattccggttatttggcttctttctcaccggttaacggtgaccgacatcgatcactctcgttcctgtctgcttctcctcaaggattgaatcctcttgacctctgtgttagattccagaggaagtctggtcgtgcttctgtctttatgcaagatggtgcaatagtcactaattcaaattcatcagagagtaaaacttctcttaagggattgaaagatgaggtgctatcagctttatctcaagaagcagccaaggttggagtagaatctgatggtcaaagccagtcaacagttagtattacggtggttggagcctctggtgatcttgctaagaagaagattttcccggctcttttcgccctttactatgaaggttgtctccctgagcattttacaatatttggatattctaggagtaagatgacagatgttgaacttagaaacatggtcagcaaaaccctcacttgcagaattgataagagggcaaactgtggtgaaaagatggaagaatttctcaagagatgtttttaccattctggtcagtatgattctcaggaacattttactgaattggataagaagctcaaggaacatgaggctggaagaatctcaaaccgcctcttttatttgtctatccctccaaatatatttgtagatgctgtgaaatgtgcaagcacttctgcttcatctgtcaatggatggactagggttatcgtcgagaaaccttttggtcgagattctgaaacctcggctgctttaacgaaatccctcaagcagtatttggaggaagatcaaatttttaggatagaccattacctaggaaaggagctagtcgagaacttatctgttcttcgattctcaaaccttatatttgagccgctatggtcaaggcagtacataaggaacgtgcaatttatattttctgaggatttcggcactgaaggacgtggagggtactttgacaattacggaataataagagatataatgcagaatcatctgcttcaaatcttagccctctttgccatggaaacgcctgttagtttggatgcagaggatatcagaaatgaaaaggttaaggtgttacgttcaatgaggccaattcgagttgaagatgtggtaataggacaatacaagagccacacaaagggaggagtcacatatcctgcctacaccgatgataaaactgtaccaaaaggtagtctgactccaacatttgcagctgctgctcttttcatcgacaatgcaagatgggacggtgtgccctttttaatgaaagcgggcaaagcactacacaccaggagtgcagagataagggtgcagttcaggcatgttccggggaatttgtataaccggaatactggttctgatcttgatcaagctacaaatgagcttgtgatccgtgtccaaccagatgaagcaatctatttgaaaatcaacaacaaggtccctggtttaggaatgagattagatcgcagtaacttgaatcttctatactcagcaaggtattcaaaggagataccagatgcatatgagaggcttctgttagatgcaatagaaggagaaagaagattgttcataagaagtgacgagcttgatgcagcttggtcgctattcactccattgcttaaagagattgaagagaagaagagaatccctgagtactatccttatggtagccgtggtcctgttggtgctcattatctagctgctaaacacaaggtgcaatggggtgacgtcagtattgaccagtaaaacattttcttgtttgtattctcttttttttacattgataatagatttatctaggattcaagctttttctacgcctctttttacagctttaatttgtgcaatttggttatgtaccatttaataaataaataaaccaaaggggtttctcttattctctacaaggaaaatgtcttcttttta

SEQ ID NO: 79611 - protein, 596 aa, Arabidopsis thaliana
  peptide (1)..(596): Ceres Seq. ID no. 12652126
MAALSSSVTTRSYHSGYLASFSPVNGDRHRSLSFLSASPQGLNPLDLCVRFQRKSGRASVFMQDGAIVTNSNSSESKTSLKGLKDEVLSALSQEAAKVGVESDGQSQSTVSITVVGASGDLAKKKIFPALFALYYEGCLPEHFTIFGYSRSKMTDVELRNMVSKTLTCRIDKRANCGEKMEEFLKRCFYHSGQYDSQEHFTELDKKLKEHEAGRISNRLFYLSIPPNIFVDAVKCASTSASSVNGWTRVIVEKPFGRDSETSAALTKSLKQYLEEDQIFRIDHYLGKELVENLSVLRFSNLIFEPLWSRQYIRNVQFIFSEDFGTEGRGGYFDNYGIIRDIMQNHLLQILALFAMETPVSLDAEDIRNEKVKVLRSMRPIRVEDVVIGQYKSHTKGGVTYPAYTDDKTVPKGSLTPTFAAAALFIDNARWDGVPFLMKAGKALHTRSAEIRVQFRHVPGNLYNRNTGSDLDQATNELVIRVQPDEAIYLKINNKVPGLGMRLDRSNLNLLYSARYSKEIPDAYERLLLDAIEGERRLFIRSDELDAAWSLFTPLLKEIEEKKRIPEYYPYGSRGPVGAHYLAAKHKVQWGDVSIDQ

SEQ ID NO: 79612 - protein, 535 aa, Arabidopsis thaliana
  peptide (1)..(535): Ceres Seq. ID no. 12652127
MQDGAIVTNSNSSESKTSLKGLKDEVLSALSQEAAKVGVESDGQSQSTVSITVVGASGDLAKKKIFPALFALYYEGCLPEHFTIFGYSRSKMTDVELRNMVSKTLTCRIDKRANCGEKMEEFLKRCFYHSGQYDSQEHFTELDKKLKEHEAGRISNRLFYLSIPPNIFVDAVKCASTSASSVNGWTRVIVEKPFGRDSETSAALTKSLKQYLEEDQIFRIDHYLGKELVENLSVLRFSNLIFEPLWSRQYIRNVQFIFSEDFGTEGRGGYFDNYGIIRDIMQNHLLQILALFAMETPVSLDAEDIRNEKVKVLRSMRPIRVEDVVIGQYKSHTKGGVTYPAYTDDKTVPKGSLTPTFAAAALFIDNARWDGVPFLMKAGKALHTRSAEIRVQFRHVPGNLYNRNTGSDLDQATNELVIRVQPDEAIYLKINNKVPGLGMRLDRSNLNLLYSARYSKEIPDAYERLLLDAIEGERRLFIRSDELDAAWSLFTPLLKEIEEKKRIPEYYPYGSRGPVGAHYLAAKHKVQWGDVSIDQ

SEQ ID NO: 79613 - protein, 444 aa, Arabidopsis thaliana
  peptide (1)..(444): Ceres Seq. ID no. 12652128
MTDVELRNMVSKTLTCRIDKRANCGEKMEEFLKRCFYHSGQYDSQEHFTELDKKLKEHEAGRISNRLFYLSIPPNIFVDAVKCASTSASSVNGWTRVIVEKPFGRDSETSAALTKSLKQYLEEDQIFRIDHYLGKELVENLSVLRFSNLIFEPLWSRQYIRNVQFIFSEDFGTEGRGGYFDNYGIIRDIMQNHLLQILALFAMETPVSLDAEDIRNEKVKVLRSMRPIRVEDVVIGQYKSHTKGGVTYPAYTDDKTVPKGSLTPTFAAAALFIDNARWDGVPFLMKAGKALHTRSAEIRVQFRHVPGNLYNRNTGSDLDQATNELVIRVQPDEAIYLKINNKVPGLGMRLDRSNLNLLYSARYSKEIPDAYERLLLDAIEGERRLFIRSDELDAAWSLFTPLLKEIEEKKRIPEYYPYGSRGPVGAHYLAAKHKVQWGDVSIDQ

SEQ ID NO: 79614 - DNA, 1775 bp, Arabidopsis thaliana
  misc_feature (1)..(1775): Ceres Seq. ID no. 12652129
  misc_feature (1)..(1775): Ortholog of  Ceres SEQ ID NO 15170354 as cited in SEQ ID NO 54190
  misc_feature (1)..(1775): Ortholog of  Ceres SEQ ID NO 14307253 as cited in SEQ ID NO 54783
  misc_feature (1)..(1775): Ortholog of  Ceres SEQ ID NO 14312300 as cited in SEQ ID NO 58632
  misc_feature (1)..(1775): Ortholog of  Ceres SEQ ID NO 13654989 as cited in SEQ ID NO 63117
  misc_feature (1)..(1775): Ortholog of  Ceres SEQ ID NO 13584744 as cited in SEQ ID NO 69137
cgacaaaagaagctgcttcttcatctctctctctctccttctctttctctctcaactccaattcgtttttaccagtttcgaatctgaacaaagttgggttttttattggtacccagaatctcaattctccttctttccttctgggtataggaaaagtctcgcctttttttatatttatccaatcgctcctgttcattgattccccagtaggattgtagtttttggttattgggaaaattgagtaaaggaggagatgggttgtttctcgtgttttgattcgagtgatgacgagaagctgaatccagttgatgaatctaatcatggtcagaagaaacaatcacaaccgacagtatccaataacatatctggactcccttcaggtggggagaagcttagctcaaagaccaatggaggatcaaaaagggagctactgcttccaagggatggacttggacaaattgctgctcatacatttgctttccgcgagcttgctgctgcaactatgaactttcatcctgacactttcttaggcgaaggtggatttggacgtgtctacaaaggaaggcttgacagcaccggtcaggttgttgctgttaaacaactagacaggaatggtctacaaggtaacagagaatttctggtagaggttcttatgctcagtcttcttcatcatcccaacttagtcaaccttattggttattgtgctgatggagatcaacgcctcttggtctacgagtttatgccgttaggatcattggaagatcacctccacgatcttccaccggataaggaggccttagattggaacatgagaatgaaaatagctgctggtgcggcgaaaggattggaatttctacatgataaggcaaaccctccggttatttatagagattttaagtcatcaaatattttactggatgagggtttccaccctaagctttctgattttggacttgctaaactcggaccaacgggagacaaatctcatgtctccactagagttatgggaacttatggttattgtgctcccgagtacgcaatgacgggacaattgacagtaaaatcagatgtctacagttttggtgtggtttttctcgagctcattactggtcgcaaagctatagacagcgagatgcctcatggagagcagaacctggtggcttgggctcgcccattgttcaacgacaggcgaaagttcataaaactggctgatccaaggttaaaggggcggtttccaacgcgtgcactctaccaagctttagctgtggcatcaatgtgcatccaagaacaggcggctacacgtcctctcatagcagatgttgtcactgcactctcctatcttgcaaaccaagcttatgatccaagtaaagatgatagtagaagaaaccgggatgaaagaggtgcaaggttaataacaaggaacgacgatggaggtggctcgggaagtaaattcgatttagaaggttcagagaaagaagattcaccgagagagacagctcggatattgaaccgagatatcaatagggagcgtgcggttgcagaggctaagatgtggggagagagtttgagggagaaacgaagacagagcgagcagggtacttcagagagcaacagtaccgggtagaaccggtttgggtcggtcttgacccttttttgttcttatttctctcaagactctcatttattgtcaaacatagaaaacaaacaaaaaaacattgggacgacgagttgctgtacattatatatgtgatgttgcaatatgggcacaaaggtta

SEQ ID NO: 79615 - protein, 456 aa, Arabidopsis thaliana
  peptide (1)..(456): Ceres Seq. ID no. 12652130
MGCFSCFDSSDDEKLNPVDESNHGQKKQSQPTVSNNISGLPSGGEKLSSKTNGGSKRELLLPRDGLGQIAAHTFAFRELAAATMNFHPDTFLGEGGFGRVYKGRLDSTGQVVAVKQLDRNGLQGNREFLVEVLMLSLLHHPNLVNLIGYCADGDQRLLVYEFMPLGSLEDHLHDLPPDKEALDWNMRMKIAAGAAKGLEFLHDKANPPVIYRDFKSSNILLDEGFHPKLSDFGLAKLGPTGDKSHVSTRVMGTYGYCAPEYAMTGQLTVKSDVYSFGVVFLELITGRKAIDSEMPHGEQNLVAWARPLFNDRRKFIKLADPRLKGRFPTRALYQALAVASMCIQEQAATRPLIADVVTALSYLANQAYDPSKDDSRRNRDERGARLITRNDDGGGSGSKFDLEGSEKEDSPRETARILNRDINRERAVAEAKMWGESLREKRRQSEQGTSESNSTG

SEQ ID NO: 79616 - protein, 373 aa, Arabidopsis thaliana
  peptide (1)..(373): Ceres Seq. ID no. 12652131
MNFHPDTFLGEGGFGRVYKGRLDSTGQVVAVKQLDRNGLQGNREFLVEVLMLSLLHHPNLVNLIGYCADGDQRLLVYEFMPLGSLEDHLHDLPPDKEALDWNMRMKIAAGAAKGLEFLHDKANPPVIYRDFKSSNILLDEGFHPKLSDFGLAKLGPTGDKSHVSTRVMGTYGYCAPEYAMTGQLTVKSDVYSFGVVFLELITGRKAIDSEMPHGEQNLVAWARPLFNDRRKFIKLADPRLKGRFPTRALYQALAVASMCIQEQAATRPLIADVVTALSYLANQAYDPSKDDSRRNRDERGARLITRNDDGGGSGSKFDLEGSEKEDSPRETARILNRDINRERAVAEAKMWGESLREKRRQSEQGTSESNSTG

SEQ ID NO: 79617 - protein, 323 aa, Arabidopsis thaliana
  peptide (1)..(323): Ceres Seq. ID no. 12652132
MLSLLHHPNLVNLIGYCADGDQRLLVYEFMPLGSLEDHLHDLPPDKEALDWNMRMKIAAGAAKGLEFLHDKANPPVIYRDFKSSNILLDEGFHPKLSDFGLAKLGPTGDKSHVSTRVMGTYGYCAPEYAMTGQLTVKSDVYSFGVVFLELITGRKAIDSEMPHGEQNLVAWARPLFNDRRKFIKLADPRLKGRFPTRALYQALAVASMCIQEQAATRPLIADVVTALSYLANQAYDPSKDDSRRNRDERGARLITRNDDGGGSGSKFDLEGSEKEDSPRETARILNRDINRERAVAEAKMWGESLREKRRQSEQGTSESNSTG

SEQ ID NO: 79618 - DNA, 921 bp, Arabidopsis thaliana
  misc_feature (1)..(921): Ceres Seq. ID no. 12652189
  misc_feature (1)..(921): Ortholog of  Ceres SEQ ID NO 13581804 as cited in SEQ ID NO 51424
  misc_feature (1)..(921): Ortholog of  Ceres SEQ ID NO 15169703 as cited in SEQ ID NO 59628
atgggtcgtggaaaaatcgagataaagaggatcgagaatgcgaatagcagacaagtcactttttccaagaggcgttctgggttacttaagaaagctcgtgagctctctgttctttgtgatgctgaagttgctgtcatcgtcttctctaagtctggcaagctcttcgagtactccagtactggaatgaagcaaacactttccagatacggtaatcaccagagttcttcagcttctaaagcagaggaggattgtgcagaggtggatattttaaaggatcaactttcaaagcttcaagagaaacatttacaactgcagggcaagggcttgaatcctctgacctttaaagagctgcaaagccttgagcagcaactatatcatgcattgattactgtcagagagcgaaaggaacgattgctgactaaccaacttgaagaatcacgcctcaaggaacaacgagcagagttggaaaacgagaccttgcgtagacaggttcaagaactgaggagctttctcccgtcgttcacccactatgttccatcctacatcaaatgctttgctatagatccaaagaacgctctcataaaccacgacagtaaatgcagcctccagaacaccgattcagacacaactttgcaattagggttgccgggagaggcacatgatagaaggacgaatgaaggagaaagagagagcccgtcaagcgattcagtgacaacaaacacgagcagcgaaactgcagaaagaggggatcagtctagtttagcaaattctccacctgaagccaaaagacaaaggttctctgtttagtcctagaaaagtatgggagaaggctactaatgtttcctctttagcaagtatccgattgttttaaaagtaattttagagggatacttgcaaaaagaagagaagattcagttatct

SEQ ID NO: 79619 - protein, 268 aa, Arabidopsis thaliana
  peptide (1)..(268): Ceres Seq. ID no. 12652190
MGRGKIEIKRIENANSRQVTFSKRRSGLLKKARELSVLCDAEVAVIVFSKSGKLFEYSSTGMKQTLSRYGNHQSSSASKAEEDCAEVDILKDQLSKLQEKHLQLQGKGLNPLTFKELQSLEQQLYHALITVRERKERLLTNQLEESRLKEQRAELENETLRRQVQELRSFLPSFTHYVPSYIKCFAIDPKNALINHDSKCSLQNTDSDTTLQLGLPGEAHDRRTNEGERESPSSDSVTTNTSSETAERGDQSSLANSPPEAKRQRFSV

SEQ ID NO: 79620 - protein, 207 aa, Arabidopsis thaliana
  peptide (1)..(207): Ceres Seq. ID no. 12652191
MKQTLSRYGNHQSSSASKAEEDCAEVDILKDQLSKLQEKHLQLQGKGLNPLTFKELQSLEQQLYHALITVRERKERLLTNQLEESRLKEQRAELENETLRRQVQELRSFLPSFTHYVPSYIKCFAIDPKNALINHDSKCSLQNTDSDTTLQLGLPGEAHDRRTNEGERESPSSDSVTTNTSSETAERGDQSSLANSPPEAKRQRFSV

SEQ ID NO: 79621 - DNA, 1107 bp, Arabidopsis thaliana
  misc_feature (1)..(1107): Ceres Seq. ID no. 12652195
  misc_feature (1)..(1107): Ortholog of  Ceres SEQ ID NO 15179482 as cited in SEQ ID NO 0
atggctcctcctccggcgaagatgcaagagatccaccaattcctctcctccgcactcacccagcgtggcccttccgctcttccatacgccgagaacaccaagtcgctaatccgtcaacacctcctcaacctaatctcttcctacacttccctcgaccccaaaacggcaacgtttacacacaacgatggccgatccgtgattctcctccaagccgacggtacaatcccgatgcctttccaaggcgtcagctacaacatccccgtcgtgatctggctcctcgaatcttaccctcagtatcctccttgcgtttacgtgaatcctacacgcgacatgatcatcaaacgacctcactctaatgtctctccttctggactcgtctctcttccttacctccaaaattggatttaccctagctccaatctcgtagatctcgcctctcatctcagcgccgccttctctcgtgatccgccgctttactctcagcgccgtcctcctccgcaaccgtctccttcgatcggatctggatactcgagacctcttcctcctcgccagacggatgatgcggcagaggtatataagaagaacgctatcaacaggattgttgagatggttcatggtgatattgtattgatgaggagtgctagagaagtggagacggaaggattactgagtttacaatctgatcttaagagaagagaagaggagatcaacaatggttttaaggagatggtgattgagaaagagaccttagagcagcaactacaggttattgctatgaatactgatgttcttggctcttggattagggagaatcaagggaaagccaaggatttgctagtggatttggatgttgatgattcatttgaatgcattgactcattgtctaagcagatgttagagtgtactgcattggatttagctattgaagatgttgtttattccatggataaatcgtttagagatggttcgttaccgtttgatcagtatttgaggaatgtgaggttgttgtcgagggagcagttcttccaccgagccacggctgagaaagttagggagatacagatggatgctcaggttgcttccattgcagctaggttgcattcgtga

SEQ ID NO: 79622 - protein, 368 aa, Arabidopsis thaliana
  peptide (1)..(368): Ceres Seq. ID no. 12652196
MAPPPAKMQEIHQFLSSALTQRGPSALPYAENTKSLIRQHLLNLISSYTSLDPKTATFTHNDGRSVILLQADGTIPMPFQGVSYNIPVVIWLLESYPQYPPCVYVNPTRDMIIKRPHSNVSPSGLVSLPYLQNWIYPSSNLVDLASHLSAAFSRDPPLYSQRRPPPQPSPSIGSGYSRPLPPRQTDDAAEVYKKNAINRIVEMVHGDIVLMRSAREVETEGLLSLQSDLKRREEEINNGFKEMVIEKETLEQQLQVIAMNTDVLGSWIRENQGKAKDLLVDLDVDDSFECIDSLSKQMLECTALDLAIEDVVYSMDKSFRDGSLPFDQYLRNVRLLSREQFFHRATAEKVREIQMDAQVASIAARLHS

SEQ ID NO: 79623 - protein, 361 aa, Arabidopsis thaliana
  peptide (1)..(361): Ceres Seq. ID no. 12652197
MQEIHQFLSSALTQRGPSALPYAENTKSLIRQHLLNLISSYTSLDPKTATFTHNDGRSVILLQADGTIPMPFQGVSYNIPVVIWLLESYPQYPPCVYVNPTRDMIIKRPHSNVSPSGLVSLPYLQNWIYPSSNLVDLASHLSAAFSRDPPLYSQRRPPPQPSPSIGSGYSRPLPPRQTDDAAEVYKKNAINRIVEMVHGDIVLMRSAREVETEGLLSLQSDLKRREEEINNGFKEMVIEKETLEQQLQVIAMNTDVLGSWIRENQGKAKDLLVDLDVDDSFECIDSLSKQMLECTALDLAIEDVVYSMDKSFRDGSLPFDQYLRNVRLLSREQFFHRATAEKVREIQMDAQVASIAARLHS

SEQ ID NO: 79624 - protein, 292 aa, Arabidopsis thaliana
  peptide (1)..(292): Ceres Seq. ID no. 12652198
MPFQGVSYNIPVVIWLLESYPQYPPCVYVNPTRDMIIKRPHSNVSPSGLVSLPYLQNWIYPSSNLVDLASHLSAAFSRDPPLYSQRRPPPQPSPSIGSGYSRPLPPRQTDDAAEVYKKNAINRIVEMVHGDIVLMRSAREVETEGLLSLQSDLKRREEEINNGFKEMVIEKETLEQQLQVIAMNTDVLGSWIRENQGKAKDLLVDLDVDDSFECIDSLSKQMLECTALDLAIEDVVYSMDKSFRDGSLPFDQYLRNVRLLSREQFFHRATAEKVREIQMDAQVASIAARLHS

SEQ ID NO: 79625 - DNA, 1365 bp, Arabidopsis thaliana
  misc_feature (1)..(1365): Ceres Seq. ID no. 12652219
  misc_feature (1)..(1365): Ortholog of  Ceres SEQ ID NO 14313811 as cited in SEQ ID NO 54578
aatggatgagagtttcagagtgaggatagacaaggtttttggatctcttgcatcatcttctacgtcttcagcacctgtgagctctctctggtgtctcgcggaagacgagatcgatggaaaccaacggagcggagaaaaggaactttctgaatcattgaacagcttctcggataatggaaagcaggagcatgaatcagatgatttgagcatagatgaggaaaaaggaaggtctagtgaattgcagaagccgagtgattacgatgacgaagagtgggagatcaaaaactcaattgggatggactctactcttgatatggaggaagagctagatgataatgacaaagtggcattaggtgaaaaagtgtactgttgcatgaaggatgtgaatgacgactatgagactgaagcagacgagtgggtggagcttccagcttctttcaatgaaagagagaaggaccctcgagctaatctcatagcagcaaagcttaggcttaaagaggacgcagaagctgttaacaagttgaattctttacatgtctctgaggaacttcaggataatctgtccatgtcgacggaaaacgagaaaccttttgtggtgtctgaagataacttgctgggggctttcaaggagtcacatgttggctcttcagatgagaatgggctgaaaccgatattgaagaggagagaaaaccaggctgatgattctaagtcgccaaagcgtgttaggtttagttctgatgtcaaagataggaccttgactgaaggtgacaacgattctgtgatggaggcaagttcccctaacgaagataaagtagaggcagtctatccgactgggattccagattatatgcggaacccatcaaaatacactcgatatacattcgagtcaggtgaggttgatgaagaatccaacaggaaagcatacatggactttctcaacatgattaggagcaaagacgagtcccttgtagaccctctgatggagcttccaagatcagtggctttcgtaccaaagagaaaaccaatggctgagagtaaagtagaaaatatagacaaggattgtgagggaagaagagttgcaatagctgttgatactatagaagactgcaccatttctgctatggaagaagatgaaccagaaacagctcaacatgtcacaaaaagacctggccgacagtatcgtgccagagccaaggaagatccagaggaatgttgaagatcatcaaccttagcttgctgatttgttacgttttctttatgtttcttgaatgtggtatttgataggtatttgatgattaagaaatcaaatttgttttgacaaacgatatgctacgtctactgtatctaatatctatcataagccag

SEQ ID NO: 79626 - protein, 404 aa, Arabidopsis thaliana
  peptide (1)..(404): Ceres Seq. ID no. 12652220
MDESFRVRIDKVFGSLASSSTSSAPVSSLWCLAEDEIDGNQRSGEKELSESLNSFSDNGKQEHESDDLSIDEEKGRSSELQKPSDYDDEEWEIKNSIGMDSTLDMEEELDDNDKVALGEKVYCCMKDVNDDYETEADEWVELPASFNEREKDPRANLIAAKLRLKEDAEAVNKLNSLHVSEELQDNLSMSTENEKPFVVSEDNLLGAFKESHVGSSDENGLKPILKRRENQADDSKSPKRVRFSSDVKDRTLTEGDNDSVMEASSPNEDKVEAVYPTGIPDYMRNPSKYTRYTFESGEVDEESNRKAYMDFLNMIRSKDESLVDPLMELPRSVAFVPKRKPMAESKVENIDKDCEGRRVAIAVDTIEDCTISAMEEDEPETAQHVTKRPGRQYRARAKEDPEEC

SEQ ID NO: 79627 - protein, 306 aa, Arabidopsis thaliana
  peptide (1)..(306): Ceres Seq. ID no. 12652221
MDSTLDMEEELDDNDKVALGEKVYCCMKDVNDDYETEADEWVELPASFNEREKDPRANLIAAKLRLKEDAEAVNKLNSLHVSEELQDNLSMSTENEKPFVVSEDNLLGAFKESHVGSSDENGLKPILKRRENQADDSKSPKRVRFSSDVKDRTLTEGDNDSVMEASSPNEDKVEAVYPTGIPDYMRNPSKYTRYTFESGEVDEESNRKAYMDFLNMIRSKDESLVDPLMELPRSVAFVPKRKPMAESKVENIDKDCEGRRVAIAVDTIEDCTISAMEEDEPETAQHVTKRPGRQYRARAKEDPEEC

SEQ ID NO: 79628 - protein, 300 aa, Arabidopsis thaliana
  peptide (1)..(300): Ceres Seq. ID no. 12652222
MEEELDDNDKVALGEKVYCCMKDVNDDYETEADEWVELPASFNEREKDPRANLIAAKLRLKEDAEAVNKLNSLHVSEELQDNLSMSTENEKPFVVSEDNLLGAFKESHVGSSDENGLKPILKRRENQADDSKSPKRVRFSSDVKDRTLTEGDNDSVMEASSPNEDKVEAVYPTGIPDYMRNPSKYTRYTFESGEVDEESNRKAYMDFLNMIRSKDESLVDPLMELPRSVAFVPKRKPMAESKVENIDKDCEGRRVAIAVDTIEDCTISAMEEDEPETAQHVTKRPGRQYRARAKEDPEEC

SEQ ID NO: 79629 - DNA, 2691 bp, Arabidopsis thaliana
  misc_feature (1)..(2691): Ceres Seq. ID no. 12652251
  misc_feature (1)..(2691): Ortholog of  Ceres SEQ ID NO 14307030 as cited in SEQ ID NO 54041
  misc_feature (1)..(2691): Ortholog of  Ceres SEQ ID NO 14302891 as cited in SEQ ID NO 66282
acttatctctctctctttttctcatcggcctttgccatggcagatataatcggcggcgaagttgtgacggagctcgtgaggcagctctatgcggtttctcaaaaaaccctcagatgcagaggcatcgccaaaaatctcgccaccatgatcgatggtcttcaaccaacgatcaaggagatccaatacagcggcgtcgagctcacacctcatcgccaggctcagttgcgtatgttctcggaaaccttagacaagtgtaggaagctcaccgagaaagttcttaaatccagccgttggaacatggttagacagctactccatgttaggaaaatggagaatcttcagagtaaagtgtctagctttctcaacggtcaattgttagtccatgttctcgctgatgttcatcatgttcgagccgattctgaattccggttcgatcggattgataggaaggttgatagtttgaatgagaagcttggttctatgaaactcaggggaagtgaatcgttgcgtgaggcgttgaagacggccgaggctaccgttgagatggtgacaaccgatggtgctgatttgggggtgggattggatttgggaaagaggaaggtgaaggagatgttgtttaaatccattgatggggaaagacttattggtatctctgggatgagtggttcagggaaaaccactcttgccaaagagcttgcccgggacgaggaggttcgaggccactttgggaacaaggttttgtttctgactgtgtcacaatctcccaatcttgaggagcttagagcccatatatggggatttcttactagttatgaggctggggttggtgctactcttccagaatcgaggaagctagtgatccttgatgatgtttggacaagggaatctctggaccagctgatgttcgaaaatattcctggaaccacaactcttgtggtctcacggtctaaactcgcagattctagagtcacttatgatgtagagttactcaatgaacatgaagcaacggccctgttctgtctctctgttttcaatcagaaattagtgccttcagggttcagccaaagtttggtcaagcaggttgttggggagtgtaaaggtctacctttgtctctgaaagtcattggtgcttcattgaaagaacgacctgaaaaatattgggaaggtgcagtggagaggctatcaagaggtgaacctgctgatgaaactcatgagagtagagtgtttgctcaaatcgaagcaactctagaaaatcttgaccctaaaaccagagattgtttcttggttctcggtgctttccctgaagataagaagatccctcttgatgttctcatcaacgtgttggttgagttgcatgatctcgaggatgcaactgcttttgctgttattgttgatttagcaaacaggaatctccttactcttgtgaaagatccaaggtttggacatatgtacactagctactatgatatatttgtcacgcagcatgatgttctaagagatgtagcacttcgtcttagcaatcatgggaaagtaaataacagagagcggttattgatgccaaaaagagagtcaatgcttccgagagaatgggagaggaacaatgatgagccatacaaagccagagtagtttccattcacacaggagaaatgactcagatggattggtttgacatggaactccctaaggctgaagttttgatactacacttctcttctgacaagtatgtattgcctcctttcattgctaagatgggcaagcttacagcgctcgtgatcatcaacaatggtatgtctcctgcgcgtctacatgacttctccatctttaccaatttggccaaactcaagagtctctggcttcagagggttcatgtccctgaactctctagcagtacagtgcccttgcaaaacctccacaagctgtctctcatattctgcaagatcaacactagtcttgatcagacagagctagacattgcccaaatcttcccaaaattgtctgatcttacaatagatcattgtgatgatcttctggaactaccttcgaccatctgtggaatcacctctctcaattccatcagcataacaaattgtccccgcatcaaggaattgcctaagaatctgagtaagctaaaagcccttcagcttctgaggctatacgcttgccatgagctgaattctctgcctgtggaaatctgtgaactgccaagactaaagtatgttgacatttctcaatgtgtcagcctgagttctcttccggaaaagataggaaaggtaaagacacttgagaaaatcgacacgagggaatgcagcttatcgagcataccaaactctgtggttttattgacttctctacgccatgtaatatgcgatagagaggctttatggatgtgggaaaaggtccagaaggcggttgcaggacttcgtgttgaagctgcggaaaaatctttcagcagggattggctcgacgattaggttcgtgattctctccctccgagcccttagaagcatgttgtataaaatacttaattgctaatctgtagcaaagtcttgtataatattatattttatgagcacactcaagagtcaagagtcagtgcaaacttcgttcttgctctttctccagaaatttatctaactataaaatttccattcaagaatcagatttatgttagtatcattccagattccttt

SEQ ID NO: 79630 - protein, 823 aa, Arabidopsis thaliana
  peptide (1)..(823): Ceres Seq. ID no. 12652252
TYLSLFFSSAFAMADIIGGEVVTELVRQLYAVSQKTLRCRGIAKNLATMIDGLQPTIKEIQYSGVELTPHRQAQLRMFSETLDKCRKLTEKVLKSSRWNMVRQLLHVRKMENLQSKVSSFLNGQLLVHVLADVHHVRADSEFRFDRIDRKVDSLNEKLGSMKLRGSESLREALKTAEATVEMVTTDGADLGVGLDLGKRKVKEMLFKSIDGERLIGISGMSGSGKTTLAKELARDEEVRGHFGNKVLFLTVSQSPNLEELRAHIWGFLTSYEAGVGATLPESRKLVILDDVWTRESLDQLMFENIPGTTTLVVSRSKLADSRVTYDVELLNEHEATALFCLSVFNQKLVPSGFSQSLVKQVVGECKGLPLSLKVIGASLKERPEKYWEGAVERLSRGEPADETHESRVFAQIEATLENLDPKTRDCFLVLGAFPEDKKIPLDVLINVLVELHDLEDATAFAVIVDLANRNLLTLVKDPRFGHMYTSYYDIFVTQHDVLRDVALRLSNHGKVNNRERLLMPKRESMLPREWERNNDEPYKARVVSIHTGEMTQMDWFDMELPKAEVLILHFSSDKYVLPPFIAKMGKLTALVIINNGMSPARLHDFSIFTNLAKLKSLWLQRVHVPELSSSTVPLQNLHKLSLIFCKINTSLDQTELDIAQIFPKLSDLTIDHCDDLLELPSTICGITSLNSISITNCPRIKELPKNLSKLKALQLLRLYACHELNSLPVEICELPRLKYVDISQCVSLSSLPEKIGKVKTLEKIDTRECSLSSIPNSVVLLTSLRHVICDREALWMWEKVQKAVAGLRVEAAEKSFSRDWLDD

SEQ ID NO: 79631 - protein, 811 aa, Arabidopsis thaliana
  peptide (1)..(811): Ceres Seq. ID no. 12652253
MADIIGGEVVTELVRQLYAVSQKTLRCRGIAKNLATMIDGLQPTIKEIQYSGVELTPHRQAQLRMFSETLDKCRKLTEKVLKSSRWNMVRQLLHVRKMENLQSKVSSFLNGQLLVHVLADVHHVRADSEFRFDRIDRKVDSLNEKLGSMKLRGSESLREALKTAEATVEMVTTDGADLGVGLDLGKRKVKEMLFKSIDGERLIGISGMSGSGKTTLAKELARDEEVRGHFGNKVLFLTVSQSPNLEELRAHIWGFLTSYEAGVGATLPESRKLVILDDVWTRESLDQLMFENIPGTTTLVVSRSKLADSRVTYDVELLNEHEATALFCLSVFNQKLVPSGFSQSLVKQVVGECKGLPLSLKVIGASLKERPEKYWEGAVERLSRGEPADETHESRVFAQIEATLENLDPKTRDCFLVLGAFPEDKKIPLDVLINVLVELHDLEDATAFAVIVDLANRNLLTLVKDPRFGHMYTSYYDIFVTQHDVLRDVALRLSNHGKVNNRERLLMPKRESMLPREWERNNDEPYKARVVSIHTGEMTQMDWFDMELPKAEVLILHFSSDKYVLPPFIAKMGKLTALVIINNGMSPARLHDFSIFTNLAKLKSLWLQRVHVPELSSSTVPLQNLHKLSLIFCKINTSLDQTELDIAQIFPKLSDLTIDHCDDLLELPSTICGITSLNSISITNCPRIKELPKNLSKLKALQLLRLYACHELNSLPVEICELPRLKYVDISQCVSLSSLPEKIGKVKTLEKIDTRECSLSSIPNSVVLLTSLRHVICDREALWMWEKVQKAVAGLRVEAAEKSFSRDWLDD

SEQ ID NO: 79632 - protein, 775 aa, Arabidopsis thaliana
  peptide (1)..(775): Ceres Seq. ID no. 12652254
MIDGLQPTIKEIQYSGVELTPHRQAQLRMFSETLDKCRKLTEKVLKSSRWNMVRQLLHVRKMENLQSKVSSFLNGQLLVHVLADVHHVRADSEFRFDRIDRKVDSLNEKLGSMKLRGSESLREALKTAEATVEMVTTDGADLGVGLDLGKRKVKEMLFKSIDGERLIGISGMSGSGKTTLAKELARDEEVRGHFGNKVLFLTVSQSPNLEELRAHIWGFLTSYEAGVGATLPESRKLVILDDVWTRESLDQLMFENIPGTTTLVVSRSKLADSRVTYDVELLNEHEATALFCLSVFNQKLVPSGFSQSLVKQVVGECKGLPLSLKVIGASLKERPEKYWEGAVERLSRGEPADETHESRVFAQIEATLENLDPKTRDCFLVLGAFPEDKKIPLDVLINVLVELHDLEDATAFAVIVDLANRNLLTLVKDPRFGHMYTSYYDIFVTQHDVLRDVALRLSNHGKVNNRERLLMPKRESMLPREWERNNDEPYKARVVSIHTGEMTQMDWFDMELPKAEVLILHFSSDKYVLPPFIAKMGKLTALVIINNGMSPARLHDFSIFTNLAKLKSLWLQRVHVPELSSSTVPLQNLHKLSLIFCKINTSLDQTELDIAQIFPKLSDLTIDHCDDLLELPSTICGITSLNSISITNCPRIKELPKNLSKLKALQLLRLYACHELNSLPVEICELPRLKYVDISQCVSLSSLPEKIGKVKTLEKIDTRECSLSSIPNSVVLLTSLRHVICDREALWMWEKVQKAVAGLRVEAAEKSFSRDWLDD

SEQ ID NO: 79633 - DNA, 1154 bp, Arabidopsis thaliana
  misc_feature (1)..(1154): Ceres Seq. ID no. 12652294
  misc_feature (1)..(1154): Ortholog of  Ceres SEQ ID NO 14302306 as cited in SEQ ID NO 62834
  misc_feature (1)..(1154): Ortholog of  Ceres SEQ ID NO 14303305 as cited in SEQ ID NO 0
gaaataacctcatagtgtcgatatggcttgccaaaacaatctcgttgtgaagcaaatcatcgacttgtacgaccaaatctcaaagctcaagagcttaaaaccttccaaaaatgtcgacactttgttcggacaactcgtgtccacgtgcttacccacggatacaaacatcgatgtcacaaatatgtgtgaagaagtcaaagacatgagagctaatctcatcaagctttgtggtgaagccgaaggttatttagagcaacacttctccacaattttgggatctttacaagaagaccaaaacccacttgaccatttacacatctttccttactactccaactacctcaagctaggcaagctcgagttcgatctcctgagccaacactcaagccatgtccccaccaagattgccttcgtgggttcgggtccgatgcctctcacatccatcgtattggccaagtttcacctccccaacacgacgttccacaactttgacatcgactcacacgcaaacacactcgcttcaaacctcgtctctcgcgacccggacctctcaaaacgcatgatcttccacacaacggacgtactaaacgcaaccgaaggccttgaccaatatgacgtcgttttcttagcggcgcttgtagggatggacaaagagtcaaaggtcaaagccatcgagcacttggagaaacacatggctcctggagctgttcttatgctaaggagtgctcatgctctcagagctttcttatatccaatcgttgactcgtctgatctcaaaggctttcaactcttgaccatctatcatccaaccgatgacgtggttaactcggttgtgatcgcacgtaagctcggtggtccgaccacgcccggggttaatggtactcgtggatgcatgtttatgccttgtaactgctccaagattcacgcgatcatgaacaaccgtggtaagaagaatatgatcgaggagtttagtgccatcgagtaaacaaacaattaataaaacacatctcttttcttaagattgtgttaatgtttttgtcttatattaactgctcttttcatttcatgtcttgtgtgtgtgtggctacgcttattaagtgttaagtttgtgaattttgagttctttgatctttgttatgaatgaaaaagatacc

SEQ ID NO: 79634 - protein, 320 aa, Arabidopsis thaliana
  peptide (1)..(320): Ceres Seq. ID no. 12652295
MACQNNLVVKQIIDLYDQISKLKSLKPSKNVDTLFGQLVSTCLPTDTNIDVTNMCEEVKDMRANLIKLCGEAEGYLEQHFSTILGSLQEDQNPLDHLHIFPYYSNYLKLGKLEFDLLSQHSSHVPTKIAFVGSGPMPLTSIVLAKFHLPNTTFHNFDIDSHANTLASNLVSRDPDLSKRMIFHTTDVLNATEGLDQYDVVFLAALVGMDKESKVKAIEHLEKHMAPGAVLMLRSAHALRAFLYPIVDSSDLKGFQLLTIYHPTDDVVNSVVIARKLGGPTTPGVNGTRGCMFMPCNCSKIHAIMNNRGKKNMIEEFSAIE

SEQ ID NO: 79635 - protein, 267 aa, Arabidopsis thaliana
  peptide (1)..(267): Ceres Seq. ID no. 12652296
MCEEVKDMRANLIKLCGEAEGYLEQHFSTILGSLQEDQNPLDHLHIFPYYSNYLKLGKLEFDLLSQHSSHVPTKIAFVGSGPMPLTSIVLAKFHLPNTTFHNFDIDSHANTLASNLVSRDPDLSKRMIFHTTDVLNATEGLDQYDVVFLAALVGMDKESKVKAIEHLEKHMAPGAVLMLRSAHALRAFLYPIVDSSDLKGFQLLTIYHPTDDVVNSVVIARKLGGPTTPGVNGTRGCMFMPCNCSKIHAIMNNRGKKNMIEEFSAIE

SEQ ID NO: 79636 - protein, 260 aa, Arabidopsis thaliana
  peptide (1)..(260): Ceres Seq. ID no. 12652297
MRANLIKLCGEAEGYLEQHFSTILGSLQEDQNPLDHLHIFPYYSNYLKLGKLEFDLLSQHSSHVPTKIAFVGSGPMPLTSIVLAKFHLPNTTFHNFDIDSHANTLASNLVSRDPDLSKRMIFHTTDVLNATEGLDQYDVVFLAALVGMDKESKVKAIEHLEKHMAPGAVLMLRSAHALRAFLYPIVDSSDLKGFQLLTIYHPTDDVVNSVVIARKLGGPTTPGVNGTRGCMFMPCNCSKIHAIMNNRGKKNMIEEFSAIE

SEQ ID NO: 79637 - DNA, 1572 bp, Arabidopsis thaliana
  misc_feature (1)..(1572): Ceres Seq. ID no. 12652339
  misc_feature (1)..(1572): Ortholog of  Ceres SEQ ID NO 13585332 as cited in SEQ ID NO 60654
  misc_feature (1)..(1572): Ortholog of  Ceres SEQ ID NO 13502874 as cited in SEQ ID NO 66298
  misc_feature (1)..(1572): Ortholog of  Ceres SEQ ID NO 12614124 as cited in SEQ ID NO 68392
atgctcgcgtttattataggtttgcttcttcttgcattaactatgaagcgtaaggagaagaagaaaaccatgttaattagccctacgagaaacctctctctccctcccgggccgaaatcttggcctttaatcggaaacctaccggaaatactagggaggaacaaaccggtgttccggtggatacattctctcatgaaagaactcaacaccgatattgcatgtatccgtcttgcgaatactcacgtgatccccgtgacatccccgagaattgcaagagagattctgaagaagcaagactccgttttcgccactagaccgctaacgatgggcacggagtactgcagccgcgggtacttgaccgttgcggtggagccacaaggagagcagtggaagaagatgaggagagtggtggcatctcacgtgacgagcaagaagagcttccaaatgatgctacaaaagagaaccgaagaggctgataacttagtccggtacatcaataaccgtagtgtcaaaaaccgtggtaatgcttttgtggttattgatttaaggcttgcggtacggcaatacagtggaaatgtagctcggaagatgatgtttggtataaggcattttggtaaaggaagtgaagatggatcgggaccagggttggaagagattgaacatgtggaatctttgtttacggttttaacccatctttacgcctttgcattgtcagattatgtcccgtggctaaggttcttggacttggaaggccatgagaaggttgtgagtaacgcaatgagaaatgtaagtaagtataacgacccttttgttgatgaaagactcatgcaatggcgaaatgggaagatgaaagaacctcaagattttcttgacatgtttataatagctaaagacactgacgggaagcctactctgtcggacgaagagatcaaagcacaagtgacggaactaatgttggcgacggttgataatccgtctaacgcggcagagtggggtatggcggagatgattaacgagccgagcatcatgcaaaaagccgtggaagagattgatagggtagttggaaaagaccgtcttgtcattgagtctgatctcccaaatcttaactatgtgaaggcttgtgtgaaagaagcattccggttacaccccgtggcaccgttcaacctccctcacatgtccaccactgatactgtggtagacggttatttcatccccaagggaagccacgtattgattagtcgtatggggattgggagaaatcctagtgtgtgggacaagccgcataagttcgaccctgagagacatttgagcactaacacatgtgtggatctaaacgagtctgatctgaatataatatcgttcagtgcaggacgaagaggttgtatgggtgtggacattgggtcagccatgacgtacatgttactggctcggttgattcaaggattcacgtggttaccagtgcctggtaagaataagattgatatttcagaaagcaagaatgatctttttatggcaaaaccattatacgcggttgccacacctcgtttagctccacatgtgtatccaacctaa

SEQ ID NO: 79638 - protein, 523 aa, Arabidopsis thaliana
  peptide (1)..(523): Ceres Seq. ID no. 12652340
MLAFIIGLLLLALTMKRKEKKKTMLISPTRNLSLPPGPKSWPLIGNLPEILGRNKPVFRWIHSLMKELNTDIACIRLANTHVIPVTSPRIAREILKKQDSVFATRPLTMGTEYCSRGYLTVAVEPQGEQWKKMRRVVASHVTSKKSFQMMLQKRTEEADNLVRYINNRSVKNRGNAFVVIDLRLAVRQYSGNVARKMMFGIRHFGKGSEDGSGPGLEEIEHVESLFTVLTHLYAFALSDYVPWLRFLDLEGHEKVVSNAMRNVSKYNDPFVDERLMQWRNGKMKEPQDFLDMFIIAKDTDGKPTLSDEEIKAQVTELMLATVDNPSNAAEWGMAEMINEPSIMQKAVEEIDRVVGKDRLVIESDLPNLNYVKACVKEAFRLHPVAPFNLPHMSTTDTVVDGYFIPKGSHVLISRMGIGRNPSVWDKPHKFDPERHLSTNTCVDLNESDLNIISFSAGRRGCMGVDIGSAMTYMLLARLIQGFTWLPVPGKNKIDISESKNDLFMAKPLYAVATPRLAPHVYPT

SEQ ID NO: 79639 - protein, 509 aa, Arabidopsis thaliana
  peptide (1)..(509): Ceres Seq. ID no. 12652341
MKRKEKKKTMLISPTRNLSLPPGPKSWPLIGNLPEILGRNKPVFRWIHSLMKELNTDIACIRLANTHVIPVTSPRIAREILKKQDSVFATRPLTMGTEYCSRGYLTVAVEPQGEQWKKMRRVVASHVTSKKSFQMMLQKRTEEADNLVRYINNRSVKNRGNAFVVIDLRLAVRQYSGNVARKMMFGIRHFGKGSEDGSGPGLEEIEHVESLFTVLTHLYAFALSDYVPWLRFLDLEGHEKVVSNAMRNVSKYNDPFVDERLMQWRNGKMKEPQDFLDMFIIAKDTDGKPTLSDEEIKAQVTELMLATVDNPSNAAEWGMAEMINEPSIMQKAVEEIDRVVGKDRLVIESDLPNLNYVKACVKEAFRLHPVAPFNLPHMSTTDTVVDGYFIPKGSHVLISRMGIGRNPSVWDKPHKFDPERHLSTNTCVDLNESDLNIISFSAGRRGCMGVDIGSAMTYMLLARLIQGFTWLPVPGKNKIDISESKNDLFMAKPLYAVATPRLAPHVYPT

SEQ ID NO: 79640 - protein, 500 aa, Arabidopsis thaliana
  peptide (1)..(500): Ceres Seq. ID no. 12652342
MLISPTRNLSLPPGPKSWPLIGNLPEILGRNKPVFRWIHSLMKELNTDIACIRLANTHVIPVTSPRIAREILKKQDSVFATRPLTMGTEYCSRGYLTVAVEPQGEQWKKMRRVVASHVTSKKSFQMMLQKRTEEADNLVRYINNRSVKNRGNAFVVIDLRLAVRQYSGNVARKMMFGIRHFGKGSEDGSGPGLEEIEHVESLFTVLTHLYAFALSDYVPWLRFLDLEGHEKVVSNAMRNVSKYNDPFVDERLMQWRNGKMKEPQDFLDMFIIAKDTDGKPTLSDEEIKAQVTELMLATVDNPSNAAEWGMAEMINEPSIMQKAVEEIDRVVGKDRLVIESDLPNLNYVKACVKEAFRLHPVAPFNLPHMSTTDTVVDGYFIPKGSHVLISRMGIGRNPSVWDKPHKFDPERHLSTNTCVDLNESDLNIISFSAGRRGCMGVDIGSAMTYMLLARLIQGFTWLPVPGKNKIDISESKNDLFMAKPLYAVATPRLAPHVYPT

SEQ ID NO: 79641 - DNA, 976 bp, Arabidopsis thaliana
  misc_feature (1)..(976): Ceres Seq. ID no. 12652347
  misc_feature (1)..(976): Ortholog of  Ceres SEQ ID NO 13596519 as cited in SEQ ID NO 62572
  misc_feature (1)..(976): Ortholog of  Ceres SEQ ID NO 12625108 as cited in SEQ ID NO 68102
actactcatccccttttccacttcttacttcctcctctttagcccatcagcaaatatcatgaatcttacagaatattcccatattttgtttctttcactatgcaccctcaacttctgcttgtactccataaactccgacgacaacggaggctgggagagaggccatgctaccttctatggtggagctgatgcatccggcacaatgggtggtgcttgtgggtacggtaacttacacagccaaggctatgggctacaaaccgcggctttgagcacggctttgttcaatagtgggcagaaatgtggggcctgctttgagctacagtgtgaggatgatcctgagtggtgcatccctggttccatcatcgtctcggctacaaacttctgtcctccaaactttgccttagctaatgataatggtggttggtgcaatcctcctcttaagcactttgacttggccgagcctgccttcctccagatcgctcagtaccgagctgggatcgttcctgtcgcattcagaagggttccatgtgagaaaggtggagggataaggtttacgataaacgggaatccatatttcgacctcgtgctaatcacgaatgtgggtggtgctggagatataagggccgtctctttgaaaggctcaaagacagatcagtggcaatccatgtcaagaaactggggacagaattggcaaagcaacacttacctcagaggtcaaagcctttctttccaagtcactgatagtgatggtcggactgttgtgagctacgatgttgtgcctcatgattggcagttcggtcagacttttgaaggcggacaattttagatttatgatcaagtgaaactaatagacgttatatccaagaaaagtcaatgattgtgtttaagataaaactctgcttttcattgatcataaccactcttcgatatataatagtcataagaaagaaatacaatgaaacaattaattttgttt

SEQ ID NO: 79642 - protein, 274 aa, Arabidopsis thaliana
  peptide (1)..(274): Ceres Seq. ID no. 12652348
LLIPFSTSYFLLFSPSANIMNLTEYSHILFLSLCTLNFCLYSINSDDNGGWERGHATFYGGADASGTMGGACGYGNLHSQGYGLQTAALSTALFNSGQKCGACFELQCEDDPEWCIPGSIIVSATNFCPPNFALANDNGGWCNPPLKHFDLAEPAFLQIAQYRAGIVPVAFRRVPCEKGGGIRFTINGNPYFDLVLITNVGGAGDIRAVSLKGSKTDQWQSMSRNWGQNWQSNTYLRGQSLSFQVTDSDGRTVVSYDVVPHDWQFGQTFEGGQF

SEQ ID NO: 79643 - protein, 255 aa, Arabidopsis thaliana
  peptide (1)..(255): Ceres Seq. ID no. 12652349
MNLTEYSHILFLSLCTLNFCLYSINSDDNGGWERGHATFYGGADASGTMGGACGYGNLHSQGYGLQTAALSTALFNSGQKCGACFELQCEDDPEWCIPGSIIVSATNFCPPNFALANDNGGWCNPPLKHFDLAEPAFLQIAQYRAGIVPVAFRRVPCEKGGGIRFTINGNPYFDLVLITNVGGAGDIRAVSLKGSKTDQWQSMSRNWGQNWQSNTYLRGQSLSFQVTDSDGRTVVSYDVVPHDWQFGQTFEGGQF

SEQ ID NO: 79644 - protein, 207 aa, Arabidopsis thaliana
  peptide (1)..(207): Ceres Seq. ID no. 12652350
MGGACGYGNLHSQGYGLQTAALSTALFNSGQKCGACFELQCEDDPEWCIPGSIIVSATNFCPPNFALANDNGGWCNPPLKHFDLAEPAFLQIAQYRAGIVPVAFRRVPCEKGGGIRFTINGNPYFDLVLITNVGGAGDIRAVSLKGSKTDQWQSMSRNWGQNWQSNTYLRGQSLSFQVTDSDGRTVVSYDVVPHDWQFGQTFEGGQF

SEQ ID NO: 79645 - DNA, 1220 bp, Arabidopsis thaliana
  misc_feature (1)..(1220): Ceres Seq. ID no. 12652357
  misc_feature (1)..(1220): Ortholog of  Ceres SEQ ID NO 14310369 as cited in SEQ ID NO 54765
  misc_feature (1)..(1220): Ortholog of  Ceres SEQ ID NO 13639124 as cited in SEQ ID NO 56718
  misc_feature (1)..(1220): Ortholog of  Ceres SEQ ID NO 13638746 as cited in SEQ ID NO 59296
  misc_feature (1)..(1220): Ortholog of  Ceres SEQ ID NO 13596474 as cited in SEQ ID NO 62169
  misc_feature (1)..(1220): Ortholog of  Ceres SEQ ID NO 13598714 as cited in SEQ ID NO 62656
  misc_feature (1)..(1220): Ortholog of  Ceres SEQ ID NO 14302434 as cited in SEQ ID NO 63410
  misc_feature (1)..(1220): Ortholog of  Ceres SEQ ID NO 13597519 as cited in SEQ ID NO 64759
  misc_feature (1)..(1220): Ortholog of  Ceres SEQ ID NO 13587054 as cited in SEQ ID NO 0
aagtacaacaatcaactctaagtctattatattcaagtctttgttttaacctaacaatggcttcaaataaacttatttcgattctagttctcgtagttacacttttactccaaggtgataacaattacgtcgtcgaagcacaactcacgactaacttctactcaacctcttgccccaacctcctctccaccgtccaaaccgccgttaaatctgccgttaacagcgaggctcgaatgggtgcatctatcctccgtctcttcttccacgattgctttgtcaacggatgcgacggttcgattctactagacgatacgtcaagcttcacaggagaacaaaacgcggctccaaaccgcaattcagctcgtgggtttaatgtgatcgacaacatcaaatcagcggttgagaaagcatgtcccggggttgtgtcttgtgctgatatcttagccattgctgctagagactccgtcgtagcccttggaggaccgaactggaatgtgaaagtaggaagaagagatgcaagaacggcgagtcaagcggcagcgaatagtaacattccggcaccgacttcgagtctgagccaactcattagtagtttcagtgctgttggactctccaccagagatatggttgctctctctggcgcacacacgatcggacaatcccgttgcacgaacttccgagcgagaatctacaacgagacaaacatcaatgccgccttcgccacgacacgtcaacgaacttgccctagagcctccggttccggcgacggaaacctagctccactagacgtcaccacggcagcttctttcgacaacaactacttcaagaatctcatgactcagagagggctcctccattccgaccaagtgctcttcaacggcggctctactgactccatcgtccgtggatacagcaacaatccgtcgagctttaactctgacttcacggcggcgatgataaaaatgggtgatatcagcccgttgactggtagtagcggtgaaatccgcaaggtttgcgggaggaccaactgattcaagtctactccacgtgtctttttcctattggatttaccttttattatttgagttggtgagtataataaagattgatcttctccaaaaaaattcgaaggtccctttcaatgttttttttttgtttgctttgctttgtgttgaagtgtgtatttccgcattaaaaatctaatgaaaattattccattt

SEQ ID NO: 79646 - protein, 342 aa, Arabidopsis thaliana
  peptide (1)..(342): Ceres Seq. ID no. 12652358
VQQSTLSLLYSSLCFNLTMASNKLISILVLVVTLLLQGDNNYVVEAQLTTNFYSTSCPNLLSTVQTAVKSAVNSEARMGASILRLFFHDCFVNGCDGSILLDDTSSFTGEQNAAPNRNSARGFNVIDNIKSAVEKACPGVVSCADILAIAARDSVVALGGPNWNVKVGRRDARTASQAAANSNIPAPTSSLSQLISSFSAVGLSTRDMVALSGAHTIGQSRCTNFRARIYNETNINAAFATTRQRTCPRASGSGDGNLAPLDVTTAASFDNNYFKNLMTQRGLLHSDQVLFNGGSTDSIVRGYSNNPSSFNSDFTAAMIKMGDISPLTGSSGEIRKVCGRTN

SEQ ID NO: 79647 - protein, 324 aa, Arabidopsis thaliana
  peptide (1)..(324): Ceres Seq. ID no. 12652359
MASNKLISILVLVVTLLLQGDNNYVVEAQLTTNFYSTSCPNLLSTVQTAVKSAVNSEARMGASILRLFFHDCFVNGCDGSILLDDTSSFTGEQNAAPNRNSARGFNVIDNIKSAVEKACPGVVSCADILAIAARDSVVALGGPNWNVKVGRRDARTASQAAANSNIPAPTSSLSQLISSFSAVGLSTRDMVALSGAHTIGQSRCTNFRARIYNETNINAAFATTRQRTCPRASGSGDGNLAPLDVTTAASFDNNYFKNLMTQRGLLHSDQVLFNGGSTDSIVRGYSNNPSSFNSDFTAAMIKMGDISPLTGSSGEIRKVCGRTN

SEQ ID NO: 79648 - protein, 265 aa, Arabidopsis thaliana
  peptide (1)..(265): Ceres Seq. ID no. 12652360
MGASILRLFFHDCFVNGCDGSILLDDTSSFTGEQNAAPNRNSARGFNVIDNIKSAVEKACPGVVSCADILAIAARDSVVALGGPNWNVKVGRRDARTASQAAANSNIPAPTSSLSQLISSFSAVGLSTRDMVALSGAHTIGQSRCTNFRARIYNETNINAAFATTRQRTCPRASGSGDGNLAPLDVTTAASFDNNYFKNLMTQRGLLHSDQVLFNGGSTDSIVRGYSNNPSSFNSDFTAAMIKMGDISPLTGSSGEIRKVCGRTN

SEQ ID NO: 79649 - DNA, 1450 bp, Arabidopsis thaliana
  misc_feature (1)..(1450): Ceres Seq. ID no. 12652373
  misc_feature (1)..(1450): Ortholog of  Ceres SEQ ID NO 15175597 as cited in SEQ ID NO 58317
agatattttgatttctgctaaagctgtctgataaaaagaagaggaaaactcgaaaaagctacacacaagaagaagaagaaaagatacgagcaagaagactaaacacgaaagcgatttatcaactcgaaggaagagactttgattttcaaatttcgtcccctatagattgtgttgtttctgggaaggagatggcagtttatgatcagagtggagatagaaacagaacacaaattgatacatcgaggaaaaggaaatctagaagtagaggtgacggtactactgtggctgagagattaaagagatggaaagagtataacgagaccgtagaagaagtttctaccaagaagaggaaagtacctgcgaaagggtcgaagaagggttgtatgaaaggtaaaggaggaccagagaatagccgatgtagtttcagaggagttaggcaaaggatttggggtaaatgggttgctgagatcagagagcctaatcgaggtagcaggctttggcttggtactttccctactgctcaagaagctgcttctgcttatgatgaggctgctaaagctatgtatggtcctttggctcgtcttaatttccctcggtctgatgcgtctgaggttacgagtacctcaagtcagtctgaggtgtgtactgttgagactcctggttgtgttcatgtgaaaacagaggatccagattgtgaatctaaacccttctccggtggagtggagccgatgtattgtctggagaatggtgcggaagagatgaagagaggtgttaaagcggataagcattggctgagcgagtttgaacataactattggagtgatattctgaaagagaaagagaaacagaaggagcaagggattgtagaaacctgtcagcaacaacagcaggattcgctatctgttgcagactatggttggcccaatgatgtggatcagagtcacttggattcttcagacatgtttgatgtcgatgagcttctacgtgacctaaatggcgacgatgtgtttgcaggcttaaatcaggaccggtacccggggaacagtgttgccaacggttcatacaggcccgagagtcaacaaagtggttttgatccgctacaaagcctcaactacggaatacctccgtttcagctcgagggaaaggatggtaatggattcttcgacgacttgagttacttggatctggagaactaaacaaaacaatatgaagctttttggatttgatatttgccttaatcccacaacgactgttgattctctatccgagttttagtgatatagagaactacagaacacgttttttcttgttataaaggtgaactgtatatatcgaaacagtgatatgacaatagagaagacaactatagtttgttagtctgcttctcttaagttgttctttagatatgttttatgttttgtaacaacaggaatgaataatacacacttgt

SEQ ID NO: 79650 - protein, 335 aa, Arabidopsis thaliana
  peptide (1)..(335): Ceres Seq. ID no. 12652374
MAVYDQSGDRNRTQIDTSRKRKSRSRGDGTTVAERLKRWKEYNETVEEVSTKKRKVPAKGSKKGCMKGKGGPENSRCSFRGVRQRIWGKWVAEIREPNRGSRLWLGTFPTAQEAASAYDEAAKAMYGPLARLNFPRSDASEVTSTSSQSEVCTVETPGCVHVKTEDPDCESKPFSGGVEPMYCLENGAEEMKRGVKADKHWLSEFEHNYWSDILKEKEKQKEQGIVETCQQQQQDSLSVADYGWPNDVDQSHLDSSDMFDVDELLRDLNGDDVFAGLNQDRYPGNSVANGSYRPESQQSGFDPLQSLNYGIPPFQLEGKDGNGFFDDLSYLDLEN

SEQ ID NO: 79651 - protein, 270 aa, Arabidopsis thaliana
  peptide (1)..(270): Ceres Seq. ID no. 12652375
MKGKGGPENSRCSFRGVRQRIWGKWVAEIREPNRGSRLWLGTFPTAQEAASAYDEAAKAMYGPLARLNFPRSDASEVTSTSSQSEVCTVETPGCVHVKTEDPDCESKPFSGGVEPMYCLENGAEEMKRGVKADKHWLSEFEHNYWSDILKEKEKQKEQGIVETCQQQQQDSLSVADYGWPNDVDQSHLDSSDMFDVDELLRDLNGDDVFAGLNQDRYPGNSVANGSYRPESQQSGFDPLQSLNYGIPPFQLEGKDGNGFFDDLSYLDLEN

SEQ ID NO: 79652 - protein, 211 aa, Arabidopsis thaliana
  peptide (1)..(211): Ceres Seq. ID no. 12652376
MYGPLARLNFPRSDASEVTSTSSQSEVCTVETPGCVHVKTEDPDCESKPFSGGVEPMYCLENGAEEMKRGVKADKHWLSEFEHNYWSDILKEKEKQKEQGIVETCQQQQQDSLSVADYGWPNDVDQSHLDSSDMFDVDELLRDLNGDDVFAGLNQDRYPGNSVANGSYRPESQQSGFDPLQSLNYGIPPFQLEGKDGNGFFDDLSYLDLEN

SEQ ID NO: 79653 - DNA, 1641 bp, Arabidopsis thaliana
  misc_feature (1)..(1641): Ceres Seq. ID no. 12652414
  misc_feature (1)..(1641): Ortholog of  Ceres SEQ ID NO 13574398 as cited in SEQ ID NO 0
atggatggttcgtcggaaaatttgccagaagtggaagagaaaggtagagaaagcagttgctgcagctcggaaacaaccagacaagaggaggaagaacaaagccctagctgtacggaggatttcacggcttctccggtttcatctcgttggtctgtgaagaacatcgatggagagaagaagaagattcgttcggattcaagagtttcagaggttgagatgatgaaggaaagattttcgaaactgctgcttggagaagatatgtcaggttctggaaatggtgtctgtacagctttagctatctcaaacgcaatcactaatctttgtgctaccttgtttggacaactatggaggttagaaccactgcctacagagaagaaagagatgtggagaagagaaatggaatggcttctctgtgtcagtgatcacattgtagagatgactcctacttggcaaacatttcctgatggaaccaaacttgagataatgacttgcagaccaagatcagatctttatgttaacctcccagctctcaggaaactagataacatgcttcttgagatattagatagttttgaggagacagagttttggtatgttgaccaaggaatcatggcacacgaatcagcagcggacggatcatcttctttccgaaaatcttttcagagacaagaagacaaatggtggcttcctgttccacgggtttcaccaggaggtttacaagaaaactcaagaaaacagttgcagcataaacgcgactgtactaatcagatattaaaagctgctatggccatcaacagtatcacactcgctgacatggaaatccctgaatcataccttgaatctcttccgcggaaagggagatcttgccttggtgacttaatctacagatacatttcatcggatcaattttcacctgaatgtcttcttgattgccttgacttatcctctgaacatcaagccatagagatagctaaccgagtcgagtcatcgatctatctatggcacaaaagaactaattccaaaccagctactaataccaaaacgtcgtgggaaatggtgaaagaactaatggttgatgcagataagctagagctaatggcggatcgagctgaaagtttattgctttctttaaaacaacgattcccaggtcttcctcaaaccgctctagacatgagcaaaatccaatacaacaaggacatcgggaaatcgattctggaaagctattcaagagttctagagagcttagcattcaacattgttgcacgcatcgatgatttgctctttgttgatgatcttacaagacattcatcggatcagattcctacaacattaggcaacaacgggaatgacgctcctaagagcattgcagtgccggtttcaaactacacaactccgagctactcgccttcaaaacaggagcttcgatcatcaattacagttccaccatctccctcccggttcaagattcctcacagtagcagtgttaaaagggttttgacagcttatgtaacaaagaacgaaccaagactgaagaatcttcctttagaaagatcgagccgttcttcgtcgagtgagagattgtctctggagaaatgcatgaaggagtcgttgaatgtatcgaaccttgatcctgggatttga

SEQ ID NO: 79654 - protein, 546 aa, Arabidopsis thaliana
  peptide (1)..(546): Ceres Seq. ID no. 12652415
MDGSSENLPEVEEKGRESSCCSSETTRQEEEEQSPSCTEDFTASPVSSRWSVKNIDGEKKKIRSDSRVSEVEMMKERFSKLLLGEDMSGSGNGVCTALAISNAITNLCATLFGQLWRLEPLPTEKKEMWRREMEWLLCVSDHIVEMTPTWQTFPDGTKLEIMTCRPRSDLYVNLPALRKLDNMLLEILDSFEETEFWYVDQGIMAHESAADGSSSFRKSFQRQEDKWWLPVPRVSPGGLQENSRKQLQHKRDCTNQILKAAMAINSITLADMEIPESYLESLPRKGRSCLGDLIYRYISSDQFSPECLLDCLDLSSEHQAIEIANRVESSIYLWHKRTNSKPATNTKTSWEMVKELMVDADKLELMADRAESLLLSLKQRFPGLPQTALDMSKIQYNKDIGKSILESYSRVLESLAFNIVARIDDLLFVDDLTRHSSDQIPTTLGNNGNDAPKSIAVPVSNYTTPSYSPSKQELRSSITVPPSPSRFKIPHSSSVKRVLTAYVTKNEPRLKNLPLERSSRSSSSERLSLEKCMKESLNVSNLDPGI

SEQ ID NO: 79655 - protein, 474 aa, Arabidopsis thaliana
  peptide (1)..(474): Ceres Seq. ID no. 12652416
MMKERFSKLLLGEDMSGSGNGVCTALAISNAITNLCATLFGQLWRLEPLPTEKKEMWRREMEWLLCVSDHIVEMTPTWQTFPDGTKLEIMTCRPRSDLYVNLPALRKLDNMLLEILDSFEETEFWYVDQGIMAHESAADGSSSFRKSFQRQEDKWWLPVPRVSPGGLQENSRKQLQHKRDCTNQILKAAMAINSITLADMEIPESYLESLPRKGRSCLGDLIYRYISSDQFSPECLLDCLDLSSEHQAIEIANRVESSIYLWHKRTNSKPATNTKTSWEMVKELMVDADKLELMADRAESLLLSLKQRFPGLPQTALDMSKIQYNKDIGKSILESYSRVLESLAFNIVARIDDLLFVDDLTRHSSDQIPTTLGNNGNDAPKSIAVPVSNYTTPSYSPSKQELRSSITVPPSPSRFKIPHSSSVKRVLTAYVTKNEPRLKNLPLERSSRSSSSERLSLEKCMKESLNVSNLDPGI

SEQ ID NO: 79656 - protein, 473 aa, Arabidopsis thaliana
  peptide (1)..(473): Ceres Seq. ID no. 12652417
MKERFSKLLLGEDMSGSGNGVCTALAISNAITNLCATLFGQLWRLEPLPTEKKEMWRREMEWLLCVSDHIVEMTPTWQTFPDGTKLEIMTCRPRSDLYVNLPALRKLDNMLLEILDSFEETEFWYVDQGIMAHESAADGSSSFRKSFQRQEDKWWLPVPRVSPGGLQENSRKQLQHKRDCTNQILKAAMAINSITLADMEIPESYLESLPRKGRSCLGDLIYRYISSDQFSPECLLDCLDLSSEHQAIEIANRVESSIYLWHKRTNSKPATNTKTSWEMVKELMVDADKLELMADRAESLLLSLKQRFPGLPQTALDMSKIQYNKDIGKSILESYSRVLESLAFNIVARIDDLLFVDDLTRHSSDQIPTTLGNNGNDAPKSIAVPVSNYTTPSYSPSKQELRSSITVPPSPSRFKIPHSSSVKRVLTAYVTKNEPRLKNLPLERSSRSSSSERLSLEKCMKESLNVSNLDPGI

SEQ ID NO: 79657 - DNA, 1974 bp, Arabidopsis thaliana
  misc_feature (1)..(1974): Ceres Seq. ID no. 12652422
  misc_feature (1)..(1974): Ortholog of  Ceres SEQ ID NO 13654989 as cited in SEQ ID NO 63117
  misc_feature (1)..(1974): Ortholog of  Ceres SEQ ID NO 13584744 as cited in SEQ ID NO 69137
atggagaagaagcgatcatactacgccttattgatacctactctcttgaccgtatggctagcatgcgcgggtcattcttgtgcccgacatgctaaggcaaaacctcccatggccggaccaccacggtgtcctaactgcggacctatggttgtaccttatcctctaagcacgggtccaacctgcggggatcaagcctataggataaattgtgttggtggtaagctttatttcggtgccctccatgggtcatcttatgtcattacgtccatcaactcagtgacccagcggatcgttctacgcccgcctggtcttgctagctcagtatcctgtatctcagctgatgtctctaaacagggcctcgagctcgacccccatctccctttcagcatcactagtagcaacactatcttgctccttaattgctctcaggctatgctgcaggcgccaatagattgtagtcctaccagcttatgttacagctacatcaagaacaatgcatcaccttgttctaaggctcccttgtgttgcaccttcagaaccgacgggtctcaaaccgcttacacgatcaggatcaacggtgggggatgcctcgcgtaccaaagcttcgtggggctgaatccaaacaaagaggttcctcctcccgggaaaaaatggcctgacacggggctcgagttgcaatgggcattgcctaaagaaccagtttgcaaaactgatgtagattgtaacctcttgttgggtaaatcaaaatgcttgcctgatccaacgagtctcggcctgaaacgatgctcctgcaaaaaaggtttggaatgggatccggttaacgcaatatgtggtaaatgtcgccatgggaaacactgcaaaaagaagaagaagaccgttgttttcgcaggtgcggctgttgcggttgtgggagttacgctagcgattgcggtagcagtaattggaaccaaacatagccaccaaaaggttaaaaaggatatccacaagaacattgttaaggagcgagaagagatgcttagcgcaaattccactggaaaatcatcaagaatcttcactggcagagaaatcacgaaagcaaccaacaatttctcaaaagacaatctcataggcactggaggttttggagaagtgtttaaagctgttcttgaggatggaaccataaccgcgatcaaacgagcaaagcttaacaacaccaaaggcactgatcagatcctaaacgaagtccggattctctgccaagtcaatcatagaagcttagttaggcttctcggttgctgtgttgatcttgaattgcctctcttgatctacgagtttattcccaacggaacgctgttcgaacatctccatggcagttcagaccgtacttggaaaccgctgacttggcggcgcagactgcagattgcataccaaaccgctgaaggattagcttatctccactccgcagcacagccacccatttaccaccgcgacgtaaagtcaagcaatattttgcttgacgagaagctaaacgccaaggtttcagactttgggctgtcaagacttgtggatttgacagaaaccgctaataacgagagccatatcttcacgggtgcgcaaggtacattgggatacctcgatccagaatactaccggaatttccagctaactgataagagcgatgtgtacagcttcggggttgtgcttctggagatggttacatcgaagaaggcgatagatttcactagagaagaggaagatgtgaacctggtgatgtatattaacaagatgatggatcaagagagattgactgaatgcatcgatccactgctgaagaagacagctaacaagattgacatgcagacgatacagcagctcgggaatttagcatctgcgtgccttaacgaacggagacaaaaccgaccttcgatgaaagaggttgctgatgagattgaatacatcatcaatattctgtcacaagaggttactgagacatag

SEQ ID NO: 79658 - protein, 657 aa, Arabidopsis thaliana
  peptide (1)..(657): Ceres Seq. ID no. 12652423
MEKKRSYYALLIPTLLTVWLACAGHSCARHAKAKPPMAGPPRCPNCGPMVVPYPLSTGPTCGDQAYRINCVGGKLYFGALHGSSYVITSINSVTQRIVLRPPGLASSVSCISADVSKQGLELDPHLPFSITSSNTILLLNCSQAMLQAPIDCSPTSLCYSYIKNNASPCSKAPLCCTFRTDGSQTAYTIRINGGGCLAYQSFVGLNPNKEVPPPGKKWPDTGLELQWALPKEPVCKTDVDCNLLLGKSKCLPDPTSLGLKRCSCKKGLEWDPVNAICGKCRHGKHCKKKKKTVVFAGAAVAVVGVTLAIAVAVIGTKHSHQKVKKDIHKNIVKEREEMLSANSTGKSSRIFTGREITKATNNFSKDNLIGTGGFGEVFKAVLEDGTITAIKRAKLNNTKGTDQILNEVRILCQVNHRSLVRLLGCCVDLELPLLIYEFIPNGTLFEHLHGSSDRTWKPLTWRRRLQIAYQTAEGLAYLHSAAQPPIYHRDVKSSNILLDEKLNAKVSDFGLSRLVDLTETANNESHIFTGAQGTLGYLDPEYYRNFQLTDKSDVYSFGVVLLEMVTSKKAIDFTREEEDVNLVMYINKMMDQERLTECIDPLLKKTANKIDMQTIQQLGNLASACLNERRQNRPSMKEVADEIEYIINILSQEVTET

SEQ ID NO: 79659 - protein, 621 aa, Arabidopsis thaliana
  peptide (1)..(621): Ceres Seq. ID no. 12652424
MAGPPRCPNCGPMVVPYPLSTGPTCGDQAYRINCVGGKLYFGALHGSSYVITSINSVTQRIVLRPPGLASSVSCISADVSKQGLELDPHLPFSITSSNTILLLNCSQAMLQAPIDCSPTSLCYSYIKNNASPCSKAPLCCTFRTDGSQTAYTIRINGGGCLAYQSFVGLNPNKEVPPPGKKWPDTGLELQWALPKEPVCKTDVDCNLLLGKSKCLPDPTSLGLKRCSCKKGLEWDPVNAICGKCRHGKHCKKKKKTVVFAGAAVAVVGVTLAIAVAVIGTKHSHQKVKKDIHKNIVKEREEMLSANSTGKSSRIFTGREITKATNNFSKDNLIGTGGFGEVFKAVLEDGTITAIKRAKLNNTKGTDQILNEVRILCQVNHRSLVRLLGCCVDLELPLLIYEFIPNGTLFEHLHGSSDRTWKPLTWRRRLQIAYQTAEGLAYLHSAAQPPIYHRDVKSSNILLDEKLNAKVSDFGLSRLVDLTETANNESHIFTGAQGTLGYLDPEYYRNFQLTDKSDVYSFGVVLLEMVTSKKAIDFTREEEDVNLVMYINKMMDQERLTECIDPLLKKTANKIDMQTIQQLGNLASACLNERRQNRPSMKEVADEIEYIINILSQEVTET

SEQ ID NO: 79660 - protein, 609 aa, Arabidopsis thaliana
  peptide (1)..(609): Ceres Seq. ID no. 12652425
MVVPYPLSTGPTCGDQAYRINCVGGKLYFGALHGSSYVITSINSVTQRIVLRPPGLASSVSCISADVSKQGLELDPHLPFSITSSNTILLLNCSQAMLQAPIDCSPTSLCYSYIKNNASPCSKAPLCCTFRTDGSQTAYTIRINGGGCLAYQSFVGLNPNKEVPPPGKKWPDTGLELQWALPKEPVCKTDVDCNLLLGKSKCLPDPTSLGLKRCSCKKGLEWDPVNAICGKCRHGKHCKKKKKTVVFAGAAVAVVGVTLAIAVAVIGTKHSHQKVKKDIHKNIVKEREEMLSANSTGKSSRIFTGREITKATNNFSKDNLIGTGGFGEVFKAVLEDGTITAIKRAKLNNTKGTDQILNEVRILCQVNHRSLVRLLGCCVDLELPLLIYEFIPNGTLFEHLHGSSDRTWKPLTWRRRLQIAYQTAEGLAYLHSAAQPPIYHRDVKSSNILLDEKLNAKVSDFGLSRLVDLTETANNESHIFTGAQGTLGYLDPEYYRNFQLTDKSDVYSFGVVLLEMVTSKKAIDFTREEEDVNLVMYINKMMDQERLTECIDPLLKKTANKIDMQTIQQLGNLASACLNERRQNRPSMKEVADEIEYIINILSQEVTET

SEQ ID NO: 79661 - DNA, 1829 bp, Arabidopsis thaliana
  misc_feature (1)..(1829): Ceres Seq. ID no. 12652438
  misc_feature (1)..(1829): Ortholog of  Ceres SEQ ID NO 14311103 as cited in SEQ ID NO 52897
acagtagaagaatacaaacaaagtagatgaagcaaaacgagacattcgatcaagaaagggaagatttgtatcacacgttcgatgaggaagatgaagaaagccaaacagagagctccgttccctcaactcctttatctcgtaacagatccgaagacgttcccgttccgtggcctcgaagttatcgacaatctatggatttgttgactggagttacacctccgactagtacaagttttgtctcttcatttcgccagagacgacaaagctctgttttcggttcgtttacttcttcaccaagcaaacagcaacttctcatagacaaagacgagatccaaagctctgttgtgtcctccatcaaatcatttcttgcttctcatctccagctatcagtcccaggggatcttttaactccccaagaaaaccgcagttgcacattctctcaatccgttctcaacggaattaacgttctatgtggagtagctttacttacaatgccttacgcagttaaagaaggaggatggttagggcttttcatactcttctcctttggcattatcactttctacaccggcattctcctcaagagatgtctcgagaactcccctggaatccacacttacccggacatcggtcaagctgcattcggaaccactggacgcatcctcgtctctatacttctctacgtagagttatacgcatcttgtgtggaatacataatcatgatgagtgataatttgtcaagaatgttcccaaatacctccttatacatcaacggattttctttagattctactcaagttttcgccattaccacgactcttattgttcttcctactgtctggctcaaagacctcagcttattgtcctatctctcagccggaggtgtcatctcctcaatcttgcttgcgctttgcctcttttgggctggatcagtagacggggttggatttcacataagcggacaagctcttgatataactaacatacctgtcgcaatcggaatttacgggttcggtttcgggagtcactctgttttccccaacatttactcatccatgaaagaaccttccaagtttcctacggtgcttctcatcagttttgcgttttgcactctattttacattgcggtagcggtttgtggattcacgatgtttggtgatgcgattcaatcccaatttacactgaacatgccaccacatttcacctcatctaaaatcgcagtctggacagcggtcgtaacaccaatgacgaaatacgctttaacgatcactccagtaatgctaagcctagaagaactcataccgtcttcatcaagaaagatgagatccaaaggtgtctctatgctctttagaaccatattagttctctccactttggtcgttgcactcacagttccattcttcgctactgtggcggctctgattggatctttcatcgcaatgcttatcgcgttaatattcccgtgtctctgttatatcagcattatgaagggtagattaactaactttcagattggaatttgtattttaatcgtgataatcggcattgtaagcggttgttgcgggacttattctgctatcgccagattaatcggcgaaatgacctgattggttttgcagaataagtacgtatattcgaaggaataaaccggtatatacttgaataaaaccggtttttgataaaccaatggttttttgtgtgaagataatccaatttgatttttttttttggtattttattcatagttttaagtccattttactcaatgtagtcttcatttttttttttcatttgctcatttaaaaataaataaataacagaatattttg

SEQ ID NO: 79662 - protein, 526 aa, Arabidopsis thaliana
  peptide (1)..(526): Ceres Seq. ID no. 12652439
MKQNETFDQEREDLYHTFDEEDEESQTESSVPSTPLSRNRSEDVPVPWPRSYRQSMDLLTGVTPPTSTSFVSSFRQRRQSSVFGSFTSSPSKQQLLIDKDEIQSSVVSSIKSFLASHLQLSVPGDLLTPQENRSCTFSQSVLNGINVLCGVALLTMPYAVKEGGWLGLFILFSFGIITFYTGILLKRCLENSPGIHTYPDIGQAAFGTTGRILVSILLYVELYASCVEYIIMMSDNLSRMFPNTSLYINGFSLDSTQVFAITTTLIVLPTVWLKDLSLLSYLSAGGVISSILLALCLFWAGSVDGVGFHISGQALDITNIPVAIGIYGFGFGSHSVFPNIYSSMKEPSKFPTVLLISFAFCTLFYIAVAVCGFTMFGDAIQSQFTLNMPPHFTSSKIAVWTAVVTPMTKYALTITPVMLSLEELIPSSSRKMRSKGVSMLFRTILVLSTLVVALTVPFFATVAALIGSFIAMLIALIFPCLCYISIMKGRLTNFQIGICILIVIIGIVSGCCGTYSAIARLIGEMT

SEQ ID NO: 79663 - protein, 471 aa, Arabidopsis thaliana
  peptide (1)..(471): Ceres Seq. ID no. 12652440
MDLLTGVTPPTSTSFVSSFRQRRQSSVFGSFTSSPSKQQLLIDKDEIQSSVVSSIKSFLASHLQLSVPGDLLTPQENRSCTFSQSVLNGINVLCGVALLTMPYAVKEGGWLGLFILFSFGIITFYTGILLKRCLENSPGIHTYPDIGQAAFGTTGRILVSILLYVELYASCVEYIIMMSDNLSRMFPNTSLYINGFSLDSTQVFAITTTLIVLPTVWLKDLSLLSYLSAGGVISSILLALCLFWAGSVDGVGFHISGQALDITNIPVAIGIYGFGFGSHSVFPNIYSSMKEPSKFPTVLLISFAFCTLFYIAVAVCGFTMFGDAIQSQFTLNMPPHFTSSKIAVWTAVVTPMTKYALTITPVMLSLEELIPSSSRKMRSKGVSMLFRTILVLSTLVVALTVPFFATVAALIGSFIAMLIALIFPCLCYISIMKGRLTNFQIGICILIVIIGIVSGCCGTYSAIARLIGEMT

SEQ ID NO: 79664 - protein, 371 aa, Arabidopsis thaliana
  peptide (1)..(371): Ceres Seq. ID no. 12652441
MPYAVKEGGWLGLFILFSFGIITFYTGILLKRCLENSPGIHTYPDIGQAAFGTTGRILVSILLYVELYASCVEYIIMMSDNLSRMFPNTSLYINGFSLDSTQVFAITTTLIVLPTVWLKDLSLLSYLSAGGVISSILLALCLFWAGSVDGVGFHISGQALDITNIPVAIGIYGFGFGSHSVFPNIYSSMKEPSKFPTVLLISFAFCTLFYIAVAVCGFTMFGDAIQSQFTLNMPPHFTSSKIAVWTAVVTPMTKYALTITPVMLSLEELIPSSSRKMRSKGVSMLFRTILVLSTLVVALTVPFFATVAALIGSFIAMLIALIFPCLCYISIMKGRLTNFQIGICILIVIIGIVSGCCGTYSAIARLIGEMT

SEQ ID NO: 79665 - DNA, 1995 bp, Arabidopsis thaliana
  misc_feature (1)..(1995): Ceres Seq. ID no. 12652481
  misc_feature (1)..(1995): Ortholog of  Ceres SEQ ID NO 13600310 as cited in SEQ ID NO 5086
atggttagtggtaagatattgaaacccgggaaagtcaacaaagcacatgggatttttagcgaacgtgaactgccgttgagggcgattgtttcgaagtttagacctcaaagtaacaaacgacagttttggctccccagtgtgaaccgtcggatcatggagataactcatctaacgagaatggtggattcgaaaacccctgcgaaaaccaaattgttagattcgtcttcgatttctaatgtcagagtcgtccttagggttcgtccttttcttccccgggagatttcggacgagagttgtgacgggagatcgtgcgtttccgtaatcggcggcgatggaggagataccagcgaagtggcggtttacctcaaagatccagatagctgtcgtaacgaaagctatcagctggatgcgttttacgggagagaggatgataatgtgaagcatatattcgatagagaagtaagccctttgattcctgggatctttcatggtttcaatgctactgtgcttgcttatggagccaccggaagcggaaagacttttacgatgcagggaatcgatgagctaccaggtctgatgccattgaccatgtccaccattctgtctatgtgcgagaagacaaggagtagggctgagatttcatattatgaagtttacatggacagatgttgggatcttctagaagttaaagacaacgagattgctgtttgggatgataaagatggacaagttcatcttaagggactttctagtgtccctgttaagtccatgtctgagtttcaagaggcgtatttgtgtggcgttcagaggaggaaagttgcacacactggtttaaatgatgtctctagtagaagccatggagtgcttgtgatctcagtaacctcacaagggcttgtcactggtaaaatcaatctgattgatcttgcaggtaacgaagacaatagaaggacaggcaatgaagggatccgtttacaagagagtgccaagattaatcagtcattatttgcattgtccaatgtggtttatgcactgaataataacctccctagagtgccatacagggaaaccaaattgactagaatactgcaggattcacttggtggaacaagtagggctctcatggtcgcatgtctgaatcctggagaataccaagaatctcttcgcaccgttagcctggctgcaaggtcaaggcacatctcaaacaatgtttctctgaatcccaaggtagagacccccaaggttaagatagacatggaagcaaaactgcaagcttggcttgaatcaaaaggcaagatgaagagcgcgcatagaatgatggcaatacggtctccattgatgggtacaaaccagacttcaatttctcaaagctcagtcaagaaattactctgtcatagatcagccattgcagaaagtgctaagcttgccggcacaggacagagggacgcatttgtgaccgcaagaaacttatttggtgtggaaactcttgctgcttcacatttatgggaacctatacggaatctgcagttagcttctccaaccaaagaagatgagagagacacatctggcgaagagaatctattggtatcagaagcaagcttgagagataacacattggatgtcgagaagaaatatactgaactgagtcctcttcgagaagctctatctccaatagactccaatgcaaaaccaaattcagcacacggaagctctccttttctgaagccaatgaccccaaaaacaccttttctttctacaaaccctgaaattatgcagatggaaggcacttgccagaagttcaatgcatggagcaataatttaaagggaattgggcagaagatggctgagtacatcattgaactcagagaaacaagccctttaaaatcgcttaccgacttagaaaagatcggtttcacctcaagacaggtacataacctattcaaaaaagccactgaaggagtcctcgagaagccagtttctgcttcaacaacaccttag

SEQ ID NO: 79666 - protein, 664 aa, Arabidopsis thaliana
  peptide (1)..(664): Ceres Seq. ID no. 12652482
MVSGKILKPGKVNKAHGIFSERELPLRAIVSKFRPQSNKRQFWLPSVNRRIMEITHLTRMVDSKTPAKTKLLDSSSISNVRVVLRVRPFLPREISDESCDGRSCVSVIGGDGGDTSEVAVYLKDPDSCRNESYQLDAFYGREDDNVKHIFDREVSPLIPGIFHGFNATVLAYGATGSGKTFTMQGIDELPGLMPLTMSTILSMCEKTRSRAEISYYEVYMDRCWDLLEVKDNEIAVWDDKDGQVHLKGLSSVPVKSMSEFQEAYLCGVQRRKVAHTGLNDVSSRSHGVLVISVTSQGLVTGKINLIDLAGNEDNRRTGNEGIRLQESAKINQSLFALSNVVYALNNNLPRVPYRETKLTRILQDSLGGTSRALMVACLNPGEYQESLRTVSLAARSRHISNNVSLNPKVETPKVKIDMEAKLQAWLESKGKMKSAHRMMAIRSPLMGTNQTSISQSSVKKLLCHRSAIAESAKLAGTGQRDAFVTARNLFGVETLAASHLWEPIRNLQLASPTKEDERDTSGEENLLVSEASLRDNTLDVEKKYTELSPLREALSPIDSNAKPNSAHGSSPFLKPMTPKTPFLSTNPEIMQMEGTCQKFNAWSNNLKGIGQKMAEYIIELRETSPLKSLTDLEKIGFTSRQVHNLFKKATEGVLEKPVSASTTP

SEQ ID NO: 79667 - protein, 613 aa, Arabidopsis thaliana
  peptide (1)..(613): Ceres Seq. ID no. 12652483
MEITHLTRMVDSKTPAKTKLLDSSSISNVRVVLRVRPFLPREISDESCDGRSCVSVIGGDGGDTSEVAVYLKDPDSCRNESYQLDAFYGREDDNVKHIFDREVSPLIPGIFHGFNATVLAYGATGSGKTFTMQGIDELPGLMPLTMSTILSMCEKTRSRAEISYYEVYMDRCWDLLEVKDNEIAVWDDKDGQVHLKGLSSVPVKSMSEFQEAYLCGVQRRKVAHTGLNDVSSRSHGVLVISVTSQGLVTGKINLIDLAGNEDNRRTGNEGIRLQESAKINQSLFALSNVVYALNNNLPRVPYRETKLTRILQDSLGGTSRALMVACLNPGEYQESLRTVSLAARSRHISNNVSLNPKVETPKVKIDMEAKLQAWLESKGKMKSAHRMMAIRSPLMGTNQTSISQSSVKKLLCHRSAIAESAKLAGTGQRDAFVTARNLFGVETLAASHLWEPIRNLQLASPTKEDERDTSGEENLLVSEASLRDNTLDVEKKYTELSPLREALSPIDSNAKPNSAHGSSPFLKPMTPKTPFLSTNPEIMQMEGTCQKFNAWSNNLKGIGQKMAEYIIELRETSPLKSLTDLEKIGFTSRQVHNLFKKATEGVLEKPVSASTTP

SEQ ID NO: 79668 - protein, 605 aa, Arabidopsis thaliana
  peptide (1)..(605): Ceres Seq. ID no. 12652484
MVDSKTPAKTKLLDSSSISNVRVVLRVRPFLPREISDESCDGRSCVSVIGGDGGDTSEVAVYLKDPDSCRNESYQLDAFYGREDDNVKHIFDREVSPLIPGIFHGFNATVLAYGATGSGKTFTMQGIDELPGLMPLTMSTILSMCEKTRSRAEISYYEVYMDRCWDLLEVKDNEIAVWDDKDGQVHLKGLSSVPVKSMSEFQEAYLCGVQRRKVAHTGLNDVSSRSHGVLVISVTSQGLVTGKINLIDLAGNEDNRRTGNEGIRLQESAKINQSLFALSNVVYALNNNLPRVPYRETKLTRILQDSLGGTSRALMVACLNPGEYQESLRTVSLAARSRHISNNVSLNPKVETPKVKIDMEAKLQAWLESKGKMKSAHRMMAIRSPLMGTNQTSISQSSVKKLLCHRSAIAESAKLAGTGQRDAFVTARNLFGVETLAASHLWEPIRNLQLASPTKEDERDTSGEENLLVSEASLRDNTLDVEKKYTELSPLREALSPIDSNAKPNSAHGSSPFLKPMTPKTPFLSTNPEIMQMEGTCQKFNAWSNNLKGIGQKMAEYIIELRETSPLKSLTDLEKIGFTSRQVHNLFKKATEGVLEKPVSASTTP

SEQ ID NO: 79669 - DNA, 1200 bp, Arabidopsis thaliana
  misc_feature (1)..(1200): Ceres Seq. ID no. 12652499
  misc_feature (1)..(1200): Ortholog of  Ceres SEQ ID NO 15168521 as cited in SEQ ID NO 58180
atggttttttcttcatttcctacttatcctgatcattcatcaaactggcaacaacaacatcaaccaatcacaaccaccgttggattcacgggaaataacatcaaccaacagtttcttcctcaccatcccctcccaccgcaacagcaacaaacgcctccgcagcttcaccacaacaacggtaacggcggagtcgctgttcccggtggacctggcgggttaatccgaccaggttcgatggcggaaagagcaaggctagccaacataccattacctgaaacagccttgaagtgtccaagatgtgactcaactaacaccaaattctgttacttcaacaactacagtctcactcaacctcgccacttctgcaaagcatgccgtcgttactggacacgtggcggtgctctaaggagcgttcccgtcggtggcggttgccgtagaaacaaaagaaccaaaaacagcagcggtggaggtggcggtagcaccagtagcggtaacagcaagtcacaagacagcgccacgagcaacgaccaataccaccaccgagccatggctaacaatcagatgggaccaccttcttcgtcatcgtctctaagctcgttgctgtcttcttacaacgcagggttaatccccggacatgatcataacagcaataacaacaacatacttggacttggatcatctttgcctcctcttaagcttatgcctcctttagacttcacagacaacttcaccttacaatacggtgccgtttcagctccttcttatcatataggcggtggaagcagtggaggagcggcggctcttttaaacggttttgaccagtggagattcccggcaacaaaccaacttcctttaggcggtttagacccgtttgatcaacaacatcaaatggagcagcagaatccaggttacggattggttaccgggtcgggtcagtatcgacctaagaacattttccataaccttatctcctcttcttcgtctgcttcatcagctatggttacagccaccgcgtcgcaattagcttcagtgaaaatggaagatagtaacaatcagctcaacttgtctagacaactttttggagacgaacaacagctctggaatattcatggcgctgctgcagcatccaccgcagctgcaacaagttcgtggagtgaagtctctaataatttcagttcttcttctactagcaatatataa

SEQ ID NO: 79670 - protein, 399 aa, Arabidopsis thaliana
  peptide (1)..(399): Ceres Seq. ID no. 12652500
MVFSSFPTYPDHSSNWQQQHQPITTTVGFTGNNINQQFLPHHPLPPQQQQTPPQLHHNNGNGGVAVPGGPGGLIRPGSMAERARLANIPLPETALKCPRCDSTNTKFCYFNNYSLTQPRHFCKACRRYWTRGGALRSVPVGGGCRRNKRTKNSSGGGGGSTSSGNSKSQDSATSNDQYHHRAMANNQMGPPSSSSSLSSLLSSYNAGLIPGHDHNSNNNNILGLGSSLPPLKLMPPLDFTDNFTLQYGAVSAPSYHIGGGSSGGAAALLNGFDQWRFPATNQLPLGGLDPFDQQHQMEQQNPGYGLVTGSGQYRPKNIFHNLISSSSSASSAMVTATASQLASVKMEDSNNQLNLSRQLFGDEQQLWNIHGAAAASTAAATSSWSEVSNNFSSSSTSNI

SEQ ID NO: 79671 - protein, 321 aa, Arabidopsis thaliana
  peptide (1)..(321): Ceres Seq. ID no. 12652501
MAERARLANIPLPETALKCPRCDSTNTKFCYFNNYSLTQPRHFCKACRRYWTRGGALRSVPVGGGCRRNKRTKNSSGGGGGSTSSGNSKSQDSATSNDQYHHRAMANNQMGPPSSSSSLSSLLSSYNAGLIPGHDHNSNNNNILGLGSSLPPLKLMPPLDFTDNFTLQYGAVSAPSYHIGGGSSGGAAALLNGFDQWRFPATNQLPLGGLDPFDQQHQMEQQNPGYGLVTGSGQYRPKNIFHNLISSSSSASSAMVTATASQLASVKMEDSNNQLNLSRQLFGDEQQLWNIHGAAAASTAAATSSWSEVSNNFSSSSTSNI

SEQ ID NO: 79672 - protein, 217 aa, Arabidopsis thaliana
  peptide (1)..(217): Ceres Seq. ID no. 12652502
MANNQMGPPSSSSSLSSLLSSYNAGLIPGHDHNSNNNNILGLGSSLPPLKLMPPLDFTDNFTLQYGAVSAPSYHIGGGSSGGAAALLNGFDQWRFPATNQLPLGGLDPFDQQHQMEQQNPGYGLVTGSGQYRPKNIFHNLISSSSSASSAMVTATASQLASVKMEDSNNQLNLSRQLFGDEQQLWNIHGAAAASTAAATSSWSEVSNNFSSSSTSNI

SEQ ID NO: 79673 - DNA, 2348 bp, Arabidopsis thaliana
  misc_feature (1)..(2348): Ceres Seq. ID no. 12652507
  misc_feature (1)..(2348): Ortholog of  Ceres SEQ ID NO 14310803 as cited in SEQ ID NO 58463
  misc_feature (1)..(2348): Ortholog of  Ceres SEQ ID NO 13663769 as cited in SEQ ID NO 60793
aatccaatcttcttcttacataaacacctctcctcccccaccgtttccaaaagagagaagctttctcactaacaccaaaaacaagtctttgaagaagaataaaaagattggattttgataagtttagtgaaaatgggggagcttttgtgttcttcactgtggaacccgtcacgattcattgttgcttctctcaaaaggtattttctgggtttagcttcttagaggttcttcgttcttaaaggtctgtttttttttaggttgtgatactttgaatgtaaaaaagggaagatttttagtttcgatatgtatatctctcggatgggtttgagtcggagtttcccgccgctttttgggggatttcgggaaattctagggttagggttggatattgtcttcctctagcagtctctgccacttttaaaatctcttcatctttctttgagagtgaaagaggtttttttatttgtttgtgtcttcctgggaatcgagattctggatcttaatcaatatgtgggttaattgggagatctgggatttgggagatcttgtggtggattgaagaaaaagcaaggttgtagattttgaaaaatgaaaggttcaattcttactgttttgtcaatggagaatcatcatccgtcaacgcttttatctatggattctagtggctcatctcatgaagagcttgatttggagatgaacaatggtaataggcaaatcactctttataatccaccagacattaatctgcctttgtctgtaggaagaagctctccttcttggaatttggattcttgtgataacattttggatgttggtcttagctctcatgtctatgagaccgagacgtttctcaatgtggtcccgagtaaagtagctaagaagtgtttgaaacgaggggatagtatgtggggagcttggtttttctttagcttctacttcagaccggcgttgaatgagaaatccaagtctaaggtcattagggaaagtggtggtggtggaggaggaggaggaggatgttttactgggtttgataaatctgatctcaagctcgatgtttttcttgttcagcatgatatggagaacatgtatatgtgggcttttaaggataaacctgagaatgcgcttgggaaaatgcagttgagaagctatatgaatgggcattctcgtcaaggtgagcgtccgtttccgtttagtgcggagaaagggtttgttcggtctcacagaatgcagaggaagcattacaggggactctctaatcctcagtgtcttcacgggattgagtttgtggcttcgccgagtttgtttggtgtcggtgaagaagataagaagagatggatggagctcacgggtcgagatttgaagttcactatccctcctgatgctagtgatttcggttcatggagaaatcttcccaacacagacatcgagctagagagaccagctcatgttactaaagcagcaccgaataacgccaagaagattctcaatggctccggcttacatttgacaagcaatgcgtctttcagtagcaatggggactcgtctgatcaatctccaggaggaggagtcatcaacaacaagaagagaaaagagtttctatctcctggaagcagcgaagaagaatgctgtttgactgttaacaacatcgagacccaccacgccaaggacccgcccagttgggtaaacgacttcacgggagtgatgaagaatagctgcggacctgtaactgctgcaaaaaccgtctatgaggacgaagaagcttatctggtcgtaataactctaccatttgtggatttgaacaccgtgaaggtttcatggaggaacaatatcacaaatggaatcgtgaaggtcacgggactaagcacttcgagggcttcgtttgtgaagagacgggaccggactttcaagctggttgatcagatggctgagcattgtcctccaggggaattcatgagggagatacaattgccgaatcggattccggaagaagcaaatattgaagcatactttgatgggactggaccagttttagagattgtggttccaaaattgagaggaggagtggaggaagaacacgaggttagagtttgtctacggtcacaccacctcggatgaaagatgcaaccatgttttaaagtgtttgtagaagcattttgttgtgtacaatggggaaataagcataagcaaaagcagaaagtgctgttttttaagtataactttttcactttagttttttttttgtcttcgtttctaaaaagtatattcttcagagcaagttgtatttaaccacaattttatttgattagtaaacactattttatttataaaaaggctaaattgtctacaac

SEQ ID NO: 79674 - protein, 508 aa, Arabidopsis thaliana
  peptide (1)..(508): Ceres Seq. ID no. 12652508
MKGSILTVLSMENHHPSTLLSMDSSGSSHEELDLEMNNGNRQITLYNPPDINLPLSVGRSSPSWNLDSCDNILDVGLSSHVYETETFLNVVPSKVAKKCLKRGDSMWGAWFFFSFYFRPALNEKSKSKVIRESGGGGGGGGGCFTGFDKSDLKLDVFLVQHDMENMYMWAFKDKPENALGKMQLRSYMNGHSRQGERPFPFSAEKGFVRSHRMQRKHYRGLSNPQCLHGIEFVASPSLFGVGEEDKKRWMELTGRDLKFTIPPDASDFGSWRNLPNTDIELERPAHVTKAAPNNAKKILNGSGLHLTSNASFSSNGDSSDQSPGGGVINNKKRKEFLSPGSSEEECCLTVNNIETHHAKDPPSWVNDFTGVMKNSCGPVTAAKTVYEDEEAYLVVITLPFVDLNTVKVSWRNNITNGIVKVTGLSTSRASFVKRRDRTFKLVDQMAEHCPPGEFMREIQLPNRIPEEANIEAYFDGTGPVLEIVVPKLRGGVEEEHEVRVCLRSHHLG

SEQ ID NO: 79675 - protein, 498 aa, Arabidopsis thaliana
  peptide (1)..(498): Ceres Seq. ID no. 12652509
MENHHPSTLLSMDSSGSSHEELDLEMNNGNRQITLYNPPDINLPLSVGRSSPSWNLDSCDNILDVGLSSHVYETETFLNVVPSKVAKKCLKRGDSMWGAWFFFSFYFRPALNEKSKSKVIRESGGGGGGGGGCFTGFDKSDLKLDVFLVQHDMENMYMWAFKDKPENALGKMQLRSYMNGHSRQGERPFPFSAEKGFVRSHRMQRKHYRGLSNPQCLHGIEFVASPSLFGVGEEDKKRWMELTGRDLKFTIPPDASDFGSWRNLPNTDIELERPAHVTKAAPNNAKKILNGSGLHLTSNASFSSNGDSSDQSPGGGVINNKKRKEFLSPGSSEEECCLTVNNIETHHAKDPPSWVNDFTGVMKNSCGPVTAAKTVYEDEEAYLVVITLPFVDLNTVKVSWRNNITNGIVKVTGLSTSRASFVKRRDRTFKLVDQMAEHCPPGEFMREIQLPNRIPEEANIEAYFDGTGPVLEIVVPKLRGGVEEEHEVRVCLRSHHLG

SEQ ID NO: 79676 - protein, 487 aa, Arabidopsis thaliana
  peptide (1)..(487): Ceres Seq. ID no. 12652510
MDSSGSSHEELDLEMNNGNRQITLYNPPDINLPLSVGRSSPSWNLDSCDNILDVGLSSHVYETETFLNVVPSKVAKKCLKRGDSMWGAWFFFSFYFRPALNEKSKSKVIRESGGGGGGGGGCFTGFDKSDLKLDVFLVQHDMENMYMWAFKDKPENALGKMQLRSYMNGHSRQGERPFPFSAEKGFVRSHRMQRKHYRGLSNPQCLHGIEFVASPSLFGVGEEDKKRWMELTGRDLKFTIPPDASDFGSWRNLPNTDIELERPAHVTKAAPNNAKKILNGSGLHLTSNASFSSNGDSSDQSPGGGVINNKKRKEFLSPGSSEEECCLTVNNIETHHAKDPPSWVNDFTGVMKNSCGPVTAAKTVYEDEEAYLVVITLPFVDLNTVKVSWRNNITNGIVKVTGLSTSRASFVKRRDRTFKLVDQMAEHCPPGEFMREIQLPNRIPEEANIEAYFDGTGPVLEIVVPKLRGGVEEEHEVRVCLRSHHLG

SEQ ID NO: 79677 - DNA, 2460 bp, Arabidopsis thaliana
  misc_feature (1)..(2460): Ceres Seq. ID no. 12652538
  misc_feature (1)..(2460): Ortholog of  Ceres SEQ ID NO 13657677 as cited in SEQ ID NO 66119
atggcggacaagctagctcttcctcttctccttccctgcactccttcctctaaaccttattctcacgaccaaaaccaccatatctctcggacgccttttcttactacgtctctttcgtcaccacctcctccgcctgtagagcctctcctccacgatgttttccttcaccagaaccctaattccagacaacccatcagctctcaaacatctagaaaccgtaaccggactcgaattggcaagtcacgtgaccctaacctcggtaaaccttggtcttaccatggtctttctccacaaggtcagcaagttcttcgttccctcatcgaacccaattttgattccggtcaattagattctgtactctctgagctattcgagccttttaaggataaaccagagtctacctcgtcggagttactagcttttcttaaaggattaggatttcataagaaattcgatttggctctgcgtgcttttgattggtttatgaagcaaaaggattatcaatccatgttggataactctgttgttgctataatcatcagtatgctaggtaaagaaggcagagtatcttccgctgcaaatatgttcaatggtttgcaggaagacgggttttcgcttgatgtctactcttatacttcgttgatatcagcgtttgctaatagcggaaggtatagggaagctgtaaatgtgttcaagaagatggaggaagatggttgtaaaccgactttgataacgtataatgttatcttgaatgtgtttgggaaaatgggtactccttggaataagattacgtctcttgttgagaagatgaagagtgatgggattgctccggatgcgtatacttacaacactcttataacttgttgtaaacgaggctctttgcatcaggaagctgctcaggtttttgaagaaatgaaggctgctgggtttagttatgataaggttacttataatgcgttattagatgtttatggaaagtctcatcggcctaaggaagctatgaaggttttgaatgaaatggtgctcaatggattttctccgagcattgtgacttacaactccttgatctctgcatatgcgagggatggtatgctggatgaggcaatggagcttaaaaatcagatggcggaaaagggaacgaaacctgatgtttttacttatacaacacttttgtcagggtttgagagggctgggaaggtcgaatctgctatgagtatttttgaagagatgagaaatgcagggtgcaaaccaaatatttgtacttttaatgcctttataaagatgtatggtaacaggggaaagtttactgaaatgatgaagatatttgacgagatcaatgtgtgtggtctctcccccgacattgtcacttggaatacactattagcagtctttggccaaaacgggatggattcagaagtatcgggtgtattcaaggaaatgaagagagctgggttcgtacccgaaagggaaactttcaacaccctaatcagtgcgtatagccgctgtggttcgtttgaacaagctatgactgtttacagacgaatgcttgatgctggggtcactcctgacctttccacctataacactgtgttggcagctttggcccgtggaggaatgtgggaacaatctgaaaaagttcttgcagagatggaggatggtcggtgcaaaccaaatgaattaacttactgctctctacttcatgcatatgcaaatggcaaggagattggtctgatgcattctctagcagaagaggtttattctggagttatcgagcctcgagctgtgcttttgaagacccttgtcttggtttgtagtaagtgtgatcttttgccagaggctgaacgtgcattctctgagctcaaagaaagagggttttcaccagacataaccacattaaattccatggtctccatatatggaagaaggcagatggtggcaaaggcgaacggagtcttggactacatgaaagaaaggggtttcacaccaagcatggcgacctacaatagcctcatgtatatgcatagtcggtctgcagatttcggaaaatcagaggaaatcttgagggaaatactggctaaggggatcaagccagacatcatatcgtacaacacagtcatttacgcctattgtagaaatactcggatgagagatgcatctagaatattttcagagatgaggaattcagggattgtccctgatgttatcacctacaatacgtttattggttcttatgcagctgactcaatgtttgaggaggccatcggcgtcgttaggtacatgatcaagcatggttgtagaccaaaccagaacacctacaactccattgtcgatggatactgcaagctaaacaggaaagatgaggcaaaactttttgtcgaagatctgaggaatcttgatccccatgctcccaaaggcgaggatcttaggttgctggaacggatagtgaagaagtggccatag

SEQ ID NO: 79678 - protein, 819 aa, Arabidopsis thaliana
  peptide (1)..(819): Ceres Seq. ID no. 12652539
MADKLALPLLLPCTPSSKPYSHDQNHHISRTPFLTTSLSSPPPPPVEPLLHDVFLHQNPNSRQPISSQTSRNRNRTRIGKSRDPNLGKPWSYHGLSPQGQQVLRSLIEPNFDSGQLDSVLSELFEPFKDKPESTSSELLAFLKGLGFHKKFDLALRAFDWFMKQKDYQSMLDNSVVAIIISMLGKEGRVSSAANMFNGLQEDGFSLDVYSYTSLISAFANSGRYREAVNVFKKMEEDGCKPTLITYNVILNVFGKMGTPWNKITSLVEKMKSDGIAPDAYTYNTLITCCKRGSLHQEAAQVFEEMKAAGFSYDKVTYNALLDVYGKSHRPKEAMKVLNEMVLNGFSPSIVTYNSLISAYARDGMLDEAMELKNQMAEKGTKPDVFTYTTLLSGFERAGKVESAMSIFEEMRNAGCKPNICTFNAFIKMYGNRGKFTEMMKIFDEINVCGLSPDIVTWNTLLAVFGQNGMDSEVSGVFKEMKRAGFVPERETFNTLISAYSRCGSFEQAMTVYRRMLDAGVTPDLSTYNTVLAALARGGMWEQSEKVLAEMEDGRCKPNELTYCSLLHAYANGKEIGLMHSLAEEVYSGVIEPRAVLLKTLVLVCSKCDLLPEAERAFSELKERGFSPDITTLNSMVSIYGRRQMVAKANGVLDYMKERGFTPSMATYNSLMYMHSRSADFGKSEEILREILAKGIKPDIISYNTVIYAYCRNTRMRDASRIFSEMRNSGIVPDVITYNTFIGSYAADSMFEEAIGVVRYMIKHGCRPNQNTYNSIVDGYCKLNRKDEAKLFVEDLRNLDPHAPKGEDLRLLERIVKKWP

SEQ ID NO: 79679 - protein, 658 aa, Arabidopsis thaliana
  peptide (1)..(658): Ceres Seq. ID no. 12652540
MKQKDYQSMLDNSVVAIIISMLGKEGRVSSAANMFNGLQEDGFSLDVYSYTSLISAFANSGRYREAVNVFKKMEEDGCKPTLITYNVILNVFGKMGTPWNKITSLVEKMKSDGIAPDAYTYNTLITCCKRGSLHQEAAQVFEEMKAAGFSYDKVTYNALLDVYGKSHRPKEAMKVLNEMVLNGFSPSIVTYNSLISAYARDGMLDEAMELKNQMAEKGTKPDVFTYTTLLSGFERAGKVESAMSIFEEMRNAGCKPNICTFNAFIKMYGNRGKFTEMMKIFDEINVCGLSPDIVTWNTLLAVFGQNGMDSEVSGVFKEMKRAGFVPERETFNTLISAYSRCGSFEQAMTVYRRMLDAGVTPDLSTYNTVLAALARGGMWEQSEKVLAEMEDGRCKPNELTYCSLLHAYANGKEIGLMHSLAEEVYSGVIEPRAVLLKTLVLVCSKCDLLPEAERAFSELKERGFSPDITTLNSMVSIYGRRQMVAKANGVLDYMKERGFTPSMATYNSLMYMHSRSADFGKSEEILREILAKGIKPDIISYNTVIYAYCRNTRMRDASRIFSEMRNSGIVPDVITYNTFIGSYAADSMFEEAIGVVRYMIKHGCRPNQNTYNSIVDGYCKLNRKDEAKLFVEDLRNLDPHAPKGEDLRLLERIVKKWP

SEQ ID NO: 79680 - protein, 650 aa, Arabidopsis thaliana
  peptide (1)..(650): Ceres Seq. ID no. 12652541
MLDNSVVAIIISMLGKEGRVSSAANMFNGLQEDGFSLDVYSYTSLISAFANSGRYREAVNVFKKMEEDGCKPTLITYNVILNVFGKMGTPWNKITSLVEKMKSDGIAPDAYTYNTLITCCKRGSLHQEAAQVFEEMKAAGFSYDKVTYNALLDVYGKSHRPKEAMKVLNEMVLNGFSPSIVTYNSLISAYARDGMLDEAMELKNQMAEKGTKPDVFTYTTLLSGFERAGKVESAMSIFEEMRNAGCKPNICTFNAFIKMYGNRGKFTEMMKIFDEINVCGLSPDIVTWNTLLAVFGQNGMDSEVSGVFKEMKRAGFVPERETFNTLISAYSRCGSFEQAMTVYRRMLDAGVTPDLSTYNTVLAALARGGMWEQSEKVLAEMEDGRCKPNELTYCSLLHAYANGKEIGLMHSLAEEVYSGVIEPRAVLLKTLVLVCSKCDLLPEAERAFSELKERGFSPDITTLNSMVSIYGRRQMVAKANGVLDYMKERGFTPSMATYNSLMYMHSRSADFGKSEEILREILAKGIKPDIISYNTVIYAYCRNTRMRDASRIFSEMRNSGIVPDVITYNTFIGSYAADSMFEEAIGVVRYMIKHGCRPNQNTYNSIVDGYCKLNRKDEAKLFVEDLRNLDPHAPKGEDLRLLERIVKKWP

SEQ ID NO: 79681 - DNA, 2344 bp, Arabidopsis thaliana
  misc_feature (1)..(2344): Ceres Seq. ID no. 12652598
  misc_feature (1)..(2344): Ortholog of  Ceres SEQ ID NO 13655640 as cited in SEQ ID NO 63844
aacaacctccaaattcttcctcagatctccaaaggaatccaatgaaaaacttaaactaatgttgaaacttcctccgagattcttctctgtttactcaactctcatccacattcttgcctccttcctctgctcctccgacgtcagaggcgatttcccggcgacgagattcgatctcggaacgttgactctctcaagcctcaaacttctcggcgatgctcatctcaacaacggaactattaagctcactcgtgaactctctgttcccacttccaccgccggaaaagctctttatgggaaaccggtaaaattccggcacccggaaactaaatctccggcgagtttcactacttacttctccttctcggtaacgaatctcaatccttcctcaattggcggtggattagctttcgtaatctcccctgatgaagattacttaggatccaccggtggatttctcggtctaaccgaagaaaccggatccgggtcgggttttgtggcggttgaattcgatacgttaatggatgtgcaattcaaagacgttaacgggaaccacgtgggattggatctaaacgccgtcgtttcagccgcggtagccgatttgggaaacgtcgacatcgatctcaagagcggaaacgccgtgaattcatggatcacttatgacgggtcgggtcgggttttaacagtttacgtctcttactcaaacttgaaacctaaatcgccgattttgtcggttcctctcgatcttgatcgttacgtaagcgattcaatgtttgttggattctctggatcaacacaaggaagcactgagattcacagtgtcgattggtggagctttagttcatctttcgaagaatcatcggaatcaccaccgccgatgcctaattctcctcctccgtcgtcaccgtcttcatcaatcacaccatccctatccaccgtccggagaaaaaccgccgatccatcgtcctcttgccgtaacaaactctgtaaaaaatcaccagccgccgtcgccggagtagtaaccgccggagcatttttcttagcattattcgccggagtgataatctgggtttactctaaaaagatcaaatacactcgaaagtctgaatctttagcatcggaaataatgaaatcgccgagagagttcacttacaaggagctgaaattagccaccgactgtttcagctcatcgagagtcatcggaaacggagcattcggcaccgtctacaaaggaatcttacaagattccggcgaaattatcgcaatcaaaagatgcagccacatttctcaaggaaacacagaattcttatcggaattatctctaatcggaaccctccgtcaccggaatcttctccgtcttcaaggctattgcagagaaaaaggcgaaattctgttaatttatgatctaatgcctaatggatcacttgataaagcactctacgagtctccgactacattaccctggcctcaccggagaaaaatacttcttggagtcgcttctgctttggcttatttgcatcaagagtgcgagaatcagatcattcaccgtgatgttaaaacaagtaacattatgctcgacgcgaattttaatccgaagttaggtgattttggactcgcgaggcaaacggagcacgataaatcgccggacgcaaccgccgccgctggaacaatggggtatttagcgccggagtatttgttaaccggtcgagcgacggagaaaaccgacgtttttagctacggagccgttgttttagaagtatgcactggtagaagacccataacccgacccgaaccggaacccggtttaagacccggtttgaggtcgagtttggtagattgggtttggggtttgtatagagaagggaagttattgaccgccgtggacgagcggttgagtgagtttaacccggaggagatgagtcgggttatgatggtgggccttgcttgttcacaacccgatccggtcaccaggcccactatgagaagtgtggttcagattcttgttggtgaagctgatgtgccggaagttccgattgcgaaaccgtcgtcgtcgatgagttttagtacgtcggagttattgcttacgttacaagacagtgtatcggactgtaatgaagttttggctccgatttcaacgacttcttgttcctcgtcggaacacgacatcttcattgtcggcaaggaccgatcggtttgaaataaattattcaaatgacaattaatataaaatacgaagcacaattttgtacgtaaattgaaaataaacaaaaaccaaaaacatactaattgtaaaaatgttggatttacatgtatattttctgttcgattttaataattcttggttttg

SEQ ID NO: 79682 - protein, 730 aa, Arabidopsis thaliana
  peptide (1)..(730): Ceres Seq. ID no. 12652599
TTSKFFLRSPKESNEKLKLMLKLPPRFFSVYSTLIHILASFLCSSDVRGDFPATRFDLGTLTLSSLKLLGDAHLNNGTIKLTRELSVPTSTAGKALYGKPVKFRHPETKSPASFTTYFSFSVTNLNPSSIGGGLAFVISPDEDYLGSTGGFLGLTEETGSGSGFVAVEFDTLMDVQFKDVNGNHVGLDLNAVVSAAVADLGNVDIDLKSGNAVNSWITYDGSGRVLTVYVSYSNLKPKSPILSVPLDLDRYVSDSMFVGFSGSTQGSTEIHSVDWWSFSSSFEESSESPPPMPNSPPPSSPSSSITPSLSTVRRKTADPSSSCRNKLCKKSPAAVAGVVTAGAFFLALFAGVIIWVYSKKIKYTRKSESLASEIMKSPREFTYKELKLATDCFSSSRVIGNGAFGTVYKGILQDSGEIIAIKRCSHISQGNTEFLSELSLIGTLRHRNLLRLQGYCREKGEILLIYDLMPNGSLDKALYESPTTLPWPHRRKILLGVASALAYLHQECENQIIHRDVKTSNIMLDANFNPKLGDFGLARQTEHDKSPDATAAAGTMGYLAPEYLLTGRATEKTDVFSYGAVVLEVCTGRRPITRPEPEPGLRPGLRSSLVDWVWGLYREGKLLTAVDERLSEFNPEEMSRVMMVGLACSQPDPVTRPTMRSVVQILVGEADVPEVPIAKPSSSMSFSTSELLLTLQDSVSDCNEVLAPISTTSCSSSEHDIFIVGKDRSV

SEQ ID NO: 79683 - protein, 711 aa, Arabidopsis thaliana
  peptide (1)..(711): Ceres Seq. ID no. 12652600
MLKLPPRFFSVYSTLIHILASFLCSSDVRGDFPATRFDLGTLTLSSLKLLGDAHLNNGTIKLTRELSVPTSTAGKALYGKPVKFRHPETKSPASFTTYFSFSVTNLNPSSIGGGLAFVISPDEDYLGSTGGFLGLTEETGSGSGFVAVEFDTLMDVQFKDVNGNHVGLDLNAVVSAAVADLGNVDIDLKSGNAVNSWITYDGSGRVLTVYVSYSNLKPKSPILSVPLDLDRYVSDSMFVGFSGSTQGSTEIHSVDWWSFSSSFEESSESPPPMPNSPPPSSPSSSITPSLSTVRRKTADPSSSCRNKLCKKSPAAVAGVVTAGAFFLALFAGVIIWVYSKKIKYTRKSESLASEIMKSPREFTYKELKLATDCFSSSRVIGNGAFGTVYKGILQDSGEIIAIKRCSHISQGNTEFLSELSLIGTLRHRNLLRLQGYCREKGEILLIYDLMPNGSLDKALYESPTTLPWPHRRKILLGVASALAYLHQECENQIIHRDVKTSNIMLDANFNPKLGDFGLARQTEHDKSPDATAAAGTMGYLAPEYLLTGRATEKTDVFSYGAVVLEVCTGRRPITRPEPEPGLRPGLRSSLVDWVWGLYREGKLLTAVDERLSEFNPEEMSRVMMVGLACSQPDPVTRPTMRSVVQILVGEADVPEVPIAKPSSSMSFSTSELLLTLQDSVSDCNEVLAPISTTSCSSSEHDIFIVGKDRSV

SEQ ID NO: 79684 - protein, 558 aa, Arabidopsis thaliana
  peptide (1)..(558): Ceres Seq. ID no. 12652601
MDVQFKDVNGNHVGLDLNAVVSAAVADLGNVDIDLKSGNAVNSWITYDGSGRVLTVYVSYSNLKPKSPILSVPLDLDRYVSDSMFVGFSGSTQGSTEIHSVDWWSFSSSFEESSESPPPMPNSPPPSSPSSSITPSLSTVRRKTADPSSSCRNKLCKKSPAAVAGVVTAGAFFLALFAGVIIWVYSKKIKYTRKSESLASEIMKSPREFTYKELKLATDCFSSSRVIGNGAFGTVYKGILQDSGEIIAIKRCSHISQGNTEFLSELSLIGTLRHRNLLRLQGYCREKGEILLIYDLMPNGSLDKALYESPTTLPWPHRRKILLGVASALAYLHQECENQIIHRDVKTSNIMLDANFNPKLGDFGLARQTEHDKSPDATAAAGTMGYLAPEYLLTGRATEKTDVFSYGAVVLEVCTGRRPITRPEPEPGLRPGLRSSLVDWVWGLYREGKLLTAVDERLSEFNPEEMSRVMMVGLACSQPDPVTRPTMRSVVQILVGEADVPEVPIAKPSSSMSFSTSELLLTLQDSVSDCNEVLAPISTTSCSSSEHDIFIVGKDRSV

SEQ ID NO: 79685 - DNA, 1856 bp, Arabidopsis thaliana
  misc_feature (1)..(1856): Ceres Seq. ID no. 12652602
  misc_feature (1)..(1856): Ortholog of  Ceres SEQ ID NO 14314536 as cited in SEQ ID NO 52436
aaaaataaaaaccgccgaatccaatttacttctttagttgagagaaacggggcaggcactgagtaagcacacaaaattgaagcaacctatatgagtgttcttgatcaaaagcttctttctcagattatcatttctcctaaaaattagtccttttaagcaaattaatcccaaagattgatactttgttttcctgagattcttcttttacttcactgtttctgggttttgtaatttgatggtgatggatgataaagataaatatcgcgaagtagtagaacattggtcttgcgaaggtacttctccagctctaatggttggagattctactgagataacagaaatgctatcaccgagccaacatcaacgatggcgaggccttgtgttagatatacaatcgagagaagctcatggcgatttcttgagagcaaatggttccttaattcatagccccgtttccaaaaggttcaagttttctccaatgtccagccctagaactgggagacgtgttggatcaatgagtccttcctcgtcaagaaacagaacgaatcagaagaatttcaaaaacaggaaccacagtgcagatattgaggaaggtgttgtgtcccctttaggagatggtagtgataagtcttatattccaagaacatggtctctcactaatctcttagctcctagaaaatctaagaagacagagtcttttataactcactcaaaccctgagtccatgaacgggaggtatgccgttgaggttgatccggttacatccatgaaaggggagcgtttactgcctattcgtcgtacacgctctgtccccacattcttcaacaaagatggaagtgtaaagccgtcaagtgttttccgcgtgattcctactccgtctcgtggggatgagaagagactagagatgacgcaggcatcgaaattgaatgaaaatgatgatggtggagaagatgttcctgaagaagaagctgtgtgtagaatctgtatggttgaaatggaagaagatgaagaagcttttaagatggaatgtatgtgcaaaggggaactagctcttgcccacaaaacgtgcactatcaaatggtttacaattaaagggaacataacatgtgatgtgtgtaagcaagaggtgagaaatctcccggttacccttctacgtgtgcaggattctcaaaaccgttctagagcagccagggatatcgagatttcacggttcaataatgtatggcaagatattccaattcttgtcattgtaagcatgcttgcatacttctgtttccttgaacagcttctgattatagatatgaaatctagcgccgttgcaatagctttaccgttctcttgcattatcggtcttcttgcatcaatgatatcaacaacaatggtgaagaagaactatgtatggatctacgccaccgttcagttcggttttgtggtccttttcgctcagcttttctacagagttgtaagatttgatgtgaagcagccggtaatgtgcattgtcttagccactatgatcggatttggactcaccatgaccggcacaacagctattaacgagtatttgaaatggaggagaagcaattcccacctgccagaagagccagcaagtactcaggtggtttgacagcagcgtagatcttttgagtgaagctagagtccctaaagggttggatcggttttcaattaaccggtcgggattcggttttcggtttagctttaatcgacttgtctaggttgagatcagatttggttttcaatacttccaagtctttttttttttgccaactaaaatataaggaatgatgataggcacacacatgacacataaaatcataatgaacagtagtatgattagc

SEQ ID NO: 79686 - protein, 462 aa, Arabidopsis thaliana
  peptide (1)..(462): Ceres Seq. ID no. 12652603
MVMDDKDKYREVVEHWSCEGTSPALMVGDSTEITEMLSPSQHQRWRGLVLDIQSREAHGDFLRANGSLIHSPVSKRFKFSPMSSPRTGRRVGSMSPSSSRNRTNQKNFKNRNHSADIEEGVVSPLGDGSDKSYIPRTWSLTNLLAPRKSKKTESFITHSNPESMNGRYAVEVDPVTSMKGERLLPIRRTRSVPTFFNKDGSVKPSSVFRVIPTPSRGDEKRLEMTQASKLNENDDGGEDVPEEEAVCRICMVEMEEDEEAFKMECMCKGELALAHKTCTIKWFTIKGNITCDVCKQEVRNLPVTLLRVQDSQNRSRAARDIEISRFNNVWQDIPILVIVSMLAYFCFLEQLLIIDMKSSAVAIALPFSCIIGLLASMISTTMVKKNYVWIYATVQFGFVVLFAQLFYRVVRFDVKQPVMCIVLATMIGFGLTMTGTTAINEYLKWRRSNSHLPEEPASTQVV

SEQ ID NO: 79687 - protein, 460 aa, Arabidopsis thaliana
  peptide (1)..(460): Ceres Seq. ID no. 12652604
MDDKDKYREVVEHWSCEGTSPALMVGDSTEITEMLSPSQHQRWRGLVLDIQSREAHGDFLRANGSLIHSPVSKRFKFSPMSSPRTGRRVGSMSPSSSRNRTNQKNFKNRNHSADIEEGVVSPLGDGSDKSYIPRTWSLTNLLAPRKSKKTESFITHSNPESMNGRYAVEVDPVTSMKGERLLPIRRTRSVPTFFNKDGSVKPSSVFRVIPTPSRGDEKRLEMTQASKLNENDDGGEDVPEEEAVCRICMVEMEEDEEAFKMECMCKGELALAHKTCTIKWFTIKGNITCDVCKQEVRNLPVTLLRVQDSQNRSRAARDIEISRFNNVWQDIPILVIVSMLAYFCFLEQLLIIDMKSSAVAIALPFSCIIGLLASMISTTMVKKNYVWIYATVQFGFVVLFAQLFYRVVRFDVKQPVMCIVLATMIGFGLTMTGTTAINEYLKWRRSNSHLPEEPASTQVV

SEQ ID NO: 79688 - protein, 437 aa, Arabidopsis thaliana
  peptide (1)..(437): Ceres Seq. ID no. 12652605
MVGDSTEITEMLSPSQHQRWRGLVLDIQSREAHGDFLRANGSLIHSPVSKRFKFSPMSSPRTGRRVGSMSPSSSRNRTNQKNFKNRNHSADIEEGVVSPLGDGSDKSYIPRTWSLTNLLAPRKSKKTESFITHSNPESMNGRYAVEVDPVTSMKGERLLPIRRTRSVPTFFNKDGSVKPSSVFRVIPTPSRGDEKRLEMTQASKLNENDDGGEDVPEEEAVCRICMVEMEEDEEAFKMECMCKGELALAHKTCTIKWFTIKGNITCDVCKQEVRNLPVTLLRVQDSQNRSRAARDIEISRFNNVWQDIPILVIVSMLAYFCFLEQLLIIDMKSSAVAIALPFSCIIGLLASMISTTMVKKNYVWIYATVQFGFVVLFAQLFYRVVRFDVKQPVMCIVLATMIGFGLTMTGTTAINEYLKWRRSNSHLPEEPASTQVV

SEQ ID NO: 79689 - DNA, 1398 bp, Arabidopsis thaliana
  misc_feature (1)..(1398): Ceres Seq. ID no. 12652638
  misc_feature (1)..(1398): Ortholog of  Ceres SEQ ID NO 13597574 as cited in SEQ ID NO 64677
  misc_feature (1)..(1398): Ortholog of  Ceres SEQ ID NO 12617417 as cited in SEQ ID NO 65089
  misc_feature (1)..(1398): Ortholog of  Ceres SEQ ID NO 13597678 as cited in SEQ ID NO 65375
  misc_feature (1)..(1398): Ortholog of  Ceres SEQ ID NO 13596180 as cited in SEQ ID NO 67941
  misc_feature (1)..(1398): Ortholog of  Ceres SEQ ID NO 13591190 as cited in SEQ ID NO 68044
  misc_feature (1)..(1398): Ortholog of  Ceres SEQ ID NO 13595961 as cited in SEQ ID NO 68223
atgacggaagtgttattgttgccgggaactaaatcggagaattcaaaaccaccgcacatagtggtgtttccattcccagcacaaggccacttacttcctctacttgacttaactcaccaactctgcctccgtggattcaacgtctccgtcatcgttactcccggtaaccttacttacctctctcctcttctctccgctcatccctcctccgtcacctccgtcgttttccctttccctcctcatccttcactctctcccggcgtcgaaaacgttaaagacgtcggaaattcaggaaatctcccgatcatggcttctcttcgtcagctacgagaaccaatcatcaactggttccaatctcatccgaatccgcctatcgctctcatctccgatttcttcctcggatggactcacgatctctgcaatcaaatcggtatccccagattcgctttcttctccatcagcttcttcttagtttccgttcttcaattttgcttcgagaacatcgatctaatcaaatcaacggatccgattcatctccttgatcttcctcgcgctccgattttcaaagaagagcatcttccgtctatagtccgacgaagtctccaaactccgtcaccggatctcgaatcaatcaaagatttctccatgaatttgttgagctacggatctgttttcaattcttctgagattctggaagatgattatcttcagtacgtgaaacagaggatgggtcatgatcgggtttatgttattggcccgctttgttcaatcgggtcgggtcttaaatcgaattcgggttctgtagacccgagtttgctgagttggttagacggatccccaaacgggtcagttctatacgtttgtttcggaagtcaaaaggcgttgactaaagaccagtgtgatgctttggctctaggcttagagaaaagcatgacccggtttgtttgggtggttaagaaagatccgatacccgacgggtttgaggatcgggtttccggaaggggattggtggtaagaggatgggtctcccagctggcggtgttgcgacacgtggcggttggtggatttttgagccattgtggatggaactcagtgcttgaagggataacgagtggggctgtgatcttgggctggcccatggaggcggaccagtttgtgaacgcgaggttgcttgtggagcatttgggtgttgcggttagggtttgcgaaggtggtgaaactgtgcctgactcggatgagttgggtcgggtcatagcggaaacgatgggtgagggaggacgcgaggtggctgctcgggctgaggagatacggcggaagaccgaggctgccgtgacggaggcaaatggaagctccgttgaaaatgtacaaagacttgtcaaagaatttgaaaaagtctaa

SEQ ID NO: 79690 - protein, 465 aa, Arabidopsis thaliana
  peptide (1)..(465): Ceres Seq. ID no. 12652639
MTEVLLLPGTKSENSKPPHIVVFPFPAQGHLLPLLDLTHQLCLRGFNVSVIVTPGNLTYLSPLLSAHPSSVTSVVFPFPPHPSLSPGVENVKDVGNSGNLPIMASLRQLREPIINWFQSHPNPPIALISDFFLGWTHDLCNQIGIPRFAFFSISFFLVSVLQFCFENIDLIKSTDPIHLLDLPRAPIFKEEHLPSIVRRSLQTPSPDLESIKDFSMNLLSYGSVFNSSEILEDDYLQYVKQRMGHDRVYVIGPLCSIGSGLKSNSGSVDPSLLSWLDGSPNGSVLYVCFGSQKALTKDQCDALALGLEKSMTRFVWVVKKDPIPDGFEDRVSGRGLVVRGWVSQLAVLRHVAVGGFLSHCGWNSVLEGITSGAVILGWPMEADQFVNARLLVEHLGVAVRVCEGGETVPDSDELGRVIAETMGEGGREVAARAEEIRRKTEAAVTEANGSSVENVQRLVKEFEKV

SEQ ID NO: 79691 - protein, 363 aa, Arabidopsis thaliana
  peptide (1)..(363): Ceres Seq. ID no. 12652640
MASLRQLREPIINWFQSHPNPPIALISDFFLGWTHDLCNQIGIPRFAFFSISFFLVSVLQFCFENIDLIKSTDPIHLLDLPRAPIFKEEHLPSIVRRSLQTPSPDLESIKDFSMNLLSYGSVFNSSEILEDDYLQYVKQRMGHDRVYVIGPLCSIGSGLKSNSGSVDPSLLSWLDGSPNGSVLYVCFGSQKALTKDQCDALALGLEKSMTRFVWVVKKDPIPDGFEDRVSGRGLVVRGWVSQLAVLRHVAVGGFLSHCGWNSVLEGITSGAVILGWPMEADQFVNARLLVEHLGVAVRVCEGGETVPDSDELGRVIAETMGEGGREVAARAEEIRRKTEAAVTEANGSSVENVQRLVKEFEKV

SEQ ID NO: 79692 - protein, 250 aa, Arabidopsis thaliana
  peptide (1)..(250): Ceres Seq. ID no. 12652641
MNLLSYGSVFNSSEILEDDYLQYVKQRMGHDRVYVIGPLCSIGSGLKSNSGSVDPSLLSWLDGSPNGSVLYVCFGSQKALTKDQCDALALGLEKSMTRFVWVVKKDPIPDGFEDRVSGRGLVVRGWVSQLAVLRHVAVGGFLSHCGWNSVLEGITSGAVILGWPMEADQFVNARLLVEHLGVAVRVCEGGETVPDSDELGRVIAETMGEGGREVAARAEEIRRKTEAAVTEANGSSVENVQRLVKEFEKV

SEQ ID NO: 79693 - DNA, 891 bp, Arabidopsis thaliana
  misc_feature (1)..(891): Ceres Seq. ID no. 12652672
  misc_feature (1)..(891): Ortholog of  Ceres SEQ ID NO 15176155 as cited in SEQ ID NO 0
atggagttctggggtgttgaagttaagaatggcaaaccacttcacctagatcctgggctagacaggctcgtgcacatctctcaggttgctttgggagagagtaagaacaatgtaaccgaaccaatccagctttacgtgactgttggatcggataagcttctcattggaacgctatctcatgagaagtttcctcagctgtctacggagattgtcttggaaaggaactttgcgctgtctcatacttggaagaatgggagcgttttcttctctggttacaaacctgaggatttgattgatgatcaacttgaggctgctggtttcaaaggtaaatggggacttttatatccaccagctgctccgaaatctgctgcgaaacaggtgaactttcagttgccaaatgaagatgtcaaagccaagcaagatgatgacgctgacggtagtgaagaagattcttcagatgatgatgatagtgaaaactctggagacgaggaggaagagaaggttactgctgaatctgacagtgaggaagatgactcatcagacgacgaagaagatgactcctcagaagaggaaaccccaaagaagcctgaagaacccaagaagaggtctgcagaacccaactcctccaagaaccctgcgtccaacaagaaggctaagtttgtaactcctcagaaaacagattcgaagaaaccgcatgtccatgttgcaactcctcatccctcaaaacaggcgggtaagaattctggtggaggcagcactggagagacatcgaagcagcagcagacaccgaagtctgcaggagcgtttgggtgcaagtcgtgcaccagaacctttacttcggaaatgggattgcagtctcacacaaaggccaaacacagtgcagctgcttga

SEQ ID NO: 79694 - protein, 296 aa, Arabidopsis thaliana
  peptide (1)..(296): Ceres Seq. ID no. 12652673
MEFWGVEVKNGKPLHLDPGLDRLVHISQVALGESKNNVTEPIQLYVTVGSDKLLIGTLSHEKFPQLSTEIVLERNFALSHTWKNGSVFFSGYKPEDLIDDQLEAAGFKGKWGLLYPPAAPKSAAKQVNFQLPNEDVKAKQDDDADGSEEDSSDDDDSENSGDEEEEKVTAESDSEEDDSSDDEEDDSSEEETPKKPEEPKKRSAEPNSSKNPASNKKAKFVTPQKTDSKKPHVHVATPHPSKQAGKNSGGGSTGETSKQQQTPKSAGAFGCKSCTRTFTSEMGLQSHTKAKHSAAA

SEQ ID NO: 79695 - DNA, 2271 bp, Arabidopsis thaliana
  misc_feature (1)..(2271): Ceres Seq. ID no. 12652678
  misc_feature (1)..(2271): Ortholog of  Ceres SEQ ID NO 14309715 as cited in SEQ ID NO 55353
  misc_feature (1)..(2271): Ortholog of  Ceres SEQ ID NO 13595521 as cited in SEQ ID NO 59840
cacacacacacacacacacaacactgtgtcttctctccctctgtttctgtttttagatctctcttctctcttctttctttccaaaaatcatcttctccttctccacctttcattatctttcttctcttaccaaaaccctttaaatacaaaaaaaaactaaaacacataaaaaaaatattgaattctcctttttcccgacaatctgagtttctcaggcagagaagacagagattttcaccgtaagggcaaaaaacgaaaaactctgtctctctgtttctgtttcgtccttccttggctttgatttcttacaccaaaagagacatctttaaagaatctcacattgttccctattgcttgtctcacaagagaatccttgatctagggttcttgcttccctcccctgtttttttctttaaattcctcctctgttttctttttgttctcgtcggagtaagaagagatggagctaggagatacgacgtcggtgattccagactcgttcatgggatacagagacgacataacaatgcaaatgtcaatggttttggatcagatacgagctccattgattgttccagcccttaggctcggtgtttacatctgtttgacaatgtcggtgatgctctttgttgaaagggtttacatgggaattgttatctctcttgtgaagctgtttggtcgaaaaccagataaacgtttcaaatatgaaccaatcaaagatgacatcgagcttggaaactctgcttacccgatggttcttattcaaatcccaatgttcaacgaacgagaggtttatcaactatctattggagctgcttgtggactctcatggccttctgatcgaatcgttattcaagttcttgatgattccactgatccaacgatcaaagatctagtggagatggagtgtagcaggtgggcgagtaaaggagtaaacatcaagtatgagatcagagacaacagaaatggatacaaagcaggagctttgaaagaaggaatgaagaagagttatgtcaaaagctgcgattacgttgcaatcttcgacgctgattttcaacctgaagcggattttctatggagaaccgtaccgtatctactccataaccctaagcttgctcttgttcaagctcgctggaaattcgtaaattcggatgaatgtttgatgacaaggatgcaagaaatgtctttggattatcattttacggtggaacaagaagttggttcttctacttacgctttcttcggattcaatggaactgcgggaatatggagaatatcggcattaaacgaagctggtggttggaaagatagaacgaccgtggaagatatggatttggccgtgagagctagtctcaagggttggaaattcttgtacctcggttctttgaaggttaaaaacgagttgccaagtacattcaaggcttataggtatcaacagcacaggtggtcatgtggtccagctaatcttttcaggaaaatggcattcgaaatcatgactaataagaacgtgactttgtggaagaaagttcatgtgatatatagcttcttcgtggttagaaagctagtggcacacattgttaccttcatcttctactgtgtgatcttacccgctacagttcttgtaccggaagttactgttccgaaatggggagcggtttacattccttcagtcattactctcctcaacgccgttgggacaccaaggtcattgcatcttatggtcttttggattctgttcgagaatgtgatgtctcttcacagaacaaaagctacctttatcggtttactcgaaggaggaagagttaatgagtggattgttacagagaagctgggagatgttaaggctaaatcagccaccaagacttcaaagaaggttattcgttttagatttggagatagaattcatgtgttggaactcggtgtaggaatgtatctgttatttgtgggatgttatgacgcgttttttgggaagaatcattattatctataccttttcgcacaagcaatcgcgttcttcattgcgggattcgggcaaattgggacaattgtgcctaaccattgaagggaaaaaggagttttcgagcgacgaattgctcgaggataagaagatgatttgttttctttctttttggattcgctagctatttaaattcttgttggtgtgaatagagagaattgatgataccattgttacagaaatggtgtgtgtagtgtggaagataaaggatacttatagtaaagaagaaatatactttgaaggtttttttcaga

SEQ ID NO: 79696 - protein, 533 aa, Arabidopsis thaliana
  peptide (1)..(533): Ceres Seq. ID no. 12652679
MELGDTTSVIPDSFMGYRDDITMQMSMVLDQIRAPLIVPALRLGVYICLTMSVMLFVERVYMGIVISLVKLFGRKPDKRFKYEPIKDDIELGNSAYPMVLIQIPMFNEREVYQLSIGAACGLSWPSDRIVIQVLDDSTDPTIKDLVEMECSRWASKGVNIKYEIRDNRNGYKAGALKEGMKKSYVKSCDYVAIFDADFQPEADFLWRTVPYLLHNPKLALVQARWKFVNSDECLMTRMQEMSLDYHFTVEQEVGSSTYAFFGFNGTAGIWRISALNEAGGWKDRTTVEDMDLAVRASLKGWKFLYLGSLKVKNELPSTFKAYRYQQHRWSCGPANLFRKMAFEIMTNKNVTLWKKVHVIYSFFVVRKLVAHIVTFIFYCVILPATVLVPEVTVPKWGAVYIPSVITLLNAVGTPRSLHLMVFWILFENVMSLHRTKATFIGLLEGGRVNEWIVTEKLGDVKAKSATKTSKKVIRFRFGDRIHVLELGVGMYLLFVGCYDAFFGKNHYYLYLFAQAIAFFIAGFGQIGTIVPNH

SEQ ID NO: 79697 - protein, 519 aa, Arabidopsis thaliana
  peptide (1)..(519): Ceres Seq. ID no. 12652680
MGYRDDITMQMSMVLDQIRAPLIVPALRLGVYICLTMSVMLFVERVYMGIVISLVKLFGRKPDKRFKYEPIKDDIELGNSAYPMVLIQIPMFNEREVYQLSIGAACGLSWPSDRIVIQVLDDSTDPTIKDLVEMECSRWASKGVNIKYEIRDNRNGYKAGALKEGMKKSYVKSCDYVAIFDADFQPEADFLWRTVPYLLHNPKLALVQARWKFVNSDECLMTRMQEMSLDYHFTVEQEVGSSTYAFFGFNGTAGIWRISALNEAGGWKDRTTVEDMDLAVRASLKGWKFLYLGSLKVKNELPSTFKAYRYQQHRWSCGPANLFRKMAFEIMTNKNVTLWKKVHVIYSFFVVRKLVAHIVTFIFYCVILPATVLVPEVTVPKWGAVYIPSVITLLNAVGTPRSLHLMVFWILFENVMSLHRTKATFIGLLEGGRVNEWIVTEKLGDVKAKSATKTSKKVIRFRFGDRIHVLELGVGMYLLFVGCYDAFFGKNHYYLYLFAQAIAFFIAGFGQIGTIVPNH

SEQ ID NO: 79698 - protein, 511 aa, Arabidopsis thaliana
  peptide (1)..(511): Ceres Seq. ID no. 12652681
MQMSMVLDQIRAPLIVPALRLGVYICLTMSVMLFVERVYMGIVISLVKLFGRKPDKRFKYEPIKDDIELGNSAYPMVLIQIPMFNEREVYQLSIGAACGLSWPSDRIVIQVLDDSTDPTIKDLVEMECSRWASKGVNIKYEIRDNRNGYKAGALKEGMKKSYVKSCDYVAIFDADFQPEADFLWRTVPYLLHNPKLALVQARWKFVNSDECLMTRMQEMSLDYHFTVEQEVGSSTYAFFGFNGTAGIWRISALNEAGGWKDRTTVEDMDLAVRASLKGWKFLYLGSLKVKNELPSTFKAYRYQQHRWSCGPANLFRKMAFEIMTNKNVTLWKKVHVIYSFFVVRKLVAHIVTFIFYCVILPATVLVPEVTVPKWGAVYIPSVITLLNAVGTPRSLHLMVFWILFENVMSLHRTKATFIGLLEGGRVNEWIVTEKLGDVKAKSATKTSKKVIRFRFGDRIHVLELGVGMYLLFVGCYDAFFGKNHYYLYLFAQAIAFFIAGFGQIGTIVPNH

SEQ ID NO: 79699 - DNA, 1155 bp, Arabidopsis thaliana
  misc_feature (1)..(1155): Ceres Seq. ID no. 12652690
  misc_feature (1)..(1155): Ortholog of  Ceres SEQ ID NO 13581701 as cited in SEQ ID NO 51151
  misc_feature (1)..(1155): Ortholog of  Ceres SEQ ID NO 14306565 as cited in SEQ ID NO 53000
  misc_feature (1)..(1155): Ortholog of  Ceres SEQ ID NO 14315491 as cited in SEQ ID NO 57026
  misc_feature (1)..(1155): Ortholog of  Ceres SEQ ID NO 14312192 as cited in SEQ ID NO 59249
atgggttgtgtttcttcgaaactaggcaagaagaaactcataagagagattagagtcaacaatggcggcgatcacattgtctctcttacttcaactacttatggtcatctcgatctcgatgaacgagcagagacctctcctaagtcactggaagttactaaaggcgaagtctttgaatctgaaatcataccgagaagatctattaagagagatgatccggagattatcaatacttgggagcttatggaagatcttgaagattcaatgcacgtttctaatccacagaagattagtcccaaatctcgtggtattttcggtaaatcatggaagactccggtgaaatcggttgttgaatctccgaagagaggaagtagtaagagatttggagggaaagagaataattcgagaggtgtgagtccgaatcagattctgaagccgaagaacattcttgaaacaccgaagagaggtgtaatgcgtttgagttttcctcttaaatctgaagaatcttcggtgacggttacgcagaggaggaagagttatagtccaatgtttgatccagatcttgtggcttcttacgaaagagagttgtctcaagagaaagaacagatcaagatggtgatttctccggtggtgcacgagagcagaaaaacagagaaaacagagagaattcttgagaagttcccagagaaatgtccaccgggaggagagcactctgtggtgatctacataacaactcttagagggatacggaagacgtttgaggattgtaatgtggtaagatcgatattagattcacacgaagttcgattctcagagcgagatgtgtcgatgcactcggtttttaaggaagagatcaggggcattatgggaacgaaacatgtgaagatacctgcggtattcgttaaagggaggatggtaggaagtgttgaggaagtgatgaggttagaagaggagggcaaattgggaatattacttgaaggtattccggcggcgaggcttggaggcagttgctgccgtggatgtggaggaatgagatttatgatgtgtgttgtttgcaacggaagctgcaaggttagggaggaagagaagaagagtatggttaagtgtttgaagtgtaatgagaatggtttggttctatgtccaatttgttcttaa

SEQ ID NO: 79700 - protein, 384 aa, Arabidopsis thaliana
  peptide (1)..(384): Ceres Seq. ID no. 12652691
MGCVSSKLGKKKLIREIRVNNGGDHIVSLTSTTYGHLDLDERAETSPKSLEVTKGEVFESEIIPRRSIKRDDPEIINTWELMEDLEDSMHVSNPQKISPKSRGIFGKSWKTPVKSVVESPKRGSSKRFGGKENNSRGVSPNQILKPKNILETPKRGVMRLSFPLKSEESSVTVTQRRKSYSPMFDPDLVASYERELSQEKEQIKMVISPVVHESRKTEKTERILEKFPEKCPPGGEHSVVIYITTLRGIRKTFEDCNVVRSILDSHEVRFSERDVSMHSVFKEEIRGIMGTKHVKIPAVFVKGRMVGSVEEVMRLEEEGKLGILLEGIPAARLGGSCCRGCGGMRFMMCVVCNGSCKVREEEKKSMVKCLKCNENGLVLCPICS

SEQ ID NO: 79701 - protein, 303 aa, Arabidopsis thaliana
  peptide (1)..(303): Ceres Seq. ID no. 12652692
MEDLEDSMHVSNPQKISPKSRGIFGKSWKTPVKSVVESPKRGSSKRFGGKENNSRGVSPNQILKPKNILETPKRGVMRLSFPLKSEESSVTVTQRRKSYSPMFDPDLVASYERELSQEKEQIKMVISPVVHESRKTEKTERILEKFPEKCPPGGEHSVVIYITTLRGIRKTFEDCNVVRSILDSHEVRFSERDVSMHSVFKEEIRGIMGTKHVKIPAVFVKGRMVGSVEEVMRLEEEGKLGILLEGIPAARLGGSCCRGCGGMRFMMCVVCNGSCKVREEEKKSMVKCLKCNENGLVLCPICS

SEQ ID NO: 79702 - protein, 296 aa, Arabidopsis thaliana
  peptide (1)..(296): Ceres Seq. ID no. 12652693
MHVSNPQKISPKSRGIFGKSWKTPVKSVVESPKRGSSKRFGGKENNSRGVSPNQILKPKNILETPKRGVMRLSFPLKSEESSVTVTQRRKSYSPMFDPDLVASYERELSQEKEQIKMVISPVVHESRKTEKTERILEKFPEKCPPGGEHSVVIYITTLRGIRKTFEDCNVVRSILDSHEVRFSERDVSMHSVFKEEIRGIMGTKHVKIPAVFVKGRMVGSVEEVMRLEEEGKLGILLEGIPAARLGGSCCRGCGGMRFMMCVVCNGSCKVREEEKKSMVKCLKCNENGLVLCPICS

SEQ ID NO: 79703 - DNA, 1865 bp, Arabidopsis thaliana
  misc_feature (1)..(1865): Ceres Seq. ID no. 12652702
  misc_feature (1)..(1865): Ortholog of  Ceres SEQ ID NO 15175849 as cited in SEQ ID NO 55644
gtaccaagaagattgcggagagtcgtgaaaagttttgagctttgatcactcactcactagtaatggaggctcttcaattttccagcgtgaatagagttccttgtactctgagctgtaccggaaataggagaattaaggctgccttcagctctgcgttcaccggtggcaccatcaattcagcttctctgtcctcctctaggaatctctccacgcgagagatatggagttgggtgaaatcgaagactgttgttggccatggaagatacagaagaagccaagtgagagccgagatgtttggtcagttgactggtggcctcgaggctgcttggagcaaactcaaaggcgaagaggtcttgactaaggacaatattgctgagccaatgcgggatatcagaagagctctcctggaagcagatgtgagtctcccagttgttagaaggtttgttcagtctgttagtgaccaagccgttggaatgggtgtcattcgtggagtcaaaccagatcagcaattggtcaagattgtacatgatgagctagtgaaattgatgggtggagaagtatctgagttacagtttgctaaatcaggtcctacagtaatattgttggctgggctccaaggagttggaaagacaacggtttgtgctaaactagcttgttacctaaagaagcagggaaaatcttgcatgcttattgctggagatgtataccgacctgctgctatcgatcaacttgtcattttaggtgaacaggttggtgtgccggtttatacagcagggactgatgtaaaacctgcagatatagctaagcaaggtctaaaagaagctaaaaagaacaatgttgatgtagttattatggatactgcagggaggcttcagatagataaaggcatgatggacgaattaaaagacgtgaagaaatttctgaatccaacagaagtgttactagttgttgatgccatgactggacaagaagctgcagcactggtgacgacattcaatgtagagataggaattacaggagccattttgacaaagctagatggtgattcaagaggtggtgctgctttgagtgtcaaggaggtatcaggaaaaccgattaaactggtaggacgtggagagcgaatggaggatcttgaacccttttatccagatcgaatggctggacgaattctaggaatgggagatgtgctttcatttgtagagaaggcaacagaagttatgcgtcaagaagatgcagaagatctgcagaagaagataatgagtgcaaagttcgacttcaacgattttctaaagcagactcgtgctgtagcgaaaatgggttcgatgacacgagttcttggaatgattcccggaatggggaaagtgagtccagcacaaatccgagaagcggaaaagaatcttttagtcatggaagcaatgattgaagtgatgacacccgaggaaagagagagaccagagttactagcagaatctccagagagaagaaaaagaatcgctaaagattcaggaaagacagaacaacaggtgagcgcacttgtagcacaaatcttccaaatgagagtgaaaatgaagaacttgatgggagtgatggaaggaggatcaattccagcattaagcggtctcgaggacgcattgaaagcagaacaaaaggctccacctggaactgcaaggaggaagagaaaggcagactcaaggaagaaatttgtagagtcagcatcaagcaagcctggtcctcgtggcttcggctctggtaactaaaactatttcagcccaatttggttaatttctaaacggattatttttttgtataagttaatgaatgagacagaaaccttacaagttaattaccaatttgttgacaaaact

SEQ ID NO: 79704 - protein, 564 aa, Arabidopsis thaliana
  peptide (1)..(564): Ceres Seq. ID no. 12652703
MEALQFSSVNRVPCTLSCTGNRRIKAAFSSAFTGGTINSASLSSSRNLSTREIWSWVKSKTVVGHGRYRRSQVRAEMFGQLTGGLEAAWSKLKGEEVLTKDNIAEPMRDIRRALLEADVSLPVVRRFVQSVSDQAVGMGVIRGVKPDQQLVKIVHDELVKLMGGEVSELQFAKSGPTVILLAGLQGVGKTTVCAKLACYLKKQGKSCMLIAGDVYRPAAIDQLVILGEQVGVPVYTAGTDVKPADIAKQGLKEAKKNNVDVVIMDTAGRLQIDKGMMDELKDVKKFLNPTEVLLVVDAMTGQEAAALVTTFNVEIGITGAILTKLDGDSRGGAALSVKEVSGKPIKLVGRGERMEDLEPFYPDRMAGRILGMGDVLSFVEKATEVMRQEDAEDLQKKIMSAKFDFNDFLKQTRAVAKMGSMTRVLGMIPGMGKVSPAQIREAEKNLLVMEAMIEVMTPEERERPELLAESPERRKRIAKDSGKTEQQVSALVAQIFQMRVKMKNLMGVMEGGSIPALSGLEDALKAEQKAPPGTARRKRKADSRKKFVESASSKPGPRGFGSGN

SEQ ID NO: 79705 - protein, 488 aa, Arabidopsis thaliana
  peptide (1)..(488): Ceres Seq. ID no. 12652704
MFGQLTGGLEAAWSKLKGEEVLTKDNIAEPMRDIRRALLEADVSLPVVRRFVQSVSDQAVGMGVIRGVKPDQQLVKIVHDELVKLMGGEVSELQFAKSGPTVILLAGLQGVGKTTVCAKLACYLKKQGKSCMLIAGDVYRPAAIDQLVILGEQVGVPVYTAGTDVKPADIAKQGLKEAKKNNVDVVIMDTAGRLQIDKGMMDELKDVKKFLNPTEVLLVVDAMTGQEAAALVTTFNVEIGITGAILTKLDGDSRGGAALSVKEVSGKPIKLVGRGERMEDLEPFYPDRMAGRILGMGDVLSFVEKATEVMRQEDAEDLQKKIMSAKFDFNDFLKQTRAVAKMGSMTRVLGMIPGMGKVSPAQIREAEKNLLVMEAMIEVMTPEERERPELLAESPERRKRIAKDSGKTEQQVSALVAQIFQMRVKMKNLMGVMEGGSIPALSGLEDALKAEQKAPPGTARRKRKADSRKKFVESASSKPGPRGFGSGN

SEQ ID NO: 79706 - protein, 458 aa, Arabidopsis thaliana
  peptide (1)..(458): Ceres Seq. ID no. 12652705
MRDIRRALLEADVSLPVVRRFVQSVSDQAVGMGVIRGVKPDQQLVKIVHDELVKLMGGEVSELQFAKSGPTVILLAGLQGVGKTTVCAKLACYLKKQGKSCMLIAGDVYRPAAIDQLVILGEQVGVPVYTAGTDVKPADIAKQGLKEAKKNNVDVVIMDTAGRLQIDKGMMDELKDVKKFLNPTEVLLVVDAMTGQEAAALVTTFNVEIGITGAILTKLDGDSRGGAALSVKEVSGKPIKLVGRGERMEDLEPFYPDRMAGRILGMGDVLSFVEKATEVMRQEDAEDLQKKIMSAKFDFNDFLKQTRAVAKMGSMTRVLGMIPGMGKVSPAQIREAEKNLLVMEAMIEVMTPEERERPELLAESPERRKRIAKDSGKTEQQVSALVAQIFQMRVKMKNLMGVMEGGSIPALSGLEDALKAEQKAPPGTARRKRKADSRKKFVESASSKPGPRGFGSGN

SEQ ID NO: 79707 - DNA, 1461 bp, Arabidopsis thaliana
  misc_feature (1)..(1461): Ceres Seq. ID no. 12652736
  misc_feature (1)..(1461): Ortholog of  Ceres SEQ ID NO 13594209 as cited in SEQ ID NO 59089
  misc_feature (1)..(1461): Ortholog of  Ceres SEQ ID NO 13585332 as cited in SEQ ID NO 60654
  misc_feature (1)..(1461): Ortholog of  Ceres SEQ ID NO 14316039 as cited in SEQ ID NO 62062
  misc_feature (1)..(1461): Ortholog of  Ceres SEQ ID NO 15176783 as cited in SEQ ID NO 65590
  misc_feature (1)..(1461): Ortholog of  Ceres SEQ ID NO 14308019 as cited in SEQ ID NO 65849
  misc_feature (1)..(1461): Ortholog of  Ceres SEQ ID NO 13502874 as cited in SEQ ID NO 66298
  misc_feature (1)..(1461): Ortholog of  Ceres SEQ ID NO 14307944 as cited in SEQ ID NO 66503
  misc_feature (1)..(1461): Ortholog of  Ceres SEQ ID NO 12614124 as cited in SEQ ID NO 68392
atgcttctgaaaccctaccctcctggccccaaaggcttacccgtcattggaaatattctcatgatgaaccagtttaaccaccggggtctggccaagctcagccgtatatacggtgggttgctccatctccgcctcggattttcccacattttcgtcgtttcttctccggacattgcgcgtcaagtcctccaagtccaagaccacgttttctcaaaccgtcccaccacaatcgcaatccgatacttgacctacggaggatccgatcttgcattctgcaattacggcccgttttggcgtcggatgagaaaactctacgtcatgatgctctttagccgtaaacgggccgagtcgtgggtctctgttgatgaagaggtccacaaatcggtccgtttagtggcttccaacgtcggaaaaccactaaacatatgtaaactagcattttccctatcaagagacataacgttccgagcagctttcggttcctcctcatccacatctgatgaaagccgtttggacgagttccttgagatcattcaagagttctctaagctctttggtgagtttaacgtagcggattatgtcccgtcgtggctcagttggattgacccgcaagggataaacgggcgagttgagaaagcccgaaaatctctagacggtttcattgagtccgtcatcgatgatcacttgcacaagaagaagagagaacatgataacgttgacgaagagactgatatggtagatcaattacttgcgttctacgaagaagaagtcaaagtcaacaactcagtcaccaaaattaatctcgataacataaaaggcatcatcatggatgtgatgttcggaggaacggagacggtggcattagcaatcgaatgggtgctaaccgagatactccggagccccgagaacatgaaacgggtccaggacgagctaacgagtgtggtcgggcttgacagatggcgcgtggaggacacgcacctcgagaagctcactttcctcaagtgtatcctcaaggagaccctccggctccacccgcctttccctctcctcctccacgagacggtgaaggacactgagatttccggttacttcatccccaagggttcgcgtgtgatggtcaatacctacgctctagggcgtgacccgaattcttggtccgacccggaaagttttaacccgggtaggtttttaaacccgattgctccggatctgaaggggaataatttcgaatttgttccattcgggtcgggtcggagatcgtgcccgggtatgcaactcgggttgtacgcatttgagcttgcggtggctcatcttctacactgcttcacgtggagtttaccggacggtatgaatcccggtgacgtcgacaccgttgaaggaccgggtctcaccgttcctaaggcaattcctttggtggcggtgccgaccacgcgcctcctctgccccatcgtcgtctcgtga

SEQ ID NO: 79708 - protein, 486 aa, Arabidopsis thaliana
  peptide (1)..(486): Ceres Seq. ID no. 12652737
MLLKPYPPGPKGLPVIGNILMMNQFNHRGLAKLSRIYGGLLHLRLGFSHIFVVSSPDIARQVLQVQDHVFSNRPTTIAIRYLTYGGSDLAFCNYGPFWRRMRKLYVMMLFSRKRAESWVSVDEEVHKSVRLVASNVGKPLNICKLAFSLSRDITFRAAFGSSSSTSDESRLDEFLEIIQEFSKLFGEFNVADYVPSWLSWIDPQGINGRVEKARKSLDGFIESVIDDHLHKKKREHDNVDEETDMVDQLLAFYEEEVKVNNSVTKINLDNIKGIIMDVMFGGTETVALAIEWVLTEILRSPENMKRVQDELTSVVGLDRWRVEDTHLEKLTFLKCILKETLRLHPPFPLLLHETVKDTEISGYFIPKGSRVMVNTYALGRDPNSWSDPESFNPGRFLNPIAPDLKGNNFEFVPFGSGRRSCPGMQLGLYAFELAVAHLLHCFTWSLPDGMNPGDVDTVEGPGLTVPKAIPLVAVPTTRLLCPIVVS

SEQ ID NO: 79709 - protein, 466 aa, Arabidopsis thaliana
  peptide (1)..(466): Ceres Seq. ID no. 12652738
MMNQFNHRGLAKLSRIYGGLLHLRLGFSHIFVVSSPDIARQVLQVQDHVFSNRPTTIAIRYLTYGGSDLAFCNYGPFWRRMRKLYVMMLFSRKRAESWVSVDEEVHKSVRLVASNVGKPLNICKLAFSLSRDITFRAAFGSSSSTSDESRLDEFLEIIQEFSKLFGEFNVADYVPSWLSWIDPQGINGRVEKARKSLDGFIESVIDDHLHKKKREHDNVDEETDMVDQLLAFYEEEVKVNNSVTKINLDNIKGIIMDVMFGGTETVALAIEWVLTEILRSPENMKRVQDELTSVVGLDRWRVEDTHLEKLTFLKCILKETLRLHPPFPLLLHETVKDTEISGYFIPKGSRVMVNTYALGRDPNSWSDPESFNPGRFLNPIAPDLKGNNFEFVPFGSGRRSCPGMQLGLYAFELAVAHLLHCFTWSLPDGMNPGDVDTVEGPGLTVPKAIPLVAVPTTRLLCPIVVS

SEQ ID NO: 79710 - protein, 465 aa, Arabidopsis thaliana
  peptide (1)..(465): Ceres Seq. ID no. 12652739
MNQFNHRGLAKLSRIYGGLLHLRLGFSHIFVVSSPDIARQVLQVQDHVFSNRPTTIAIRYLTYGGSDLAFCNYGPFWRRMRKLYVMMLFSRKRAESWVSVDEEVHKSVRLVASNVGKPLNICKLAFSLSRDITFRAAFGSSSSTSDESRLDEFLEIIQEFSKLFGEFNVADYVPSWLSWIDPQGINGRVEKARKSLDGFIESVIDDHLHKKKREHDNVDEETDMVDQLLAFYEEEVKVNNSVTKINLDNIKGIIMDVMFGGTETVALAIEWVLTEILRSPENMKRVQDELTSVVGLDRWRVEDTHLEKLTFLKCILKETLRLHPPFPLLLHETVKDTEISGYFIPKGSRVMVNTYALGRDPNSWSDPESFNPGRFLNPIAPDLKGNNFEFVPFGSGRRSCPGMQLGLYAFELAVAHLLHCFTWSLPDGMNPGDVDTVEGPGLTVPKAIPLVAVPTTRLLCPIVVS

SEQ ID NO: 79711 - DNA, 1191 bp, Arabidopsis thaliana
  misc_feature (1)..(1191): Ceres Seq. ID no. 12652746
  misc_feature (1)..(1191): Ortholog of  Ceres SEQ ID NO 14304654 as cited in SEQ ID NO 53301
  misc_feature (1)..(1191): Ortholog of  Ceres SEQ ID NO 15172291 as cited in SEQ ID NO 55046
  misc_feature (1)..(1191): Ortholog of  Ceres SEQ ID NO 13658153 as cited in SEQ ID NO 66326
  misc_feature (1)..(1191): Ortholog of  Ceres SEQ ID NO 14303011 as cited in SEQ ID NO 67226
atggattcaagattcaccgattccacaactaccttaagatgtaatggtaagagtgaaaatgagaggaaaaacggcgatgaagaaagaattagtaaatactcctttgtgagtccactgtgtatgcgtggaggagatggatacaatagttactccagcaattctcttcttcagagaagagtgttatcaaaggctaaaccggtattggttaagaacacaaaggacctgatgataaacttaaactttcctacatacattaaagtagctgatttgggctgttcatcaggacagaatacgttcttggcaatgtctgaaattatcaatacaatcaatgtgttttgtcaacagaggaaccaaaacccaccagaaatagattgttgtctaaatgatctccctagtaacgattttaacacaacgttcaaattcatacaattcttcaatgggatgaacatcacgagcaaagaatcatactttgtctatggagtccccggttctttctactcgaggctcttccctcggaggagtcttcatttcgtacattcctcttatggtctccattggctctctaaggttcctgaagggcttgagaagaataagatgagtgtgtacatcacaaattcaagtcctctaagcacatacaaggcttacttaaatcaattccaaagagattttgcgacattccttaaactgcgttctgaagagatggtttctaatggacgcatggttctcactttcattggtcgaaacactattgataatccattgcatagagattgttgtcacttttggacattattatccaaatctcttcgtgacctagtcgccgagggccttgtgagtgcatcaaaggtagattcattctacttaccgttttatgaccccaacgaaaaagaaataaaggagatggtacagaaagaaggttcctttgaaatcagagacttggagacacatggatatgatcttggccattgtaaccaagacgagtcaaagagaagtaaatcagggcaaaatgaagctaattacatcagagcggtgagtgaaccactgcttgcggctcactttggagatgccattatcaacatattgtttaacaagtttgcatgtcatgtgtctcaacatgttagttgcaggaacaaaacgaccgtcagcatagtcgtttcactgactaagaaaaaaactttcctcatgtcctaa

SEQ ID NO: 79712 - protein, 396 aa, Arabidopsis thaliana
  peptide (1)..(396): Ceres Seq. ID no. 12652747
MDSRFTDSTTTLRCNGKSENERKNGDEERISKYSFVSPLCMRGGDGYNSYSSNSLLQRRVLSKAKPVLVKNTKDLMINLNFPTYIKVADLGCSSGQNTFLAMSEIINTINVFCQQRNQNPPEIDCCLNDLPSNDFNTTFKFIQFFNGMNITSKESYFVYGVPGSFYSRLFPRRSLHFVHSSYGLHWLSKVPEGLEKNKMSVYITNSSPLSTYKAYLNQFQRDFATFLKLRSEEMVSNGRMVLTFIGRNTIDNPLHRDCCHFWTLLSKSLRDLVAEGLVSASKVDSFYLPFYDPNEKEIKEMVQKEGSFEIRDLETHGYDLGHCNQDESKRSKSGQNEANYIRAVSEPLLAAHFGDAIINILFNKFACHVSQHVSCRNKTTVSIVVSLTKKKTFLMS

SEQ ID NO: 79713 - protein, 356 aa, Arabidopsis thaliana
  peptide (1)..(356): Ceres Seq. ID no. 12652748
MRGGDGYNSYSSNSLLQRRVLSKAKPVLVKNTKDLMINLNFPTYIKVADLGCSSGQNTFLAMSEIINTINVFCQQRNQNPPEIDCCLNDLPSNDFNTTFKFIQFFNGMNITSKESYFVYGVPGSFYSRLFPRRSLHFVHSSYGLHWLSKVPEGLEKNKMSVYITNSSPLSTYKAYLNQFQRDFATFLKLRSEEMVSNGRMVLTFIGRNTIDNPLHRDCCHFWTLLSKSLRDLVAEGLVSASKVDSFYLPFYDPNEKEIKEMVQKEGSFEIRDLETHGYDLGHCNQDESKRSKSGQNEANYIRAVSEPLLAAHFGDAIINILFNKFACHVSQHVSCRNKTTVSIVVSLTKKKTFLMS

SEQ ID NO: 79714 - protein, 321 aa, Arabidopsis thaliana
  peptide (1)..(321): Ceres Seq. ID no. 12652749
MINLNFPTYIKVADLGCSSGQNTFLAMSEIINTINVFCQQRNQNPPEIDCCLNDLPSNDFNTTFKFIQFFNGMNITSKESYFVYGVPGSFYSRLFPRRSLHFVHSSYGLHWLSKVPEGLEKNKMSVYITNSSPLSTYKAYLNQFQRDFATFLKLRSEEMVSNGRMVLTFIGRNTIDNPLHRDCCHFWTLLSKSLRDLVAEGLVSASKVDSFYLPFYDPNEKEIKEMVQKEGSFEIRDLETHGYDLGHCNQDESKRSKSGQNEANYIRAVSEPLLAAHFGDAIINILFNKFACHVSQHVSCRNKTTVSIVVSLTKKKTFLMS

SEQ ID NO: 79715 - DNA, 1158 bp, Arabidopsis thaliana
  misc_feature (1)..(1158): Ceres Seq. ID no. 12652750
  misc_feature (1)..(1158): Ortholog of  Ceres SEQ ID NO 15172291 as cited in SEQ ID NO 55046
  misc_feature (1)..(1158): Ortholog of  Ceres SEQ ID NO 13658153 as cited in SEQ ID NO 66326
atgtctctgtgtttaatattatgcaggtgtgattgtaaaagtgagtataaagtggatgaagagagaagtagtaaatatccttttgtgggtgctctatgtatgaatggtggagatgtagacaacagttacaccaccaagtctcttcttcagaaaagagttttatcaataaccaatccgatcttagttaaaaacacagaggaaatgttgacaaacttggactttcctaaatgcattaaggtagccgatttaggttgttcttcaggacaaaacacgtttttggccatgtctgagatcgtcaacacaatcaatgtattgtgtcaaaaatggaaccaaagccggccggagatagattgttgtttgaatgatctccctactaacgatttcaacacaacgttcaagttcataactttcttcaacaagaaactcacaagcaacggatcgtgcttcgtctctggagtccctggttccttttactcgaggctcttccctcgcaagagtctccatttcatatattcaatttacagtattcatttcctctctaaggttcccgatggattggagaagaacaagatgagtgtgtacataacaagttcaagtcctctaagtgaatacaaggcttacttgaatcaattcaaaagagattttacaacatttctaagaatgcgttctgaagagatggtacataatggacgtatggttctcacactaatcggcagaaacactctagataatccattgtatagggattgttgtcattgttggacattgttatccaattctctccgtgacttagtcttcgagggtcttttgagtgcgtcaaaggtatattcgttcaaaatgccattttatgatccgaatgaggaagaagtgaaggagattataagaaatgagggatccttccaaataaatgacttggagatgcatgaatttgatctcggccatagtaaggagaaatgtagcttacaatcacacaaagctaaagcagggcaaaaagaagctagttgtatacgagcggtgactgaaacaatgctcgtagctcactttggagatgacattatcgatgcattgtttcacaagtatgcacatcatgtgtctcagcatgctagctgcagggtaaaaacgagtgtaactctaatagtttcactggttcggaaataa

SEQ ID NO: 79716 - protein, 385 aa, Arabidopsis thaliana
  peptide (1)..(385): Ceres Seq. ID no. 12652751
MSLCLILCRCDCKSEYKVDEERSSKYPFVGALCMNGGDVDNSYTTKSLLQKRVLSITNPILVKNTEEMLTNLDFPKCIKVADLGCSSGQNTFLAMSEIVNTINVLCQKWNQSRPEIDCCLNDLPTNDFNTTFKFITFFNKKLTSNGSCFVSGVPGSFYSRLFPRKSLHFIYSIYSIHFLSKVPDGLEKNKMSVYITSSSPLSEYKAYLNQFKRDFTTFLRMRSEEMVHNGRMVLTLIGRNTLDNPLYRDCCHCWTLLSNSLRDLVFEGLLSASKVYSFKMPFYDPNEEEVKEIIRNEGSFQINDLEMHEFDLGHSKEKCSLQSHKAKAGQKEASCIRAVTETMLVAHFGDDIIDALFHKYAHHVSQHASCRVKTSVTLIVSLVRK

SEQ ID NO: 79717 - protein, 352 aa, Arabidopsis thaliana
  peptide (1)..(352): Ceres Seq. ID no. 12652752
MNGGDVDNSYTTKSLLQKRVLSITNPILVKNTEEMLTNLDFPKCIKVADLGCSSGQNTFLAMSEIVNTINVLCQKWNQSRPEIDCCLNDLPTNDFNTTFKFITFFNKKLTSNGSCFVSGVPGSFYSRLFPRKSLHFIYSIYSIHFLSKVPDGLEKNKMSVYITSSSPLSEYKAYLNQFKRDFTTFLRMRSEEMVHNGRMVLTLIGRNTLDNPLYRDCCHCWTLLSNSLRDLVFEGLLSASKVYSFKMPFYDPNEEEVKEIIRNEGSFQINDLEMHEFDLGHSKEKCSLQSHKAKAGQKEASCIRAVTETMLVAHFGDDIIDALFHKYAHHVSQHASCRVKTSVTLIVSLVRK

SEQ ID NO: 79718 - protein, 318 aa, Arabidopsis thaliana
  peptide (1)..(318): Ceres Seq. ID no. 12652753
MLTNLDFPKCIKVADLGCSSGQNTFLAMSEIVNTINVLCQKWNQSRPEIDCCLNDLPTNDFNTTFKFITFFNKKLTSNGSCFVSGVPGSFYSRLFPRKSLHFIYSIYSIHFLSKVPDGLEKNKMSVYITSSSPLSEYKAYLNQFKRDFTTFLRMRSEEMVHNGRMVLTLIGRNTLDNPLYRDCCHCWTLLSNSLRDLVFEGLLSASKVYSFKMPFYDPNEEEVKEIIRNEGSFQINDLEMHEFDLGHSKEKCSLQSHKAKAGQKEASCIRAVTETMLVAHFGDDIIDALFHKYAHHVSQHASCRVKTSVTLIVSLVRK

SEQ ID NO: 79719 - DNA, 915 bp, Arabidopsis thaliana
  misc_feature (1)..(915): Ceres Seq. ID no. 12652776
  misc_feature (1)..(915): Ortholog of  Ceres SEQ ID NO 14304716 as cited in SEQ ID NO 53189
  misc_feature (1)..(915): Ortholog of  Ceres SEQ ID NO 14304898 as cited in SEQ ID NO 53598
atgaactcaatagtgggagaggtccaagaagctcaatacatttttccacactctttcacgaccaacaatgatccctcttatgatgatttgatcgaaatgaaaccaccaaagatccttgagacaacttacatatcaccttcttctcatcttcctccaaattcaaagccccatcatattcaccgtcattcttcctcaagaattctctctttcgaagattatggttcaaatgatatggaacacgagtactctcccacctacctaaactcaatctttagcccaaaattagaggctcaagtgcaaccacaccagaagagtgatgagtttaatcgaaaagggaccaagagggctcaaccgttttcaagaaaccaatccaatgctcaggatcacataatagccgaaagaaaacgtagagagaagcttactcaaagattcgtagctctttccgctctagttcctggccttaaaaagatggacaaggcttctgtgttgggagatgcattaaagcatataaagtatctccaagaaagagtgggagagttggaggaacagaagaaagaaagaagattggaatcaatggttcttgtgaagaagtctaagctgatcttggacgataataatcaatcattctcttcttcttgtgaagatggcttctcggacttggatcttcccgagatcgaggtaagattctcggatgaagatgttctaatcaagatcctttgcgagaagcaaaagggtcatcttgccaagattatggccgagattgagaaacttcatatcttgataactaattcaagtgtattgaattttggaccaactcttgatatcaccattatagctaagaaggagagtgatttcgacatgacactcatggatgttgtaaagagcttaaggtctgctttgtcgaatttcatatga

SEQ ID NO: 79720 - protein, 304 aa, Arabidopsis thaliana
  peptide (1)..(304): Ceres Seq. ID no. 12652777
MNSIVGEVQEAQYIFPHSFTTNNDPSYDDLIEMKPPKILETTYISPSSHLPPNSKPHHIHRHSSSRILSFEDYGSNDMEHEYSPTYLNSIFSPKLEAQVQPHQKSDEFNRKGTKRAQPFSRNQSNAQDHIIAERKRREKLTQRFVALSALVPGLKKMDKASVLGDALKHIKYLQERVGELEEQKKERRLESMVLVKKSKLILDDNNQSFSSSCEDGFSDLDLPEIEVRFSDEDVLIKILCEKQKGHLAKIMAEIEKLHILITNSSVLNFGPTLDITIIAKKESDFDMTLMDVVKSLRSALSNFI

SEQ ID NO: 79721 - protein, 272 aa, Arabidopsis thaliana
  peptide (1)..(272): Ceres Seq. ID no. 12652778
MKPPKILETTYISPSSHLPPNSKPHHIHRHSSSRILSFEDYGSNDMEHEYSPTYLNSIFSPKLEAQVQPHQKSDEFNRKGTKRAQPFSRNQSNAQDHIIAERKRREKLTQRFVALSALVPGLKKMDKASVLGDALKHIKYLQERVGELEEQKKERRLESMVLVKKSKLILDDNNQSFSSSCEDGFSDLDLPEIEVRFSDEDVLIKILCEKQKGHLAKIMAEIEKLHILITNSSVLNFGPTLDITIIAKKESDFDMTLMDVVKSLRSALSNFI

SEQ ID NO: 79722 - protein, 227 aa, Arabidopsis thaliana
  peptide (1)..(227): Ceres Seq. ID no. 12652779
MEHEYSPTYLNSIFSPKLEAQVQPHQKSDEFNRKGTKRAQPFSRNQSNAQDHIIAERKRREKLTQRFVALSALVPGLKKMDKASVLGDALKHIKYLQERVGELEEQKKERRLESMVLVKKSKLILDDNNQSFSSSCEDGFSDLDLPEIEVRFSDEDVLIKILCEKQKGHLAKIMAEIEKLHILITNSSVLNFGPTLDITIIAKKESDFDMTLMDVVKSLRSALSNFI

SEQ ID NO: 79723 - DNA, 1461 bp, Arabidopsis thaliana
  misc_feature (1)..(1461): Ceres Seq. ID no. 12652838
  misc_feature (1)..(1461): Ortholog of  Ceres SEQ ID NO 14302875 as cited in SEQ ID NO 66242
  misc_feature (1)..(1461): Ortholog of  Ceres SEQ ID NO 13660287 as cited in SEQ ID NO 67316
atgcaggtgggagaggagatggcgtcactcacaaaaatagcttgcccgattgtgatgacatcactcctcatattctcaagatcaataatctcaatgtggttcttgagtcatctcggaaaagtcgaactcgctggtggtgcactcgctatgggctttggaaacatcactggagtctccgtacttaaaggcctttccgttggtatggacccaatctgtggccaagccttcggagccaaacgttggaccgtacttagccacacgtttcagaaaatgttctgtctcttaattgtcgtctctgttccaatcgccgttacgtggctcaacatcgaacccattttcctacggttgggtcaggacccagatattaccaaggtagccaaaacctatatgctcttcttcgtccctgagctcttggctcaggccatgctccatccgcttcgaacgttccttagaacgcaaggcttaacatcaccgctcacgatatctgccattgtatccattcttcttcatcctctcttcaactacgtctttgtcgtgcgtatgcgtttaggcgttaagggtgtggccatcgcaatggctttcaacactatgaatatcgacgtgggactgctcgtttatacgtgcttctcggattctctaatcaaaccgtgggaagggctcgctttgcggtcacttttccgcggctggtggccgctgctttctctagccgcaccaagcgctatctcggtgtgtttggagtattggtggtatgagatcatgctttttctttgtgggcttcttgggaaccctaaagcaagcgtggccgccatgggaatattgattcagaccaccgggatactatacgtagtcccgtttgctattagcagcgccattgcaacccgtgtaggtcacgctcttggaggcggccaaccaacacgggcacaatgtacgaccgtgattggcttgatactcgcggtagcgtacggtttagcagctgctgtttttgtgaccgcgcttaggtcggtttggggaaagatgttcacggacgaaccggagattctcgggcttatttcggctgcgcttccgatcttggggctttgcgagattggaaactcgccacagacggctgcttgcggagtcttgactgggacggctaggcctaaagatggagcacgcgttaacctatgcgcattctacattgtgggcttgcctgtggcagttacgaccacgtttgggtttaaggttgggtttcgtgggctatggtttggactgttatctgcgcagatgacgtgtttggtaatgatgctttatacgttaatccgtacggactggtctcatcaagtgaagcgggcagaggaacttacctccgctgcagccgacaaaagccattcggaagacgaaaccgtccatgctgaagtacaagacgatgatgatgtgagtagcaatgatctggagattggtttactacaaaatacgaattga

SEQ ID NO: 79724 - protein, 486 aa, Arabidopsis thaliana
  peptide (1)..(486): Ceres Seq. ID no. 12652839
MQVGEEMASLTKIACPIVMTSLLIFSRSIISMWFLSHLGKVELAGGALAMGFGNITGVSVLKGLSVGMDPICGQAFGAKRWTVLSHTFQKMFCLLIVVSVPIAVTWLNIEPIFLRLGQDPDITKVAKTYMLFFVPELLAQAMLHPLRTFLRTQGLTSPLTISAIVSILLHPLFNYVFVVRMRLGVKGVAIAMAFNTMNIDVGLLVYTCFSDSLIKPWEGLALRSLFRGWWPLLSLAAPSAISVCLEYWWYEIMLFLCGLLGNPKASVAAMGILIQTTGILYVVPFAISSAIATRVGHALGGGQPTRAQCTTVIGLILAVAYGLAAAVFVTALRSVWGKMFTDEPEILGLISAALPILGLCEIGNSPQTAACGVLTGTARPKDGARVNLCAFYIVGLPVAVTTTFGFKVGFRGLWFGLLSAQMTCLVMMLYTLIRTDWSHQVKRAEELTSAAADKSHSEDETVHAEVQDDDDVSSNDLEIGLLQNTN

SEQ ID NO: 79725 - protein, 480 aa, Arabidopsis thaliana
  peptide (1)..(480): Ceres Seq. ID no. 12652840
MASLTKIACPIVMTSLLIFSRSIISMWFLSHLGKVELAGGALAMGFGNITGVSVLKGLSVGMDPICGQAFGAKRWTVLSHTFQKMFCLLIVVSVPIAVTWLNIEPIFLRLGQDPDITKVAKTYMLFFVPELLAQAMLHPLRTFLRTQGLTSPLTISAIVSILLHPLFNYVFVVRMRLGVKGVAIAMAFNTMNIDVGLLVYTCFSDSLIKPWEGLALRSLFRGWWPLLSLAAPSAISVCLEYWWYEIMLFLCGLLGNPKASVAAMGILIQTTGILYVVPFAISSAIATRVGHALGGGQPTRAQCTTVIGLILAVAYGLAAAVFVTALRSVWGKMFTDEPEILGLISAALPILGLCEIGNSPQTAACGVLTGTARPKDGARVNLCAFYIVGLPVAVTTTFGFKVGFRGLWFGLLSAQMTCLVMMLYTLIRTDWSHQVKRAEELTSAAADKSHSEDETVHAEVQDDDDVSSNDLEIGLLQNTN

SEQ ID NO: 79726 - protein, 468 aa, Arabidopsis thaliana
  peptide (1)..(468): Ceres Seq. ID no. 12652841
MTSLLIFSRSIISMWFLSHLGKVELAGGALAMGFGNITGVSVLKGLSVGMDPICGQAFGAKRWTVLSHTFQKMFCLLIVVSVPIAVTWLNIEPIFLRLGQDPDITKVAKTYMLFFVPELLAQAMLHPLRTFLRTQGLTSPLTISAIVSILLHPLFNYVFVVRMRLGVKGVAIAMAFNTMNIDVGLLVYTCFSDSLIKPWEGLALRSLFRGWWPLLSLAAPSAISVCLEYWWYEIMLFLCGLLGNPKASVAAMGILIQTTGILYVVPFAISSAIATRVGHALGGGQPTRAQCTTVIGLILAVAYGLAAAVFVTALRSVWGKMFTDEPEILGLISAALPILGLCEIGNSPQTAACGVLTGTARPKDGARVNLCAFYIVGLPVAVTTTFGFKVGFRGLWFGLLSAQMTCLVMMLYTLIRTDWSHQVKRAEELTSAAADKSHSEDETVHAEVQDDDDVSSNDLEIGLLQNTN

SEQ ID NO: 79727 - DNA, 756 bp, Arabidopsis thaliana
  misc_feature (1)..(756): Ceres Seq. ID no. 12652856
  misc_feature (1)..(756): Ortholog of  Ceres SEQ ID NO 12608127 as cited in SEQ ID NO 57579
  misc_feature (1)..(756): Ortholog of  Ceres SEQ ID NO 12634558 as cited in SEQ ID NO 0
atggaaaagtgtagtagagagacgttgcttttcatttttataacaatatcatcagtggcaaccagtacaagtacatggatgccgatggatggaaattatggtgctagctattgcttaagctggagactagcagtagagaccaacaatgtacgtgcgtggcgcattgttcctctgcagtgtctgcgttacgttgaggtatatatgcttgctggtcagtatgacagagacgtccagttgactgtggaccaaatcaaagtttatctcaatgagattatccttcctggtgatggcatggacgcatggatcttggatgttgatgatacttgcttctcaaacgtcttttactatcggcttaagagatatggatgtgacccttatgatccaactggatttagaacatgggcgatgaaaggagagtctccagcaatacaacctgttcttgaattgttctataaactgatagaaacaggcttcaaagttttcctagtaaccggaagagacgaagagacccttcgccaggcaacactagagaatttgcataaccaaggattcactggttatgaaaggctgattatgaggacagcggataacaaaagacaaagcgcaacaacatacaaaacaagaatcagaaaggagatgatggaagaaggttacaggatatggggaaatgtaggcgaccaatggagtgacttacaaggagaatattcaggggatcgtaccttcaagattcctaatcctatgtacttcgttccctaa

SEQ ID NO: 79728 - protein, 251 aa, Arabidopsis thaliana
  peptide (1)..(251): Ceres Seq. ID no. 12652857
MEKCSRETLLFIFITISSVATSTSTWMPMDGNYGASYCLSWRLAVETNNVRAWRIVPLQCLRYVEVYMLAGQYDRDVQLTVDQIKVYLNEIILPGDGMDAWILDVDDTCFSNVFYYRLKRYGCDPYDPTGFRTWAMKGESPAIQPVLELFYKLIETGFKVFLVTGRDEETLRQATLENLHNQGFTGYERLIMRTADNKRQSATTYKTRIRKEMMEEGYRIWGNVGDQWSDLQGEYSGDRTFKIPNPMYFVP

SEQ ID NO: 79729 - protein, 225 aa, Arabidopsis thaliana
  peptide (1)..(225): Ceres Seq. ID no. 12652858
MPMDGNYGASYCLSWRLAVETNNVRAWRIVPLQCLRYVEVYMLAGQYDRDVQLTVDQIKVYLNEIILPGDGMDAWILDVDDTCFSNVFYYRLKRYGCDPYDPTGFRTWAMKGESPAIQPVLELFYKLIETGFKVFLVTGRDEETLRQATLENLHNQGFTGYERLIMRTADNKRQSATTYKTRIRKEMMEEGYRIWGNVGDQWSDLQGEYSGDRTFKIPNPMYFVP

SEQ ID NO: 79730 - protein, 223 aa, Arabidopsis thaliana
  peptide (1)..(223): Ceres Seq. ID no. 12652859
MDGNYGASYCLSWRLAVETNNVRAWRIVPLQCLRYVEVYMLAGQYDRDVQLTVDQIKVYLNEIILPGDGMDAWILDVDDTCFSNVFYYRLKRYGCDPYDPTGFRTWAMKGESPAIQPVLELFYKLIETGFKVFLVTGRDEETLRQATLENLHNQGFTGYERLIMRTADNKRQSATTYKTRIRKEMMEEGYRIWGNVGDQWSDLQGEYSGDRTFKIPNPMYFVP

SEQ ID NO: 79731 - DNA, 591 bp, Arabidopsis thaliana
  misc_feature (1)..(591): Ceres Seq. ID no. 12652860
  misc_feature (1)..(591): Ortholog of  Ceres SEQ ID NO 13661508 as cited in SEQ ID NO 61302
  misc_feature (1)..(591): Ortholog of  Ceres SEQ ID NO 13596366 as cited in SEQ ID NO 68126
atgacaaaagttcacccaaaattcccaagcacatgcgaagagagcttgtgtgatagcaaagcagcagttgttttaacggtgtggaagaagtcccttctcttcaactgcgacggattcacggtttacaacgccaatggagagcttgtctttagagttgacaactacatgaattgtcctagagacaacatcgtccttatggatgcttccggctttcccctcctctccattcgccgcaagaagttgagtcttggagattgctggatggtatacgatggagaaacagagagagatccaatattcacggcgagaaagaacgttagcataatatctaaccggaaaagcttggcgtgggttagcgcaaagaagacggtgttgtacgagatagaaggatcttacggtcaaagaagctgcaaaatattggatgagaggaggaacaagaagaaaacggcggagatcaagaggaaagaaacggtgatcggaggagttgcctttggcaaagatgtctataagcttatcgttgaatcggagatggaacctcgtgtggccatggcacttaccatcatcctcgaccaaatgtttcgatcttcttga

SEQ ID NO: 79732 - protein, 196 aa, Arabidopsis thaliana
  peptide (1)..(196): Ceres Seq. ID no. 12652861
MTKVHPKFPSTCEESLCDSKAAVVLTVWKKSLLFNCDGFTVYNANGELVFRVDNYMNCPRDNIVLMDASGFPLLSIRRKKLSLGDCWMVYDGETERDPIFTARKNVSIISNRKSLAWVSAKKTVLYEIEGSYGQRSCKILDERRNKKKTAEIKRKETVIGGVAFGKDVYKLIVESEMEPRVAMALTIILDQMFRSS

SEQ ID NO: 79733 - protein, 141 aa, Arabidopsis thaliana
  peptide (1)..(141): Ceres Seq. ID no. 12652862
MNCPRDNIVLMDASGFPLLSIRRKKLSLGDCWMVYDGETERDPIFTARKNVSIISNRKSLAWVSAKKTVLYEIEGSYGQRSCKILDERRNKKKTAEIKRKETVIGGVAFGKDVYKLIVESEMEPRVAMALTIILDQMFRSS

SEQ ID NO: 79734 - protein, 131 aa, Arabidopsis thaliana
  peptide (1)..(131): Ceres Seq. ID no. 12652863
MDASGFPLLSIRRKKLSLGDCWMVYDGETERDPIFTARKNVSIISNRKSLAWVSAKKTVLYEIEGSYGQRSCKILDERRNKKKTAEIKRKETVIGGVAFGKDVYKLIVESEMEPRVAMALTIILDQMFRSS

SEQ ID NO: 79735 - DNA, 2105 bp, Arabidopsis thaliana
  misc_feature (1)..(2105): Ceres Seq. ID no. 12652864
  misc_feature (1)..(2105): Ortholog of  Ceres SEQ ID NO 13657008 as cited in SEQ ID NO 69164
gcgatcgggctaagtgcagaaacacttatacttgtgcattctgcaacacaacacacacacagagaattcgacgagagtatgatttgagtgtatcgagaacagagagagacattgatagagagatcgttggcaacgttttggggatccaatgcgttcgtaattgggaaagacatttcattcaattctaaatcgggaatatgaaaggcggaggcggtggtggaggaggtggtggcggaggaaaacgccggtggaaagttctggtgattggagttttggttcttgttattctttctatgcttgttcctcttgctttcttactcggtcttcacaatggctttcactctcctggatttgtcactgttcaaccggcttcttcatttgagagctttaccagaatcaatgctactaagcatacacagagagatgtatccgaacgggtcgatgaggttcttcaaaaaatcaatccagttcttcccaagaaaagcgacataaacgtgggttccagagatgtgaatgcaacaagcggcactgattctaaaaaaagaggattaccagtgtccccaactgttgttgccaatccaagccctgcaaataaaacaaaatcggaagcctcatatacaggtgttcagaggaaaatagtaagtggtgatgaaacttggagaacttgtgaagtgaaatatgggagctactgcctctggagggaggaaaataaggaaccaatgaaagatgccaaggtgaagcaaatgaaggaccagctgtttgtggctagagcatactatcccagtattgctaaaatgccttctcaaagcaagttgactcgggatatgaaacagaatatccaagagtttgagcgtattcttagtgaaagttctcaagatgctgaccttccaccacaggttgataaaaagttgcagaagatggaagctgtaattgcaaaggcaaagtcttttccagtcgactgtaacaatgttgacaagaaattgagacagatccttgatttgactgaggatgaagctagtttccacatgaaacagagtgtgttcctctaccagcttgcagtacagacaatgcctaagagtcttcattgcttgtcaatgcgactaactgtggaacatttcaagtcagattcacttgaggatcccattagtgagaaattttcagatccctcattacttcactttgttatcatctccgataatatactagcatcgtccgttgtgatcaactcaacggttgtacatgcaagggacagtaaaaactttgttttccatgtactgacagacgagcagaattactttgcaatgaaacaatggtttattaggaatccttgcaaacaatcaactgttcaagtattgaacattgaaaaactcgagctggacgattctgatatgaaactgtctttgtctgcggagttccgtgtttccttccccagtggtgaccttttggcgtctcaacagaatagaacacactacttatcccttttctctcaatctcactatcttcttcccaaattatttgacaaattggagaaggttgtgattctggatgatgacgttgtagtccagcgagacttatctcccctttgggaccttgatatggaagggaaagtgaatggcgctgttaagtcgtgcactgtgagattgggtcagctaaggagtctcaagagaggaaattttgataccaatgcttgtctctggatgtctggtttgaatgtcgttgatcttgctagatggagggcattgggtgtttcagaaacctatcaaaaatattataaagagatgagtagtggagatgagtcgagcgaagcaattgcattgcaggcaagcttgctcacatttcaagaccaagtatatgctcttgacgacaaatgggctctatcagggcttggttatgactactacatcaatgcacaagccataaaaaacgcagccatattgcactataacgggaacatgaagccgtggcttgagctgggaatcccaaattacaaaaactattggagaaggcatctgagtcgggaagatcggttcttgagtgactgtaacgtgaatccttgatgagtaagtagctacacggccaatgcttttagaagcaaggtcacacgc

SEQ ID NO: 79736 - protein, 619 aa, Arabidopsis thaliana
  peptide (1)..(619): Ceres Seq. ID no. 12652865
MKGGGGGGGGGGGGKRRWKVLVIGVLVLVILSMLVPLAFLLGLHNGFHSPGFVTVQPASSFESFTRINATKHTQRDVSERVDEVLQKINPVLPKKSDINVGSRDVNATSGTDSKKRGLPVSPTVVANPSPANKTKSEASYTGVQRKIVSGDETWRTCEVKYGSYCLWREENKEPMKDAKVKQMKDQLFVARAYYPSIAKMPSQSKLTRDMKQNIQEFERILSESSQDADLPPQVDKKLQKMEAVIAKAKSFPVDCNNVDKKLRQILDLTEDEASFHMKQSVFLYQLAVQTMPKSLHCLSMRLTVEHFKSDSLEDPISEKFSDPSLLHFVIISDNILASSVVINSTVVHARDSKNFVFHVLTDEQNYFAMKQWFIRNPCKQSTVQVLNIEKLELDDSDMKLSLSAEFRVSFPSGDLLASQQNRTHYLSLFSQSHYLLPKLFDKLEKVVILDDDVVVQRDLSPLWDLDMEGKVNGAVKSCTVRLGQLRSLKRGNFDTNACLWMSGLNVVDLARWRALGVSETYQKYYKEMSSGDESSEAIALQASLLTFQDQVYALDDKWALSGLGYDYYINAQAIKNAAILHYNGNMKPWLELGIPNYKNYWRRHLSREDRFLSDCNVNP

SEQ ID NO: 79737 - protein, 587 aa, Arabidopsis thaliana
  peptide (1)..(587): Ceres Seq. ID no. 12652866
MLVPLAFLLGLHNGFHSPGFVTVQPASSFESFTRINATKHTQRDVSERVDEVLQKINPVLPKKSDINVGSRDVNATSGTDSKKRGLPVSPTVVANPSPANKTKSEASYTGVQRKIVSGDETWRTCEVKYGSYCLWREENKEPMKDAKVKQMKDQLFVARAYYPSIAKMPSQSKLTRDMKQNIQEFERILSESSQDADLPPQVDKKLQKMEAVIAKAKSFPVDCNNVDKKLRQILDLTEDEASFHMKQSVFLYQLAVQTMPKSLHCLSMRLTVEHFKSDSLEDPISEKFSDPSLLHFVIISDNILASSVVINSTVVHARDSKNFVFHVLTDEQNYFAMKQWFIRNPCKQSTVQVLNIEKLELDDSDMKLSLSAEFRVSFPSGDLLASQQNRTHYLSLFSQSHYLLPKLFDKLEKVVILDDDVVVQRDLSPLWDLDMEGKVNGAVKSCTVRLGQLRSLKRGNFDTNACLWMSGLNVVDLARWRALGVSETYQKYYKEMSSGDESSEAIALQASLLTFQDQVYALDDKWALSGLGYDYYINAQAIKNAAILHYNGNMKPWLELGIPNYKNYWRRHLSREDRFLSDCNVNP

SEQ ID NO: 79738 - protein, 445 aa, Arabidopsis thaliana
  peptide (1)..(445): Ceres Seq. ID no. 12652867
MKDAKVKQMKDQLFVARAYYPSIAKMPSQSKLTRDMKQNIQEFERILSESSQDADLPPQVDKKLQKMEAVIAKAKSFPVDCNNVDKKLRQILDLTEDEASFHMKQSVFLYQLAVQTMPKSLHCLSMRLTVEHFKSDSLEDPISEKFSDPSLLHFVIISDNILASSVVINSTVVHARDSKNFVFHVLTDEQNYFAMKQWFIRNPCKQSTVQVLNIEKLELDDSDMKLSLSAEFRVSFPSGDLLASQQNRTHYLSLFSQSHYLLPKLFDKLEKVVILDDDVVVQRDLSPLWDLDMEGKVNGAVKSCTVRLGQLRSLKRGNFDTNACLWMSGLNVVDLARWRALGVSETYQKYYKEMSSGDESSEAIALQASLLTFQDQVYALDDKWALSGLGYDYYINAQAIKNAAILHYNGNMKPWLELGIPNYKNYWRRHLSREDRFLSDCNVNP

SEQ ID NO: 79739 - DNA, 750 bp, Arabidopsis thaliana
  misc_feature (1)..(750): Ceres Seq. ID no. 12652965
  misc_feature (1)..(750): Ortholog of  Ceres SEQ ID NO 15171228 as cited in SEQ ID NO 56948
atgtatccttgtggttacgttgctcaagtcaccaacttgtctcctcaagccactgagaaagatgttcataggttcttctctcactgtggtatcgtcgagctcgttgaaatcaccgggtgccaaggggatgcattaacggcttatgtaaccttcagagatgcgtatgctctggatatggctgtgttacttagcggagctacgatcgttgatcaaaccgtttggatatcggtctacggtgtctatttacatgaatctaacaatctcagacaagaagaagactatagtgttacggtgactcgttcagacgcgtttgcttcatcgcctggagaggccataaccgtggctcaacaagttgtgcagacgatgttagctaaaggctacgttttaagcaaagacgcgattggtaaagccaaagctttggatgagtctcagagattttcaagcttggtagcgaccaaattggcagagatcagccattaccttggcctcacacagaacattcagtcgagtatggaactcgtgagatcagcggacgagaagtatcatttctcggatttcactaaatccgcggttcttgtcacgggcacagctgctgtagccgcagccaccattacagggaaagtggctgcagctgcagcgactagtgtggtcaacagtcgttactttgctaatggggctttatggttctcagatgctttgggccgggctgcaaaagcagcggcccatatcggtggaggaggaagcaattga

SEQ ID NO: 79740 - protein, 249 aa, Arabidopsis thaliana
  peptide (1)..(249): Ceres Seq. ID no. 12652966
MYPCGYVAQVTNLSPQATEKDVHRFFSHCGIVELVEITGCQGDALTAYVTFRDAYALDMAVLLSGATIVDQTVWISVYGVYLHESNNLRQEEDYSVTVTRSDAFASSPGEAITVAQQVVQTMLAKGYVLSKDAIGKAKALDESQRFSSLVATKLAEISHYLGLTQNIQSSMELVRSADEKYHFSDFTKSAVLVTGTAAVAAATITGKVAAAAATSVVNSRYFANGALWFSDALGRAAKAAAHIGGGGSN

SEQ ID NO: 79741 - protein, 191 aa, Arabidopsis thaliana
  peptide (1)..(191): Ceres Seq. ID no. 12652967
MAVLLSGATIVDQTVWISVYGVYLHESNNLRQEEDYSVTVTRSDAFASSPGEAITVAQQVVQTMLAKGYVLSKDAIGKAKALDESQRFSSLVATKLAEISHYLGLTQNIQSSMELVRSADEKYHFSDFTKSAVLVTGTAAVAAATITGKVAAAAATSVVNSRYFANGALWFSDALGRAAKAAAHIGGGGSN

SEQ ID NO: 79742 - protein, 128 aa, Arabidopsis thaliana
  peptide (1)..(128): Ceres Seq. ID no. 12652968
MLAKGYVLSKDAIGKAKALDESQRFSSLVATKLAEISHYLGLTQNIQSSMELVRSADEKYHFSDFTKSAVLVTGTAAVAAATITGKVAAAAATSVVNSRYFANGALWFSDALGRAAKAAAHIGGGGSN

SEQ ID NO: 79743 - DNA, 822 bp, Arabidopsis thaliana
  misc_feature (1)..(822): Ceres Seq. ID no. 12652997
  misc_feature (1)..(822): Ortholog of  Ceres SEQ ID NO 13654531 as cited in SEQ ID NO 68083
atggattctcttcgattcaacctccaacaatctccatttcaattgaaacctagaattctccgaccaagaatcaccaacatatcaaaccgaatcgatgaaaccgatcctcgaccatcatcctcggccggtaggatccaaaggttagtacttaacaacgaaggtcggaccaaactaaacgccgatcctgaccgtgaattctattcatatccacggttcgtgaaccacgtagatgatagtttcatatcctccttaaccgaactatacagaaaccggttgagacccggttcgactgtacttgacttgatgagctcatgggtcagccatcttccagaagaagtgaagtacgagaaagtagtagggcatggtcttaacgcacaggagcttgctcgtaaccctagactcgattacttcttcgtcaaggatcttaatgaagatcagaagttcgagttcgaagacaagtatttcgacgctgttttgtgttctgttggtgtacagtatctacaacaacccgaaaaggtgtttgcagaagtgtatagagtgttgaaaccgggaggagtgttgatagtgagttttagcaaccggatgttttatgagaaagcaattagggtttggcgtgatggaaccgaatacagtcggatccaattggtggttcagtactttcagtctattgaagggtttactcagccggagatcatccggcaacagcctggagctcagatatcggttttgactcggcttatgggttttatcggtttagcttctacgcccgatccttttaatgctgtcattgcttataaaaatttcaaacctatttatgagtaa

SEQ ID NO: 79744 - protein, 273 aa, Arabidopsis thaliana
  peptide (1)..(273): Ceres Seq. ID no. 12652998
MDSLRFNLQQSPFQLKPRILRPRITNISNRIDETDPRPSSSAGRIQRLVLNNEGRTKLNADPDREFYSYPRFVNHVDDSFISSLTELYRNRLRPGSTVLDLMSSWVSHLPEEVKYEKVVGHGLNAQELARNPRLDYFFVKDLNEDQKFEFEDKYFDAVLCSVGVQYLQQPEKVFAEVYRVLKPGGVLIVSFSNRMFYEKAIRVWRDGTEYSRIQLVVQYFQSIEGFTQPEIIRQQPGAQISVLTRLMGFIGLASTPDPFNAVIAYKNFKPIYE

SEQ ID NO: 79745 - protein, 172 aa, Arabidopsis thaliana
  peptide (1)..(172): Ceres Seq. ID no. 12652999
MSSWVSHLPEEVKYEKVVGHGLNAQELARNPRLDYFFVKDLNEDQKFEFEDKYFDAVLCSVGVQYLQQPEKVFAEVYRVLKPGGVLIVSFSNRMFYEKAIRVWRDGTEYSRIQLVVQYFQSIEGFTQPEIIRQQPGAQISVLTRLMGFIGLASTPDPFNAVIAYKNFKPIYE

SEQ ID NO: 79746 - DNA, 2478 bp, Arabidopsis thaliana
  misc_feature (1)..(2478): Ceres Seq. ID no. 12653054
  misc_feature (1)..(2478): Ortholog of  Ceres SEQ ID NO 12586556 as cited in SEQ ID NO 64667
  misc_feature (1)..(2478): Ortholog of  Ceres SEQ ID NO 13660894 as cited in SEQ ID NO 67475
atgaaactttattgcaactctaatgaagtccgctcacgaactcttgccactttacggcagctccgacaaccgtcaccggcgacatttctcgacacacgacgtgttgatgctcgcatcattaaaactggcttcgacacagatacgtgtcgctccaatttcatcgtcgaggaccttctcaggagaggtcaagtttctgctgcacgcaaggtgtacgacgaaatgcctcacaagaacactgtctccaccaataccatgatttccggtcacgtgaagacgggtgatgtttccagcgcccgagacctttttgacgcaatgcccgacagaactgttgtcacgtggactatcttgatggggtggtacgcccggaacagccacttcgatgaagctttcaagcttttccgtcagatgtgcaggtcttcttcctgtaccctgcccgatcatgtcacctttactacgcttttaccaggctgcaatgacgctgttccccagaacgcggtcggtcaggttcatgcttttgccgtcaagttaggctttgataccaacccctttctcactgtctccaatgttctgcttaagtcctactgtgaggtaaggcgactcgatttagcctgtgtgttgttcgaggagattccagagaaagactctgtcacgttcaacacccttattacagggtacgagaaggatggcttgtacacggagtccatccatctctttcttaaaatgcggcagtctggtcaccagccttcagatttcacattttctggggttctcaaggctgttgttgggctgcacgattttgctcttggtcagcaactccatgctctgtcagttactaccggcttctccagggatgcttctgttggcaatcaaattcttgatttctactccaaacatgaccgtgttcttgaaactaggatgctttttgatgagatgcctgagttggattttgtttcttacaatgtggtcatctcaagctactcacaggctgatcaatacgaggcatccctccacttctttagagaaatgcagtgcatggggtttgatcgcagaaacttccctttcgcgacgatgctgagcatcgctgctaacttgtcatccttgcagatgggtcgacaattgcactgccaggccctcctggcaacggctgattcaatccttcatgttgggaattctttagtagatatgtatgcaaaatgcgaaatgttcgaggaagctgagttgatattcaagagtttaccacaacggaccaccgtttcctggactgccttgatctcaggttacgttcagaaagggcttcatggagctgggcttaagttgttcaccaagatgcgaggatcaaatttacgagcagaccaatcaacttttgctactgtattgaaagcttccgctagtttcgcttctctgttgctggggaaacaactccatgcattcataatcagatcagggaacttggaaaatgtgttctccggaagtggcctggttgatatgtacgccaaatgtggttctatcaaagatgcagttcaagtattcgaagagatgcccgatagaaatgcagtttcctggaatgctttgatttcagcacacgctgataacggagatggagaagcagctattggtgcatttgcaaagatgattgaatctggtctccagccagattcagtcagcatcttaggcgtcttaactgcatgtagtcactgtggatttgttgaacaaggaacagaatatttccaggcaatgtctccaatctatgggataactccaaaaaagaagcattatgcatgcatgctggatttgcttggcagaaacggaagatttgcagaagcagagaagttgatggacgaaatgccctttgagccagatgaaattatgtggtcgtcagtgttgaacgcatgtcggattcacaagaatcaaagccttgctgagagagcagcagagaagctcttcagtatggagaagctcagggacgctgctgcttatgtaagcatgtcaaacatctatgcagcggctggggaatgggaaaaagttagggatgtgaagaaagcaatgcgcgaacgcggaatcaaaaaggttccggcttatagctgggtagaagttaaccacaagattcatgtgttctcatcaaatgatcagacacacccaaacggagatgagatcgtgagaaagatcaatgaattgacagctgagattgagagagaagggtacaagcctgacactagttcggtagtacaagacgtagatgagcagatgaagattgagtcgcttaagtaccacagtgaacgtttagccgttgcatttgctctgatcagtacaccagaagggtgtccgattgttgtgatgaagaacttgagggcctgcagggattgccatgctgcaataaaactaatatcgaagattgtaaagagggagataactgtaagggatacaagcagattccatcactttagtgagggggtctgttcttgtggtgattactggtga

SEQ ID NO: 79747 - protein, 825 aa, Arabidopsis thaliana
  peptide (1)..(825): Ceres Seq. ID no. 12653055
MKLYCNSNEVRSRTLATLRQLRQPSPATFLDTRRVDARIIKTGFDTDTCRSNFIVEDLLRRGQVSAARKVYDEMPHKNTVSTNTMISGHVKTGDVSSARDLFDAMPDRTVVTWTILMGWYARNSHFDEAFKLFRQMCRSSSCTLPDHVTFTTLLPGCNDAVPQNAVGQVHAFAVKLGFDTNPFLTVSNVLLKSYCEVRRLDLACVLFEEIPEKDSVTFNTLITGYEKDGLYTESIHLFLKMRQSGHQPSDFTFSGVLKAVVGLHDFALGQQLHALSVTTGFSRDASVGNQILDFYSKHDRVLETRMLFDEMPELDFVSYNVVISSYSQADQYEASLHFFREMQCMGFDRRNFPFATMLSIAANLSSLQMGRQLHCQALLATADSILHVGNSLVDMYAKCEMFEEAELIFKSLPQRTTVSWTALISGYVQKGLHGAGLKLFTKMRGSNLRADQSTFATVLKASASFASLLLGKQLHAFIIRSGNLENVFSGSGLVDMYAKCGSIKDAVQVFEEMPDRNAVSWNALISAHADNGDGEAAIGAFAKMIESGLQPDSVSILGVLTACSHCGFVEQGTEYFQAMSPIYGITPKKKHYACMLDLLGRNGRFAEAEKLMDEMPFEPDEIMWSSVLNACRIHKNQSLAERAAEKLFSMEKLRDAAAYVSMSNIYAAAGEWEKVRDVKKAMRERGIKKVPAYSWVEVNHKIHVFSSNDQTHPNGDEIVRKINELTAEIEREGYKPDTSSVVQDVDEQMKIESLKYHSERLAVAFALISTPEGCPIVVMKNLRACRDCHAAIKLISKIVKREITVRDTSRFHHFSEGVCSCGDYW

SEQ ID NO: 79748 - protein, 752 aa, Arabidopsis thaliana
  peptide (1)..(752): Ceres Seq. ID no. 12653056
MPHKNTVSTNTMISGHVKTGDVSSARDLFDAMPDRTVVTWTILMGWYARNSHFDEAFKLFRQMCRSSSCTLPDHVTFTTLLPGCNDAVPQNAVGQVHAFAVKLGFDTNPFLTVSNVLLKSYCEVRRLDLACVLFEEIPEKDSVTFNTLITGYEKDGLYTESIHLFLKMRQSGHQPSDFTFSGVLKAVVGLHDFALGQQLHALSVTTGFSRDASVGNQILDFYSKHDRVLETRMLFDEMPELDFVSYNVVISSYSQADQYEASLHFFREMQCMGFDRRNFPFATMLSIAANLSSLQMGRQLHCQALLATADSILHVGNSLVDMYAKCEMFEEAELIFKSLPQRTTVSWTALISGYVQKGLHGAGLKLFTKMRGSNLRADQSTFATVLKASASFASLLLGKQLHAFIIRSGNLENVFSGSGLVDMYAKCGSIKDAVQVFEEMPDRNAVSWNALISAHADNGDGEAAIGAFAKMIESGLQPDSVSILGVLTACSHCGFVEQGTEYFQAMSPIYGITPKKKHYACMLDLLGRNGRFAEAEKLMDEMPFEPDEIMWSSVLNACRIHKNQSLAERAAEKLFSMEKLRDAAAYVSMSNIYAAAGEWEKVRDVKKAMRERGIKKVPAYSWVEVNHKIHVFSSNDQTHPNGDEIVRKINELTAEIEREGYKPDTSSVVQDVDEQMKIESLKYHSERLAVAFALISTPEGCPIVVMKNLRACRDCHAAIKLISKIVKREITVRDTSRFHHFSEGVCSCGDYW

SEQ ID NO: 79749 - protein, 741 aa, Arabidopsis thaliana
  peptide (1)..(741): Ceres Seq. ID no. 12653057
MISGHVKTGDVSSARDLFDAMPDRTVVTWTILMGWYARNSHFDEAFKLFRQMCRSSSCTLPDHVTFTTLLPGCNDAVPQNAVGQVHAFAVKLGFDTNPFLTVSNVLLKSYCEVRRLDLACVLFEEIPEKDSVTFNTLITGYEKDGLYTESIHLFLKMRQSGHQPSDFTFSGVLKAVVGLHDFALGQQLHALSVTTGFSRDASVGNQILDFYSKHDRVLETRMLFDEMPELDFVSYNVVISSYSQADQYEASLHFFREMQCMGFDRRNFPFATMLSIAANLSSLQMGRQLHCQALLATADSILHVGNSLVDMYAKCEMFEEAELIFKSLPQRTTVSWTALISGYVQKGLHGAGLKLFTKMRGSNLRADQSTFATVLKASASFASLLLGKQLHAFIIRSGNLENVFSGSGLVDMYAKCGSIKDAVQVFEEMPDRNAVSWNALISAHADNGDGEAAIGAFAKMIESGLQPDSVSILGVLTACSHCGFVEQGTEYFQAMSPIYGITPKKKHYACMLDLLGRNGRFAEAEKLMDEMPFEPDEIMWSSVLNACRIHKNQSLAERAAEKLFSMEKLRDAAAYVSMSNIYAAAGEWEKVRDVKKAMRERGIKKVPAYSWVEVNHKIHVFSSNDQTHPNGDEIVRKINELTAEIEREGYKPDTSSVVQDVDEQMKIESLKYHSERLAVAFALISTPEGCPIVVMKNLRACRDCHAAIKLISKIVKREITVRDTSRFHHFSEGVCSCGDYW

SEQ ID NO: 79750 - DNA, 765 bp, Arabidopsis thaliana
  misc_feature (1)..(765): Ceres Seq. ID no. 12653068
  misc_feature (1)..(765): Ortholog of  Ceres SEQ ID NO 12610031 as cited in SEQ ID NO 55811
  misc_feature (1)..(765): Ortholog of  Ceres SEQ ID NO 12610896 as cited in SEQ ID NO 55861
  misc_feature (1)..(765): Ortholog of  Ceres SEQ ID NO 12619664 as cited in SEQ ID NO 66048
  misc_feature (1)..(765): Ortholog of  Ceres SEQ ID NO 12635952 as cited in SEQ ID NO 0
atggctgattctaagatgaagctccactgtggctttatctggggtaattcggcagctctcttttgtatcaatgagaaaggtcttgactttgagcttgtcttcgtagattggcttgctggtgaagccaaaaccaaaacttttctctctactctcaacccatttggtgaagtcccggttcttgaagatggagatctcaaacttttcgaaccaaaggcgatcacgcgatacctagccgagcaatacaaagacgttggaacaaatctattaccagatgatcccaaaaagagagcaatcatgtcgatgtggatggaagtagatagcaatcaatttcttcctatagcatcaacactcatcaaagaactcatcatcaatccatatcaaggtttagccacagacgatacagcagttcaagagaacaaagaaaagttatcagaggttctgaacatctacgagactcgtttaggcgagtctccttacttggctggtgaaagcttcagtttagcggatctgcatcatcttgcgccgattgattacttgttgaacacggacgaagaagagttgaaaaacttgatctattcacgtcccaatgtagcggcatgggtcgagaaaatgaaaatgaggccagcttggctgaaaacagtagtcatgaaaaatcacatcgttgacttgatgaagcagcgtcgtttgcctataaagttagattcatcgtgtcatgagtcaaccgttgtggctcaaaaaaatgcgatcgccattgagaacaagtaa

SEQ ID NO: 79751 - protein, 254 aa, Arabidopsis thaliana
  peptide (1)..(254): Ceres Seq. ID no. 12653069
MADSKMKLHCGFIWGNSAALFCINEKGLDFELVFVDWLAGEAKTKTFLSTLNPFGEVPVLEDGDLKLFEPKAITRYLAEQYKDVGTNLLPDDPKKRAIMSMWMEVDSNQFLPIASTLIKELIINPYQGLATDDTAVQENKEKLSEVLNIYETRLGESPYLAGESFSLADLHHLAPIDYLLNTDEEELKNLIYSRPNVAAWVEKMKMRPAWLKTVVMKNHIVDLMKQRRLPIKLDSSCHESTVVAQKNAIAIENK

SEQ ID NO: 79752 - protein, 249 aa, Arabidopsis thaliana
  peptide (1)..(249): Ceres Seq. ID no. 12653070
MKLHCGFIWGNSAALFCINEKGLDFELVFVDWLAGEAKTKTFLSTLNPFGEVPVLEDGDLKLFEPKAITRYLAEQYKDVGTNLLPDDPKKRAIMSMWMEVDSNQFLPIASTLIKELIINPYQGLATDDTAVQENKEKLSEVLNIYETRLGESPYLAGESFSLADLHHLAPIDYLLNTDEEELKNLIYSRPNVAAWVEKMKMRPAWLKTVVMKNHIVDLMKQRRLPIKLDSSCHESTVVAQKNAIAIENK

SEQ ID NO: 79753 - protein, 156 aa, Arabidopsis thaliana
  peptide (1)..(156): Ceres Seq. ID no. 12653071
MSMWMEVDSNQFLPIASTLIKELIINPYQGLATDDTAVQENKEKLSEVLNIYETRLGESPYLAGESFSLADLHHLAPIDYLLNTDEEELKNLIYSRPNVAAWVEKMKMRPAWLKTVVMKNHIVDLMKQRRLPIKLDSSCHESTVVAQKNAIAIENK

SEQ ID NO: 79754 - DNA, 1614 bp, Arabidopsis thaliana
  misc_feature (1)..(1614): Ceres Seq. ID no. 12653091
  misc_feature (1)..(1614): Ortholog of  Ceres SEQ ID NO 15179924 as cited in SEQ ID NO 57437
  misc_feature (1)..(1614): Ortholog of  Ceres SEQ ID NO 15171286 as cited in SEQ ID NO 58206
  misc_feature (1)..(1614): Ortholog of  Ceres SEQ ID NO 14302451 as cited in SEQ ID NO 66180
aattctctcttaaaccctaaactagttagggttagtagtgttaaagttcctttcttcgtagctctgactaattaacatttaccgataattcaatcttcaattcacaatggatccttgctctttcgtacgcatcatcgtcgggaatttggcggttaggtttccgagatcaccgtcgtcatcatcgtcgtcttcttcttcatctggaccgtctgtttcggatgtatcctctggtaattgctattgtaaaatcaagttcaagagtttcccacgccagattgtttctgttcccgttctgttgcgaaccgaatcggaatcagagtctcggtgttgttccggtaacgtctcaaccgtcgctgcttgctttagtctaagtaagtctcagattgagacgtctcttaagaaggctaaatggagtgttctctccgtcgaggtttactctcgccgtagtgcgtcgtgtggatttgtcgctgcttccggtgagaagctgattggtcggtttcaggttacgcttgatttgaaggcggcggagtcaaagacgtgtttggcacacaacggctgggttgatttgggcactaaatcgaagaataataagaagtccgggtcggatcctgagctccacgttagcgtacgggttgaacccgacacgaggtttgtgtttcaattcgacggcgagcccgagtgtagtcctcaggtttttcaagtccaaggaaacgcaaaacaagctgttttcacttgcaagttcgggttcagaaactccggtgatcggaatcttagtctcagcttatcatcggtgacaagtggaaaggaacagttttcaaaagagagaaaaggttggtcgataacgatccatgatctctctggttcaccagtagctatggcttcaatggtcacacctttcgtaccatctcctggttccaaccgcgtctctcggtctagtcctggagcttggctaatcctcagacctgatggctacacctggaagccatgggttcgccttcaggcatggcgtgaaccaggcgtctccgatgttctaggttaccgtttcgagctttataaagacggtatcgctgttgcagtctctgcttcctcgtcgatcagcacaaaacttggcgggagtttcatcattgatggatccacttctacgactacgactgcttcttggagtagctctgaaggaagtttcgatctttcttcgtggtcaagcatcagatcatcaagaactgattcaggatcggggtcggatttcaggttctcactgtctcaagcgcaacaaaacttggggtttgtgatgtcgacgagggtgcaaggagtggagaaacagagcaagcctaaggtggaggtaggtgtgaagcacgtgacttgtacggaggatgcggcggcgcacgtggcactagcagcggcggtggatctaagcatggatgcttgtaggctcttctctcagaagctaagaaatgagctgagacagccaagtcgtgttgatatcgtttgacgtttattgctttgtcgttttgatacatgagatagaattgtcagttgtcttccactcgctagttttttttttgtttctagtgagggaaattggggaaatttgagtaaagtggaaaagtctttttg

SEQ ID NO: 79755 - protein, 460 aa, Arabidopsis thaliana
  peptide (1)..(460): Ceres Seq. ID no. 12653092
MDPCSFVRIIVGNLAVRFPRSPSSSSSSSSSSGPSVSDVSSGNCYCKIKFKSFPRQIVSVPVLLRTESESESRCCSGNVSTVAACFSLSKSQIETSLKKAKWSVLSVEVYSRRSASCGFVAASGEKLIGRFQVTLDLKAAESKTCLAHNGWVDLGTKSKNNKKSGSDPELHVSVRVEPDTRFVFQFDGEPECSPQVFQVQGNAKQAVFTCKFGFRNSGDRNLSLSLSSVTSGKEQFSKERKGWSITIHDLSGSPVAMASMVTPFVPSPGSNRVSRSSPGAWLILRPDGYTWKPWVRLQAWREPGVSDVLGYRFELYKDGIAVAVSASSSISTKLGGSFIIDGSTSTTTTASWSSSEGSFDLSSWSSIRSSRTDSGSGSDFRFSLSQAQQNLGFVMSTRVQGVEKQSKPKVEVGVKHVTCTEDAAAHVALAAAVDLSMDACRLFSQKLRNELRQPSRVDIV

SEQ ID NO: 79756 - DNA, 486 bp, Arabidopsis thaliana
  misc_feature (1)..(486): Ceres Seq. ID no. 12653093
  misc_feature (1)..(486): Ortholog of  Ceres SEQ ID NO 13663631 as cited in SEQ ID NO 67073
atgaatactttcaaaaccccttttctcgtcatcgttgcgattagctttcttgttgttgcaaccaatgctcaaaacactccacaagactaccttaactctcacaacaccgctcgtgcgcaggttggagtaccgaacgtggtgtgggacacaactctcgcggcctacgcattgaactattcaaattttagaaaagccgactgcaaccttgttcactccaacggaccatatggagaaaacctagccaagggaagtagttcctcgttctcggccatctcggccgtcaaactttgggtcgacgagaaaccttactacagctacgcatacaataattgcacaggtggaaaacaatgcttgcattacacgcaagtggtgtggagagattcagtgaagatagggtgtgctagggttcaatgcaccaatacttggtggttcgtgagttgtaactataactcacccggtaattgggtcggagagtacccttactga

SEQ ID NO: 79757 - protein, 161 aa, Arabidopsis thaliana
  peptide (1)..(161): Ceres Seq. ID no. 12653094
MNTFKTPFLVIVAISFLVVATNAQNTPQDYLNSHNTARAQVGVPNVVWDTTLAAYALNYSNFRKADCNLVHSNGPYGENLAKGSSSSFSAISAVKLWVDEKPYYSYAYNNCTGGKQCLHYTQVVWRDSVKIGCARVQCTNTWWFVSCNYNSPGNWVGEYPY

SEQ ID NO: 79758 - DNA, 1923 bp, Arabidopsis thaliana
  misc_feature (1)..(1923): Ceres Seq. ID no. 12653099
  misc_feature (1)..(1923): Ortholog of  Ceres SEQ ID NO 13595870 as cited in SEQ ID NO 62101
  misc_feature (1)..(1923): Ortholog of  Ceres SEQ ID NO 13590241 as cited in SEQ ID NO 63878
  misc_feature (1)..(1923): Ortholog of  Ceres SEQ ID NO 13660597 as cited in SEQ ID NO 67655
atggatcacagggtcgtattggggaagatttccacatctgatggtcaaaagagtgcttttaccgttattcctggcaggccattgtctagtggacaacgtggagaggtatatgaggtgattgggaaccgtgttgctgtcatattcgaatacggtgatgataaaacatcagagggaagtgagaaaaagccagcagagcagccccagatgttacccatccactggttagatgtgaaagacctgaagtacgatttggatatgcaggcagttgatggctacattgctatggaagctttaaatgaggttttgcaatccattcaaccacttatagtctattttccagactcgacgcagtggttgtctagagctgtgcctaagacaagacgaaaggaatttgtagacaaagttaaggaaatgtttgataaactatcaggtccgattgttatgatctgtgggcagaacaagatagaaacaggctcaaaagaaagagagaaattcacgatggtactcccaaaccttagccgagttgtgaagctgcctcttcccttgaagggcctaactgagggattcacgggaaggggaaaatcagaggagaatgagatatacaagcttttcactaatgttatgcgcctacatcctccgaaggaggaggataccctcagattattcaagaaacaactaggagaagataggagaattgtgatatcgcggagcaatataaatgagttgctaaaggcacttgaagaacatgagttattgtgcacagatttatatcaagtgaacaccgatggggttatattgacaaagcaaaaagcagagaaagctattggctgggccaaaaatcactatttagcttcttgtccagtcccattggttaaaggaggtcgcttgtctctgcctcgtgaaagccttgagatatcaattgcgaggttaagaaaattagaagataactccctaaagccttcgcaaaacttgaagaatattgcaaaggatgagtacgaaagaaattttgtctcggctgtggttgctcctggagaaattggcgtcaaatttgaagatattggggctctcgaagacgtgaaaaaagcattaaatgagctggttattcttcccatgagaaggccagagctttttgcccgtggaaatctcttgcggccctgtaaaggaatattgctttttggtcctcctggaacgggtaagacgctcctagctaaggcgcttgcaacagaagctggggcaaacttcattagcataactggctcaacacttacatcaaagtggttcggagatgcagagaagctcactaaggctctcttttcctttgccaccaagctagcacctgtaattatttttgttgatgagatcgacagtctgctaggtgctcgtggtggctcttccgagcacgaagctaccagaagaatgagaaatgagttcatggcagcttgggacgggctcaggtcaaaagacagccaaaggatcctcattcttggtgccaccaaccgtccctttgatcttgatgatgctgtcattcgtcgtctaccaaggcggatatatgtcgacttaccagatgccgaaaaccggttaaagatactgaaaatatttctaactcctgaaaatctggaatctgatttccagttcgagaaacttgcaaaggaaactgaaggttattccggtagcgatctgaagaatctatgcattgctgctgcgtacaggcctgttcaagaactgttacaagaagaacaaaagggtgcaagagcagaagcatctcctggtctacggtcgctaagtttggatgacttcattcagtctaaagctaaggtgagcccatctgtggcgtacgatgcgactacgatgaatgagctgagaaaatggaacgagcaatatggtgaaggaggcagcaggacaaagtctccttttggcttctga

SEQ ID NO: 79759 - protein, 640 aa, Arabidopsis thaliana
  peptide (1)..(640): Ceres Seq. ID no. 12653100
MDHRVVLGKISTSDGQKSAFTVIPGRPLSSGQRGEVYEVIGNRVAVIFEYGDDKTSEGSEKKPAEQPQMLPIHWLDVKDLKYDLDMQAVDGYIAMEALNEVLQSIQPLIVYFPDSTQWLSRAVPKTRRKEFVDKVKEMFDKLSGPIVMICGQNKIETGSKEREKFTMVLPNLSRVVKLPLPLKGLTEGFTGRGKSEENEIYKLFTNVMRLHPPKEEDTLRLFKKQLGEDRRIVISRSNINELLKALEEHELLCTDLYQVNTDGVILTKQKAEKAIGWAKNHYLASCPVPLVKGGRLSLPRESLEISIARLRKLEDNSLKPSQNLKNIAKDEYERNFVSAVVAPGEIGVKFEDIGALEDVKKALNELVILPMRRPELFARGNLLRPCKGILLFGPPGTGKTLLAKALATEAGANFISITGSTLTSKWFGDAEKLTKALFSFATKLAPVIIFVDEIDSLLGARGGSSEHEATRRMRNEFMAAWDGLRSKDSQRILILGATNRPFDLDDAVIRRLPRRIYVDLPDAENRLKILKIFLTPENLESDFQFEKLAKETEGYSGSDLKNLCIAAAYRPVQELLQEEQKGARAEASPGLRSLSLDDFIQSKAKVSPSVAYDATTMNELRKWNEQYGEGGSRTKSPFGF

SEQ ID NO: 79760 - protein, 572 aa, Arabidopsis thaliana
  peptide (1)..(572): Ceres Seq. ID no. 12653101
MLPIHWLDVKDLKYDLDMQAVDGYIAMEALNEVLQSIQPLIVYFPDSTQWLSRAVPKTRRKEFVDKVKEMFDKLSGPIVMICGQNKIETGSKEREKFTMVLPNLSRVVKLPLPLKGLTEGFTGRGKSEENEIYKLFTNVMRLHPPKEEDTLRLFKKQLGEDRRIVISRSNINELLKALEEHELLCTDLYQVNTDGVILTKQKAEKAIGWAKNHYLASCPVPLVKGGRLSLPRESLEISIARLRKLEDNSLKPSQNLKNIAKDEYERNFVSAVVAPGEIGVKFEDIGALEDVKKALNELVILPMRRPELFARGNLLRPCKGILLFGPPGTGKTLLAKALATEAGANFISITGSTLTSKWFGDAEKLTKALFSFATKLAPVIIFVDEIDSLLGARGGSSEHEATRRMRNEFMAAWDGLRSKDSQRILILGATNRPFDLDDAVIRRLPRRIYVDLPDAENRLKILKIFLTPENLESDFQFEKLAKETEGYSGSDLKNLCIAAAYRPVQELLQEEQKGARAEASPGLRSLSLDDFIQSKAKVSPSVAYDATTMNELRKWNEQYGEGGSRTKSPFGF

SEQ ID NO: 79761 - protein, 555 aa, Arabidopsis thaliana
  peptide (1)..(555): Ceres Seq. ID no. 12653102
MQAVDGYIAMEALNEVLQSIQPLIVYFPDSTQWLSRAVPKTRRKEFVDKVKEMFDKLSGPIVMICGQNKIETGSKEREKFTMVLPNLSRVVKLPLPLKGLTEGFTGRGKSEENEIYKLFTNVMRLHPPKEEDTLRLFKKQLGEDRRIVISRSNINELLKALEEHELLCTDLYQVNTDGVILTKQKAEKAIGWAKNHYLASCPVPLVKGGRLSLPRESLEISIARLRKLEDNSLKPSQNLKNIAKDEYERNFVSAVVAPGEIGVKFEDIGALEDVKKALNELVILPMRRPELFARGNLLRPCKGILLFGPPGTGKTLLAKALATEAGANFISITGSTLTSKWFGDAEKLTKALFSFATKLAPVIIFVDEIDSLLGARGGSSEHEATRRMRNEFMAAWDGLRSKDSQRILILGATNRPFDLDDAVIRRLPRRIYVDLPDAENRLKILKIFLTPENLESDFQFEKLAKETEGYSGSDLKNLCIAAAYRPVQELLQEEQKGARAEASPGLRSLSLDDFIQSKAKVSPSVAYDATTMNELRKWNEQYGEGGSRTKSPFGF

SEQ ID NO: 79762 - DNA, 873 bp, Arabidopsis thaliana
  misc_feature (1)..(873): Ceres Seq. ID no. 12653122
  misc_feature (1)..(873): Ortholog of  Ceres SEQ ID NO 15226740 as cited in SEQ ID NO 183
gtggacaatatagtttctgaaactataataggataagaaaaaattaagcttatttgtggggatatatattaatgtcatatcattgtcataaacatggtcggcaaaacttgggacggcagtttaccagaataatccggtcgacagaattcaacagttcctctctctaaaagatatgaaggagattaattttggctttgttagcaaagatggccggtcctcttctggcaaatccggcttttacaagcggttttggccggcttttatccttcctccgccgttcgatcggttgttcttaccgattgctttagtttctttttcagtttttctttcaataatttctaaagatttcaattggagattaattttaggtcataatagcctaagattaagttttcggatttgtatctttagaaagtttgatttgcagaattacctcaagtatgaaaggaagttttgtttccagcatattgggattgcctgtagccgtttctacatgtttatggagcttcgatcgatcaaatttgaggaatactcagatttttctttcctcattacctgtttttgccaaatctcttgattgatgattttggaattgaattctctgtttgtgtatcctcccttctctgtttagcagtttccggtgagaaaaaaacaaaaatcgatgtttgccctttttcgacgttgattgtgttcaccggatcggagtctttgacggcacaggatgacaggaacgtttcatcgcttctcttgcaacacgtgtcttgttatacgatcgtgttttgttaaagagatatccttcctttaaagaaatgtaactaagtggacctttgttgggctgtattctgtggatcattaataaacataatctttcca

SEQ ID NO: 79763 - protein, 134 aa, Arabidopsis thaliana
  peptide (1)..(134): Ceres Seq. ID no. 12653123
MKEINFGFVSKDGRSSSGKSGFYKRFWPAFILPPPFDRLFLPIALVSFSVFLSIISKDFNWRLILGHNSLRLSFRICIFRKFDLQNYLKYERKFCFQHIGIACSRFYMFMELRSIKFEEYSDFSFLITCFCQIS

SEQ ID NO: 79764 - DNA, 1554 bp, Arabidopsis thaliana
  misc_feature (1)..(1554): Ceres Seq. ID no. 12653128
  misc_feature (1)..(1554): Ortholog of  Ceres SEQ ID NO 13594380 as cited in SEQ ID NO 58039
  misc_feature (1)..(1554): Ortholog of  Ceres SEQ ID NO 13597407 as cited in SEQ ID NO 64106
  misc_feature (1)..(1554): Ortholog of  Ceres SEQ ID NO 15180690 as cited in SEQ ID NO 0
atggctggaggagcctttgtatcagaaggtggtggtggaggaaacagctatgaaggcggagtcaccgtctttgtcatcatgacatgtattgtggccgctatgggaggtctcctctttggttatgacctcggtatctcaggtggagtgacatctatggaggagtttctgagcaagtttttcccggaggtggataagcaaatgcacgaagcaaggcgcgagactgcttactgcaaattcgataaccaattgctacagttgttcacttcctcactctacctcgcggcactcgcgtcttcctttgtagcttcggctgtcacaaggaagtacggacgcaaaatctccatgtttgttggaggggttgctttcctcataggttctctattcaacgcatttgctaccaatgtcgcaatgctcatcgttggtagattgttgctcggagtcggtgttggatttgccaatcagtctacgcctgtttatctctcggagatggctccagcgaagatccgaggagcacttaacatcgggtttcaaatggctataaccatcgggattttgattgcaaacttaatcaactacggaacatctcaaatggctaagaacggatggagagtatcattgggtttagccgctgtaccggcagttattatggttattggatcttttgtcttgcccgatacaccaaactcgatgctcgagagaggcaagtacgaacaagcgagagagatgttgcaaaagattcgtggagctgataacgtagatgaggagtttcaagatctgtgtgatgcttgtgaggctgctaagaaagtggataatccatggaagaacattttccaacaggcaaaatacagacccgctcttgttttctgttctgcgattcctttcttccaacagattactggtatcaatgttatcatgttctacgcccccgttctctttaagactctcggttttgcggatgatgcctcgctcatctcagcggttattacgggtgcggtcaatgttgtctctacccttgtctccatctatgcggttgacaggtacggaagaaggattctcttccttgaaggaggcatccaaatgattgtttcccagatcgttgttggtaccttgattggtatgaagtttggaaccacgggatcagggaccttaacacctgcaacagcagattggatcctggctttcatatgtttgtatgttgcaggatttgcatggtcatggggtccattaggatggttagtaccaagtgagatctgtccattggaaatcagaccagcgggacaagccatcaacgtctctgtcaacatgttcttcactttcctcattggacagtttttcctcacgatgctttgccacatgaagtttggtctcttctacttctttggaggaatggttgcagtcatgaccgtcttcatctacttcttgttgccggagacaaaaggggttccaattgaagaaatgggaagagtatggaagcaacatccgttctggaaacgttacatgccagatgatgctgttattggaggaggtgaagaaaactacgtcaaggaggtttga

SEQ ID NO: 79765 - protein, 517 aa, Arabidopsis thaliana
  peptide (1)..(517): Ceres Seq. ID no. 12653129
MAGGAFVSEGGGGGNSYEGGVTVFVIMTCIVAAMGGLLFGYDLGISGGVTSMEEFLSKFFPEVDKQMHEARRETAYCKFDNQLLQLFTSSLYLAALASSFVASAVTRKYGRKISMFVGGVAFLIGSLFNAFATNVAMLIVGRLLLGVGVGFANQSTPVYLSEMAPAKIRGALNIGFQMAITIGILIANLINYGTSQMAKNGWRVSLGLAAVPAVIMVIGSFVLPDTPNSMLERGKYEQAREMLQKIRGADNVDEEFQDLCDACEAAKKVDNPWKNIFQQAKYRPALVFCSAIPFFQQITGINVIMFYAPVLFKTLGFADDASLISAVITGAVNVVSTLVSIYAVDRYGRRILFLEGGIQMIVSQIVVGTLIGMKFGTTGSGTLTPATADWILAFICLYVAGFAWSWGPLGWLVPSEICPLEIRPAGQAINVSVNMFFTFLIGQFFLTMLCHMKFGLFYFFGGMVAVMTVFIYFLLPETKGVPIEEMGRVWKQHPFWKRYMPDDAVIGGGEENYVKEV

SEQ ID NO: 79766 - protein, 491 aa, Arabidopsis thaliana
  peptide (1)..(491): Ceres Seq. ID no. 12653130
MTCIVAAMGGLLFGYDLGISGGVTSMEEFLSKFFPEVDKQMHEARRETAYCKFDNQLLQLFTSSLYLAALASSFVASAVTRKYGRKISMFVGGVAFLIGSLFNAFATNVAMLIVGRLLLGVGVGFANQSTPVYLSEMAPAKIRGALNIGFQMAITIGILIANLINYGTSQMAKNGWRVSLGLAAVPAVIMVIGSFVLPDTPNSMLERGKYEQAREMLQKIRGADNVDEEFQDLCDACEAAKKVDNPWKNIFQQAKYRPALVFCSAIPFFQQITGINVIMFYAPVLFKTLGFADDASLISAVITGAVNVVSTLVSIYAVDRYGRRILFLEGGIQMIVSQIVVGTLIGMKFGTTGSGTLTPATADWILAFICLYVAGFAWSWGPLGWLVPSEICPLEIRPAGQAINVSVNMFFTFLIGQFFLTMLCHMKFGLFYFFGGMVAVMTVFIYFLLPETKGVPIEEMGRVWKQHPFWKRYMPDDAVIGGGEENYVKEV

SEQ ID NO: 79767 - protein, 484 aa, Arabidopsis thaliana
  peptide (1)..(484): Ceres Seq. ID no. 12653131
MGGLLFGYDLGISGGVTSMEEFLSKFFPEVDKQMHEARRETAYCKFDNQLLQLFTSSLYLAALASSFVASAVTRKYGRKISMFVGGVAFLIGSLFNAFATNVAMLIVGRLLLGVGVGFANQSTPVYLSEMAPAKIRGALNIGFQMAITIGILIANLINYGTSQMAKNGWRVSLGLAAVPAVIMVIGSFVLPDTPNSMLERGKYEQAREMLQKIRGADNVDEEFQDLCDACEAAKKVDNPWKNIFQQAKYRPALVFCSAIPFFQQITGINVIMFYAPVLFKTLGFADDASLISAVITGAVNVVSTLVSIYAVDRYGRRILFLEGGIQMIVSQIVVGTLIGMKFGTTGSGTLTPATADWILAFICLYVAGFAWSWGPLGWLVPSEICPLEIRPAGQAINVSVNMFFTFLIGQFFLTMLCHMKFGLFYFFGGMVAVMTVFIYFLLPETKGVPIEEMGRVWKQHPFWKRYMPDDAVIGGGEENYVKEV

SEQ ID NO: 79768 - DNA, 933 bp, Arabidopsis thaliana
  misc_feature (1)..(933): Ceres Seq. ID no. 12653136
  misc_feature (1)..(933): Ortholog of  Ceres SEQ ID NO 13502858 as cited in SEQ ID NO 65109
atggagggcttttcaccaccgattaacactgcgcaagtcgatgcaaagaccaaacttgacgagaaagtggattactcaaacctcccttgccctgtcctctatgaggaactcaaccgtgaagctaccatggctttaaagccagagctatttgagggtttccgcctcgactataacaagtcgcttaaccagaagttttttctcagccatagcatattgatggggccaactgaggttcctaatccaactccatcatccgaaataatcaaaattccaactgccaattatgactttggtgctggtttcatcgatccaaagctatatcttatcggaaggatcacgacggacggtagactaaatgcgagagccaagttcgatttaactgacaatttttccgtcaaggctaatgctctgctgacagatgaagaagataagtcgcaaggccacctcgtcattgattacaaggggtctgactacagaactcagcttcagcttggaaacaattccgtttatgcagctaactatattcagcatgtgacaccacacctgtctttgggtggtgaggctttctggcttggtcagcaactgatgtcgggtgttggttatgcagctcgatatgagactgacaaaacggttgcctctgggcaaattgcttccactggtgtggctgtcatgaactatgttcataaggtttcagagaagttgtcatttgcaacggatttcatctacaattatttgtcacgagatgttacagctagtgtcgggtatgacctcattactagacagtctcgattaagaggaaaggttgattctaacggtgttgtcgctgcttaccttgaagaacaattgcctattggactcagatttcttctatctgcagaggtggatcatgtgaagaaggattacaagtttggtttcggtgttaacgccttttaa

SEQ ID NO: 79769 - protein, 310 aa, Arabidopsis thaliana
  peptide (1)..(310): Ceres Seq. ID no. 12653137
MEGFSPPINTAQVDAKTKLDEKVDYSNLPCPVLYEELNREATMALKPELFEGFRLDYNKSLNQKFFLSHSILMGPTEVPNPTPSSEIIKIPTANYDFGAGFIDPKLYLIGRITTDGRLNARAKFDLTDNFSVKANALLTDEEDKSQGHLVIDYKGSDYRTQLQLGNNSVYAANYIQHVTPHLSLGGEAFWLGQQLMSGVGYAARYETDKTVASGQIASTGVAVMNYVHKVSEKLSFATDFIYNYLSRDVTASVGYDLITRQSRLRGKVDSNGVVAAYLEEQLPIGLRFLLSAEVDHVKKDYKFGFGVNAF

SEQ ID NO: 79770 - protein, 268 aa, Arabidopsis thaliana
  peptide (1)..(268): Ceres Seq. ID no. 12653138
MALKPELFEGFRLDYNKSLNQKFFLSHSILMGPTEVPNPTPSSEIIKIPTANYDFGAGFIDPKLYLIGRITTDGRLNARAKFDLTDNFSVKANALLTDEEDKSQGHLVIDYKGSDYRTQLQLGNNSVYAANYIQHVTPHLSLGGEAFWLGQQLMSGVGYAARYETDKTVASGQIASTGVAVMNYVHKVSEKLSFATDFIYNYLSRDVTASVGYDLITRQSRLRGKVDSNGVVAAYLEEQLPIGLRFLLSAEVDHVKKDYKFGFGVNAF

SEQ ID NO: 79771 - protein, 238 aa, Arabidopsis thaliana
  peptide (1)..(238): Ceres Seq. ID no. 12653139
MGPTEVPNPTPSSEIIKIPTANYDFGAGFIDPKLYLIGRITTDGRLNARAKFDLTDNFSVKANALLTDEEDKSQGHLVIDYKGSDYRTQLQLGNNSVYAANYIQHVTPHLSLGGEAFWLGQQLMSGVGYAARYETDKTVASGQIASTGVAVMNYVHKVSEKLSFATDFIYNYLSRDVTASVGYDLITRQSRLRGKVDSNGVVAAYLEEQLPIGLRFLLSAEVDHVKKDYKFGFGVNAF

SEQ ID NO: 79772 - DNA, 1984 bp, Arabidopsis thaliana
  misc_feature (1)..(1984): Ceres Seq. ID no. 12653150
  misc_feature (1)..(1984): Ortholog of  Ceres SEQ ID NO 13502874 as cited in SEQ ID NO 66298
  misc_feature (1)..(1984): Ortholog of  Ceres SEQ ID NO 12614124 as cited in SEQ ID NO 68392
gatctaaagagtacatataataaaaccagtctgcttcatctaaccctctctgcagtttttagacaacaatggcagcaatcagcgttgactttcagctctgcttcatcttcatcctcctagcaatcttctcactcttctgtttctctgctttcttcttcaagaaaccaaaagacccacaacttcaaggctgcggtctacctccgagcccaccgtctctaccgatcattggtcatcttcactttctcctctctgttccatgttacaaatcctttcagaaactctcctccaagtatggtcccttccttcacctccgcgctttcaatatccctatagttctagtctcgtcgggctccatggccaacgaagttttgaggatccaagacctgaactttgctagccgtgatagcgggcagactcctataatggaaaaatcattactttttggatcttttggctttgtctcagttccttatggagattactggagattcatgaagaagctcttagtcaaaaaacttctcgggtctcattccctcgagcagacacggctcctccgtgggaaagaactccaaactttccgtgctatgttgtttgataaggcggcaaagaatgagactgttgacgttggtaaagagatgatgaagctaacgaacaacagcatttgcaggatgacaatggggaggagctgttcagaggagaacggtgaagcagagcaagtcaggggtttggtgaccaaatcacttagtttgacgaagaagttcctcatagctagcattgttggtcaattttccaagctggtcgggatctctttgtttgggaaggaaatcatggaggtctcgcagaggtacgatgaattgctggagaaaattattaaggaacacgaagaaaatcccaacaatggagaggatagagacatgatggatgttctattggaagtttgtgcagatgacaacgccgagtttaagatttccaggaaccaaatcaaagcactttttgtggagattttccttgcaggcactgatacttcagcacaaacaatacagtggatattggcagaactcattaaccatcccgagattcttgaaaagttgagaaaagagatagaatctgttgttggggttaggagactgattcaagaaacagatctccccaacctgccgtatttacaggctgtgatgaaagaagggctaagactacacccgcatacgccaatcttggtgaggaatgcaacagaaggatgcaagatcggagggtattacatagggcagaacacaacaatgatggtaaacgcttatgcggtgctgagagatccggattcatgggaatatccagaagaatttcagcccgagaggttcatgacttctcctttaaaagggaaagaagatgagaaagcacagctagccttgaacttcattcctttcgggagtggaagaagaggatgtctcggaaaaaacttgggttatatcttcatgggagtagccattggaacaatggtgcagggttttgattggagaatcaatggagataaggttaacatggaagagactggagaaatgacgctgaccatggctcatccacttaaatgcattcctgttgctcgaatcaacccagctagctttgatccttagttgatgatggaggagtatgatatgtcttgttgaagttgcagacatatgtctcaaactgataatggaactagatttgggtattttcgaattaaccatctagctaccgtcaatctagagatccttacatgatggttgaatttgatatatcctgttgatgttgaagacatatatctctgcaactggtaatggaacttgctgtctttgtattgttttcttcttcaaacacaaacttgttgtctttatgtctttgtattgttttcttcttcaaacacaaacttcttgtctttatgtctatctgttatatgagaagggaagagattatgaaactttagtactaaattggaaaagttgcagat

SEQ ID NO: 79773 - protein, 519 aa, Arabidopsis thaliana
  peptide (1)..(519): Ceres Seq. ID no. 12653151
MAAISVDFQLCFIFILLAIFSLFCFSAFFFKKPKDPQLQGCGLPPSPPSLPIIGHLHFLLSVPCYKSFQKLSSKYGPFLHLRAFNIPIVLVSSGSMANEVLRIQDLNFASRDSGQTPIMEKSLLFGSFGFVSVPYGDYWRFMKKLLVKKLLGSHSLEQTRLLRGKELQTFRAMLFDKAAKNETVDVGKEMMKLTNNSICRMTMGRSCSEENGEAEQVRGLVTKSLSLTKKFLIASIVGQFSKLVGISLFGKEIMEVSQRYDELLEKIIKEHEENPNNGEDRDMMDVLLEVCADDNAEFKISRNQIKALFVEIFLAGTDTSAQTIQWILAELINHPEILEKLRKEIESVVGVRRLIQETDLPNLPYLQAVMKEGLRLHPHTPILVRNATEGCKIGGYYIGQNTTMMVNAYAVLRDPDSWEYPEEFQPERFMTSPLKGKEDEKAQLALNFIPFGSGRRGCLGKNLGYIFMGVAIGTMVQGFDWRINGDKVNMEETGEMTLTMAHPLKCIPVARINPASFDP

SEQ ID NO: 79774 - protein, 424 aa, Arabidopsis thaliana
  peptide (1)..(424): Ceres Seq. ID no. 12653152
MANEVLRIQDLNFASRDSGQTPIMEKSLLFGSFGFVSVPYGDYWRFMKKLLVKKLLGSHSLEQTRLLRGKELQTFRAMLFDKAAKNETVDVGKEMMKLTNNSICRMTMGRSCSEENGEAEQVRGLVTKSLSLTKKFLIASIVGQFSKLVGISLFGKEIMEVSQRYDELLEKIIKEHEENPNNGEDRDMMDVLLEVCADDNAEFKISRNQIKALFVEIFLAGTDTSAQTIQWILAELINHPEILEKLRKEIESVVGVRRLIQETDLPNLPYLQAVMKEGLRLHPHTPILVRNATEGCKIGGYYIGQNTTMMVNAYAVLRDPDSWEYPEEFQPERFMTSPLKGKEDEKAQLALNFIPFGSGRRGCLGKNLGYIFMGVAIGTMVQGFDWRINGDKVNMEETGEMTLTMAHPLKCIPVARINPASFDP

SEQ ID NO: 79775 - protein, 401 aa, Arabidopsis thaliana
  peptide (1)..(401): Ceres Seq. ID no. 12653153
MEKSLLFGSFGFVSVPYGDYWRFMKKLLVKKLLGSHSLEQTRLLRGKELQTFRAMLFDKAAKNETVDVGKEMMKLTNNSICRMTMGRSCSEENGEAEQVRGLVTKSLSLTKKFLIASIVGQFSKLVGISLFGKEIMEVSQRYDELLEKIIKEHEENPNNGEDRDMMDVLLEVCADDNAEFKISRNQIKALFVEIFLAGTDTSAQTIQWILAELINHPEILEKLRKEIESVVGVRRLIQETDLPNLPYLQAVMKEGLRLHPHTPILVRNATEGCKIGGYYIGQNTTMMVNAYAVLRDPDSWEYPEEFQPERFMTSPLKGKEDEKAQLALNFIPFGSGRRGCLGKNLGYIFMGVAIGTMVQGFDWRINGDKVNMEETGEMTLTMAHPLKCIPVARINPASFDP

SEQ ID NO: 79776 - DNA, 1347 bp, Arabidopsis thaliana
  misc_feature (1)..(1347): Ceres Seq. ID no. 12653158
  misc_feature (1)..(1347): Ortholog of  Ceres SEQ ID NO 13582281 as cited in SEQ ID NO 51014
  misc_feature (1)..(1347): Ortholog of  Ceres SEQ ID NO 12617417 as cited in SEQ ID NO 65089
atgggatcaaaatttcatgcttttatgtatccatggtttggttttggtcatatgattccatatcttcatttagccaacaaactagctgagaaaggtcatagggtcactttcttcctccccaagaaagctcataagcagctccaacctctcaatctgttcccagacagcattgtctttgagcctcttactctccctcctgtcgatggtctcccttttggcgccgagacagcctcggatctcccaaactcaactaagaaacccatattcgttgccatggatctcttacgcgatcagatcgaagcaaaggtccgtgctttgaaaccagatctaatctttttcgattttgttcattgggttccagaaatggcagaagagtttggaataaagagtgtcaattaccagatcatatcggcagcttgtgtagctatggttcttgcacctagggctgaattagggtttcctccgccggattatcctttatccaaagtggcgttacgtggacatgaagctaacgtctgttctctctttgcgaattcccatgagcttttcggtctgatcaccaaaggccttaagaactgtgacgtcgtttccataaggacctgcgtggaacttgaaggtaagctatgcggtttcatcgaaaaagaatgtcaaaagaaacttctcttaaccggtccaatgctccctgaaccgcaaaataagagtggtaaatttctagaagaccgatggaatcactggttaaacggatttgaaccagggtcggtagtgttttgtgcgtttggcactcaattctttttcgagaaggatcaatttcaagaattctgtttaggaatggagctaatgggtctaccgtttttaatatcggttatgccgccaaaaggctcaccaacggttcaagaagcgttaccaaaaggattcgaagaacgggttaaaaagcatggaatcgtttgggaaggatggttggaacaacctttgatattgtctcatccatcagtaggttgctttgtgaaccattgtggctttggttcaatgtgggagtctttggttagtgattgtcagattgtgtttattccacaattggcagatcaagttctcatcacaagattgttgactgaagaactcgaagtctctgtgaaagtgcagagagaagattccggatggttctcgaaagaggacttgagagatactgttaaatctgtgatggatatagatagtgagattgggaacttagtgaagaggaatcataagaaattgaaagagactttagttagtcctggattgttaagtggttatgctgataagtttgtagaagcattggagattgaagtcaacaacaccaaattttcttga

SEQ ID NO: 79777 - protein, 448 aa, Arabidopsis thaliana
  peptide (1)..(448): Ceres Seq. ID no. 12653159
MGSKFHAFMYPWFGFGHMIPYLHLANKLAEKGHRVTFFLPKKAHKQLQPLNLFPDSIVFEPLTLPPVDGLPFGAETASDLPNSTKKPIFVAMDLLRDQIEAKVRALKPDLIFFDFVHWVPEMAEEFGIKSVNYQIISAACVAMVLAPRAELGFPPPDYPLSKVALRGHEANVCSLFANSHELFGLITKGLKNCDVVSIRTCVELEGKLCGFIEKECQKKLLLTGPMLPEPQNKSGKFLEDRWNHWLNGFEPGSVVFCAFGTQFFFEKDQFQEFCLGMELMGLPFLISVMPPKGSPTVQEALPKGFEERVKKHGIVWEGWLEQPLILSHPSVGCFVNHCGFGSMWESLVSDCQIVFIPQLADQVLITRLLTEELEVSVKVQREDSGWFSKEDLRDTVKSVMDIDSEIGNLVKRNHKKLKETLVSPGLLSGYADKFVEALEIEVNNTKFS

SEQ ID NO: 79778 - protein, 440 aa, Arabidopsis thaliana
  peptide (1)..(440): Ceres Seq. ID no. 12653160
MYPWFGFGHMIPYLHLANKLAEKGHRVTFFLPKKAHKQLQPLNLFPDSIVFEPLTLPPVDGLPFGAETASDLPNSTKKPIFVAMDLLRDQIEAKVRALKPDLIFFDFVHWVPEMAEEFGIKSVNYQIISAACVAMVLAPRAELGFPPPDYPLSKVALRGHEANVCSLFANSHELFGLITKGLKNCDVVSIRTCVELEGKLCGFIEKECQKKLLLTGPMLPEPQNKSGKFLEDRWNHWLNGFEPGSVVFCAFGTQFFFEKDQFQEFCLGMELMGLPFLISVMPPKGSPTVQEALPKGFEERVKKHGIVWEGWLEQPLILSHPSVGCFVNHCGFGSMWESLVSDCQIVFIPQLADQVLITRLLTEELEVSVKVQREDSGWFSKEDLRDTVKSVMDIDSEIGNLVKRNHKKLKETLVSPGLLSGYADKFVEALEIEVNNTKFS

SEQ ID NO: 79779 - protein, 431 aa, Arabidopsis thaliana
  peptide (1)..(431): Ceres Seq. ID no. 12653161
MIPYLHLANKLAEKGHRVTFFLPKKAHKQLQPLNLFPDSIVFEPLTLPPVDGLPFGAETASDLPNSTKKPIFVAMDLLRDQIEAKVRALKPDLIFFDFVHWVPEMAEEFGIKSVNYQIISAACVAMVLAPRAELGFPPPDYPLSKVALRGHEANVCSLFANSHELFGLITKGLKNCDVVSIRTCVELEGKLCGFIEKECQKKLLLTGPMLPEPQNKSGKFLEDRWNHWLNGFEPGSVVFCAFGTQFFFEKDQFQEFCLGMELMGLPFLISVMPPKGSPTVQEALPKGFEERVKKHGIVWEGWLEQPLILSHPSVGCFVNHCGFGSMWESLVSDCQIVFIPQLADQVLITRLLTEELEVSVKVQREDSGWFSKEDLRDTVKSVMDIDSEIGNLVKRNHKKLKETLVSPGLLSGYADKFVEALEIEVNNTKFS

SEQ ID NO: 79780 - DNA, 1566 bp, Arabidopsis thaliana
  misc_feature (1)..(1566): Ceres Seq. ID no. 12653174
  misc_feature (1)..(1566): Ortholog of  Ceres SEQ ID NO 13659971 as cited in SEQ ID NO 67565
atggggaattgcttagccaagaaatacggattggtgatgaaaccacaacaaaatggtgaaagatcagttgagatcgagaacagaagaaggagcacccaccaagatccgtctaaaatatccaccggaacgaatcaaccaccaccttggcggaatccagcgaaacacagtggtgctgcagctatactcgagaagccgtacgaagacgtgaaactgttctacactttgagcaaagaattgggtcgaggccagtttggagtaacgtatctgtgcacagagaagtcgacggggaagagattcgcttgcaagtcgatttccaagaagaaacttgtgacgaaaggtgataaagaagatatgaggagagagattcagattatgcagcatttgagtggacaacctaacattgttgagtttaaaggagcttatgaagatgagaaagctgtgaatttggttatggagctttgtgctggtggtgaattgttcgataggattttagcaaagggacattacagtgagagagcagctgcttctgtttgtagacagattgttaatgttgtcaatatttgtcatttcatgggtgtgatgcatagagacttaaagcctgagaatttcttgttatctagcaaagatgagaaggctcttatcaaagccactgatttcggattatcagtctttatcgaagaagggagagtgtataaagatatagttgggagtgcatattatgttgctcctgaagttttgaagcggagatatggtaaagaaatcgatatatggagtgctggaattatactatacattctacttagtggtgtgcctccgttttgggctgaaacggagaaagggatatttgatgctatattggaaggtgaaatcgactttgaatcccaaccttggccctcaatttccaatagtgctaaagatttggtacgtagaatgttgacacaagatccgaaaagacggatttctgctgctgaagttcttaagcatccatggctaagagaaggtggagaagcatcggataagcctattgatagtgctgttctctcaaggatgaagcaatttagagcgatgaataaactaaagaaacttgctttaaaggtcattgcggagaacattgacacggaagaaatacaaggcttaaaggcgatgtttgctaatatagatacagacaatagtggtactatcacatacgaagaattgaaagaaggattagccaaactgggatcaagactcactgaagctgaagtgaaacagctcatggatgctgctgacgttgatggaaatgggtcaatagattacattgagtttattactgcaacaatgcatagacataggcttgaaagtaatgagaacgtttacaaagccttccaacattttgacaaagatgggagtggatacattacgacagacgagctagaggctgctttgaaggaatatggaatgggagatgatgctactatcaaagagattttgtctgatgtcgacgctgataatgacggtagaatcaactatgacgagttttgtgctatgatgagaagtgggaatccacaacaaccaagattgttctaa

SEQ ID NO: 79781 - protein, 521 aa, Arabidopsis thaliana
  peptide (1)..(521): Ceres Seq. ID no. 12653175
MGNCLAKKYGLVMKPQQNGERSVEIENRRRSTHQDPSKISTGTNQPPPWRNPAKHSGAAAILEKPYEDVKLFYTLSKELGRGQFGVTYLCTEKSTGKRFACKSISKKKLVTKGDKEDMRREIQIMQHLSGQPNIVEFKGAYEDEKAVNLVMELCAGGELFDRILAKGHYSERAAASVCRQIVNVVNICHFMGVMHRDLKPENFLLSSKDEKALIKATDFGLSVFIEEGRVYKDIVGSAYYVAPEVLKRRYGKEIDIWSAGIILYILLSGVPPFWAETEKGIFDAILEGEIDFESQPWPSISNSAKDLVRRMLTQDPKRRISAAEVLKHPWLREGGEASDKPIDSAVLSRMKQFRAMNKLKKLALKVIAENIDTEEIQGLKAMFANIDTDNSGTITYEELKEGLAKLGSRLTEAEVKQLMDAADVDGNGSIDYIEFITATMHRHRLESNENVYKAFQHFDKDGSGYITTDELEAALKEYGMGDDATIKEILSDVDADNDGRINYDEFCAMMRSGNPQQPRLF

SEQ ID NO: 79782 - protein, 509 aa, Arabidopsis thaliana
  peptide (1)..(509): Ceres Seq. ID no. 12653176
MKPQQNGERSVEIENRRRSTHQDPSKISTGTNQPPPWRNPAKHSGAAAILEKPYEDVKLFYTLSKELGRGQFGVTYLCTEKSTGKRFACKSISKKKLVTKGDKEDMRREIQIMQHLSGQPNIVEFKGAYEDEKAVNLVMELCAGGELFDRILAKGHYSERAAASVCRQIVNVVNICHFMGVMHRDLKPENFLLSSKDEKALIKATDFGLSVFIEEGRVYKDIVGSAYYVAPEVLKRRYGKEIDIWSAGIILYILLSGVPPFWAETEKGIFDAILEGEIDFESQPWPSISNSAKDLVRRMLTQDPKRRISAAEVLKHPWLREGGEASDKPIDSAVLSRMKQFRAMNKLKKLALKVIAENIDTEEIQGLKAMFANIDTDNSGTITYEELKEGLAKLGSRLTEAEVKQLMDAADVDGNGSIDYIEFITATMHRHRLESNENVYKAFQHFDKDGSGYITTDELEAALKEYGMGDDATIKEILSDVDADNDGRINYDEFCAMMRSGNPQQPRLF

SEQ ID NO: 79783 - protein, 404 aa, Arabidopsis thaliana
  peptide (1)..(404): Ceres Seq. ID no. 12653177
MRREIQIMQHLSGQPNIVEFKGAYEDEKAVNLVMELCAGGELFDRILAKGHYSERAAASVCRQIVNVVNICHFMGVMHRDLKPENFLLSSKDEKALIKATDFGLSVFIEEGRVYKDIVGSAYYVAPEVLKRRYGKEIDIWSAGIILYILLSGVPPFWAETEKGIFDAILEGEIDFESQPWPSISNSAKDLVRRMLTQDPKRRISAAEVLKHPWLREGGEASDKPIDSAVLSRMKQFRAMNKLKKLALKVIAENIDTEEIQGLKAMFANIDTDNSGTITYEELKEGLAKLGSRLTEAEVKQLMDAADVDGNGSIDYIEFITATMHRHRLESNENVYKAFQHFDKDGSGYITTDELEAALKEYGMGDDATIKEILSDVDADNDGRINYDEFCAMMRSGNPQQPRLF

SEQ ID NO: 79784 - DNA, 2307 bp, Arabidopsis thaliana
  misc_feature (1)..(2307): Ceres Seq. ID no. 12653190
  misc_feature (1)..(2307): Ortholog of  Ceres SEQ ID NO 13648101 as cited in SEQ ID NO 169
atggagaacgcatcgtcatcgtcgagtcttctcattgaagagagagaagaagtaatggtaactgataaaggtcgttgcttgagaaaaaaccatttcttaaaaccctttgttacctccatcaatggaggctctgtggctgagcttccccgccgtgatgaacgtctctctgtttcctcttcgcagctactaaagctcttctctttgcggagaactttctctgggttttgggttgtagatgctcctttcgtatcttggcttgcaaaaatggaagctttacacgcacaaacatggagaaaagctgggatttttgaagcaattaaagtatctacttacagtatcaccaaaaacccatctctgattctctctgtttctgaaaaatggtgccctgaaaccaaatcgtttgtcttcccttggggtgaagcaaccataactttagaggatgtaatggtgcttctagggttttccgttttgggctctccggtctttgcccctttagaaacctcggagacgagagattcggtaaagaaactggagaatgtaagaatccagcatatgaatagcagcacagacaggcgtgtgagccaaaaatcatgggtttcgaccttcttgggtagaggtggggacatggagcatgtagcgtttctggtattgtggctttcgcttttcgtatttccagttaaatctcgtcgtaatatctcgaatcatgttttcccaatagctgttcgtttagctagaggggaaaggatagctcttgcccctgctattctcgcaatcctctacagagatttggatcgaatccatgaggtatctagagaagattgtgttgacaaattccatctggaatctttgtttaagttagtacaagtttggacatgggaaagattcaggaacataagaccaaaagccagtgacattcccaaaggtgaacctagaatagctcagtggcatggtttgcatcgaagatctaaggatgcgtggttctgttttgatgattttgagtggcgtccttatactaaagcattgaacaattggaacccatttcggttttaccttgaggaagctatttgggtgactgttgatgaaagtattgatgatgagtttgcttcttttgctcggtgtgtgacagtttctcagattgttggagatggttttgtagaggattacttcccaaatagagtggcgagacagttcggtttggatcaagatcttcctggtttggctacttgtcaaagaaactccacagaaaaggaagcttggaatgattacaataagtctcttattggtttaaacctctacatgccttctcgcctcgatcaaggttctgtcactgcgagataccgagtctggtggctgaaatcagtttcaaagtttctgagtcctgaagagatgaaggaagaatcaactgaaacttttaacgcaaggaagacatttgatcattatgacgaagattatgatgatgatattgatgcatctcccaaggtactgcctttgagtcaggtgtttcagaaattggaagaaggttttcccgcaaaacgcagaaggtctgtgatacatagattggtaaagcaagataagataggtgggtgtgtgaacagtcgtgtatcatcaggttggaagatgaacaacacaagtgaggattttacaaacaatagaagcatttacaagccagtggtgctgaagcgagctcatgggggtaatgatggtatttctacgggtgaagaaaaggataacatgactattgctcaaaggatcagatctaaggagaagtatagcagtaatgcggagaatactctaggagatgcttctgaaacacttggaaaaagggctagaagatatatgacggtggatagcgatgacgactcagagccttgtcaaaagcttgcttcgacaaaaatagagcaaaggagtgaagaggatgatgaaactacaagcaaatcacacaagacaagggagattttcaatgattttgaggttgacgtgattggaaatactgcagggaagaagagtatgatcgatgatgagcagcaacataatggatcgactatgaaaagcattggaagcaatgggagcaagaaagcagagtttttggtccataaaaatagcgaaaagcatagatgcaatgagaaaatgtgcagtgaagttaaaaagcaagaagaaattgatgaaaggttgaaagagagaaagcttgcaataaaggagatggaactgaagcttgaggcacatatgattgagatggagaagactttgtccatgattagaaagtggaaaatcagaggaaaccagattaaaagtcgagtttctgcttag

SEQ ID NO: 79785 - protein, 768 aa, Arabidopsis thaliana
  peptide (1)..(768): Ceres Seq. ID no. 12653191
MENASSSSSLLIEEREEVMVTDKGRCLRKNHFLKPFVTSINGGSVAELPRRDERLSVSSSQLLKLFSLRRTFSGFWVVDAPFVSWLAKMEALHAQTWRKAGIFEAIKVSTYSITKNPSLILSVSEKWCPETKSFVFPWGEATITLEDVMVLLGFSVLGSPVFAPLETSETRDSVKKLENVRIQHMNSSTDRRVSQKSWVSTFLGRGGDMEHVAFLVLWLSLFVFPVKSRRNISNHVFPIAVRLARGERIALAPAILAILYRDLDRIHEVSREDCVDKFHLESLFKLVQVWTWERFRNIRPKASDIPKGEPRIAQWHGLHRRSKDAWFCFDDFEWRPYTKALNNWNPFRFYLEEAIWVTVDESIDDEFASFARCVTVSQIVGDGFVEDYFPNRVARQFGLDQDLPGLATCQRNSTEKEAWNDYNKSLIGLNLYMPSRLDQGSVTARYRVWWLKSVSKFLSPEEMKEESTETFNARKTFDHYDEDYDDDIDASPKVLPLSQVFQKLEEGFPAKRRRSVIHRLVKQDKIGGCVNSRVSSGWKMNNTSEDFTNNRSIYKPVVLKRAHGGNDGISTGEEKDNMTIAQRIRSKEKYSSNAENTLGDASETLGKRARRYMTVDSDDDSEPCQKLASTKIEQRSEEDDETTSKSHKTREIFNDFEVDVIGNTAGKKSMIDDEQQHNGSTMKSIGSNGSKKAEFLVHKNSEKHRCNEKMCSEVKKQEEIDERLKERKLAIKEMELKLEAHMIEMEKTLSMIRKWKIRGNQIKSRVSA

SEQ ID NO: 79786 - protein, 750 aa, Arabidopsis thaliana
  peptide (1)..(750): Ceres Seq. ID no. 12653192
MVTDKGRCLRKNHFLKPFVTSINGGSVAELPRRDERLSVSSSQLLKLFSLRRTFSGFWVVDAPFVSWLAKMEALHAQTWRKAGIFEAIKVSTYSITKNPSLILSVSEKWCPETKSFVFPWGEATITLEDVMVLLGFSVLGSPVFAPLETSETRDSVKKLENVRIQHMNSSTDRRVSQKSWVSTFLGRGGDMEHVAFLVLWLSLFVFPVKSRRNISNHVFPIAVRLARGERIALAPAILAILYRDLDRIHEVSREDCVDKFHLESLFKLVQVWTWERFRNIRPKASDIPKGEPRIAQWHGLHRRSKDAWFCFDDFEWRPYTKALNNWNPFRFYLEEAIWVTVDESIDDEFASFARCVTVSQIVGDGFVEDYFPNRVARQFGLDQDLPGLATCQRNSTEKEAWNDYNKSLIGLNLYMPSRLDQGSVTARYRVWWLKSVSKFLSPEEMKEESTETFNARKTFDHYDEDYDDDIDASPKVLPLSQVFQKLEEGFPAKRRRSVIHRLVKQDKIGGCVNSRVSSGWKMNNTSEDFTNNRSIYKPVVLKRAHGGNDGISTGEEKDNMTIAQRIRSKEKYSSNAENTLGDASETLGKRARRYMTVDSDDDSEPCQKLASTKIEQRSEEDDETTSKSHKTREIFNDFEVDVIGNTAGKKSMIDDEQQHNGSTMKSIGSNGSKKAEFLVHKNSEKHRCNEKMCSEVKKQEEIDERLKERKLAIKEMELKLEAHMIEMEKTLSMIRKWKIRGNQIKSRVSA

SEQ ID NO: 79787 - protein, 680 aa, Arabidopsis thaliana
  peptide (1)..(680): Ceres Seq. ID no. 12653193
MEALHAQTWRKAGIFEAIKVSTYSITKNPSLILSVSEKWCPETKSFVFPWGEATITLEDVMVLLGFSVLGSPVFAPLETSETRDSVKKLENVRIQHMNSSTDRRVSQKSWVSTFLGRGGDMEHVAFLVLWLSLFVFPVKSRRNISNHVFPIAVRLARGERIALAPAILAILYRDLDRIHEVSREDCVDKFHLESLFKLVQVWTWERFRNIRPKASDIPKGEPRIAQWHGLHRRSKDAWFCFDDFEWRPYTKALNNWNPFRFYLEEAIWVTVDESIDDEFASFARCVTVSQIVGDGFVEDYFPNRVARQFGLDQDLPGLATCQRNSTEKEAWNDYNKSLIGLNLYMPSRLDQGSVTARYRVWWLKSVSKFLSPEEMKEESTETFNARKTFDHYDEDYDDDIDASPKVLPLSQVFQKLEEGFPAKRRRSVIHRLVKQDKIGGCVNSRVSSGWKMNNTSEDFTNNRSIYKPVVLKRAHGGNDGISTGEEKDNMTIAQRIRSKEKYSSNAENTLGDASETLGKRARRYMTVDSDDDSEPCQKLASTKIEQRSEEDDETTSKSHKTREIFNDFEVDVIGNTAGKKSMIDDEQQHNGSTMKSIGSNGSKKAEFLVHKNSEKHRCNEKMCSEVKKQEEIDERLKERKLAIKEMELKLEAHMIEMEKTLSMIRKWKIRGNQIKSRVSA

SEQ ID NO: 79788 - DNA, 1104 bp, Arabidopsis thaliana
  misc_feature (1)..(1104): Ceres Seq. ID no. 12653214
  misc_feature (1)..(1104): Ortholog of  Ceres SEQ ID NO 12364737 as cited in SEQ ID NO 51089
  misc_feature (1)..(1104): Ortholog of  Ceres SEQ ID NO 13582301 as cited in SEQ ID NO 56509
  misc_feature (1)..(1104): Ortholog of  Ceres SEQ ID NO 13597502 as cited in SEQ ID NO 64681
atggttcgattagttttgatcatcttcttcgtctacacaataatcttgtcgatcggctcaatcaactgcatagacaataataatctggtaacaaatcaagctgctttgttcgtgttcggagattctctttttgatgccggaaacaacaactacatcaatactgtctcaagtttccggtctaatatctggccgtacggtcaaaccaatttcaagtttcccaccggaagattatccgatggacccgaaaaggcatggttgccgtcgatcccgccaaatctacaaccaaacaacggtaacaatcaatttacctatggagtaagttttgcttctgctggcgccggagctttagccgaatcctttcttggaatggtgataaatttgggaacacagttaaacaacttcaaagatgttgaaaagagcttgagatctgaactaggagatgcagaaaccaaaagggttttctcaagagctgtttatctgtttcatatcggggccaacgactatttttatcctttctctgcaaactcctcaactttcaaatccaactccaaagagaaattcgtcgattttgttatcggtaacattacattcgttatcgaggaagtgtataaaatgggaggaagaaagtttggatttttgaacgtgggaccgtacgaatgttcaccaaattcattgataagagaccgaacaaagataggatcttgtttcaaacctgtcgctgagcttatcgacatgcacaacaagaagtttcccgatgttttaaggcggctacaacgccaattatcgggttttagatacgcccttcatgactatcacacttctctttccgaaagaatcaacagtccttcaaaatatgggttcaaggaagggaagaaggcatgttgtggaagcggaccactgagaggaatcaatacgtgtggaaacagaataggaccgtcgcaaggttacggcctatgcgaaaacgttaccgattatttgttctatgattcctctcatttgacggaaaaggctcatcgacaaatcgcagagctgatttggaacgggccgcctaatgtcactagaccttataatctcaaagctttatttgaacttaggcttacataa

SEQ ID NO: 79789 - protein, 367 aa, Arabidopsis thaliana
  peptide (1)..(367): Ceres Seq. ID no. 12653215
MVRLVLIIFFVYTIILSIGSINCIDNNNLVTNQAALFVFGDSLFDAGNNNYINTVSSFRSNIWPYGQTNFKFPTGRLSDGPEKAWLPSIPPNLQPNNGNNQFTYGVSFASAGAGALAESFLGMVINLGTQLNNFKDVEKSLRSELGDAETKRVFSRAVYLFHIGANDYFYPFSANSSTFKSNSKEKFVDFVIGNITFVIEEVYKMGGRKFGFLNVGPYECSPNSLIRDRTKIGSCFKPVAELIDMHNKKFPDVLRRLQRQLSGFRYALHDYHTSLSERINSPSKYGFKEGKKACCGSGPLRGINTCGNRIGPSQGYGLCENVTDYLFYDSSHLTEKAHRQIAELIWNGPPNVTRPYNLKALFELRLT

SEQ ID NO: 79790 - protein, 245 aa, Arabidopsis thaliana
  peptide (1)..(245): Ceres Seq. ID no. 12653216
MVINLGTQLNNFKDVEKSLRSELGDAETKRVFSRAVYLFHIGANDYFYPFSANSSTFKSNSKEKFVDFVIGNITFVIEEVYKMGGRKFGFLNVGPYECSPNSLIRDRTKIGSCFKPVAELIDMHNKKFPDVLRRLQRQLSGFRYALHDYHTSLSERINSPSKYGFKEGKKACCGSGPLRGINTCGNRIGPSQGYGLCENVTDYLFYDSSHLTEKAHRQIAELIWNGPPNVTRPYNLKALFELRLT

SEQ ID NO: 79791 - DNA, 372 bp, Arabidopsis thaliana
  misc_feature (1)..(372): Ceres Seq. ID no. 12653217
  misc_feature (1)..(372): Ortholog of  Ceres SEQ ID NO 15169814 as cited in SEQ ID NO 52818
atggggttcctacacaagctgtgggatgaaacggtggccggaccgacgccggacaatggtctcgggaaattgagaaagcacgattcattatccaccgtccgatcttctcctccttctctctcaagcgaccaagtcaccagaagcatcatggttaccaaggggaataacaatgttcgtggtctccgtaaattgaaaatggatccggattctccaacctgttcaagcagcaaccctgggacacctttaacccctgggacaccatgctatgctttgggaccattcactgccggcaaaatcccttcctctggcgaagacgatgcagcaagtctaactacttatgaatggattgtgataaacgcgttggaccgttga

SEQ ID NO: 79792 - protein, 123 aa, Arabidopsis thaliana
  peptide (1)..(123): Ceres Seq. ID no. 12653218
MGFLHKLWDETVAGPTPDNGLGKLRKHDSLSTVRSSPPSLSSDQVTRSIMVTKGNNNVRGLRKLKMDPDSPTCSSSNPGTPLTPGTPCYALGPFTAGKIPSSGEDDAASLTTYEWIVINALDR

SEQ ID NO: 79793 - protein, 74 aa, Arabidopsis thaliana
  peptide (1)..(74): Ceres Seq. ID no. 12653219
MVTKGNNNVRGLRKLKMDPDSPTCSSSNPGTPLTPGTPCYALGPFTAGKIPSSGEDDAASLTTYEWIVINALDR

SEQ ID NO: 79794 - DNA, 2334 bp, Arabidopsis thaliana
  misc_feature (1)..(2334): Ceres Seq. ID no. 12653220
  misc_feature (1)..(2334): Ortholog of  Ceres SEQ ID NO 13598865 as cited in SEQ ID NO 0
aaaaaaaaagaaggcgaattttgatttcttcattaaaaaattggcaaagcagacttcagagttctctcagtataatcttcacctaaatctcatttcaaaggaacaaacaaaaagaaaacacctaaatcgatctgtgaagtcaaaacactttccagtttcagattctgattatggcaacaccggagactcgtggcgttgattccgatttagagacagcggagaagataatactccggtgggattcaacaacatctgaagaagctaaagagaatctgattttccaaagcggtggtgatcgagaagaagtagatcggtacttgaaagctgtagatgaagttcaaagacacatctcttcaatctcaatctccgatgaagtcaaagcaacgattcaaatcgccatggctagactcgaggacgagctaagaaatatcttaatctctcagacttctactttcgaacctgattctcttcttctcgattcatcgttatcttcttcctctttcgcttcttcttctcgtacggagcttgaagatgacacttgcgatgacggtaacgaagaagaagagcaacaacaagtggatctggttttaccagatggttccggttcagattccggttcgagacggttatcgaggagtaggagaagcaatagcaaatccacaagcagtatacgagagatcgatcttgtaacaccggaagctgtttctgatctgagatcgatagctcagaggatgatcggagctggttactctcgtgaatgtgttcaggtatacggaaacgtgagaaaatccgccatggaaatgatttttaagcagctagggattgtgaaactagggattggtgatgtgcagagacttgactgggaagctgtagaagtgaagatcagaagatggatccgtgctgcgaaggtttgcgttagagttgttttcgctagcgagaagagactctgtgagcagatatttgaaggaaccatggaagagacttgtttcatggagattgttaaaacctctgctttgcagctttttaatttccctgaagctataagcattagtagaagatcacctgagaaactattcaagattcttgatttacatgatgctataacagatttgttacctgatatggaagagattttcgattcgagttcatcggagtcgattcttgttcaagctacagagattcaatcaagattagctgaagcagcaagagggatacttaccgagtttgagaatgcggtgtttcgcgaaccttcggttgttcctgtccctggaggaactatacatccattgacaaggtatgtgatgaattacctcaacttgatctctgactatagggaaacgttgattgatctcgtcatgacgaaaccatgtcggggtttgaaatgtaccaatgatcgaaacgatccggatatggatatctctgagcttgaaggaatatctccgttagctttgcatatgatatggacaatggtgatgctacaattcaatctagaagagaagtctttgcattacagggacgaacctttatctcacatcttcgtcatgaacaatgtccattacatagttcagaaggtcaaaagctctccggagctaatggagttgataggagacaagtatttaaggaagcttaccgggatatttagacaagcagctaccaagtatcagagagctacatgggtcagggtgttgaatagcttgagagatgaaggattacatgtgagcggaagcttctcttccggtgtatcgaagagtgctttaagagagaggtttaaagctttcaatacaatgtttgaagaggttcacaggattcaatcgacatggtcggttccggatactcagcttagagaagaactcaggatatctctatcggagcatcttatcccggcttatagatcctttcttggaagattcaggggacatatagagagcggaagacatcccgaaaactacttgaaatactctgttgaaaatcttgaaaccgcagtgttggatttcttcgaaggatataccacagccccacatttgagacggtctcagtgaaagaagaagattgaaaaccccataaaactttccttttcggtttgcccacattagaattaaccatttatatcattctttgaattcattccattttcatgtggtggcagtgttgagattgttttccaggcttctggtgaatagtctctcactcttttgtacttgtaagcatatttgttgtgtgttgtttgtttgttaccaaatttcattactccattgttgatataaatgtttgtattttgtgacttttgttgtactagttccttcataaacccatctaaatgcaatttgatttttt

SEQ ID NO: 79795 - protein, 622 aa, Arabidopsis thaliana
  peptide (1)..(622): Ceres Seq. ID no. 12653221
MATPETRGVDSDLETAEKIILRWDSTTSEEAKENLIFQSGGDREEVDRYLKAVDEVQRHISSISISDEVKATIQIAMARLEDELRNILISQTSTFEPDSLLLDSSLSSSSFASSSRTELEDDTCDDGNEEEEQQQVDLVLPDGSGSDSGSRRLSRSRRSNSKSTSSIREIDLVTPEAVSDLRSIAQRMIGAGYSRECVQVYGNVRKSAMEMIFKQLGIVKLGIGDVQRLDWEAVEVKIRRWIRAAKVCVRVVFASEKRLCEQIFEGTMEETCFMEIVKTSALQLFNFPEAISISRRSPEKLFKILDLHDAITDLLPDMEEIFDSSSSESILVQATEIQSRLAEAARGILTEFENAVFREPSVVPVPGGTIHPLTRYVMNYLNLISDYRETLIDLVMTKPCRGLKCTNDRNDPDMDISELEGISPLALHMIWTMVMLQFNLEEKSLHYRDEPLSHIFVMNNVHYIVQKVKSSPELMELIGDKYLRKLTGIFRQAATKYQRATWVRVLNSLRDEGLHVSGSFSSGVSKSALRERFKAFNTMFEEVHRIQSTWSVPDTQLREELRISLSEHLIPAYRSFLGRFRGHIESGRHPENYLKYSVENLETAVLDFFEGYTTAPHLRRSQ

SEQ ID NO: 79796 - protein, 546 aa, Arabidopsis thaliana
  peptide (1)..(546): Ceres Seq. ID no. 12653222
MARLEDELRNILISQTSTFEPDSLLLDSSLSSSSFASSSRTELEDDTCDDGNEEEEQQQVDLVLPDGSGSDSGSRRLSRSRRSNSKSTSSIREIDLVTPEAVSDLRSIAQRMIGAGYSRECVQVYGNVRKSAMEMIFKQLGIVKLGIGDVQRLDWEAVEVKIRRWIRAAKVCVRVVFASEKRLCEQIFEGTMEETCFMEIVKTSALQLFNFPEAISISRRSPEKLFKILDLHDAITDLLPDMEEIFDSSSSESILVQATEIQSRLAEAARGILTEFENAVFREPSVVPVPGGTIHPLTRYVMNYLNLISDYRETLIDLVMTKPCRGLKCTNDRNDPDMDISELEGISPLALHMIWTMVMLQFNLEEKSLHYRDEPLSHIFVMNNVHYIVQKVKSSPELMELIGDKYLRKLTGIFRQAATKYQRATWVRVLNSLRDEGLHVSGSFSSGVSKSALRERFKAFNTMFEEVHRIQSTWSVPDTQLREELRISLSEHLIPAYRSFLGRFRGHIESGRHPENYLKYSVENLETAVLDFFEGYTTAPHLRRSQ

SEQ ID NO: 79797 - protein, 435 aa, Arabidopsis thaliana
  peptide (1)..(435): Ceres Seq. ID no. 12653223
MIGAGYSRECVQVYGNVRKSAMEMIFKQLGIVKLGIGDVQRLDWEAVEVKIRRWIRAAKVCVRVVFASEKRLCEQIFEGTMEETCFMEIVKTSALQLFNFPEAISISRRSPEKLFKILDLHDAITDLLPDMEEIFDSSSSESILVQATEIQSRLAEAARGILTEFENAVFREPSVVPVPGGTIHPLTRYVMNYLNLISDYRETLIDLVMTKPCRGLKCTNDRNDPDMDISELEGISPLALHMIWTMVMLQFNLEEKSLHYRDEPLSHIFVMNNVHYIVQKVKSSPELMELIGDKYLRKLTGIFRQAATKYQRATWVRVLNSLRDEGLHVSGSFSSGVSKSALRERFKAFNTMFEEVHRIQSTWSVPDTQLREELRISLSEHLIPAYRSFLGRFRGHIESGRHPENYLKYSVENLETAVLDFFEGYTTAPHLRRSQ

SEQ ID NO: 79798 - DNA, 720 bp, Arabidopsis thaliana
  misc_feature (1)..(720): Ceres Seq. ID no. 12653279
  misc_feature (1)..(720): Ortholog of  Ceres SEQ ID NO 13655934 as cited in SEQ ID NO 65278
  misc_feature (1)..(720): Ortholog of  Ceres SEQ ID NO 15180098 as cited in SEQ ID NO 0
atgggagatcaacaaaaaattcacccggttcttcaaatggaagccaacaagacgaagacaacaacaccagctcccggaaagacagtcttgcttccggttcaacggccgattccgcctcctgttattcctagtaagaatcgaaatatgtgctgcaaaatcttttgttgggtgttaagccttctagtcattgcattgatcgcgttagcaattgcggttgcggttgtatactttgttttccaccctaaactcccgagttacgaagtcaacagtttacgagttaccaaccttggaatcaatctagacctctctctttccgcggagtttaaagtcgagatcacagctcgtaatcccaacgaaaagattgggatttattacgagaaaggaggtcatatcggtgtgtggtacgacaagacaaagctatgtgaaggccctataccgaggttttatcaaggacatcgcaatgtaactaaactaaatgtggctctaacgggaagagcgcaatatgggaacactgtcttggcggcattgcagcagcaacaacaaacaggacgtgtaccgttagatcttaaagtgaatgcacctgtcgccatcaaactcggaaatctgaagatgaagaagattcggatattggggagttgtaagcttgttgttgatagtttatcaacgaacaataatatcaacatcaaagctagtgattgcagttttaaggccaaactctga

SEQ ID NO: 79799 - protein, 239 aa, Arabidopsis thaliana
  peptide (1)..(239): Ceres Seq. ID no. 12653280
MGDQQKIHPVLQMEANKTKTTTPAPGKTVLLPVQRPIPPPVIPSKNRNMCCKIFCWVLSLLVIALIALAIAVAVVYFVFHPKLPSYEVNSLRVTNLGINLDLSLSAEFKVEITARNPNEKIGIYYEKGGHIGVWYDKTKLCEGPIPRFYQGHRNVTKLNVALTGRAQYGNTVLAALQQQQQTGRVPLDLKVNAPVAIKLGNLKMKKIRILGSCKLVVDSLSTNNNINIKASDCSFKAKL

SEQ ID NO: 79800 - protein, 227 aa, Arabidopsis thaliana
  peptide (1)..(227): Ceres Seq. ID no. 12653281
MEANKTKTTTPAPGKTVLLPVQRPIPPPVIPSKNRNMCCKIFCWVLSLLVIALIALAIAVAVVYFVFHPKLPSYEVNSLRVTNLGINLDLSLSAEFKVEITARNPNEKIGIYYEKGGHIGVWYDKTKLCEGPIPRFYQGHRNVTKLNVALTGRAQYGNTVLAALQQQQQTGRVPLDLKVNAPVAIKLGNLKMKKIRILGSCKLVVDSLSTNNNINIKASDCSFKAKL

SEQ ID NO: 79801 - protein, 191 aa, Arabidopsis thaliana
  peptide (1)..(191): Ceres Seq. ID no. 12653282
MCCKIFCWVLSLLVIALIALAIAVAVVYFVFHPKLPSYEVNSLRVTNLGINLDLSLSAEFKVEITARNPNEKIGIYYEKGGHIGVWYDKTKLCEGPIPRFYQGHRNVTKLNVALTGRAQYGNTVLAALQQQQQTGRVPLDLKVNAPVAIKLGNLKMKKIRILGSCKLVVDSLSTNNNINIKASDCSFKAKL

SEQ ID NO: 79802 - DNA, 549 bp, Arabidopsis thaliana
  misc_feature (1)..(549): Ceres Seq. ID no. 12653291
  misc_feature (1)..(549): Ortholog of  Ceres SEQ ID NO 12393496 as cited in SEQ ID NO 20599
atgaagttcttgatttacctcgttgtgtttgttcttcttttcaatggtttgacggccaacagagtggaaaactctctggttcagaaatattgcaatcaaagttcaaagtacgcggaacgatatttctataagttttgcattgcatctctcgaagagaatgcggaaagtcagaaagcaaggaatagcaatgatttaacattggtaggaacgaataacgctttatcaaacctaacaaacgtgaaaagaattgtggagaagattttcaacgagagaaaatataagggcaggctgagtaagaagttgttgcaaaagtgccttaagctttattctgaaggctatgacgcgttaacctcagctttgaagtacattaaagtgagagatctgtttaaagtttcggttcatttgcagaaagcaaaagaagcaccaagcatttgcgaaatgggattcaacggcgacaataaacaaatatctccgatgaagaaagaaaacgatgttcttttcgacgtgatcaatattccttacagttttaatatgaatcgacatggttag

SEQ ID NO: 79803 - protein, 182 aa, Arabidopsis thaliana; identical to SEQ ID NO: 20602
  peptide (1)..(182): Ceres Seq. ID no. 12653292

SEQ ID NO: 79804 - DNA, 1044 bp, Arabidopsis thaliana
  misc_feature (1)..(1044): Ceres Seq. ID no. 12653305
  misc_feature (1)..(1044): Ortholog of  Ceres SEQ ID NO 14302852 as cited in SEQ ID NO 64814
  misc_feature (1)..(1044): Ortholog of  Ceres SEQ ID NO 13598593 as cited in SEQ ID NO 64978
  misc_feature (1)..(1044): Ortholog of  Ceres SEQ ID NO 14303067 as cited in SEQ ID NO 67078
  misc_feature (1)..(1044): Ortholog of  Ceres SEQ ID NO 13595992 as cited in SEQ ID NO 68401
atgaagggagatctgagaaatggggtttacgttggattggtggtgatgctctatgcgtgtattgtcgttgtacaactcgaagcagcgttggaaacaaagacatgtttccaaaggaagagtccatgtttcctaaagaagcaaacttgcccaaagcaatgtccttcgttttcccctcccaatggcagtaccaaggcatgcgtcatcgattgctttaaccctatttgcaaagccacttgccgaaataggaagcctaattgcaacggcaaaggatcagcatgcttagatccacgtttcatcggcggagatggcatcgtcttctactttcatggaaaacgcgacgagcattttgcactaatctctgacgttgacttccaagtcaacgcacgtttcattggtcttagacctaatggtcgggccagagattttacgtggatacaatccttaggtctaatcttcggccccaacagcaaaaccttctcactcgaggctacaaaagccgagaaatgggatcaccaagttgaccacctccgtctttcctacgaaggaaaagagatctctttaccaaaaggagatacatcagtgtggagtcctcctctaggagactatataaagatcgagagaacttctgacataaactccgtgttggtcacgttacaagacattgccgagatttggatcaacgtggttccggtgacaaaagaagacgacataatccataaatacgggataccggaggatgactgttttgctcatcttgaggttcagttccggttcttgaagttgtcatcaaacgtggaaggtgttttaggaagaacgtataaagaagatttcaagaatccggcgaaacctggcgttgctatgccggttgttggtggcgaagataaatacagaacagcgtcacttcttgaaacaagttgtaatgcatgtgtttactctggtggctcaagaagtttggacaagattgagccattgttgctgaatcaaaacactgttgattgcaccggtggatccagcagtggtgttggaatcttttgcagaaaataa

SEQ ID NO: 79805 - protein, 347 aa, Arabidopsis thaliana
  peptide (1)..(347): Ceres Seq. ID no. 12653306
MKGDLRNGVYVGLVVMLYACIVVVQLEAALETKTCFQRKSPCFLKKQTCPKQCPSFSPPNGSTKACVIDCFNPICKATCRNRKPNCNGKGSACLDPRFIGGDGIVFYFHGKRDEHFALISDVDFQVNARFIGLRPNGRARDFTWIQSLGLIFGPNSKTFSLEATKAEKWDHQVDHLRLSYEGKEISLPKGDTSVWSPPLGDYIKIERTSDINSVLVTLQDIAEIWINVVPVTKEDDIIHKYGIPEDDCFAHLEVQFRFLKLSSNVEGVLGRTYKEDFKNPAKPGVAMPVVGGEDKYRTASLLETSCNACVYSGGSRSLDKIEPLLLNQNTVDCTGGSSSGVGIFCRK

SEQ ID NO: 79806 - protein, 332 aa, Arabidopsis thaliana
  peptide (1)..(332): Ceres Seq. ID no. 12653307
MLYACIVVVQLEAALETKTCFQRKSPCFLKKQTCPKQCPSFSPPNGSTKACVIDCFNPICKATCRNRKPNCNGKGSACLDPRFIGGDGIVFYFHGKRDEHFALISDVDFQVNARFIGLRPNGRARDFTWIQSLGLIFGPNSKTFSLEATKAEKWDHQVDHLRLSYEGKEISLPKGDTSVWSPPLGDYIKIERTSDINSVLVTLQDIAEIWINVVPVTKEDDIIHKYGIPEDDCFAHLEVQFRFLKLSSNVEGVLGRTYKEDFKNPAKPGVAMPVVGGEDKYRTASLLETSCNACVYSGGSRSLDKIEPLLLNQNTVDCTGGSSSGVGIFCRK

SEQ ID NO: 79807 - DNA, 2797 bp, Arabidopsis thaliana
  misc_feature (1)..(2797): Ceres Seq. ID no. 12653317
  misc_feature (1)..(2797): Ortholog of  Ceres SEQ ID NO 15176051 as cited in SEQ ID NO 53434
  misc_feature (1)..(2797): Ortholog of  Ceres SEQ ID NO 15170306 as cited in SEQ ID NO 58219
  misc_feature (1)..(2797): Ortholog of  Ceres SEQ ID NO 12465091 as cited in SEQ ID NO 65947
accattcataaacacacaccgagagaaaatcagaaattaaattagagagagagcagagtgaatcaaaacttcaacttcacccaaaaagatgttcggagaacttagggatctgctcaccggcggcggaaatgagacgacgacgaagaaggtgaaaggaacggtggttctgatgaagaagaacgtcctcgatttcaacgatttcaatgcttcgtttctcgatcgtcttcatgaatttctcggaaacaaaatcactcttcgtcttgtaagctctgatgttactgattcagaaaacggttctaaaggcaaactagggaaggctgctcacttggaggattggatcacaacaatcacgtcgttaaccgcaggcgaatccgctttcaaggtcacgttcgattacgaaaccgatttcggttaccctggagcattcttgatcagaaacagccatttcagtgagtttcttctcaaaagtctcacacttgaagacgttccaggccatggcagagtccattacatctgtaattcttggatttaccctgctaaacactacactacagaccgagtcttcttctccaacaagacttatcttccacatgaaacaccagcgacgctgctcaagtatagagaagaagagctagtgagtttgagaggaaccggcgaaggagagcttaaggaatgggacagagtatatgactatgcttactacaatgatttaggcgtcccaccaaagaacccacggcctgtacttggagggacacaggagtatccttacccaagaagaggaagaaccgggcggaaaccaactaaagaagatcctcaaaccgagagcaggctaccgatcacatcgagcctagacatatatgttccacgagatgagagatttggacacttgaagatgtctgatttccttgcttatgctctaaaagcgattgctcagttcatccaacctgcacttgaggctgtattcgacgatactcctaaagagtttgattcttttgaagatgttcttaagatctatgaagaaggaatcgatctaccaaaccaagctttgattgatagtatcgttaagaatataccgcttgagatgttaaaggagatattcagaacagatggccagaaattccttaagtttccagtgcctcaggtcatcaaagaggacaaaactgcatggagaacagatgaggaatttgctagagaaatgttggctggactaaaccctgttgttattcaacttcttaaggagtttcctccaaagagtaagcttgacagtgaatcatacggtaaccagaacagtacaatcactaaaagccacatagaacacaatttggatggactcactgttgaagaggctctggagaaggagaggttgtttatattagaccaccatgacacactgatgccatacttgggacgcgtaaacaccaccacgaccaagacttatgcaagcaggacacttctgttcttgaaagatgatgggaccttgaagccgttggtgatagagctgagcttgcctcatcctaatggagacaaatttggagcagtgagtgaagtatatacgcctggtgaaggtgtctacgactcgctatggcagttggctaaggcttttgtcggtgtaaatgactccggaaatcatcagcttattagccactggatgcaaacacacgcatcgattgaaccgtttgtgattgccacaaacagacagctgagtgttcttcacccggtctttaagctccttgaacctcacttccgtgatacgatgaatatcaatgcacttgctaggcaaatcttgatcaatggtggtggtatatttgaaatcactgtgtttccttctaaatacgccatggagatgtcatctttcatttacaaaaaccactggaccttccctgaccaagcattaccagcagaacttaaaaagagagggatggccgttgaggatccagaagcaccacacggattacgtctgaggataaaagactatccttacgcagtggatgggcttgaggtttggtatgctattgaatcatgggtccgagactacattttcttgttctacaagatagaggaggatatccaaaccgacacagagctccaagcctggtggaaggaggtgcgcgaggaaggtcatggagacaaaaagtcagaaccatggtggcctaaaatgcaaacccgtgaagaacttgttgagtcttgcaccatcattatttgggtggcttctgctcttcatgcagctgttaacttcggacagtatccagttgctgggtacctcccaaacagaccgactataagccgtcagtacatgccaaaggaaaacactccagagtttgaagaacttgagaagaatcctgataaagtgtttttgaagaccatcacagctcagcttcagacacttctagggatatctctgattgagattctctctactcattctagcgacgaggtctatttgggacagagagattctaaagaatgggcggctgagaaagaagcgttggaggcgttcgagaagtttggagagaaagtaaaggagattgagaagaacattgatgagaggaacgacgacgagactctcaagaacaggactggtttggttaagatgccatacactttattgtttccgagcagtgaaggcggagtcaccggcaggggaattccaaatagcgtctctatctgaaacaactctcgcttcagaattgtgtcagagtcacgtgttgttctatatcccatggtttacttgttctacaagttataaactttgattattgttataataaacatcagaataaagcaagtctatacatat

SEQ ID NO: 79808 - protein, 859 aa, Arabidopsis thaliana [sequence omitted]

SEQ ID NO: 79809 - protein, 832 aa, Arabidopsis thaliana
  peptide (1)..(832): Ceres Seq. ID no. 12653319
MKKNVLDFNDFNASFLDRLHEFLGNKITLRLVSSDVTDSENGSKGKLGKAAHLEDWITTITSLTAGESAFKVTFDYETDFGYPGAFLIRNSHFSEFLLKSLTLEDVPGHGRVHYICNSWIYPAKHYTTDRVFFSNKTYLPHETPATLLKYREEELVSLRGTGEGELKEWDRVYDYAYYNDLGVPPKNPRPVLGGTQEYPYPRRGRTGRKPTKEDPQTESRLPITSSLDIYVPRDERFGHLKMSDFLAYALKAIAQFIQPALEAVFDDTPKEFDSFEDVLKIYEEGIDLPNQALIDSIVKNIPLEMLKEIFRTDGQKFLKFPVPQVIKEDKTAWRTDEEFAREMLAGLNPVVIQLLKEFPPKSKLDSESYGNQNSTITKSHIEHNLDGLTVEEALEKERLFILDHHDTLMPYLGRVNTTTTKTYASRTLLFLKDDGTLKPLVIELSLPHPNGDKFGAVSEVYTPGEGVYDSLWQLAKAFVGVNDSGNHQLISHWMQTHASIEPFVIATNRQLSVLHPVFKLLEPHFRDTMNINALARQILINGGGIFEITVFPSKYAMEMSSFIYKNHWTFPDQALPAELKKRGMAVEDPEAPHGLRLRIKDYPYAVDGLEVWYAIESWVRDYIFLFYKIEEDIQTDTELQAWWKEVREEGHGDKKSEPWWPKMQTREELVESCTIIIWVASALHAAVNFGQYPVAGYLPNRPTISRQYMPKENTPEFEELEKNPDKVFLKTITAQLQTLLGISLIEILSTHSSDEVYLGQRDSKEWAAEKEALEAFEKFGEKVKEIEKNIDERNDDETLKNRTGLVKMPYTLLFPSSEGGVTGRGIPNSVSI

SEQ ID NO: 79810 - protein, 591 aa, Arabidopsis thaliana
  peptide (1)..(591): Ceres Seq. ID no. 12653320
MSDFLAYALKAIAQFIQPALEAVFDDTPKEFDSFEDVLKIYEEGIDLPNQALIDSIVKNIPLEMLKEIFRTDGQKFLKFPVPQVIKEDKTAWRTDEEFAREMLAGLNPVVIQLLKEFPPKSKLDSESYGNQNSTITKSHIEHNLDGLTVEEALEKERLFILDHHDTLMPYLGRVNTTTTKTYASRTLLFLKDDGTLKPLVIELSLPHPNGDKFGAVSEVYTPGEGVYDSLWQLAKAFVGVNDSGNHQLISHWMQTHASIEPFVIATNRQLSVLHPVFKLLEPHFRDTMNINALARQILINGGGIFEITVFPSKYAMEMSSFIYKNHWTFPDQALPAELKKRGMAVEDPEAPHGLRLRIKDYPYAVDGLEVWYAIESWVRDYIFLFYKIEEDIQTDTELQAWWKEVREEGHGDKKSEPWWPKMQTREELVESCTIIIWVASALHAAVNFGQYPVAGYLPNRPTISRQYMPKENTPEFEELEKNPDKVFLKTITAQLQTLLGISLIEILSTHSSDEVYLGQRDSKEWAAEKEALEAFEKFGEKVKEIEKNIDERNDDETLKNRTGLVKMPYTLLFPSSEGGVTGRGIPNSVSI

SEQ ID NO: 79811 - DNA, 2779 bp, Arabidopsis thaliana
  misc_feature (1)..(2779): Ceres Seq. ID no. 12653325
  misc_feature (1)..(2779): Ortholog of  Ceres SEQ ID NO 14307534 as cited in SEQ ID NO 55715
  misc_feature (1)..(2779): Ortholog of  Ceres SEQ ID NO 14307548 as cited in SEQ ID NO 58859
ggctgcttctgcaacctaaaaatggctgcttcaatctctcttcttctcatcaaacgcatctctcacttgcacataaaccctaaaagccaccgactttttcaaccatttctcactaaatcactctctacttctccacaaagcaacactgaatcaacccatgaacctaatcacaaaccctcttctctatcttctcgtcttagcttcgttttcgatcaaatcgatgctattgagaaacgtcactctgagaaagacgaaacccttgagcgtattcgtgcttggcgtcaatctaaacagacgcatcagttaaaaactcctccttctgctccacaacaagatccggatcttagagaagtcgaatccgttgtgtctaatgataaattggattcttgtgttgtgcttgagccgattcagattgattctggtgagttgagtaaggagaaaggtgttattgagttggtccatccatggccggagtggatggagttgatggagagattggtgaagcagaattactttgatcataggagagaaagagatgatgatgatatggtgaatagtttggggattgatgtgtctagtgttggattaggtgaagatgagaatgttggagttgctttgtttcaggattttagagctgttcaaaatgcttgtagcaattttggtaaagaccgtttcgatattctaaggtcattgtcgagaaatgacattcaaatcctagtcggtcatggatgtccagcgactgatagaaaagtggttttctcaggaaaactactgaggaagcgtgttcatcttgatgaaggagatgtctgcagttcctgcagcttgaggaactcatgcgaaaaggcatttttgttgacaaacaaagaggatgaggctcgaaccattgaccttatgcgcattttgttcacctatggttttgacccattgaatggaacagtggccaacaaaagtctcctgaagaaaaagtctgttaagtctgtggtgcgtaaactgctgcatgagattgtcaagttaagcgctgtaccaatagatcctaatctcactccaccagttatcaaaagagcgccccctaaagtcaagcagccaccgccaactcctaaacgacgtgttggccgtgatgatgttgagatgaagaaaggagattggctatgcccaaagtgcgatttcatgaactttgcaaagaacacgatttgcttacagtgtgatgcaaagaggccaaagagacagctccttccaggagaatgggaatgccctgaatgcaacttcttaaactatagaagaaacatggcatgttttcattgtgattgcaagcgtccagctgatgctatcctagagaacaaaccacaagaaacttatcgcttcactgaagcacaaacagacagggttgtgaaacgggatgatgtttccaatgcatggaactttgattttgatgacgatgaatcagacggagcagaagttgctgcttttgaatatgcggattccagtaaaaagaatgaaaaccttctccgggagggtttgagagatcctgaagaagaatttggtaatcttcctccaggagcccgagaaagttctgagtttggcagaagcagaagacctggagttgggtttgatgattttgacgatgaagatgacattgatagctatgaaatagacgaatctaaagagagagatgtcccagtggaaggagctcgatcttcttttgcttctgacgagttctcagaggatgaaaagtttccagaatcaaagtctggttttaatgcacacagaggaggaagttcaaactttcacaacagtggaaagaagcatggaaacagtaagggaggtttctctagggatgatgagctcggttttagttcagatgatgaggtttccgccaatcccaggtggaagtcaagccatgtggcttcgacccagagaggtccaccttcgagaaaacttacttttgggtcagacgaagaatttgggctcgattctgatatggaggatgatagtcccaggtccggtttgaggcgtggacaaagaaacaacggtgcgagaggagggttcaagggaaaacgaagctcctattcagcttcagaatctgatgatgacatggatgatcaagagtacagagggtcaagtttctctggtaatagatcgagaggaagtagaggaagaatgagaggtggaggacgaggtggtttcaatgataattttgcctctgatagctacaggggatcaaatggctcctcggctaatagatcaagagggagaggaggaagaataggaagcagaaggagtagttttgatagtgacgatgaagattacagagggtcaagttcctcagctagtagatcaagaggtaacagagaagatagtggcggggttgggggaagaatgggaagcagaagaggcggttttgatgatgagtttgatagaaagagtagccgaggacgcggttcaggtagtttcaggggatctaacagaggaggaagaggaggaggaggaggaggaaaccggcatgggcatagtgatggtaaagacacagacgttggtgatttcagaaacagtcgaagagttatcgagagatagagatgtaaactggtctcatcagatatttactttatacttttatccagtatccaattggctatagtgcattagttcagtcataatatcaatttctgttattttactgtctcgtgcctagactcatgagagttttggaggtgtaaaacaaatttatggattcgtgagctcatatgcctcgaccaagctatctactatctagggaccgttt

SEQ ID NO: 79812 - protein, 856 aa, Arabidopsis thaliana
  peptide (1)..(856): Ceres Seq. ID no. 12653326
GCFCNLKMAASISLLLIKRISHLHINPKSHRLFQPFLTKSLSTSPQSNTESTHEPNHKPSSLSSRLSFVFDQIDAIEKRHSEKDETLERIRAWRQSKQTHQLKTPPSAPQQDPDLREVESVVSNDKLDSCVVLEPIQIDSGELSKEKGVIELVHPWPEWMELMERLVKQNYFDHRRERDDDDMVNSLGIDVSSVGLGEDENVGVALFQDFRAVQNACSNFGKDRFDILRSLSRNDIQILVGHGCPATDRKVVFSGKLLRKRVHLDEGDVCSSCSLRNSCEKAFLLTNKEDEARTIDLMRILFTYGFDPLNGTVANKSLLKKKSVKSVVRKLLHEIVKLSAVPIDPNLTPPVIKRAPPKVKQPPPTPKRRVGRDDVEMKKGDWLCPKCDFMNFAKNTICLQCDAKRPKRQLLPGEWECPECNFLNYRRNMACFHCDCKRPADAILENKPQETYRFTEAQTDRVVKRDDVSNAWNFDFDDDESDGAEVAAFEYADSSKKNENLLREGLRDPEEEFGNLPPGARESSEFGRSRRPGVGFDDFDDEDDIDSYEIDESKERDVPVEGARSSFASDEFSEDEKFPESKSGFNAHRGGSSNFHNSGKKHGNSKGGFSRDDELGFSSDDEVSANPRWKSSHVASTQRGPPSRKLTFGSDEEFGLDSDMEDDSPRSGLRRGQRNNGARGGFKGKRSSYSASESDDDMDDQEYRGSSFSGNRSRGSRGRMRGGGRGGFNDNFASDSYRGSNGSSANRSRGRGGRIGSRRSSFDSDDEDYRGSSSSASRSRGNREDSGGVGGRMGSRRGGFDDEFDRKSSRGRGSGSFRGSNRGGRGGGGGGNRHGHSDGKDTDVGDFRNSRRVIER

SEQ ID NO: 79813 - protein, 849 aa, Arabidopsis thaliana
  peptide (1)..(849): Ceres Seq. ID no. 12653327
MAASISLLLIKRISHLHINPKSHRLFQPFLTKSLSTSPQSNTESTHEPNHKPSSLSSRLSFVFDQIDAIEKRHSEKDETLERIRAWRQSKQTHQLKTPPSAPQQDPDLREVESVVSNDKLDSCVVLEPIQIDSGELSKEKGVIELVHPWPEWMELMERLVKQNYFDHRRERDDDDMVNSLGIDVSSVGLGEDENVGVALFQDFRAVQNACSNFGKDRFDILRSLSRNDIQILVGHGCPATDRKVVFSGKLLRKRVHLDEGDVCSSCSLRNSCEKAFLLTNKEDEARTIDLMRILFTYGFDPLNGTVANKSLLKKKSVKSVVRKLLHEIVKLSAVPIDPNLTPPVIKRAPPKVKQPPPTPKRRVGRDDVEMKKGDWLCPKCDFMNFAKNTICLQCDAKRPKRQLLPGEWECPECNFLNYRRNMACFHCDCKRPADAILENKPQETYRFTEAQTDRVVKRDDVSNAWNFDFDDDESDGAEVAAFEYADSSKKNENLLREGLRDPEEEFGNLPPGARESSEFGRSRRPGVGFDDFDDEDDIDSYEIDESKERDVPVEGARSSFASDEFSEDEKFPESKSGFNAHRGGSSNFHNSGKKHGNSKGGFSRDDELGFSSDDEVSANPRWKSSHVASTQRGPPSRKLTFGSDEEFGLDSDMEDDSPRSGLRRGQRNNGARGGFKGKRSSYSASESDDDMDDQEYRGSSFSGNRSRGSRGRMRGGGRGGFNDNFASDSYRGSNGSSANRSRGRGGRIGSRRSSFDSDDEDYRGSSSSASRSRGNREDSGGVGGRMGSRRGGFDDEFDRKSSRGRGSGSFRGSNRGGRGGGGGGNRHGHSDGKDTDVGDFRNSRRVIER

SEQ ID NO: 79814 - protein, 697 aa, Arabidopsis thaliana
  peptide (1)..(697): Ceres Seq. ID no. 12653328
MELMERLVKQNYFDHRRERDDDDMVNSLGIDVSSVGLGEDENVGVALFQDFRAVQNACSNFGKDRFDILRSLSRNDIQILVGHGCPATDRKVVFSGKLLRKRVHLDEGDVCSSCSLRNSCEKAFLLTNKEDEARTIDLMRILFTYGFDPLNGTVANKSLLKKKSVKSVVRKLLHEIVKLSAVPIDPNLTPPVIKRAPPKVKQPPPTPKRRVGRDDVEMKKGDWLCPKCDFMNFAKNTICLQCDAKRPKRQLLPGEWECPECNFLNYRRNMACFHCDCKRPADAILENKPQETYRFTEAQTDRVVKRDDVSNAWNFDFDDDESDGAEVAAFEYADSSKKNENLLREGLRDPEEEFGNLPPGARESSEFGRSRRPGVGFDDFDDEDDIDSYEIDESKERDVPVEGARSSFASDEFSEDEKFPESKSGFNAHRGGSSNFHNSGKKHGNSKGGFSRDDELGFSSDDEVSANPRWKSSHVASTQRGPPSRKLTFGSDEEFGLDSDMEDDSPRSGLRRGQRNNGARGGFKGKRSSYSASESDDDMDDQEYRGSSFSGNRSRGSRGRMRGGGRGGFNDNFASDSYRGSNGSSANRSRGRGGRIGSRRSSFDSDDEDYRGSSSSASRSRGNREDSGGVGGRMGSRRGGFDDEFDRKSSRGRGSGSFRGSNRGGRGGGGGGNRHGHSDGKDTDVGDFRNSRRVIER

SEQ ID NO: 79815 - DNA, 1825 bp, Arabidopsis thaliana
  misc_feature (1)..(1825): Ceres Seq. ID no. 12653344
  misc_feature (1)..(1825): Ortholog of  Ceres SEQ ID NO 14310452 as cited in SEQ ID NO 54426
  misc_feature (1)..(1825): Ortholog of  Ceres SEQ ID NO 15174626 as cited in SEQ ID NO 59393
  misc_feature (1)..(1825): Ortholog of  Ceres SEQ ID NO 15169663 as cited in SEQ ID NO 64659
  misc_feature (1)..(1825): Ortholog of  Ceres SEQ ID NO 13656177 as cited in SEQ ID NO 64997
acgagctttgtctcgtctctcttctggcactctcacctttcgtcgtcccaatttgtaaaaccctaacgactagatttcagtacctgcaactcctttttctcaactttccgatcatatttctcaatcggagaaactgattcgacgaacatcatgagtcgctacgatagccggaccggcgattccacctcgtaccgtgaccgtcgaagtgactcagggtttggtgggacttcatcatatggaagctcaggtagtcatacatctagcaaaaaggataacgatggcaatgaatctccaaggaagctagatttagatggtttgactccttttgagaagaatttttatgtcgagtctcccgctgtggcggctatgacagacacagaagtagaggaatatcgaaagctaagggaaattactgttgaaggcaaagatattccaaaacctgtcaagagttttcgtgatgttggctttcctgattatgttttggaagaggttaagaaggctggttttactgaacctacgcctatacaatctcaggggtggccaatggctatgaagggacgtgatcttatcggcattgctgaaactggttctggaaagactctttcttacttactacctgctattgtccatgttaatgcccaaccaatgttagctcatggtgacggcccaatcgtcttggttcttgctcccactcgtgaactggctgtgcagatacagcaagaggcatctaaatttggttcatcctcaaaaattaagaccacttgcatttatggtggggttccaaaagggcctcaagtgcgtgatctccagaaaggtgtggagatcgttatagctactcctgggaggttaatagacatgatggagtcgaacaacacaaacctacgaagggttacttatcttgttttggatgaggctgatcgaatgcttgatatggggtttgaccctcagatccggaaaattgtttcacatattcggccagaccgtcaaactttgtactggagtgccacttggcctaaggaggtggaacaactatcgaagaagtttctttataacccatacaaagtgataataggatcttctgatttgaaagctaaccgtgcaattcgtcaaattgttgatgtcatttccgaaagccaaaagtataacaagttggtgaaactgcttgaggacataatggatggaagcagaattcttgtcttcctcgatacaaaaaagggctgtgaccaaatcactcgtcagcttcgcatggatggttggcctgctttgtcaatacatggagataaaagtcaagcggaaagagattgggttctctcggagtttagatcaggcaaaagccctataatgactgctacagacgttgcagctcgtggattagacgtgaaagatgtgaagtatgtgataaactatgacttccctggatcactggaggattatgttcacaggattggacgaacaggtagagccggggctaaaggaacagcttacactttcttcacagttgcaaatgcgagattcgccaaggaacttaccaacatactacaagaagctggacagaaagtgagtcccgaattggcttcaatgggtcgcagtaccgctcctcctcctccagggcttggaggattcagagaccgtgggagcagaagagggtggagctgatcactgattttgtatcttgttatggctttagggctcagtgattttctttctccatttatatctcttgtttactattttgttcctcaaacatttgacatttacagcaaaacattaaacatgtaagataacatttgatctgaatccaaattaattagagtaagataaaccg

SEQ ID NO: 79816 - protein, 501 aa, Arabidopsis thaliana
  peptide (1)..(501): Ceres Seq. ID no. 12653345
MSRYDSRTGDSTSYRDRRSDSGFGGTSSYGSSGSHTSSKKDNDGNESPRKLDLDGLTPFEKNFYVESPAVAAMTDTEVEEYRKLREITVEGKDIPKPVKSFRDVGFPDYVLEEVKKAGFTEPTPIQSQGWPMAMKGRDLIGIAETGSGKTLSYLLPAIVHVNAQPMLAHGDGPIVLVLAPTRELAVQIQQEASKFGSSSKIKTTCIYGGVPKGPQVRDLQKGVEIVIATPGRLIDMMESNNTNLRRVTYLVLDEADRMLDMGFDPQIRKIVSHIRPDRQTLYWSATWPKEVEQLSKKFLYNPYKVIIGSSDLKANRAIRQIVDVISESQKYNKLVKLLEDIMDGSRILVFLDTKKGCDQITRQLRMDGWPALSIHGDKSQAERDWVLSEFRSGKSPIMTATDVAARGLDVKDVKYVINYDFPGSLEDYVHRIGRTGRAGAKGTAYTFFTVANARFAKELTNILQEAGQKVSPELASMGRSTAPPPPGLGGFRDRGSRRGWS

SEQ ID NO: 79817 - protein, 429 aa, Arabidopsis thaliana
  peptide (1)..(429): Ceres Seq. ID no. 12653346
MTDTEVEEYRKLREITVEGKDIPKPVKSFRDVGFPDYVLEEVKKAGFTEPTPIQSQGWPMAMKGRDLIGIAETGSGKTLSYLLPAIVHVNAQPMLAHGDGPIVLVLAPTRELAVQIQQEASKFGSSSKIKTTCIYGGVPKGPQVRDLQKGVEIVIATPGRLIDMMESNNTNLRRVTYLVLDEADRMLDMGFDPQIRKIVSHIRPDRQTLYWSATWPKEVEQLSKKFLYNPYKVIIGSSDLKANRAIRQIVDVISESQKYNKLVKLLEDIMDGSRILVFLDTKKGCDQITRQLRMDGWPALSIHGDKSQAERDWVLSEFRSGKSPIMTATDVAARGLDVKDVKYVINYDFPGSLEDYVHRIGRTGRAGAKGTAYTFFTVANARFAKELTNILQEAGQKVSPELASMGRSTAPPPPGLGGFRDRGSRRGWS

SEQ ID NO: 79818 - protein, 370 aa, Arabidopsis thaliana
  peptide (1)..(370): Ceres Seq. ID no. 12653347
MAMKGRDLIGIAETGSGKTLSYLLPAIVHVNAQPMLAHGDGPIVLVLAPTRELAVQIQQEASKFGSSSKIKTTCIYGGVPKGPQVRDLQKGVEIVIATPGRLIDMMESNNTNLRRVTYLVLDEADRMLDMGFDPQIRKIVSHIRPDRQTLYWSATWPKEVEQLSKKFLYNPYKVIIGSSDLKANRAIRQIVDVISESQKYNKLVKLLEDIMDGSRILVFLDTKKGCDQITRQLRMDGWPALSIHGDKSQAERDWVLSEFRSGKSPIMTATDVAARGLDVKDVKYVINYDFPGSLEDYVHRIGRTGRAGAKGTAYTFFTVANARFAKELTNILQEAGQKVSPELASMGRSTAPPPPGLGGFRDRGSRRGWS

SEQ ID NO: 79819 - DNA, 2027 bp, Arabidopsis thaliana
  misc_feature (1)..(2027): Ceres Seq. ID no. 12653400
  misc_feature (1)..(2027): Ortholog of  Ceres SEQ ID NO 15170647 as cited in SEQ ID NO 67122
actaatcaaatttactcatttagccgtcacctctgaatcttcttctccgatcttcaaacattccggccgccaccgagttcttagccgttacaatgtcttcctctatgaacgtagcgacgatgcaagcactgactttctctcgccggcttctcccttctgttgcttctcgttatctctcttcttcttctgtgaccgttactggatactccggtagaagctcggcttacgcgccttctttccgttcgattaaatgcgtctctgtttctccggaagcttcaatagtaagtgatacaaagaagttggcagatgcttctaagagtacaaaccttataccaatttaccgctgtatattctctgatcagcttactcctgttcttgcttaccgttgtttggtcaaagaagatgaccgtgaagctcctagctttcttttcgagtccgttgagcctggttctcagatgtctagcgttggtcgttatagcgttgttggggctcagcctgcgatggagatcgtggcaaaggagaataaagttattgtaatggatcacaacaatgaaaccatgactgaggaattcgtcgaagatccaatggagatcccaagaaaaatctctgagaaatggaaccctgatcctcaactagttcaggaccttccagatgcgttttgtggtgggtgggttggttttttctcgtacgacactgttcgttatgttgagaagaggaaattgccattttcaaaggcccctgaggatgataggaacttgccagacatgcatcttggtctgtacgacgatgtagttgtatttgatcacgtggaaaagaaagcatatgtcattcactggattagactagatgggagccttccttacgaaaaggcatacagtaatggaatgcaacatttggagaacttggtggccaagttacatgatattgagccgccaaaactggctgcaggtaacgtgaatcttcagacacgacaatttgggccatctttggataattcaaacgtgacatgcgaagagtacaaggaggctgtggtcaaggccaaagaacatatacttgcaggagacatatttcagatcgtgctgagtcaacgttttgagcggcgaacatttgcagacccctttgaagtttatagagcactaagagttgtgaatccaagtccgtatatgggttatttgcaggctagaggatgcattttggtagcatcaagtccagaaattctcaccaaagtaaagcagaacaagatagtgaatcggccattggcaggaaccagcaagagagggaagaatgaagttgaggataagagattagaaaaggaactgctagagaatgaaaagcaatgtgctgagcacatcatgttggttgatctcggtcgcaacgatgttggaaaggttacgaaatacggatcagtgaaagtagagaagcttatgaacatcgaacgttattcccatgttatgcatataagctccacggtgacaggagaattacaagatggtttgacttgctgggacgtactacgtgcggctttaccagtgggaacagttagtggtgcaccaaaggtcaaagctatggaactaatcgatgagctagagccaacgaggcgtggaccatacagtggcggttttggtggagtctccttcactggtgacatggacattgctttatcccttaggacaatcgtttttccgacagcatgtcaatacaatacaatgtactcttacaaggatgctaacaaacggcgtgagtgggtggcttatcttcaagctggagctggtgtagtagctgatagtgacccgcaagacgaacactgtgagtgccagaacaaagccgctggtcttgctcgagccatcgacttggctgaatctgcatttgtgaaaaaatgattgtgcccaagaacagaggctggctttctttgaactccgagttcatgtgtataaaacagttacaagcagaacaaagttttttctttttcttgattttgtgagaattgcaattagactccattaatgaagctctgaaaaatgttacaa

SEQ ID NO: 79820 - protein, 595 aa, Arabidopsis thaliana
  peptide (1)..(595): Ceres Seq. ID no. 12653401
MSSSMNVATMQALTFSRRLLPSVASRYLSSSSVTVTGYSGRSSAYAPSFRSIKCVSVSPEASIVSDTKKLADASKSTNLIPIYRCIFSDQLTPVLAYRCLVKEDDREAPSFLFESVEPGSQMSSVGRYSVVGAQPAMEIVAKENKVIVMDHNNETMTEEFVEDPMEIPRKISEKWNPDPQLVQDLPDAFCGGWVGFFSYDTVRYVEKRKLPFSKAPEDDRNLPDMHLGLYDDVVVFDHVEKKAYVIHWIRLDGSLPYEKAYSNGMQHLENLVAKLHDIEPPKLAAGNVNLQTRQFGPSLDNSNVTCEEYKEAVVKAKEHILAGDIFQIVLSQRFERRTFADPFEVYRALRVVNPSPYMGYLQARGCILVASSPEILTKVKQNKIVNRPLAGTSKRGKNEVEDKRLEKELLENEKQCAEHIMLVDLGRNDVGKVTKYGSVKVEKLMNIERYSHVMHISSTVTGELQDGLTCWDVLRAALPVGTVSGAPKVKAMELIDELEPTRRGPYSGGFGGVSFTGDMDIALSLRTIVFPTACQYNTMYSYKDANKRREWVAYLQAGAGVVADSDPQDEHCECQNKAAGLARAIDLAESAFVKK

SEQ ID NO: 79821 - protein, 591 aa, Arabidopsis thaliana
  peptide (1)..(591): Ceres Seq. ID no. 12653402
MNVATMQALTFSRRLLPSVASRYLSSSSVTVTGYSGRSSAYAPSFRSIKCVSVSPEASIVSDTKKLADASKSTNLIPIYRCIFSDQLTPVLAYRCLVKEDDREAPSFLFESVEPGSQMSSVGRYSVVGAQPAMEIVAKENKVIVMDHNNETMTEEFVEDPMEIPRKISEKWNPDPQLVQDLPDAFCGGWVGFFSYDTVRYVEKRKLPFSKAPEDDRNLPDMHLGLYDDVVVFDHVEKKAYVIHWIRLDGSLPYEKAYSNGMQHLENLVAKLHDIEPPKLAAGNVNLQTRQFGPSLDNSNVTCEEYKEAVVKAKEHILAGDIFQIVLSQRFERRTFADPFEVYRALRVVNPSPYMGYLQARGCILVASSPEILTKVKQNKIVNRPLAGTSKRGKNEVEDKRLEKELLENEKQCAEHIMLVDLGRNDVGKVTKYGSVKVEKLMNIERYSHVMHISSTVTGELQDGLTCWDVLRAALPVGTVSGAPKVKAMELIDELEPTRRGPYSGGFGGVSFTGDMDIALSLRTIVFPTACQYNTMYSYKDANKRREWVAYLQAGAGVVADSDPQDEHCECQNKAAGLARAIDLAESAFVKK

SEQ ID NO: 79822 - protein, 586 aa, Arabidopsis thaliana
  peptide (1)..(586): Ceres Seq. ID no. 12653403
MQALTFSRRLLPSVASRYLSSSSVTVTGYSGRSSAYAPSFRSIKCVSVSPEASIVSDTKKLADASKSTNLIPIYRCIFSDQLTPVLAYRCLVKEDDREAPSFLFESVEPGSQMSSVGRYSVVGAQPAMEIVAKENKVIVMDHNNETMTEEFVEDPMEIPRKISEKWNPDPQLVQDLPDAFCGGWVGFFSYDTVRYVEKRKLPFSKAPEDDRNLPDMHLGLYDDVVVFDHVEKKAYVIHWIRLDGSLPYEKAYSNGMQHLENLVAKLHDIEPPKLAAGNVNLQTRQFGPSLDNSNVTCEEYKEAVVKAKEHILAGDIFQIVLSQRFERRTFADPFEVYRALRVVNPSPYMGYLQARGCILVASSPEILTKVKQNKIVNRPLAGTSKRGKNEVEDKRLEKELLENEKQCAEHIMLVDLGRNDVGKVTKYGSVKVEKLMNIERYSHVMHISSTVTGELQDGLTCWDVLRAALPVGTVSGAPKVKAMELIDELEPTRRGPYSGGFGGVSFTGDMDIALSLRTIVFPTACQYNTMYSYKDANKRREWVAYLQAGAGVVADSDPQDEHCECQNKAAGLARAIDLAESAFVKK

SEQ ID NO: 79823 - DNA, 834 bp, Arabidopsis thaliana
  misc_feature (1)..(834): Ceres Seq. ID no. 12653408
  misc_feature (1)..(834): Ortholog of  Ceres SEQ ID NO 13638441 as cited in SEQ ID NO 58066
atggagactctgcatccactactctcgcacgtgccaacttctgaccaccggtttgtagttcaagagatgatgtgcttgcaaagctcgagctggactaaagaagagaacaagaagtttgagcgagctcttgctgtctacgctgatgacacgcctgatcgctggttcaaagttgctgctatgatccctggaaagaccatatcagatgtcatgaggcaatactctaagcttgaagaagacctcttcgatatcgaagcaggacttgtcccgatcccgggttaccgttcagttactccttgtggatttgatcaggttgtgagtccacgtgactttgatgcgtatcgtaaacttcctaatggagccagaggatttgatcaagaccgtaggaaaggagttccatggacggaggaagaacacaggagattcttgttagggcttctcaagtatgggaaaggagattggagaaacatatcgaggaactttgtgggatcaaaaacaccaactcaggttgcaagtcatgcccaaaagtactaccaaagacagctttccggtgcgaaagacaaacgacggcctagcattcacgacatcaccaccgtcaatcttctcaatgccaatcttagccgtccatcgtctgatcacggttgcttagtctcaaaacaggccgagccgaaactagggttcaccgacagggataatgcagaggagggagttatgtttcttggtcagaatctatcctcggtcttctcttcctacgatcctgccattaagttttccggagcaaatgtttacggtgaaggaggttactgtatctcacaagatcttgaaacgagaaaatga

SEQ ID NO: 79824 - protein, 277 aa, Arabidopsis thaliana
  peptide (1)..(277): Ceres Seq. ID no. 12653409
METLHPLLSHVPTSDHRFVVQEMMCLQSSSWTKEENKKFERALAVYADDTPDRWFKVAAMIPGKTISDVMRQYSKLEEDLFDIEAGLVPIPGYRSVTPCGFDQVVSPRDFDAYRKLPNGARGFDQDRRKGVPWTEEEHRRFLLGLLKYGKGDWRNISRNFVGSKTPTQVASHAQKYYQRQLSGAKDKRRPSIHDITTVNLLNANLSRPSSDHGCLVSKQAEPKLGFTDRDNAEEGVMFLGQNLSSVFSSYDPAIKFSGANVYGEGGYCISQDLETRK

SEQ ID NO: 79825 - protein, 255 aa, Arabidopsis thaliana
  peptide (1)..(255): Ceres Seq. ID no. 12653410
MMCLQSSSWTKEENKKFERALAVYADDTPDRWFKVAAMIPGKTISDVMRQYSKLEEDLFDIEAGLVPIPGYRSVTPCGFDQVVSPRDFDAYRKLPNGARGFDQDRRKGVPWTEEEHRRFLLGLLKYGKGDWRNISRNFVGSKTPTQVASHAQKYYQRQLSGAKDKRRPSIHDITTVNLLNANLSRPSSDHGCLVSKQAEPKLGFTDRDNAEEGVMFLGQNLSSVFSSYDPAIKFSGANVYGEGGYCISQDLETRK

SEQ ID NO: 79826 - protein, 254 aa, Arabidopsis thaliana
  peptide (1)..(254): Ceres Seq. ID no. 12653411
MCLQSSSWTKEENKKFERALAVYADDTPDRWFKVAAMIPGKTISDVMRQYSKLEEDLFDIEAGLVPIPGYRSVTPCGFDQVVSPRDFDAYRKLPNGARGFDQDRRKGVPWTEEEHRRFLLGLLKYGKGDWRNISRNFVGSKTPTQVASHAQKYYQRQLSGAKDKRRPSIHDITTVNLLNANLSRPSSDHGCLVSKQAEPKLGFTDRDNAEEGVMFLGQNLSSVFSSYDPAIKFSGANVYGEGGYCISQDLETRK

SEQ ID NO: 79827 - DNA, 1224 bp, Arabidopsis thaliana
  misc_feature (1)..(1224): Ceres Seq. ID no. 12653412
  misc_feature (1)..(1224): Ortholog of  Ceres SEQ ID NO 13594402 as cited in SEQ ID NO 58196
atgtcttcttcttccttgatacttctcttctctactctctctctctttctcaatgtctcactcgcagacaatcacacggcggttgttataacaacctcagatactccaccgccacttcctccgccttctccaccgccacggcataacttcacttcctctctcatgcccggaatcgcagtcgttatcgccgtcctcactgcgtttttctctctcactttcttacttctcctctacgtcaaacactgtaaacgacgaaacggcagcgtttacgtaaaccacccgcagcgtttcgcaatcactagatacggaggaggatattacaacggtggaggagtagtaggaggaaggaaaaactccggtatagaccggtccgtgattgaatctttaccggttttccggtttggtgcattaagcggtcacaaggatggtttagagtgcgccgtgtgtctcgctcggttcgaaccgacggaagttctgaggttattgccgaaatgtaaacacgccttccacgtggaatgtgttgacacgtggcttgacgctcactccacttgcccgctttgccgttaccgggtcgacccggaagatatactcttgatcggtgattgtaactcctggttcgagctccagttctctaaagatgaatcaaacagtgttaataataatcctcccggtttaacccggtttattccggttagtcgaatttccggtcgtcattcctcggctggtgaacgagcgagtcgactcaacgagattagaacatcttcgtcgtataaatcgaatccgatgtcgtttcggagatcactcgatagctctctgaaagttaacgacgccggcgaggagaaatcggaatctgtcgccgttaattgcttggatcgtctacagagaaaagacggattgttgttgattccgaatcgggagagctttgaggggagatttgagcaccggataattatctccggcgggaatcgagacgatcagaggtggagcgaagtaaggccgtcggatcttttgtatttacgatcagagatgatactcagcgattgccggaaattagctgcggcggagggtggcagagatgtaattaacgggagaagtgtgtcggagttaacgggaattgagagacggaggagatggggaggagagccgagacaacgacaagccacggcggtgatttcgaggtggctcgcttggtcccaccgtgcctccgcttccagcattgtttaa

SEQ ID NO: 79828 - protein, 407 aa, Arabidopsis thaliana
  peptide (1)..(407): Ceres Seq. ID no. 12653413
MSSSSLILLFSTLSLFLNVSLADNHTAVVITTSDTPPPLPPPSPPPRHNFTSSLMPGIAVVIAVLTAFFSLTFLLLLYVKHCKRRNGSVYVNHPQRFAITRYGGGYYNGGGVVGGRKNSGIDRSVIESLPVFRFGALSGHKDGLECAVCLARFEPTEVLRLLPKCKHAFHVECVDTWLDAHSTCPLCRYRVDPEDILLIGDCNSWFELQFSKDESNSVNNNPPGLTRFIPVSRISGRHSSAGERASRLNEIRTSSSYKSNPMSFRRSLDSSLKVNDAGEEKSESVAVNCLDRLQRKDGLLLIPNRESFEGRFEHRIIISGGNRDDQRWSEVRPSDLLYLRSEMILSDCRKLAAAEGGRDVINGRSVSELTGIERRRRWGGEPRQRQATAVISRWLAWSHRASASSIV

SEQ ID NO: 79829 - protein, 353 aa, Arabidopsis thaliana
  peptide (1)..(353): Ceres Seq. ID no. 12653414
MPGIAVVIAVLTAFFSLTFLLLLYVKHCKRRNGSVYVNHPQRFAITRYGGGYYNGGGVVGGRKNSGIDRSVIESLPVFRFGALSGHKDGLECAVCLARFEPTEVLRLLPKCKHAFHVECVDTWLDAHSTCPLCRYRVDPEDILLIGDCNSWFELQFSKDESNSVNNNPPGLTRFIPVSRISGRHSSAGERASRLNEIRTSSSYKSNPMSFRRSLDSSLKVNDAGEEKSESVAVNCLDRLQRKDGLLLIPNRESFEGRFEHRIIISGGNRDDQRWSEVRPSDLLYLRSEMILSDCRKLAAAEGGRDVINGRSVSELTGIERRRRWGGEPRQRQATAVISRWLAWSHRASASSIV

SEQ ID NO: 79830 - DNA, 1521 bp, Arabidopsis thaliana
  misc_feature (1)..(1521): Ceres Seq. ID no. 12653418
  misc_feature (1)..(1521): Ortholog of  Ceres SEQ ID NO 14315279 as cited in SEQ ID NO 52534
  misc_feature (1)..(1521): Ortholog of  Ceres SEQ ID NO 12583190 as cited in SEQ ID NO 56386
atggcgacggagcttaaccctaagaacttccctgttctctcttatgtcttggatcgtctcccttcattcaccgccaaatcctcttcctcttccgatgtcgagccaccaccatccaaatccgatccttcttcatcatcaaaccactctatcgagatagtgactcagatgcctcacttggctcatcctgatgttcttgcctccatgactaacgcaaccgccgacgtttctcagacccgatctgttcttcgaaccctaggaccaagacccgatcacgaaaccgtcgacagagctcgtgctaggctccgtgagatcgacgcgtctttgtcggaatctttcgaagagatcgctctctctcctaacgatattgacgtggcggagaaggaacagaagaggagagaagctgtggagcaagagaagatttggtataaatcgatccttaagcttaacgagcttcatgaatcttatgagaagcttttgaaagaagcagaggagaggctcgtgaggatctatgagtctgccgagaagaatgctgccgcggtggcggaggaggaagctgcggaggttgaagtcaatgaagaggttgtgagtatactgcaacaagctgcggagaatccattggaccgagttgatttgtctggtcggaaattgaagttgcttcctgaagcatttggaaagattcaaggtctccttgttcttaatctctataacaatcagcttcaggctattcctgattcgatagctggtttgcataaccttctcgaactcgatgtttccactaatttcctggagacattaccagattcgatcggtttattgtcaaagttgaagattttgaatgtctcttgtaacaaactcacaactttaccagattccatctgccattgtggatcgttggttgtcttggatgcgagctacaacaatctcacctacttaccaacaaacatcggattcgagctagtgaaactagagaagctcttgatccatctcaacaaaatcagatcattaccaacttccattggtgaaatgagatccttacgctacctcgatgcacacttcaacgaactcaatggtctcccaaattctttcgggctgctcacgaacctcgagtaccttaacctgagcagtaacttcagcgatctccaagatctccctgcttcattcggagatctcataagcctccaagaactcgacttgagcaacaaccagatccattctcttccagacgcttttggcacgctcgtgaacttgaccaaactgaacttggaccaaaacccgcttgttgtcccgcctgatgaagtcgtgaaacaaggtgtggatgcggttaaaatgtatatgggtaagagatgggtcagcatgttggaagaggaagagaagatggcgaatatgaaggatgagatggatcagacaaacaccgattggctcacccgaaccacctcgaagctgaaaacgtatgttactgaggtctcggagtatcttggctcgaatccgcctagagatccttaccttgaccagcagctatga

SEQ ID NO: 79831 - protein, 506 aa, Arabidopsis thaliana
  peptide (1)..(506): Ceres Seq. ID no. 12653419
MATELNPKNFPVLSYVLDRLPSFTAKSSSSSDVEPPPSKSDPSSSSNHSIEIVTQMPHLAHPDVLASMTNATADVSQTRSVLRTLGPRPDHETVDRARARLREIDASLSESFEEIALSPNDIDVAEKEQKRREAVEQEKIWYKSILKLNELHESYEKLLKEAEERLVRIYESAEKNAAAVAEEEAAEVEVNEEVVSILQQAAENPLDRVDLSGRKLKLLPEAFGKIQGLLVLNLYNNQLQAIPDSIAGLHNLLELDVSTNFLETLPDSIGLLSKLKILNVSCNKLTTLPDSICHCGSLVVLDASYNNLTYLPTNIGFELVKLEKLLIHLNKIRSLPTSIGEMRSLRYLDAHFNELNGLPNSFGLLTNLEYLNLSSNFSDLQDLPASFGDLISLQELDLSNNQIHSLPDAFGTLVNLTKLNLDQNPLVVPPDEVVKQGVDAVKMYMGKRWVSMLEEEEKMANMKDEMDQTNTDWLTRTTSKLKTYVTEVSEYLGSNPPRDPYLDQQL

SEQ ID NO: 79832 - protein, 451 aa, Arabidopsis thaliana
  peptide (1)..(451): Ceres Seq. ID no. 12653420
MPHLAHPDVLASMTNATADVSQTRSVLRTLGPRPDHETVDRARARLREIDASLSESFEEIALSPNDIDVAEKEQKRREAVEQEKIWYKSILKLNELHESYEKLLKEAEERLVRIYESAEKNAAAVAEEEAAEVEVNEEVVSILQQAAENPLDRVDLSGRKLKLLPEAFGKIQGLLVLNLYNNQLQAIPDSIAGLHNLLELDVSTNFLETLPDSIGLLSKLKILNVSCNKLTTLPDSICHCGSLVVLDASYNNLTYLPTNIGFELVKLEKLLIHLNKIRSLPTSIGEMRSLRYLDAHFNELNGLPNSFGLLTNLEYLNLSSNFSDLQDLPASFGDLISLQELDLSNNQIHSLPDAFGTLVNLTKLNLDQNPLVVPPDEVVKQGVDAVKMYMGKRWVSMLEEEEKMANMKDEMDQTNTDWLTRTTSKLKTYVTEVSEYLGSNPPRDPYLDQQL

SEQ ID NO: 79833 - protein, 439 aa, Arabidopsis thaliana
  peptide (1)..(439): Ceres Seq. ID no. 12653421
MTNATADVSQTRSVLRTLGPRPDHETVDRARARLREIDASLSESFEEIALSPNDIDVAEKEQKRREAVEQEKIWYKSILKLNELHESYEKLLKEAEERLVRIYESAEKNAAAVAEEEAAEVEVNEEVVSILQQAAENPLDRVDLSGRKLKLLPEAFGKIQGLLVLNLYNNQLQAIPDSIAGLHNLLELDVSTNFLETLPDSIGLLSKLKILNVSCNKLTTLPDSICHCGSLVVLDASYNNLTYLPTNIGFELVKLEKLLIHLNKIRSLPTSIGEMRSLRYLDAHFNELNGLPNSFGLLTNLEYLNLSSNFSDLQDLPASFGDLISLQELDLSNNQIHSLPDAFGTLVNLTKLNLDQNPLVVPPDEVVKQGVDAVKMYMGKRWVSMLEEEEKMANMKDEMDQTNTDWLTRTTSKLKTYVTEVSEYLGSNPPRDPYLDQQL

SEQ ID NO: 79834 - DNA, 1415 bp, Arabidopsis thaliana
  misc_feature (1)..(1415): Ceres Seq. ID no. 12653422
  misc_feature (1)..(1415): Ortholog of  Ceres SEQ ID NO 13597574 as cited in SEQ ID NO 64677
  misc_feature (1)..(1415): Ortholog of  Ceres SEQ ID NO 13597843 as cited in SEQ ID NO 64850
  misc_feature (1)..(1415): Ortholog of  Ceres SEQ ID NO 13662880 as cited in SEQ ID NO 65422
  misc_feature (1)..(1415): Ortholog of  Ceres SEQ ID NO 14302071 as cited in SEQ ID NO 66585
  misc_feature (1)..(1415): Ortholog of  Ceres SEQ ID NO 14316013 as cited in SEQ ID NO 67181
  misc_feature (1)..(1415): Ortholog of  Ceres SEQ ID NO 12779098 as cited in SEQ ID NO 67698
  misc_feature (1)..(1415): Ortholog of  Ceres SEQ ID NO 13596180 as cited in SEQ ID NO 67941
  misc_feature (1)..(1415): Ortholog of  Ceres SEQ ID NO 13591190 as cited in SEQ ID NO 68044
  misc_feature (1)..(1415): Ortholog of  Ceres SEQ ID NO 13596089 as cited in SEQ ID NO 68373
agagcgtttcaattacaatggaggagaagagaaatggtctgcgtgtgattctcttccctcttccattacaaggttgcatcaaccctatgcttcagctcgccaacatccttcacgtaagaggcttctccattaccgtgatccacacgcgcttcaacgcgccaaaagcttcaagccatcctctcttcactttcttacagattcctgatggtttgtctgaaacggagattcaagatggtgttatgtctttgctcgcgcaaatcaaccttaacgctgagtctccgtttcgtgattgcttgcgtaaagtgttgctggaatcaaaagagtcagagagggttacttgtttgatcgatgactgtggatggctcttcacacaatctgtttcagagagtttgaagcttccgaggctcgttctctgtacttttaaagccactttcttcaatgcttatccgagtcttccacttatccgaaccaagggatatcttccagtttcagaatcggaagcagaggactctgttcctgagttcccgccgcttcaaaagagagatctttcaaaggttttcggggagttcggagagaaactcgatccgttcttacatgctgtagtcgaaacgacaataagatcttcagggttaatatacatgtcctgcgaagagcttgagaaagattcgttgactctttctaacgaaatttttaaagttccggtttttgcaattggtccgtttcacagctacttctctgcttcgtcaagcagcttgttcacacaagacgagacttgcattctgtggttagatgatcaagaagataaatctgtgatctacgttagtctaggaagcgttgtgaacataacggaaacagagttcttggagattgcgtgtggtttaagcaatagcaaacagcctttcttgtgggtagtacgacccggttcagtactcggcgcgaaatggatcgaaccgctctctgaagggctggttagtagccttgaagagaaaggaaagattgtgaaatgggcaccacaacaggaggttcttgcgcatcgtgccacaggagggtttttgacacacaatggttggaactcaacgctagagagtatatgcgaaggggttcctatgatctgcctaccaggaggttgggatcaaatgctgaattcaagatttgttagcgatatttggaagattggaattcacttggaaggtcggattgaaaaaaaggagattgagaaagctgtgagggtgttaatggaggaaagtgaaggaaataagattcgtgagagaatgaaagttctgaaagatgaggtcgagaaatcggtcaaacaaggaggctcatcttttcaatctattgagactctagctaatcatatactattgttgtaagttgggaatatttgctaaagatacctcaacgtttctataaattgc

SEQ ID NO: 79835 - protein, 455 aa, Arabidopsis thaliana
  peptide (1)..(455): Ceres Seq. ID no. 12653423
SVSITMEEKRNGLRVILFPLPLQGCINPMLQLANILHVRGFSITVIHTRFNAPKASSHPLFTFLQIPDGLSETEIQDGVMSLLAQINLNAESPFRDCLRKVLLESKESERVTCLIDDCGWLFTQSVSESLKLPRLVLCTFKATFFNAYPSLPLIRTKGYLPVSESEAEDSVPEFPPLQKRDLSKVFGEFGEKLDPFLHAVVETTIRSSGLIYMSCEELEKDSLTLSNEIFKVPVFAIGPFHSYFSASSSSLFTQDETCILWLDDQEDKSVIYVSLGSVVNITETEFLEIACGLSNSKQPFLWVVRPGSVLGAKWIEPLSEGLVSSLEEKGKIVKWAPQQEVLAHRATGGFLTHNGWNSTLESICEGVPMICLPGGWDQMLNSRFVSDIWKIGIHLEGRIEKKEIEKAVRVLMEESEGNKIRERMKVLKDEVEKSVKQGGSSFQSIETLANHILLL

SEQ ID NO: 79836 - protein, 450 aa, Arabidopsis thaliana
  peptide (1)..(450): Ceres Seq. ID no. 12653424
MEEKRNGLRVILFPLPLQGCINPMLQLANILHVRGFSITVIHTRFNAPKASSHPLFTFLQIPDGLSETEIQDGVMSLLAQINLNAESPFRDCLRKVLLESKESERVTCLIDDCGWLFTQSVSESLKLPRLVLCTFKATFFNAYPSLPLIRTKGYLPVSESEAEDSVPEFPPLQKRDLSKVFGEFGEKLDPFLHAVVETTIRSSGLIYMSCEELEKDSLTLSNEIFKVPVFAIGPFHSYFSASSSSLFTQDETCILWLDDQEDKSVIYVSLGSVVNITETEFLEIACGLSNSKQPFLWVVRPGSVLGAKWIEPLSEGLVSSLEEKGKIVKWAPQQEVLAHRATGGFLTHNGWNSTLESICEGVPMICLPGGWDQMLNSRFVSDIWKIGIHLEGRIEKKEIEKAVRVLMEESEGNKIRERMKVLKDEVEKSVKQGGSSFQSIETLANHILLL

SEQ ID NO: 79837 - protein, 427 aa, Arabidopsis thaliana
  peptide (1)..(427): Ceres Seq. ID no. 12653425
MLQLANILHVRGFSITVIHTRFNAPKASSHPLFTFLQIPDGLSETEIQDGVMSLLAQINLNAESPFRDCLRKVLLESKESERVTCLIDDCGWLFTQSVSESLKLPRLVLCTFKATFFNAYPSLPLIRTKGYLPVSESEAEDSVPEFPPLQKRDLSKVFGEFGEKLDPFLHAVVETTIRSSGLIYMSCEELEKDSLTLSNEIFKVPVFAIGPFHSYFSASSSSLFTQDETCILWLDDQEDKSVIYVSLGSVVNITETEFLEIACGLSNSKQPFLWVVRPGSVLGAKWIEPLSEGLVSSLEEKGKIVKWAPQQEVLAHRATGGFLTHNGWNSTLESICEGVPMICLPGGWDQMLNSRFVSDIWKIGIHLEGRIEKKEIEKAVRVLMEESEGNKIRERMKVLKDEVEKSVKQGGSSFQSIETLANHILLL

SEQ ID NO: 79838 - DNA, 1395 bp, Arabidopsis thaliana
  misc_feature (1)..(1395): Ceres Seq. ID no. 12653426
  misc_feature (1)..(1395): Ortholog of  Ceres SEQ ID NO 13597574 as cited in SEQ ID NO 64677
  misc_feature (1)..(1395): Ortholog of  Ceres SEQ ID NO 13662880 as cited in SEQ ID NO 65422
  misc_feature (1)..(1395): Ortholog of  Ceres SEQ ID NO 14302071 as cited in SEQ ID NO 66585
  misc_feature (1)..(1395): Ortholog of  Ceres SEQ ID NO 12779098 as cited in SEQ ID NO 67698
  misc_feature (1)..(1395): Ortholog of  Ceres SEQ ID NO 13596180 as cited in SEQ ID NO 67941
  misc_feature (1)..(1395): Ortholog of  Ceres SEQ ID NO 13591190 as cited in SEQ ID NO 68044
  misc_feature (1)..(1395): Ortholog of  Ceres SEQ ID NO 13596089 as cited in SEQ ID NO 68373
atggagaagagaaacgagagacaagtgattctttttcctctaccattacaaggttgcataaaccctatgcttcagctagcaaagatcctttactcaagaggtttttcgatcaccatcatccacacgcgcttcaacgcgcccaaatcttcagaccatcctctcttcactttcttacaaatccgcgacggcttgtctgaatctcagactcaatctcgtgatcttttgcttcaactcacgcttctcaacaacaattgtcagatcccatttcgagagtgtttggctaaactcattaaacctagttcagattcaggaacagaggataggaaaattagctgtgtgatcgatgattccggttgggttttcacacaatccgtggcggagagttttaatcttcctcgatttgtcctctgtgcttataagttctctttctttctcggacattttcttgttcctcagattcgtcgtgaagggtttcttccagtaccagattcggaggcagatgatctagttcctgagtttccaccgcttcgaaagaaagatctttcgagaattatgggaaccagcgctcagagtaagcctctagatgcttacttgcttaagatactcgacgcgacgaagccagcttcagggattatagttatgtcctgcaaagagcttgaccatgattcacttgctgagtccaacaaagttttcagcattccgatatttcccattggcccttttcacattcatgacgtcccagcctcgtctagcagcttgttagaaccggaccagagttgcattccatggttagatatgcgtgaaacgagatcagtagtctacgtgagcttagggagcattgcgagtcttaacgagtctgacttcttggagattgcttgtggactaagaaacaccaaccaatccttcttgtgggttgtccggcctggttcagtccatggcagagattggatcgaatcattaccttcagggttcatggaaagtctcgatggtaaaggaaagatagtgagatgggcaccgcagctagacgttcttgcgcatagagccacgggagggtttttgactcataatggatggaactcgacattagagagtatatgcgaaggagtacctatgatctgcttgccttgtaagtgggaccaatttgtaaacgcgagattcataagcgaagtttggagggttgggattcacttggaaggtcggatagagcgaagagaaatcgagagagctgttataagactaatggttgagtcgaaaggagaagagattcgaggtagaatcaaagtcttgcgagacgaagtaagaaggtcagttaaacaaggaggttcgtcatatcgatctttagatgagttggttgatcgtatatcaatcatcatcgagccactagtgcctacgtga

SEQ ID NO: 79839 - protein, 464 aa, Arabidopsis thaliana
  peptide (1)..(464): Ceres Seq. ID no. 12653427
MEKRNERQVILFPLPLQGCINPMLQLAKILYSRGFSITIIHTRFNAPKSSDHPLFTFLQIRDGLSESQTQSRDLLLQLTLLNNNCQIPFRECLAKLIKPSSDSGTEDRKISCVIDDSGWVFTQSVAESFNLPRFVLCAYKFSFFLGHFLVPQIRREGFLPVPDSEADDLVPEFPPLRKKDLSRIMGTSAQSKPLDAYLLKILDATKPASGIIVMSCKELDHDSLAESNKVFSIPIFPIGPFHIHDVPASSSSLLEPDQSCIPWLDMRETRSVVYVSLGSIASLNESDFLEIACGLRNTNQSFLWVVRPGSVHGRDWIESLPSGFMESLDGKGKIVRWAPQLDVLAHRATGGFLTHNGWNSTLESICEGVPMICLPCKWDQFVNARFISEVWRVGIHLEGRIERREIERAVIRLMVESKGEEIRGRIKVLRDEVRRSVKQGGSSYRSLDELVDRISIIIEPLVPT

SEQ ID NO: 79840 - protein, 442 aa, Arabidopsis thaliana
  peptide (1)..(442): Ceres Seq. ID no. 12653428
MLQLAKILYSRGFSITIIHTRFNAPKSSDHPLFTFLQIRDGLSESQTQSRDLLLQLTLLNNNCQIPFRECLAKLIKPSSDSGTEDRKISCVIDDSGWVFTQSVAESFNLPRFVLCAYKFSFFLGHFLVPQIRREGFLPVPDSEADDLVPEFPPLRKKDLSRIMGTSAQSKPLDAYLLKILDATKPASGIIVMSCKELDHDSLAESNKVFSIPIFPIGPFHIHDVPASSSSLLEPDQSCIPWLDMRETRSVVYVSLGSIASLNESDFLEIACGLRNTNQSFLWVVRPGSVHGRDWIESLPSGFMESLDGKGKIVRWAPQLDVLAHRATGGFLTHNGWNSTLESICEGVPMICLPCKWDQFVNARFISEVWRVGIHLEGRIERREIERAVIRLMVESKGEEIRGRIKVLRDEVRRSVKQGGSSYRSLDELVDRISIIIEPLVPT

SEQ ID NO: 79841 - protein, 280 aa, Arabidopsis thaliana
  peptide (1)..(280): Ceres Seq. ID no. 12653429
MGTSAQSKPLDAYLLKILDATKPASGIIVMSCKELDHDSLAESNKVFSIPIFPIGPFHIHDVPASSSSLLEPDQSCIPWLDMRETRSVVYVSLGSIASLNESDFLEIACGLRNTNQSFLWVVRPGSVHGRDWIESLPSGFMESLDGKGKIVRWAPQLDVLAHRATGGFLTHNGWNSTLESICEGVPMICLPCKWDQFVNARFISEVWRVGIHLEGRIERREIERAVIRLMVESKGEEIRGRIKVLRDEVRRSVKQGGSSYRSLDELVDRISIIIEPLVPT

SEQ ID NO: 79842 - DNA, 1368 bp, Arabidopsis thaliana
  misc_feature (1)..(1368): Ceres Seq. ID no. 12653430
  misc_feature (1)..(1368): Ortholog of  Ceres SEQ ID NO 14316013 as cited in SEQ ID NO 67181
  misc_feature (1)..(1368): Ortholog of  Ceres SEQ ID NO 12779098 as cited in SEQ ID NO 67698
  misc_feature (1)..(1368): Ortholog of  Ceres SEQ ID NO 13591190 as cited in SEQ ID NO 68044
atggagaagagtaatggccttcgagtgattctgtttccacttccattacaaggctgcatcaaccccatgattcagctcgccaagatcctccactcaagaggtttctccatcactgtgatccacacgtgcttcaacgcgccaaaagcttcaagccatcctctcttcaccttcttagagatcccagatggcttgtccgaaacagagaaaagaactaacaataccaaacttctcctaacgcttctcaaccggaactgtgagtctccgtttcgtgaatgtttgagtaaactgttgcagtctgcagattcagaaacaggggaagagaaacagaggattagctgtttgatcgctgattctggatggatgttcacacaacccattgctcagagtttgaaactcccaatattggtcctcagtgtgtttacagtctccttctttcgctgccaatttgttcttcctaagcttcggcgtgaagtgtatcttccacttcaagattcagaacaggaggatctagttcaagagtttccgccgcttcgaaagaaggatattgtacgtattcttgatgtagaaacagatatactagatccattcttggacaaagttctacaaatgacaaaggcgtcttcaggtcttatattcatgtcatgtgaagagttggaccacgactcagtgagtcaggcacgtgaagatttcaaaattcctatctttgggattggaccatctcacagccactttccagctacctctagtagcttgtccacacccgacgagacttgcattccatggttagacaaacaagaagacaaatccgtgatttacgtcagttacgggagcatcgtgaccatcagcgaatcagatttaatagagattgcttggggtctaagaaacagcgaccaacccttcttgttggtcgtacgggttggttcagtccgtggcagagaatggatcgagacaatcccggaagagatcatggaaaagcttaatgagaagggaaagatagtgaaatgggctccgcaacaagacgttctaaagcatcgagccattgggggattcctgacacataatggttggagctcgactgttgagagtgtttgtgaagcagtccctatgatctgtttgccttttcgttgggaccaaatgctaaatgcaagatttgttagcgatgtatggatggtcgggataaacctagaggatcgggttgaaaggaatgagatcgagggagcgataaggagattattggtggaacctgaaggagaagccatccgagagaggatagaacatcttaaggagaaagtaggacgatcgtttcaacaaaacggttccgcatatcaatcgttacaaaatttgattgattatatatcatctttttag

SEQ ID NO: 79843 - protein, 455 aa, Arabidopsis thaliana
  peptide (1)..(455): Ceres Seq. ID no. 12653431
MEKSNGLRVILFPLPLQGCINPMIQLAKILHSRGFSITVIHTCFNAPKASSHPLFTFLEIPDGLSETEKRTNNTKLLLTLLNRNCESPFRECLSKLLQSADSETGEEKQRISCLIADSGWMFTQPIAQSLKLPILVLSVFTVSFFRCQFVLPKLRREVYLPLQDSEQEDLVQEFPPLRKKDIVRILDVETDILDPFLDKVLQMTKASSGLIFMSCEELDHDSVSQAREDFKIPIFGIGPSHSHFPATSSSLSTPDETCIPWLDKQEDKSVIYVSYGSIVTISESDLIEIAWGLRNSDQPFLLVVRVGSVRGREWIETIPEEIMEKLNEKGKIVKWAPQQDVLKHRAIGGFLTHNGWSSTVESVCEAVPMICLPFRWDQMLNARFVSDVWMVGINLEDRVERNEIEGAIRRLLVEPEGEAIRERIEHLKEKVGRSFQQNGSAYQSLQNLIDYISSF

SEQ ID NO: 79844 - protein, 433 aa, Arabidopsis thaliana
  peptide (1)..(433): Ceres Seq. ID no. 12653432
MIQLAKILHSRGFSITVIHTCFNAPKASSHPLFTFLEIPDGLSETEKRTNNTKLLLTLLNRNCESPFRECLSKLLQSADSETGEEKQRISCLIADSGWMFTQPIAQSLKLPILVLSVFTVSFFRCQFVLPKLRREVYLPLQDSEQEDLVQEFPPLRKKDIVRILDVETDILDPFLDKVLQMTKASSGLIFMSCEELDHDSVSQAREDFKIPIFGIGPSHSHFPATSSSLSTPDETCIPWLDKQEDKSVIYVSYGSIVTISESDLIEIAWGLRNSDQPFLLVVRVGSVRGREWIETIPEEIMEKLNEKGKIVKWAPQQDVLKHRAIGGFLTHNGWSSTVESVCEAVPMICLPFRWDQMLNARFVSDVWMVGINLEDRVERNEIEGAIRRLLVEPEGEAIRERIEHLKEKVGRSFQQNGSAYQSLQNLIDYISSF

SEQ ID NO: 79845 - protein, 335 aa, Arabidopsis thaliana
  peptide (1)..(335): Ceres Seq. ID no. 12653433
MFTQPIAQSLKLPILVLSVFTVSFFRCQFVLPKLRREVYLPLQDSEQEDLVQEFPPLRKKDIVRILDVETDILDPFLDKVLQMTKASSGLIFMSCEELDHDSVSQAREDFKIPIFGIGPSHSHFPATSSSLSTPDETCIPWLDKQEDKSVIYVSYGSIVTISESDLIEIAWGLRNSDQPFLLVVRVGSVRGREWIETIPEEIMEKLNEKGKIVKWAPQQDVLKHRAIGGFLTHNGWSSTVESVCEAVPMICLPFRWDQMLNARFVSDVWMVGINLEDRVERNEIEGAIRRLLVEPEGEAIRERIEHLKEKVGRSFQQNGSAYQSLQNLIDYISSF

SEQ ID NO: 79846 - DNA, 1353 bp, Arabidopsis thaliana
  misc_feature (1)..(1353): Ceres Seq. ID no. 12653434
  misc_feature (1)..(1353): Ortholog of  Ceres SEQ ID NO 14302071 as cited in SEQ ID NO 66585
  misc_feature (1)..(1353): Ortholog of  Ceres SEQ ID NO 14316013 as cited in SEQ ID NO 67181
  misc_feature (1)..(1353): Ortholog of  Ceres SEQ ID NO 12779098 as cited in SEQ ID NO 67698
atggataagagtaatggcctacgagtgattctgtttccacttccattacaaggatgcatcaaccccatgattcagctagcgaagatcctccactcaagaggtttctccatcactgtgatccacacgcgcttcaatgcgccaaaagcttcaaaccaccctctgttcaccttcttacagatcccagatggcttgtctgaaacagagacaagaactcacgatatcacacttctcctaacgcttctcaaccgaagctgtgagtctccatttcgtgaatgtttgactaaacttttgcagtctgcagattcagaaacaggggaagagaaacagaggattagctgtttgatcgatgattctggatggatattcacacagcccgttgctcagagtttcaatctcccgagattggtccttaacacctacaaagtctccttctttcgggaccattttgttcttcctcaactccgtcgtgaaatgtatcttccattacaagattcagaacaaggtgatgatccagttgaggagtttccaccccttcgaaagaaagatcttttacaaattcttgatcaagaatcggagcaactagactcgtactccaatatgattttggaaacaacaaaagcgtcttcaggtcttatatttgtatccacatgtgaagagttggaccaagactcactgagtcaagcacgtgaagattatcaagtcccaatctttacgataggaccttctcatagctacttcccaggctcatctagtagcttgttcacagtggacgagacttgcattccatggttagacaagcaagaagacaaatccgtgatttacgtgagttttgggagcatctcgaccattggcgaagcagaattcatggagattgcttgggctctaagaaacagcgaccaaccgttcttgtgggtcgtacggggtggttcggtagtccatggtgcagaatggatcgaacagcttcatgagaaaggaaagatagtgaattgggccccacaacaagaggttctaaagcatcaagccattggaggattcttgacacacaatggttggaactcgacggttgagagtgtttttgaaggcgtccctatgatatgtatgccttttgtatgggaccaattgcttaatgcaagatttgttagtgatgtatggatggttgggctgcatctagagggtcggattgagaggaatgtgattgagggaatgataagaagattattttcggaaactgaaggaaaagcgatccgagagaggatggaaattcttaaggagaatgtaggaagatccgttaaaccaaaaggttcggcgtatcgatcgttacaacatttgattgattatataacatatttctag

SEQ ID NO: 79847 - protein, 450 aa, Arabidopsis thaliana
  peptide (1)..(450): Ceres Seq. ID no. 12653435
MDKSNGLRVILFPLPLQGCINPMIQLAKILHSRGFSITVIHTRFNAPKASNHPLFTFLQIPDGLSETETRTHDITLLLTLLNRSCESPFRECLTKLLQSADSETGEEKQRISCLIDDSGWIFTQPVAQSFNLPRLVLNTYKVSFFRDHFVLPQLRREMYLPLQDSEQGDDPVEEFPPLRKKDLLQILDQESEQLDSYSNMILETTKASSGLIFVSTCEELDQDSLSQAREDYQVPIFTIGPSHSYFPGSSSSLFTVDETCIPWLDKQEDKSVIYVSFGSISTIGEAEFMEIAWALRNSDQPFLWVVRGGSVVHGAEWIEQLHEKGKIVNWAPQQEVLKHQAIGGFLTHNGWNSTVESVFEGVPMICMPFVWDQLLNARFVSDVWMVGLHLEGRIERNVIEGMIRRLFSETEGKAIRERMEILKENVGRSVKPKGSAYRSLQHLIDYITYF

SEQ ID NO: 79848 - protein, 428 aa, Arabidopsis thaliana
  peptide (1)..(428): Ceres Seq. ID no. 12653436
MIQLAKILHSRGFSITVIHTRFNAPKASNHPLFTFLQIPDGLSETETRTHDITLLLTLLNRSCESPFRECLTKLLQSADSETGEEKQRISCLIDDSGWIFTQPVAQSFNLPRLVLNTYKVSFFRDHFVLPQLRREMYLPLQDSEQGDDPVEEFPPLRKKDLLQILDQESEQLDSYSNMILETTKASSGLIFVSTCEELDQDSLSQAREDYQVPIFTIGPSHSYFPGSSSSLFTVDETCIPWLDKQEDKSVIYVSFGSISTIGEAEFMEIAWALRNSDQPFLWVVRGGSVVHGAEWIEQLHEKGKIVNWAPQQEVLKHQAIGGFLTHNGWNSTVESVFEGVPMICMPFVWDQLLNARFVSDVWMVGLHLEGRIERNVIEGMIRRLFSETEGKAIRERMEILKENVGRSVKPKGSAYRSLQHLIDYITYF

SEQ ID NO: 79849 - protein, 293 aa, Arabidopsis thaliana
  peptide (1)..(293): Ceres Seq. ID no. 12653437
MYLPLQDSEQGDDPVEEFPPLRKKDLLQILDQESEQLDSYSNMILETTKASSGLIFVSTCEELDQDSLSQAREDYQVPIFTIGPSHSYFPGSSSSLFTVDETCIPWLDKQEDKSVIYVSFGSISTIGEAEFMEIAWALRNSDQPFLWVVRGGSVVHGAEWIEQLHEKGKIVNWAPQQEVLKHQAIGGFLTHNGWNSTVESVFEGVPMICMPFVWDQLLNARFVSDVWMVGLHLEGRIERNVIEGMIRRLFSETEGKAIRERMEILKENVGRSVKPKGSAYRSLQHLIDYITYF

SEQ ID NO: 79850 - DNA, 1503 bp, Arabidopsis thaliana
  misc_feature (1)..(1503): Ceres Seq. ID no. 12653452
  misc_feature (1)..(1503): Ortholog of  Ceres SEQ ID NO 15169264 as cited in SEQ ID NO 55026
  misc_feature (1)..(1503): Ortholog of  Ceres SEQ ID NO 15224709 as cited in SEQ ID NO 68627
atggagtcatcaactacaacatcgtattcagttgtgtcggagctagaaggaacactactgaaaaacccaaaacccttcgcctacttcatgctcgtagctttcgaggcttcaggactaatccgttttgcgaccttgctgtttctctggcctatcatagcactccttgacgttttgggctacagaaacggtagccttaagttaatgatcttcgtcgcaacggccggtttgcacgaatcagagattgaatcagtggctcgagcggttcttcccaaattcttcatggacgatatcagcatggacgcttggagggcgtttggttcgtgcgataagagagtcgttgtgacaagaatgccacgagttatggtggagagattcgctaaggatcatcttagcgccgatgaggtcatcggtacagagattgtcgtaaaccgtttcggttatgctaccggtttgattcaggaaaccaatgtggaccaatctgttttcaacagtgtggctaacttgtttgtggatcggagacctcaactaggtctaggacgacatattatctcggattctccaactttcctatctttatgtgaggagcaagttcatgcaccagttccatcgaactacaacggtcataaccagcggctacatgtgcagccgttaccagttatcttccacgatggacgacttgtgaagctaccaacaccagccaccgcactcatcatccttctttggatcccctttggaataattctagccatgattcggatattcgttgggttcttacttccattatgggccataccttacgtctcacggatattcaacactcgattcatcgtaaaaggaaagcctccggcacaagcaaccaccggaaacccaggcgtactattcgtatgcactcatagaactctaatggatccggtcgtattatcctatgtgctcggacgtagcattccagctgttacctactctatttctcgtttatccgagatcctatctccgattccaacctttaggttaactagaattcgagatgtagatgcggagatgatcaagaaagaactgtctaatggggacttagtggtatatcccgagggaaccacttgtcgcgagccgtttttgctgagatttagcgcgcttttcgcagaattaaccgacaatattgtgcccgtggcaatgaactacagagttggattctttcatgcgactaccgctagaggctggaaaggtttggacccgatcttctttttcatgaacccgagaccggtttatgaggtgacgttcttgaaccagctcgaggtggaggcgacgtgttcgtcagggaagagcccttatgacgtggctaactatgtacagagaatcttggcagctacgttaggctttgagtgtactaactttacgaggaaggataagtatagagttctcgcagggaacgacggaaccgtgtcgtatttgtcgtttctcgatcaagtcaagaaggtcgtcaccactttcaaaccttttttgcattaa

SEQ ID NO: 79851 - protein, 500 aa, Arabidopsis thaliana
  peptide (1)..(500): Ceres Seq. ID no. 12653453
MESSTTTSYSVVSELEGTLLKNPKPFAYFMLVAFEASGLIRFATLLFLWPIIALLDVLGYRNGSLKLMIFVATAGLHESEIESVARAVLPKFFMDDISMDAWRAFGSCDKRVVVTRMPRVMVERFAKDHLSADEVIGTEIVVNRFGYATGLIQETNVDQSVFNSVANLFVDRRPQLGLGRHIISDSPTFLSLCEEQVHAPVPSNYNGHNQRLHVQPLPVIFHDGRLVKLPTPATALIILLWIPFGIILAMIRIFVGFLLPLWAIPYVSRIFNTRFIVKGKPPAQATTGNPGVLFVCTHRTLMDPVVLSYVLGRSIPAVTYSISRLSEILSPIPTFRLTRIRDVDAEMIKKELSNGDLVVYPEGTTCREPFLLRFSALFAELTDNIVPVAMNYRVGFFHATTARGWKGLDPIFFFMNPRPVYEVTFLNQLEVEATCSSGKSPYDVANYVQRILAATLGFECTNFTRKDKYRVLAGNDGTVSYLSFLDQVKKVVTTFKPFLH

SEQ ID NO: 79852 - protein, 471 aa, Arabidopsis thaliana
  peptide (1)..(471): Ceres Seq. ID no. 12653454
MLVAFEASGLIRFATLLFLWPIIALLDVLGYRNGSLKLMIFVATAGLHESEIESVARAVLPKFFMDDISMDAWRAFGSCDKRVVVTRMPRVMVERFAKDHLSADEVIGTEIVVNRFGYATGLIQETNVDQSVFNSVANLFVDRRPQLGLGRHIISDSPTFLSLCEEQVHAPVPSNYNGHNQRLHVQPLPVIFHDGRLVKLPTPATALIILLWIPFGIILAMIRIFVGFLLPLWAIPYVSRIFNTRFIVKGKPPAQATTGNPGVLFVCTHRTLMDPVVLSYVLGRSIPAVTYSISRLSEILSPIPTFRLTRIRDVDAEMIKKELSNGDLVVYPEGTTCREPFLLRFSALFAELTDNIVPVAMNYRVGFFHATTARGWKGLDPIFFFMNPRPVYEVTFLNQLEVEATCSSGKSPYDVANYVQRILAATLGFECTNFTRKDKYRVLAGNDGTVSYLSFLDQVKKVVTTFKPFLH

SEQ ID NO: 79853 - protein, 433 aa, Arabidopsis thaliana
  peptide (1)..(433): Ceres Seq. ID no. 12653455
MIFVATAGLHESEIESVARAVLPKFFMDDISMDAWRAFGSCDKRVVVTRMPRVMVERFAKDHLSADEVIGTEIVVNRFGYATGLIQETNVDQSVFNSVANLFVDRRPQLGLGRHIISDSPTFLSLCEEQVHAPVPSNYNGHNQRLHVQPLPVIFHDGRLVKLPTPATALIILLWIPFGIILAMIRIFVGFLLPLWAIPYVSRIFNTRFIVKGKPPAQATTGNPGVLFVCTHRTLMDPVVLSYVLGRSIPAVTYSISRLSEILSPIPTFRLTRIRDVDAEMIKKELSNGDLVVYPEGTTCREPFLLRFSALFAELTDNIVPVAMNYRVGFFHATTARGWKGLDPIFFFMNPRPVYEVTFLNQLEVEATCSSGKSPYDVANYVQRILAATLGFECTNFTRKDKYRVLAGNDGTVSYLSFLDQVKKVVTTFKPFLH

SEQ ID NO: 79854 - DNA, 1532 bp, Arabidopsis thaliana
  misc_feature (1)..(1532): Ceres Seq. ID no. 12653467
  misc_feature (1)..(1532): Ortholog of  Ceres SEQ ID NO 13659033 as cited in SEQ ID NO 66372
  misc_feature (1)..(1532): Ortholog of  Ceres SEQ ID NO 13655724 as cited in SEQ ID NO 68973
  misc_feature (1)..(1532): Ortholog of  Ceres SEQ ID NO 12625899 as cited in SEQ ID NO 69079
  misc_feature (1)..(1532): Ortholog of  Ceres SEQ ID NO 15180366 as cited in SEQ ID NO 0
acatcttcaagatcaagaaacatctcttcgtcagcctctttttacttagcctcctcatattctcgaccgtggtcgtcgacgtcatgccctctcttcgtatcggattgttgtcatcgtcatcatcgcaaacagtaacaaaggagtgcgattactccaaaggaaaatgggttcgtcgagcatcatcatcatcatcatccgttaatggattgttttatggcgaagagtgtcgctttcttgactctggttttcgttgtcataagcatggaagaaaagattctggttatcttgattggcgatggcaaccacacggctgcgatcttccacgatttaacgcaagtgatttacttgagaggagtcggaacgggaggatagtgttcgtgggagattccatcggaagaaaccagtgggaatcccttatgtgcatgctctcacaagcaatacctaataaatctgagatctatgaagtaaatgggaaccctataactaaacacaagggctttctctccatgcgattccctcgggaaaacctcactgttgagtatcacagatcaccctttcttgtcgtgattggtcggccaccggataaatcaccgaaagagatcaaaaccacagtgagagttgatgagtttaactggcagtcgaaaagatgggtcgggtcagacgttctggtcttcaattcagggcattggtggaacgaagacaaaactgtgttaacgggatgctattttgaggagggaaggaaagtgaacaagacaatgggagtaatggaggcatttggaaagtctttgaagacatggaagtcatgggtcttggagaaacttgatcctgacaagagttatgtcttcttcagaagctactctccagtgcactacagaaatgggacatggaataccggtggtctatgtgatgcagagattgagcctgagactgataaaaggaagctggaacctgatgcgagtcacaatgaatatatctataaagtaattgaagaaatgagatatcgacatagtaaggttaagtttctgaacattacatatctgacagagtttaggaaagatggtcatatttctcggtatcgagagcaaggcacttctgttgatgttcctcaagactgtagccactggtgcctacccggtgtaccagatacatggaatgagatcctctatgcgcaactcttgtcaatgaactatagaacaaagtgattccttgaggttcaacctttcggctccgtaggtcgaaggtatctgaacaaaaaaggaaaaaagtgttctttatcaacttgattgaagaaatgtacagaagagaagaagcaagtaaaaaagaaagcattaccaagcctggcacatatctctgaattgcagcaagcatagccgcatgaccaactgctgtgacctgttagacataagtgcccattagattagttcatagactcagacatattgtaaatgttaaggtagatgtaatgatacagtgattggtattacgggattttgtacaaagagcaaccatcaatagatcagcataaaagttgt

SEQ ID NO: 79855 - protein, 399 aa, Arabidopsis thaliana
  peptide (1)..(399): Ceres Seq. ID no. 12653468
IFKIKKHLFVSLFLLSLLIFSTVVVDVMPSLRIGLLSSSSSQTVTKECDYSKGKWVRRASSSSSSVNGLFYGEECRFLDSGFRCHKHGRKDSGYLDWRWQPHGCDLPRFNASDLLERSRNGRIVFVGDSIGRNQWESLMCMLSQAIPNKSEIYEVNGNPITKHKGFLSMRFPRENLTVEYHRSPFLVVIGRPPDKSPKEIKTTVRVDEFNWQSKRWVGSDVLVFNSGHWWNEDKTVLTGCYFEEGRKVNKTMGVMEAFGKSLKTWKSWVLEKLDPDKSYVFFRSYSPVHYRNGTWNTGGLCDAEIEPETDKRKLEPDASHNEYIYKVIEEMRYRHSKVKFLNITYLTEFRKDGHISRYREQGTSVDVPQDCSHWCLPGVPDTWNEILYAQLLSMNYRTK

SEQ ID NO: 79856 - protein, 372 aa, Arabidopsis thaliana
  peptide (1)..(372): Ceres Seq. ID no. 12653469
MPSLRIGLLSSSSSQTVTKECDYSKGKWVRRASSSSSSVNGLFYGEECRFLDSGFRCHKHGRKDSGYLDWRWQPHGCDLPRFNASDLLERSRNGRIVFVGDSIGRNQWESLMCMLSQAIPNKSEIYEVNGNPITKHKGFLSMRFPRENLTVEYHRSPFLVVIGRPPDKSPKEIKTTVRVDEFNWQSKRWVGSDVLVFNSGHWWNEDKTVLTGCYFEEGRKVNKTMGVMEAFGKSLKTWKSWVLEKLDPDKSYVFFRSYSPVHYRNGTWNTGGLCDAEIEPETDKRKLEPDASHNEYIYKVIEEMRYRHSKVKFLNITYLTEFRKDGHISRYREQGTSVDVPQDCSHWCLPGVPDTWNEILYAQLLSMNYRTK

SEQ ID NO: 79857 - protein, 261 aa, Arabidopsis thaliana
  peptide (1)..(261): Ceres Seq. ID no. 12653470
MCMLSQAIPNKSEIYEVNGNPITKHKGFLSMRFPRENLTVEYHRSPFLVVIGRPPDKSPKEIKTTVRVDEFNWQSKRWVGSDVLVFNSGHWWNEDKTVLTGCYFEEGRKVNKTMGVMEAFGKSLKTWKSWVLEKLDPDKSYVFFRSYSPVHYRNGTWNTGGLCDAEIEPETDKRKLEPDASHNEYIYKVIEEMRYRHSKVKFLNITYLTEFRKDGHISRYREQGTSVDVPQDCSHWCLPGVPDTWNEILYAQLLSMNYRTK

SEQ ID NO: 79858 - DNA, 624 bp, Arabidopsis thaliana
  misc_feature (1)..(624): Ceres Seq. ID no. 12653478
  misc_feature (1)..(624): Ortholog of  Ceres SEQ ID NO 14303374 as cited in SEQ ID NO 54088
  misc_feature (1)..(624): Ortholog of  Ceres SEQ ID NO 13639250 as cited in SEQ ID NO 56555
  misc_feature (1)..(624): Ortholog of  Ceres SEQ ID NO 15177034 as cited in SEQ ID NO 60024
  misc_feature (1)..(624): Ortholog of  Ceres SEQ ID NO 13598257 as cited in SEQ ID NO 63008
  misc_feature (1)..(624): Ortholog of  Ceres SEQ ID NO 13597309 as cited in SEQ ID NO 63851
  misc_feature (1)..(624): Ortholog of  Ceres SEQ ID NO 12599167 as cited in SEQ ID NO 64443
atgacctcaaaagactgtggctctcacgacagccactcatcatgcaaccgtaaaatagtgatctggacgatatcaataatcctcctcttaatccttgtcgtaattctcctagtttgggcaatccttcaaccatcgaaaccacgcttcgtcctccaagacgccaccgtcttcaacttcaacgtctccggcaatccaccgaacctcctcacctcaaatttccaattcactctctcctctcgtaaccctaacgacaagatcggtatctactacgaccgtcttgacgtctacgcttcttaccggagccaacagatcactttgccgagtcccatgcttaccacttatcaaggacacaaagaagtcaacgtttggtctcctttcgtcggtggatactccgttcctgtggctccgtacaacgctttctatctcgatcaggaccattcaagtggcgcgatcatgttgatgcttcatctcgacggtcgagttcgttggaaagtcggatccttcatcaccggaaaatatcatctccacgttagatgtcatgcgcttatcaacttcgggagtagtgctgccggagttatcgtcggaaagtacatgctcaccgaaacttgtagtgttagtgtttga

SEQ ID NO: 79859 - protein, 207 aa, Arabidopsis thaliana
  peptide (1)..(207): Ceres Seq. ID no. 12653479
MTSKDCGSHDSHSSCNRKIVIWTISIILLLILVVILLVWAILQPSKPRFVLQDATVFNFNVSGNPPNLLTSNFQFTLSSRNPNDKIGIYYDRLDVYASYRSQQITLPSPMLTTYQGHKEVNVWSPFVGGYSVPVAPYNAFYLDQDHSSGAIMLMLHLDGRVRWKVGSFITGKYHLHVRCHALINFGSSAAGVIVGKYMLTETCSVSV

SEQ ID NO: 79860 - DNA, 720 bp, Arabidopsis thaliana
  misc_feature (1)..(720): Ceres Seq. ID no. 12653495
  misc_feature (1)..(720): Ortholog of  Ceres SEQ ID NO 13581701 as cited in SEQ ID NO 51151
  misc_feature (1)..(720): Ortholog of  Ceres SEQ ID NO 14315491 as cited in SEQ ID NO 57026
atgaagggaatgaaggaaagattggtgaagaaaatcaaactcatcaccactgtcaagacgttgaagcaaagcttaactcttcataagagtaccattgatcgcacaatccatcatctaagagacgaaatagtcgctgaatctggtcaaagcaaaggttgtgttacaccaacactactagagcttgaggatgcagaggaacataatcttgaagaagaaagagggattcttctggagtttaaagagaattgcccacccggaggagaagattcggttgtattctacacgacgggcctgcgaagtgtgaggaaaacatttgaagcttgcagaagagtgagattcttgttggagaatcaccaggtgatgtatagagagagagacgtttccatggattcagagtttagagaagagatgtggaggttgcttggtgggaaagttacctctccgaggctgttcattagaggtaggtacattggtggagcagaagaagttgtggcattgaacgagaacgggaagctgaagaagctactacaaggaatctcacaggttgattcaccttgcgagtcttgcgagaacgaaaggtttttgatatgttctagctgcaatggaagcacaagattgcttgcagagcatcacgatgaagagagtagtaatgataatatgtggacaagatgcagagaatgtaatgagaatggacttgtgaaatgtcctctttgtacgtag

SEQ ID NO: 79861 - protein, 239 aa, Arabidopsis thaliana
  peptide (1)..(239): Ceres Seq. ID no. 12653496
MKGMKERLVKKIKLITTVKTLKQSLTLHKSTIDRTIHHLRDEIVAESGQSKGCVTPTLLELEDAEEHNLEEERGILLEFKENCPPGGEDSVVFYTTGLRSVRKTFEACRRVRFLLENHQVMYRERDVSMDSEFREEMWRLLGGKVTSPRLFIRGRYIGGAEEVVALNENGKLKKLLQGISQVDSPCESCENERFLICSSCNGSTRLLAEHHDEESSNDNMWTRCRECNENGLVKCPLCT

SEQ ID NO: 79862 - protein, 236 aa, Arabidopsis thaliana
  peptide (1)..(236): Ceres Seq. ID no. 12653497
MKERLVKKIKLITTVKTLKQSLTLHKSTIDRTIHHLRDEIVAESGQSKGCVTPTLLELEDAEEHNLEEERGILLEFKENCPPGGEDSVVFYTTGLRSVRKTFEACRRVRFLLENHQVMYRERDVSMDSEFREEMWRLLGGKVTSPRLFIRGRYIGGAEEVVALNENGKLKKLLQGISQVDSPCESCENERFLICSSCNGSTRLLAEHHDEESSNDNMWTRCRECNENGLVKCPLCT

SEQ ID NO: 79863 - protein, 119 aa, Arabidopsis thaliana
  peptide (1)..(119): Ceres Seq. ID no. 12653498
MYRERDVSMDSEFREEMWRLLGGKVTSPRLFIRGRYIGGAEEVVALNENGKLKKLLQGISQVDSPCESCENERFLICSSCNGSTRLLAEHHDEESSNDNMWTRCRECNENGLVKCPLCT

SEQ ID NO: 79864 - DNA, 1305 bp, Arabidopsis thaliana
  misc_feature (1)..(1305): Ceres Seq. ID no. 12653522
  misc_feature (1)..(1305): Ortholog of  Ceres SEQ ID NO 13638292 as cited in SEQ ID NO 57738
atgggattaatgaattgcatggtttatgttgtggtcctaagtgctattgcggctacagtgacatcatacccttactcatctcctcataccccagcttacgattctcccagctatgaacacaaaggcccaaagtacgcaccacatccgaaaccatatgtttacagttctccaccaccaccatactatactccatcaccaaaggtaaactataaatctccaccaccaccatacgtctataattctccacctccaccgtactactctccttctccaaaggtttactacaagtccccacctccaccatacgtttacagctccccaccaccaccgtactactctccttctcctaaggtatactacaagtccccaccaccaccgtacgtctacagttccccaccaccactgtactactctccttcaccaaaggtttactacaagtccccaccaccaccatacgtctacagttccccaccaccaccgtactactctccttctccaaaggtttactacaagtccccacctccaccatacgtctacagctccccacccccaccgtactactctccatctccaaaggtatactacaagtccccaccaccaccgtacgtctacagttctccaccaccaccgtactactctccttctccaaaggtttactacaagtccccacctccaccatacgtctacagctccccacccccaccgtactactctccatctccaaaggtatactacaagtccccaccaccaccgtacgtctacagttctccaccaccaccgtactactctccttctccaaaggtttactataagtctccacctccaccatacgtctacagctccccaccaccaccgtactactctccttctcctaaggtatactacaagtccccaccaccaccgtacgtctacagttccccaccaccaccgtactactctccttctccaaaggtttactacaagtccccaccaccaccgtacgtctacagctccccacccccaccgtactactcaccatctccaaatgtatactacaagtccccaccaccaccgtacgtctacagttccccaccaccaccatactactctccttctcctaaagttcactacaagtccccacctccaccatacgtctacagctccccaccaccaccctattactctccttctcctaaggttcactacaagtctccaccaccaccatacgtctacagctccccacctcctccatactactctccttctcctaaagtcacttacaagtctccaccaccaccatatgtctacaagacgccttattattga

SEQ ID NO: 79865 - protein, 434 aa, Arabidopsis thaliana
  peptide (1)..(434): Ceres Seq. ID no. 12653523
MGLMNCMVYVVVLSAIAATVTSYPYSSPHTPAYDSPSYEHKGPKYAPHPKPYVYSSPPPPYYTPSPKVNYKSPPPPYVYNSPPPPYYSPSPKVYYKSPPPPYVYSSPPPPYYSPSPKVYYKSPPPPYVYSSPPPLYYSPSPKVYYKSPPPPYVYSSPPPPYYSPSPKVYYKSPPPPYVYSSPPPPYYSPSPKVYYKSPPPPYVYSSPPPPYYSPSPKVYYKSPPPPYVYSSPPPPYYSPSPKVYYKSPPPPYVYSSPPPPYYSPSPKVYYKSPPPPYVYSSPPPPYYSPSPKVYYKSPPPPYVYSSPPPPYYSPSPKVYYKSPPPPYVYSSPPPPYYSPSPNVYYKSPPPPYVYSSPPPPYYSPSPKVHYKSPPPPYVYSSPPPPYYSPSPKVHYKSPPPPYVYSSPPPPYYSPSPKVTYKSPPPPYVYKTPYY

SEQ ID NO: 79866 - protein, 431 aa, Arabidopsis thaliana
  peptide (1)..(431): Ceres Seq. ID no. 12653524
MNCMVYVVVLSAIAATVTSYPYSSPHTPAYDSPSYEHKGPKYAPHPKPYVYSSPPPPYYTPSPKVNYKSPPPPYVYNSPPPPYYSPSPKVYYKSPPPPYVYSSPPPPYYSPSPKVYYKSPPPPYVYSSPPPLYYSPSPKVYYKSPPPPYVYSSPPPPYYSPSPKVYYKSPPPPYVYSSPPPPYYSPSPKVYYKSPPPPYVYSSPPPPYYSPSPKVYYKSPPPPYVYSSPPPPYYSPSPKVYYKSPPPPYVYSSPPPPYYSPSPKVYYKSPPPPYVYSSPPPPYYSPSPKVYYKSPPPPYVYSSPPPPYYSPSPKVYYKSPPPPYVYSSPPPPYYSPSPNVYYKSPPPPYVYSSPPPPYYSPSPKVHYKSPPPPYVYSSPPPPYYSPSPKVHYKSPPPPYVYSSPPPPYYSPSPKVTYKSPPPPYVYKTPYY

SEQ ID NO: 79867 - protein, 428 aa, Arabidopsis thaliana
  peptide (1)..(428): Ceres Seq. ID no. 12653525
MVYVVVLSAIAATVTSYPYSSPHTPAYDSPSYEHKGPKYAPHPKPYVYSSPPPPYYTPSPKVNYKSPPPPYVYNSPPPPYYSPSPKVYYKSPPPPYVYSSPPPPYYSPSPKVYYKSPPPPYVYSSPPPLYYSPSPKVYYKSPPPPYVYSSPPPPYYSPSPKVYYKSPPPPYVYSSPPPPYYSPSPKVYYKSPPPPYVYSSPPPPYYSPSPKVYYKSPPPPYVYSSPPPPYYSPSPKVYYKSPPPPYVYSSPPPPYYSPSPKVYYKSPPPPYVYSSPPPPYYSPSPKVYYKSPPPPYVYSSPPPPYYSPSPKVYYKSPPPPYVYSSPPPPYYSPSPNVYYKSPPPPYVYSSPPPPYYSPSPKVHYKSPPPPYVYSSPPPPYYSPSPKVHYKSPPPPYVYSSPPPPYYSPSPKVTYKSPPPPYVYKTPYY

SEQ ID NO: 79868 - DNA, 2979 bp, Arabidopsis thaliana
  misc_feature (1)..(2979): Ceres Seq. ID no. 12653529
  misc_feature (1)..(2979): Ortholog of  Ceres SEQ ID NO 13600310 as cited in SEQ ID NO 5086
atgggatctaaacaagtatcaaagactagaaatggtggatttagcaagttaaagactgttgagtcctctgcatcttcaacaacctcgtcttcaaaactttatcaagaggcgtctgtagatagccatagctcccctacttcttcatcggttcgaagcaagcctcagttaccacctaagcctttgcagtccaaagaaaatgtcactgtcactgtgcgttttcgtccactcagtccaagggaaatccggaaaggagaggagattgcatggtatgcagatggggaaacgatagtgcggaatgagaataatcaatcaatagcttatgcctatgatcgtgttttcgggcctactacgactacacgcaatgtctatgatgttgctgctcagcatgtcgttaatggtgctatggcgggggtcaatgtgactttgagtgttaattcaaccacagggaccattttcgcatatggagtgacaagcagtgggaaaactcatacaatgcatgggaaccaaagatctcctggtataataccattagccgtgaaagatgctttcagcattatacaagagacaccaaggcgagaatttctcctacgtgtttcctactttgaaatttataacgaggttgtcaatgatttgttgaatccagcaggacaaaatttgaggatcagagaagatgagcagggaacctatattgaagggattaaagaagaggttgttctgtcccctgctcatgtgctttctctcatagcagctggagaagagcaccgacatattggatccacaagttttaatttgctcagcagccgaagccatacaatgtttaccctgactatagagagtagtcccttgggtgacaataatgaaggtggagcagtacacctctcgcagctgaacctcattgacctggcaggttctgagagctcaaaagctgaaaccagcggtttaaggcgcaaggaagggtcttatataaataaaagtttgctaactttagggaccgtaatatcaaagcttacagatagaagggctagtcatgtaccatatagggactctaaattaaccagactgcttgagtcctcactgagtggtcatggacgtgtatctctcatatgtacagtgacacctgcatcaagcaactctgaagaaacacacaacacattgaagtttgctcatcgtgcaaagcatattgagattcaagccgcacagaacaagataattgatgagaaatcattgatcaagaagtaccaatacgagattcgccaactcaaggaggagctggaacagcttaaacaaggaattaaaccagtttctcagctaaaggatatcagtggagatgatatcgacattgttctcctgaagcagaaactagaagaagaggaagatgctaaagcagctctcttgagtcgaatccaaaggctgacaaaactaattctcgtgtctaataaaactccacaaacatcgcggttttcttatcgtgctgatcctcggaggagacactcattcggagaagaggagttgataatgcatggccagcttgcttacctaccgcataagaggcgcgacttgacagatgatgagaaccttgaattgtatgtttctcgtgaagggactcctgagattatagatgatgcgtttatagaagaaaagaagacaaggaagcatggcctactgaactggttgaaaattaagaaaaaagacagcagtttggggggatcaagcctcagtgacaagtcgagtgcagtcaagtccaacagtacaccgtcaactcctcaaggagaaggcagtgattttcatacagaatctagactttcagaaggctccgcattggcagatcaaattatagagactatggagaatagagaagctcatgaagacagttttcatgagattgagacacctgagactagaataaaaatgatcgaccagatggaaatactgagggaacagcaaaagactttatcagaggagatggcacaacaatcaaggtcttttaaactgttgtcagaagaggctgccaaagcccctcaaaatgaagaaattaaagcagagattataaacctcaatggcgacatcaaggcaaagaacgaccagattgctacgttggggaaacaaatactggattttgttatagcatcacatgatgaattggataaatctgatatcgtgcaggctgtttctgaaatgagggctcaactaaatgagaaatgttttgaactcgaggttaaagctgcagataatcgtatcattcaggaacaactcaccgaaaagacaagtttctgtgaagatttgcaagaagaggttgcaaacctaaagcagcagctctctgacgccctggaactgggagatatcaactcggtcacatgtcacatgcaacaatcttctcaatcgccaaacaaaaatgaagaaaaagtcatagaagcacaggcatttgagattgaagagcttaaactgaaagctgcagaactaagtgaactgaatgaacaactagaaatccgaaacaagaaactagctgaagagagttcatatgcgaaagagcttgcttcagcggctgctattgagctcaaggcattgtctgaggaaatagcaagacttatgaatcacaacgagagactagcagctgatctggcagcagtgcagaagagctctgttacaacaccacagggaaagacaggaaacctgaggaatggaagaagggagagtgtttcaaagaggaaagagcaagaaaactcgttgatggaactgaagagagaactgactgtgagcaaggaacgtgaagtttcattcgaagctgctctcattgaaaaaattcagagggaagccgagctacaaagaacagtagaagagtcgaaacaaagggaagcgtatctagagaatgaacttgctaatatgtggggtcttgttgccaagttgagatcccaaggagctgctaattcaggtttgtctgattcagtatcagagacaagaatcgagcattttgggacttaa

SEQ ID NO: 79869 - protein, 992 aa, Arabidopsis thaliana
  peptide (1)..(992): Ceres Seq. ID no. 12653530
MGSKQVSKTRNGGFSKLKTVESSASSTTSSSKLYQEASVDSHSSPTSSSVRSKPQLPPKPLQSKENVTVTVRFRPLSPREIRKGEEIAWYADGETIVRNENNQSIAYAYDRVFGPTTTTRNVYDVAAQHVVNGAMAGVNVTLSVNSTTGTIFAYGVTSSGKTHTMHGNQRSPGIIPLAVKDAFSIIQETPRREFLLRVSYFEIYNEVVNDLLNPAGQNLRIREDEQGTYIEGIKEEVVLSPAHVLSLIAAGEEHRHIGSTSFNLLSSRSHTMFTLTIESSPLGDNNEGGAVHLSQLNLIDLAGSESSKAETSGLRRKEGSYINKSLLTLGTVISKLTDRRASHVPYRDSKLTRLLESSLSGHGRVSLICTVTPASSNSEETHNTLKFAHRAKHIEIQAAQNKIIDEKSLIKKYQYEIRQLKEELEQLKQGIKPVSQLKDISGDDIDIVLLKQKLEEEEDAKAALLSRIQRLTKLILVSNKTPQTSRFSYRADPRRRHSFGEEELIMHGQLAYLPHKRRDLTDDENLELYVSREGTPEIIDDAFIEEKKTRKHGLLNWLKIKKKDSSLGGSSLSDKSSAVKSNSTPSTPQGEGSDFHTESRLSEGSALADQIIETMENREAHEDSFHEIETPETRIKMIDQMEILREQQKTLSEEMAQQSRSFKLLSEEAAKAPQNEEIKAEIINLNGDIKAKNDQIATLGKQILDFVIASHDELDKSDIVQAVSEMRAQLNEKCFELEVKAADNRIIQEQLTEKTSFCEDLQEEVANLKQQLSDALELGDINSVTCHMQQSSQSPNKNEEKVIEAQAFEIEELKLKAAELSELNEQLEIRNKKLAEESSYAKELASAAAIELKALSEEIARLMNHNERLAADLAAVQKSSVTTPQGKTGNLRNGRRESVSKRKEQENSLMELKRELTVSKEREVSFEAALIEKIQREAELQRTVEESKQREAYLENELANMWGLVAKLRSQGAANSGLSDSVSETRIEHFGT

SEQ ID NO: 79870 - protein, 858 aa, Arabidopsis thaliana
  peptide (1)..(858): Ceres Seq. ID no. 12653531
MAGVNVTLSVNSTTGTIFAYGVTSSGKTHTMHGNQRSPGIIPLAVKDAFSIIQETPRREFLLRVSYFEIYNEVVNDLLNPAGQNLRIREDEQGTYIEGIKEEVVLSPAHVLSLIAAGEEHRHIGSTSFNLLSSRSHTMFTLTIESSPLGDNNEGGAVHLSQLNLIDLAGSESSKAETSGLRRKEGSYINKSLLTLGTVISKLTDRRASHVPYRDSKLTRLLESSLSGHGRVSLICTVTPASSNSEETHNTLKFAHRAKHIEIQAAQNKIIDEKSLIKKYQYEIRQLKEELEQLKQGIKPVSQLKDISGDDIDIVLLKQKLEEEEDAKAALLSRIQRLTKLILVSNKTPQTSRFSYRADPRRRHSFGEEELIMHGQLAYLPHKRRDLTDDENLELYVSREGTPEIIDDAFIEEKKTRKHGLLNWLKIKKKDSSLGGSSLSDKSSAVKSNSTPSTPQGEGSDFHTESRLSEGSALADQIIETMENREAHEDSFHEIETPETRIKMIDQMEILREQQKTLSEEMAQQSRSFKLLSEEAAKAPQNEEIKAEIINLNGDIKAKNDQIATLGKQILDFVIASHDELDKSDIVQAVSEMRAQLNEKCFELEVKAADNRIIQEQLTEKTSFCEDLQEEVANLKQQLSDALELGDINSVTCHMQQSSQSPNKNEEKVIEAQAFEIEELKLKAAELSELNEQLEIRNKKLAEESSYAKELASAAAIELKALSEEIARLMNHNERLAADLAAVQKSSVTTPQGKTGNLRNGRRESVSKRKEQENSLMELKRELTVSKEREVSFEAALIEKIQREAELQRTVEESKQREAYLENELANMWGLVAKLRSQGAANSGLSDSVSETRIEHFGT

SEQ ID NO: 79871 - protein, 828 aa, Arabidopsis thaliana
  peptide (1)..(828): Ceres Seq. ID no. 12653532
MHGNQRSPGIIPLAVKDAFSIIQETPRREFLLRVSYFEIYNEVVNDLLNPAGQNLRIREDEQGTYIEGIKEEVVLSPAHVLSLIAAGEEHRHIGSTSFNLLSSRSHTMFTLTIESSPLGDNNEGGAVHLSQLNLIDLAGSESSKAETSGLRRKEGSYINKSLLTLGTVISKLTDRRASHVPYRDSKLTRLLESSLSGHGRVSLICTVTPASSNSEETHNTLKFAHRAKHIEIQAAQNKIIDEKSLIKKYQYEIRQLKEELEQLKQGIKPVSQLKDISGDDIDIVLLKQKLEEEEDAKAALLSRIQRLTKLILVSNKTPQTSRFSYRADPRRRHSFGEEELIMHGQLAYLPHKRRDLTDDENLELYVSREGTPEIIDDAFIEEKKTRKHGLLNWLKIKKKDSSLGGSSLSDKSSAVKSNSTPSTPQGEGSDFHTESRLSEGSALADQIIETMENREAHEDSFHEIETPETRIKMIDQMEILREQQKTLSEEMAQQSRSFKLLSEEAAKAPQNEEIKAEIINLNGDIKAKNDQIATLGKQILDFVIASHDELDKSDIVQAVSEMRAQLNEKCFELEVKAADNRIIQEQLTEKTSFCEDLQEEVANLKQQLSDALELGDINSVTCHMQQSSQSPNKNEEKVIEAQAFEIEELKLKAAELSELNEQLEIRNKKLAEESSYAKELASAAAIELKALSEEIARLMNHNERLAADLAAVQKSSVTTPQGKTGNLRNGRRESVSKRKEQENSLMELKRELTVSKEREVSFEAALIEKIQREAELQRTVEESKQREAYLENELANMWGLVAKLRSQGAANSGLSDSVSETRIEHFGT

SEQ ID NO: 79872 - DNA, 1125 bp, Arabidopsis thaliana
  misc_feature (1)..(1125): Ceres Seq. ID no. 12653545
  misc_feature (1)..(1125): Ortholog of  Ceres SEQ ID NO 13599003 as cited in SEQ ID NO 0
atggataacatcaactttgaattctcaaacgcttcacaaggaagccggctacagttgcagcaacaaccgccccagccgtttaatttacaagacttgaatatgattcaatacaatcaaccatcatctccttggactacggagaccttctctggtctaactccgtacgattgcacagccaatcaatcttttcccgtacaatgttcatcttcaaaaccctacccttcctcgtttcatccgtaccatcatcaatcttctgattctccatcattagaccaatctgtatcgatgattcctatgcagcctcttccggatcaatatatgaagccattatatcaaagatcttgctcgaacgattttgccgcaacaaatgcttcatcagcctcttactcgctttcttttgaagcaagtcatgatccacaagaactatgcagaaggacctatagtaattctaatgtaacacatcttaatttcacatcatcacaacatcaacctaaacagagtcatccaagattttcttctcctccttcattctcaatccatggagggtctatggctcctaactgtgtgaacaagacacggataagatggactcaagatcttcatgagaagtttgtggagtgcgttaatcgtcttggtggcgctgataaggcgacgcccaaggcgatattgaagcggatggattctgatggactcacaatatttcacgttaaaagccacttacagaagtatagaattgcgaaatacatgcctgagtctcaagaaggcaagtttgagaaaagagcttgtgcaaaagagctgtctcagcttgacacaagaactggagtgcaaattaaagaggcacttcagcttcaactagatgttcagaggcatcttcatgaacaactagagattcaacgaaacctacaactaagaatcgaagaacaagggaaacaactgaaaatgatgatggaacaacaacaaaaaaacaaagagagtcttctgaagaagctaccagacgctgaagcatcattgtctcttctcgatccccatattcactctcctccttcgcctttcttggtacacgacgctgaagccctgatgctaacaagttatgaagacactcaactccagtccaccaaaagttga

SEQ ID NO: 79873 - protein, 374 aa, Arabidopsis thaliana
  peptide (1)..(374): Ceres Seq. ID no. 12653546
MDNINFEFSNASQGSRLQLQQQPPQPFNLQDLNMIQYNQPSSPWTTETFSGLTPYDCTANQSFPVQCSSSKPYPSSFHPYHHQSSDSPSLDQSVSMIPMQPLPDQYMKPLYQRSCSNDFAATNASSASYSLSFEASHDPQELCRRTYSNSNVTHLNFTSSQHQPKQSHPRFSSPPSFSIHGGSMAPNCVNKTRIRWTQDLHEKFVECVNRLGGADKATPKAILKRMDSDGLTIFHVKSHLQKYRIAKYMPESQEGKFEKRACAKELSQLDTRTGVQIKEALQLQLDVQRHLHEQLEIQRNLQLRIEEQGKQLKMMMEQQQKNKESLLKKLPDAEASLSLLDPHIHSPPSPFLVHDAEALMLTSYEDTQLQSTKS

SEQ ID NO: 79874 - protein, 341 aa, Arabidopsis thaliana
  peptide (1)..(341): Ceres Seq. ID no. 12653547
MIQYNQPSSPWTTETFSGLTPYDCTANQSFPVQCSSSKPYPSSFHPYHHQSSDSPSLDQSVSMIPMQPLPDQYMKPLYQRSCSNDFAATNASSASYSLSFEASHDPQELCRRTYSNSNVTHLNFTSSQHQPKQSHPRFSSPPSFSIHGGSMAPNCVNKTRIRWTQDLHEKFVECVNRLGGADKATPKAILKRMDSDGLTIFHVKSHLQKYRIAKYMPESQEGKFEKRACAKELSQLDTRTGVQIKEALQLQLDVQRHLHEQLEIQRNLQLRIEEQGKQLKMMMEQQQKNKESLLKKLPDAEASLSLLDPHIHSPPSPFLVHDAEALMLTSYEDTQLQSTKS

SEQ ID NO: 79875 - protein, 279 aa, Arabidopsis thaliana
  peptide (1)..(279): Ceres Seq. ID no. 12653548
MIPMQPLPDQYMKPLYQRSCSNDFAATNASSASYSLSFEASHDPQELCRRTYSNSNVTHLNFTSSQHQPKQSHPRFSSPPSFSIHGGSMAPNCVNKTRIRWTQDLHEKFVECVNRLGGADKATPKAILKRMDSDGLTIFHVKSHLQKYRIAKYMPESQEGKFEKRACAKELSQLDTRTGVQIKEALQLQLDVQRHLHEQLEIQRNLQLRIEEQGKQLKMMMEQQQKNKESLLKKLPDAEASLSLLDPHIHSPPSPFLVHDAEALMLTSYEDTQLQSTKS

SEQ ID NO: 79876 - DNA, 1566 bp, Arabidopsis thaliana
  misc_feature (1)..(1566): Ceres Seq. ID no. 12653581
  misc_feature (1)..(1566): Ortholog of  Ceres SEQ ID NO 13502874 as cited in SEQ ID NO 66298
  misc_feature (1)..(1566): Ortholog of  Ceres SEQ ID NO 12614124 as cited in SEQ ID NO 68392
atgaattatacttcttgttcatatctcttcttcacacttgtaaccatcttccttctccatagactcttcagctcctctagccgcagaggtcttcctccaggtcctcgaggacttcccgttcttggtcatatgcatctcctccggtctagcctaccacgatctcttcaagccttggctcatacttacggtcctctcatgaccatacgcatcggatcattacgagtcctcgttgtctcagattccgacacagctaagctaatcctcaagactcacgaccctgatttcgcttccaagtttgtgtttggtccgagacagttcaatgtttataaaggatcagagttctttaatgcaccttatggatcttactggaggttcatgaagaagctatgcatgactaagctattcgcgggttatcagcttgatcgatttgtcgacataagagaagaggaaacgttagctttactgagcacgctggttgagaggtcgcgaaacggagaggcttgcgatctcggtttggagttcactgctttgaccacaaagatcttatcaaagatggttatggggaaaaggtgccgccaaaactcgaatattcccaaagagatcaggaagatagtgagtgatattatggcttgcgccacaaggtttggattcatggagctatttggaccattgcgggatctggatttgtttgggaatggtaagaagcttagatcctctatttggcggtatgatgagttggttgagaagatactgaaggaatatgaaaacgataagagcaatgaggaagaagagaaagataaagatatcgtcgatatcttgttggacacgtataatgacccaaaagccgaactcagattgactatgaatcagatcaagttcttcattcttgagttgttcatggcgagcttagacacgacttctgcagctttacaatggacaatgactgagctaatcaaccatccggatatcttcgcgaagatcagagacgagatcaaatcggttgtaggaacaacgaaccggttaatcaaagaatcagatttgcagaagcttccttacctacaagcagctatcaaggagacattgagacttcatccagtaggaccattactacgcagagaaagcaacacagacatgaagatcaacgggtacgatgtaaaatccgggacaaagatcttcatcaatgcttacgggataatgcgtgatccgaccacatacaaagaccctgacaagtttatgccagagaggtttcttgtggtggaacaagatacagagagaaagatgggttactaccagcaatatatgttggaattaaaaggccaagatgtgaattatcttgcgtttgggagcggaagacgaggatgtcttggagcttctcacgcttctctggtgttgagtctcacaattgggtcactcgtgcagtgttttaattggacggtgaagggagatgaagacaaaatcaagatcaagttacctaccggcttttcggcttcagggactgctggaggaagctcacttatgtgttctcctgaattatgttttgatccatttggataccaaactaagtga

SEQ ID NO: 79877 - protein, 521 aa, Arabidopsis thaliana
  peptide (1)..(521): Ceres Seq. ID no. 12653582
MNYTSCSYLFFTLVTIFLLHRLFSSSSRRGLPPGPRGLPVLGHMHLLRSSLPRSLQALAHTYGPLMTIRIGSLRVLVVSDSDTAKLILKTHDPDFASKFVFGPRQFNVYKGSEFFNAPYGSYWRFMKKLCMTKLFAGYQLDRFVDIREEETLALLSTLVERSRNGEACDLGLEFTALTTKILSKMVMGKRCRQNSNIPKEIRKIVSDIMACATRFGFMELFGPLRDLDLFGNGKKLRSSIWRYDELVEKILKEYENDKSNEEEEKDKDIVDILLDTYNDPKAELRLTMNQIKFFILELFMASLDTTSAALQWTMTELINHPDIFAKIRDEIKSVVGTTNRLIKESDLQKLPYLQAAIKETLRLHPVGPLLRRESNTDMKINGYDVKSGTKIFINAYGIMRDPTTYKDPDKFMPERFLVVEQDTERKMGYYQQYMLELKGQDVNYLAFGSGRRGCLGASHASLVLSLTIGSLVQCFNWTVKGDEDKIKIKLPTGFSASGTAGGSSLMCSPELCFDPFGYQTK

SEQ ID NO: 79878 - protein, 478 aa, Arabidopsis thaliana
  peptide (1)..(478): Ceres Seq. ID no. 12653583
MHLLRSSLPRSLQALAHTYGPLMTIRIGSLRVLVVSDSDTAKLILKTHDPDFASKFVFGPRQFNVYKGSEFFNAPYGSYWRFMKKLCMTKLFAGYQLDRFVDIREEETLALLSTLVERSRNGEACDLGLEFTALTTKILSKMVMGKRCRQNSNIPKEIRKIVSDIMACATRFGFMELFGPLRDLDLFGNGKKLRSSIWRYDELVEKILKEYENDKSNEEEEKDKDIVDILLDTYNDPKAELRLTMNQIKFFILELFMASLDTTSAALQWTMTELINHPDIFAKIRDEIKSVVGTTNRLIKESDLQKLPYLQAAIKETLRLHPVGPLLRRESNTDMKINGYDVKSGTKIFINAYGIMRDPTTYKDPDKFMPERFLVVEQDTERKMGYYQQYMLELKGQDVNYLAFGSGRRGCLGASHASLVLSLTIGSLVQCFNWTVKGDEDKIKIKLPTGFSASGTAGGSSLMCSPELCFDPFGYQTK

SEQ ID NO: 79879 - protein, 456 aa, Arabidopsis thaliana
  peptide (1)..(456): Ceres Seq. ID no. 12653584
MTIRIGSLRVLVVSDSDTAKLILKTHDPDFASKFVFGPRQFNVYKGSEFFNAPYGSYWRFMKKLCMTKLFAGYQLDRFVDIREEETLALLSTLVERSRNGEACDLGLEFTALTTKILSKMVMGKRCRQNSNIPKEIRKIVSDIMACATRFGFMELFGPLRDLDLFGNGKKLRSSIWRYDELVEKILKEYENDKSNEEEEKDKDIVDILLDTYNDPKAELRLTMNQIKFFILELFMASLDTTSAALQWTMTELINHPDIFAKIRDEIKSVVGTTNRLIKESDLQKLPYLQAAIKETLRLHPVGPLLRRESNTDMKINGYDVKSGTKIFINAYGIMRDPTTYKDPDKFMPERFLVVEQDTERKMGYYQQYMLELKGQDVNYLAFGSGRRGCLGASHASLVLSLTIGSLVQCFNWTVKGDEDKIKIKLPTGFSASGTAGGSSLMCSPELCFDPFGYQTK

SEQ ID NO: 79880 - DNA, 786 bp, Arabidopsis thaliana
  misc_feature (1)..(786): Ceres Seq. ID no. 12653597
  misc_feature (1)..(786): Ortholog of  Ceres SEQ ID NO 15225507 as cited in SEQ ID NO 55551
  misc_feature (1)..(786): Ortholog of  Ceres SEQ ID NO 15225677 as cited in SEQ ID NO 0
atggcaacaccaccgttaacgccaagaatgatgactccaacaacaatgtcgcctctcgggagtccaaagtcgaagaagtcaacggcgacggtacgaccggagatcacgttggagcaaccatctggaagaaacaaaacaaccggctccaaatcgacgaaactcttccgacgtgttaggtctgtgttcagatcacttccgatcatgtctccgatgtgtaaatttcccgtaggaggaggaggaagactccacgagaatcacgttcatggaggaacacgtgtcacgggaacgttgtttggttaccgcaaaacgcgtgtgaatctagcggttcaagagaatccgcgttctttaccgattcttttattggagttagcgattccaacggggaaacttcttcaagatcttggagtcggtttagtgagaatcgcgttggaatgcgagaagaaaccgagcgagaaaaccaaaatcattgacgaaccgatttgggcgttgtattgtaacggtaagaaatctggttatggtgtgaagagacaaccaacggaagaggatcttgtggtgatgcagatgcttcatgctgtgtcgatgggagctggtgttttaccggtgagcagtggcgcgatcacggagcaaagcggcggaggaggaggaggacaacaagaaggagatttgacgtatatgagagcacatttcgagagagtgattgggtcaagagactccgagacgtattacatgatgaatcctgatgggaacagtggacctgagcttagtatctttttcgtgagggtttaa

SEQ ID NO: 79881 - protein, 261 aa, Arabidopsis thaliana
  peptide (1)..(261): Ceres Seq. ID no. 12653598
MATPPLTPRMMTPTTMSPLGSPKSKKSTATVRPEITLEQPSGRNKTTGSKSTKLFRRVRSVFRSLPIMSPMCKFPVGGGGRLHENHVHGGTRVTGTLFGYRKTRVNLAVQENPRSLPILLLELAIPTGKLLQDLGVGLVRIALECEKKPSEKTKIIDEPIWALYCNGKKSGYGVKRQPTEEDLVVMQMLHAVSMGAGVLPVSSGAITEQSGGGGGGQQEGDLTYMRAHFERVIGSRDSETYYMMNPDGNSGPELSIFFVRV

SEQ ID NO: 79882 - protein, 252 aa, Arabidopsis thaliana
  peptide (1)..(252): Ceres Seq. ID no. 12653599
MMTPTTMSPLGSPKSKKSTATVRPEITLEQPSGRNKTTGSKSTKLFRRVRSVFRSLPIMSPMCKFPVGGGGRLHENHVHGGTRVTGTLFGYRKTRVNLAVQENPRSLPILLLELAIPTGKLLQDLGVGLVRIALECEKKPSEKTKIIDEPIWALYCNGKKSGYGVKRQPTEEDLVVMQMLHAVSMGAGVLPVSSGAITEQSGGGGGGQQEGDLTYMRAHFERVIGSRDSETYYMMNPDGNSGPELSIFFVRV

SEQ ID NO: 79883 - protein, 251 aa, Arabidopsis thaliana
  peptide (1)..(251): Ceres Seq. ID no. 12653600
MTPTTMSPLGSPKSKKSTATVRPEITLEQPSGRNKTTGSKSTKLFRRVRSVFRSLPIMSPMCKFPVGGGGRLHENHVHGGTRVTGTLFGYRKTRVNLAVQENPRSLPILLLELAIPTGKLLQDLGVGLVRIALECEKKPSEKTKIIDEPIWALYCNGKKSGYGVKRQPTEEDLVVMQMLHAVSMGAGVLPVSSGAITEQSGGGGGGQQEGDLTYMRAHFERVIGSRDSETYYMMNPDGNSGPELSIFFVRV

SEQ ID NO: 79884 - DNA, 1677 bp, Arabidopsis thaliana
  misc_feature (1)..(1677): Ceres Seq. ID no. 12653601
  misc_feature (1)..(1677): Ortholog of  Ceres SEQ ID NO 13599900 as cited in SEQ ID NO 531
  misc_feature (1)..(1677): Ortholog of  Ceres SEQ ID NO 13659971 as cited in SEQ ID NO 67565
  misc_feature (1)..(1677): Ortholog of  Ceres SEQ ID NO 13500385 as cited in SEQ ID NO 67583
gatggagaacaaaccaagtgtattaactgaaagatatgaagttgggaggttattgggtcaaggtacttttgctaaagtgtattttggaaggagtaatcataccaacgagagtgtagctatcaagatgattgacaaggacaaagttatgagagtcgggcttagccagcaaatcaagcgagagatctctgtaatgaggatcgctaaacacccgaatgtcgttgagttatacgaggttatggctacaaagtcaaggatttactttgttattgagtattgtaaaggtggtgagcttttcaacaaggttgcaaaaggaaaacttaaagaagatgttgcttggaagtatttttatcagcttattagtgcggttgatttttgtcacagccgcggagtttatcaccgcgacattaagccggaaaatcttttgttggatgacaatgataatcttaaggtatctgattttggtttaagtgcgcttgctgattgcaagcggcaagatggtcttctacatacaacttgtggtacacctgcttatgttgcgcccgaggttattaaccgaaaaggatacgagggtacgaaagcggatatttggtcttgtggtgttgttttgtttgttcttttggctggttatcttcctttccatgacactaatcttatggagatgtataggaagataggtaaagcagacttcaagtgtcccagctggtttgctcctgaggtaaagagactattgtgtaagatgttggaccctaaccatgagactagaatcactattgcaaaaatcaaggagagttcttggttcagaaagggtttgcatttgaagcaaaaaaagatggaaaagatggagaaacaacaagtcagagaggctactaatcccatggaagctggaggttcaggccaaaatgaaaacggagaaaaccacgagccgcctcgacttgctaccttgaatgctttcgatatcatcgccttgtctacggggtttggtctggcaggactttttggggatgtatatgacaagcgagaatctaggttcgcgtcgcaaaaacctgcttcagagatcatttctaagctagtagaggttgccaagtgcctgaagctgaagataagaaagcaaggcgcaggcttgttcaaactggaaagagtaaaggaaggaaaaaacggaattttgacgatggatgcagagatattccaagtgacgccgacgtttcacctggtggaagtgaagaaatgtaatggagatacaatggagtatcagaagttagtggaggaggatcttaggcctgctttggcagatattgtttgggtttggcaaggcgagaaggagaaagaggagcagttactgcaggatgaacaaggagagcaagaaccatcatagcaagttcagctacaagcctacaactgcaagcacatgaattgttgcaggaacatgaaaatggtaaccctcttgcgacttcagctgaaacagaagcaagcatcaagaaactctaacgaaaacagaggaaggaaaacaataacaattgcacaaaatggattctttttgcatatagactacaaaaattgtagatagttgattgatttgtaacaactacgagctttttttttaccttgcctcttgtgaagttttgaacgtatattgtttcatgagtacagtaattgaatttctttaagagtttggtcgat

SEQ ID NO: 79885 - protein, 456 aa, Arabidopsis thaliana
  peptide (1)..(456): Ceres Seq. ID no. 12653602
MENKPSVLTERYEVGRLLGQGTFAKVYFGRSNHTNESVAIKMIDKDKVMRVGLSQQIKREISVMRIAKHPNVVELYEVMATKSRIYFVIEYCKGGELFNKVAKGKLKEDVAWKYFYQLISAVDFCHSRGVYHRDIKPENLLLDDNDNLKVSDFGLSALADCKRQDGLLHTTCGTPAYVAPEVINRKGYEGTKADIWSCGVVLFVLLAGYLPFHDTNLMEMYRKIGKADFKCPSWFAPEVKRLLCKMLDPNHETRITIAKIKESSWFRKGLHLKQKKMEKMEKQQVREATNPMEAGGSGQNENGENHEPPRLATLNAFDIIALSTGFGLAGLFGDVYDKRESRFASQKPASEIISKLVEVAKCLKLKIRKQGAGLFKLERVKEGKNGILTMDAEIFQVTPTFHLVEVKKCNGDTMEYQKLVEEDLRPALADIVWVWQGEKEKEEQLLQDEQGEQEPS

SEQ ID NO: 79886 - protein, 415 aa, Arabidopsis thaliana
  peptide (1)..(415): Ceres Seq. ID no. 12653603
MIDKDKVMRVGLSQQIKREISVMRIAKHPNVVELYEVMATKSRIYFVIEYCKGGELFNKVAKGKLKEDVAWKYFYQLISAVDFCHSRGVYHRDIKPENLLLDDNDNLKVSDFGLSALADCKRQDGLLHTTCGTPAYVAPEVINRKGYEGTKADIWSCGVVLFVLLAGYLPFHDTNLMEMYRKIGKADFKCPSWFAPEVKRLLCKMLDPNHETRITIAKIKESSWFRKGLHLKQKKMEKMEKQQVREATNPMEAGGSGQNENGENHEPPRLATLNAFDIIALSTGFGLAGLFGDVYDKRESRFASQKPASEIISKLVEVAKCLKLKIRKQGAGLFKLERVKEGKNGILTMDAEIFQVTPTFHLVEVKKCNGDTMEYQKLVEEDLRPALADIVWVWQGEKEKEEQLLQDEQGEQEPS

SEQ ID NO: 79887 - protein, 408 aa, Arabidopsis thaliana
  peptide (1)..(408): Ceres Seq. ID no. 12653604
MRVGLSQQIKREISVMRIAKHPNVVELYEVMATKSRIYFVIEYCKGGELFNKVAKGKLKEDVAWKYFYQLISAVDFCHSRGVYHRDIKPENLLLDDNDNLKVSDFGLSALADCKRQDGLLHTTCGTPAYVAPEVINRKGYEGTKADIWSCGVVLFVLLAGYLPFHDTNLMEMYRKIGKADFKCPSWFAPEVKRLLCKMLDPNHETRITIAKIKESSWFRKGLHLKQKKMEKMEKQQVREATNPMEAGGSGQNENGENHEPPRLATLNAFDIIALSTGFGLAGLFGDVYDKRESRFASQKPASEIISKLVEVAKCLKLKIRKQGAGLFKLERVKEGKNGILTMDAEIFQVTPTFHLVEVKKCNGDTMEYQKLVEEDLRPALADIVWVWQGEKEKEEQLLQDEQGEQEPS

SEQ ID NO: 79888 - DNA, 1223 bp, Arabidopsis thaliana
  misc_feature (1)..(1223): Ceres Seq. ID no. 12653625
  misc_feature (1)..(1223): Ortholog of  Ceres SEQ ID NO 15225703 as cited in SEQ ID NO 59527
  misc_feature (1)..(1223): Ortholog of  Ceres SEQ ID NO 12615972 as cited in SEQ ID NO 62455
  misc_feature (1)..(1223): Ortholog of  Ceres SEQ ID NO 13596229 as cited in SEQ ID NO 68800
  misc_feature (1)..(1223): Ortholog of  Ceres SEQ ID NO 15179393 as cited in SEQ ID NO 0
aaccaaaacaaaaaaaacaataaacaaattacagacagagaagagagagatcactatggctgtcggagatgatgatctggagaacagaatgtcggcgaaagatcgaggaatcggaagcagaggcggtgatcggaatcgaatcggaccaccgcctctgccggtagccttgtcgtcgtctactgaatttggcgataacgcgttgtcgtcgcggtggacgtcgtggcttgttccgatgttcgttgtggctaacgttgcggttttcgtcgtggcgatgttcgttaataactgtccgaatcatttcgagtctcaccgtctcagaggtcactgtgtcgccaagtttctcggtagactctcctttgagcctctccgaactaatcctctctttggtccatcttctcacacattggagaagttaggagcacttgagtggagcaaagttgtggagaagaaggaaggttggcgtctcttgacatgtatatggttacacgcgggtgttattcatctcggagccaatatgttaagccttgttttcattggtattcgtctcgagcagcaatttggttttgttagaatcggagttatatacctattatcaggaattggagggagtgtattgtcgtcgttgtttatcagaaacagtatctctgttggagcttctggtgctctttttggcctccttggctcaatgctctctgaacttttcaccaactggacaatctactctaacaagattgctgcactcctgacgcttttgtttgtcatcttgataaacttggcaattgggattctgcctcacgttgataattttgctcatgtgggtggatttgtaacggggtttctcctcggtttcattctgttggctcgtccccagtttaagtggttagcaagagagcatatgccacaaggcacacctctgagatacaagtacaagacttaccaatacctattgtggctcctatctttggttctattgattgccgggtttgtggtggcgctgttgatgctatttcgaggagaaaacggcaatgatcactgccgttggtgtcactacctgcgctgtgttcccacctcaagttggaggtgtgatgatgtctgataagtaaagcaacaagttttactttgtaaatccatctataggttatatttatcgtgttattttttagtgtttcagtgtaattgtgtgattgcttatgtgtgtgactcttattgggcttttataccgg

SEQ ID NO: 79889 - protein, 364 aa, Arabidopsis thaliana
  peptide (1)..(364): Ceres Seq. ID no. 12653626
TKTKKTINKLQTEKREITMAVGDDDLENRMSAKDRGIGSRGGDRNRIGPPPLPVALSSSTEFGDNALSSRWTSWLVPMFVVANVAVFVVAMFVNNCPNHFESHRLRGHCVAKFLGRLSFEPLRTNPLFGPSSHTLEKLGALEWSKVVEKKEGWRLLTCIWLHAGVIHLGANMLSLVFIGIRLEQQFGFVRIGVIYLLSGIGGSVLSSLFIRNSISVGASGALFGLLGSMLSELFTNWTIYSNKIAALLTLLFVILINLAIGILPHVDNFAHVGGFVTGFLLGFILLARPQFKWLAREHMPQGTPLRYKYKTYQYLLWLLSLVLLIAGFVVALLMLFRGENGNDHCRWCHYLRCVPTSSWRCDDV

SEQ ID NO: 79890 - protein, 346 aa, Arabidopsis thaliana
  peptide (1)..(346): Ceres Seq. ID no. 12653627
MAVGDDDLENRMSAKDRGIGSRGGDRNRIGPPPLPVALSSSTEFGDNALSSRWTSWLVPMFVVANVAVFVVAMFVNNCPNHFESHRLRGHCVAKFLGRLSFEPLRTNPLFGPSSHTLEKLGALEWSKVVEKKEGWRLLTCIWLHAGVIHLGANMLSLVFIGIRLEQQFGFVRIGVIYLLSGIGGSVLSSLFIRNSISVGASGALFGLLGSMLSELFTNWTIYSNKIAALLTLLFVILINLAIGILPHVDNFAHVGGFVTGFLLGFILLARPQFKWLAREHMPQGTPLRYKYKTYQYLLWLLSLVLLIAGFVVALLMLFRGENGNDHCRWCHYLRCVPTSSWRCDDV

SEQ ID NO: 79891 - protein, 335 aa, Arabidopsis thaliana
  peptide (1)..(335): Ceres Seq. ID no. 12653628
MSAKDRGIGSRGGDRNRIGPPPLPVALSSSTEFGDNALSSRWTSWLVPMFVVANVAVFVVAMFVNNCPNHFESHRLRGHCVAKFLGRLSFEPLRTNPLFGPSSHTLEKLGALEWSKVVEKKEGWRLLTCIWLHAGVIHLGANMLSLVFIGIRLEQQFGFVRIGVIYLLSGIGGSVLSSLFIRNSISVGASGALFGLLGSMLSELFTNWTIYSNKIAALLTLLFVILINLAIGILPHVDNFAHVGGFVTGFLLGFILLARPQFKWLAREHMPQGTPLRYKYKTYQYLLWLLSLVLLIAGFVVALLMLFRGENGNDHCRWCHYLRCVPTSSWRCDDV

SEQ ID NO: 79892 - DNA, 1629 bp, Arabidopsis thaliana
  misc_feature (1)..(1629): Ceres Seq. ID no. 12653655
  misc_feature (1)..(1629): Ortholog of  Ceres SEQ ID NO 12608463 as cited in SEQ ID NO 60238
atgagaaactcgccgtccaagaacgggtcggcgggagggcattctcgtacttatacagacacaatctggtctccctttgtcaagtcaggtttgggaatatctcccaacagatcctacgccctagtctccctcctcatcctcctcatagtcggcgcttttatctccacgcgcctcctcctcgacaccaccgttctgctagagaaaaaagccgcgacgacgacgacgactaaaacccaaactcagacgataaccccaaaataccctcgaccaaccacggtaattactcaaagccctaaaccggagttcacactacactgctccgccaacgaaaccaccgcgtcatgtccgagtaacaaatacccgacgacaacgagcttcgaagatgatgatacaaaccatcctccgaccgccacgtgtcctgattacttccgttggattcacgaggatctccgtccatggtcgaggacgggaatcacgagggaagcattggagcgagctaaaaagacggcgactttccggctagcgatcgtcggcgggaaaatttacgtcgagaaatttcaagatgcatttcagacaagagacgtgttcacaatctggggtttcttacagcttttacggaagtaccctgggaagattccagatctcgagcttatgtttgactgcgttgactggccggtcgttagagctacggaattcgccggagctaacgcgccgtcgcctccgccgctgtttcgttactgtgggaatgaggagacgcttgatatcgtgtttcctgattggtccttctggggatgggcggaggtgaatataaagccatgggagagtttgttgaaggaactaagagaagggaatgagaggactaaatggattaacagagagccgtatgcttattggaaaggtaatccaatggtcgcagagacacgacaagatcttatgaaatgtaatgtctctgaggaacacgagtggaacgctcgtttgtatgctcaggattggatcaaagaatcaaaggaaggttacaagcaatcagacttggcaagccaatgccatcacagatacaagatatatatagaagggtctgcatggtccgttagcgagaagtacattttggcgtgtgactctgtgactctgctagtgaaacctcattactatgatttctttactagaggtttgcttccagctcaccattattggcccgttagagagcacgataagtgccgctccatcaaattcgccgttgattggggtaactctcacattcaaaaggcacaggatattggaaaggcggccagcgattttatccaacaagacctcaagatggactatgtgtatgactacatgtaccatcttttaaccgaatactcgaaactcctccagtttaaacccgagattccgcggaatgccgtggagatttgctcggaaacaatggcatgtctgaggagtgggaatgagcggaagttcatgacagaatcactcgtgaagcaacctgcggattctggtccgtgtgccatgcctcctccttatgatccggctacgtattacgaggttgtgaagaggaaacagagtactaatatgagaatcctacagtgggaaatgaagtactggagtaagcagaatcaaaccggctcttga

SEQ ID NO: 79893 - protein, 542 aa, Arabidopsis thaliana
  peptide (1)..(542): Ceres Seq. ID no. 12653656
MRNSPSKNGSAGGHSRTYTDTIWSPFVKSGLGISPNRSYALVSLLILLIVGAFISTRLLLDTTVLLEKKAATTTTTKTQTQTITPKYPRPTTVITQSPKPEFTLHCSANETTASCPSNKYPTTTSFEDDDTNHPPTATCPDYFRWIHEDLRPWSRTGITREALERAKKTATFRLAIVGGKIYVEKFQDAFQTRDVFTIWGFLQLLRKYPGKIPDLELMFDCVDWPVVRATEFAGANAPSPPPLFRYCGNEETLDIVFPDWSFWGWAEVNIKPWESLLKELREGNERTKWINREPYAYWKGNPMVAETRQDLMKCNVSEEHEWNARLYAQDWIKESKEGYKQSDLASQCHHRYKIYIEGSAWSVSEKYILACDSVTLLVKPHYYDFFTRGLLPAHHYWPVREHDKCRSIKFAVDWGNSHIQKAQDIGKAASDFIQQDLKMDYVYDYMYHLLTEYSKLLQFKPEIPRNAVEICSETMACLRSGNERKFMTESLVKQPADSGPCAMPPPYDPATYYEVVKRKQSTNMRILQWEMKYWSKQNQTGS

SEQ ID NO: 79894 - protein, 325 aa, Arabidopsis thaliana
  peptide (1)..(325): Ceres Seq. ID no. 12653657
MFDCVDWPVVRATEFAGANAPSPPPLFRYCGNEETLDIVFPDWSFWGWAEVNIKPWESLLKELREGNERTKWINREPYAYWKGNPMVAETRQDLMKCNVSEEHEWNARLYAQDWIKESKEGYKQSDLASQCHHRYKIYIEGSAWSVSEKYILACDSVTLLVKPHYYDFFTRGLLPAHHYWPVREHDKCRSIKFAVDWGNSHIQKAQDIGKAASDFIQQDLKMDYVYDYMYHLLTEYSKLLQFKPEIPRNAVEICSETMACLRSGNERKFMTESLVKQPADSGPCAMPPPYDPATYYEVVKRKQSTNMRILQWEMKYWSKQNQTGS

SEQ ID NO: 79895 - DNA, 1023 bp, Arabidopsis thaliana
  misc_feature (1)..(1023): Ceres Seq. ID no. 12653672
  misc_feature (1)..(1023): Ortholog of  Ceres SEQ ID NO 13596474 as cited in SEQ ID NO 62169
  misc_feature (1)..(1023): Ortholog of  Ceres SEQ ID NO 13598714 as cited in SEQ ID NO 62656
  misc_feature (1)..(1023): Ortholog of  Ceres SEQ ID NO 13596969 as cited in SEQ ID NO 63375
  misc_feature (1)..(1023): Ortholog of  Ceres SEQ ID NO 13597519 as cited in SEQ ID NO 64759
  misc_feature (1)..(1023): Ortholog of  Ceres SEQ ID NO 13597870 as cited in SEQ ID NO 64982
  misc_feature (1)..(1023): Ortholog of  Ceres SEQ ID NO 13656123 as cited in SEQ ID NO 65212
atgcagtttgtgaattttttcccactattggccctcgtagtcataagcttagccggaaaggctacggtagaggctgcgacgggattgaaccctccggtgaagcttgtctggcattattacaaacttactaacacttgtgatgatgcagagacttatattagataccaagttgaaaagttttataagaatgatagtagcattgccccaaagctgcttcgtctcctctactccgattgtatggttaatggatgtgatggttcgattcttttgcaaggaccaaactcagagaggacagctccacagaatcgagggcttggaggttttgtgataatcgataaaataaagcaagttcttgaatcacgttgtcctggtgtcgtttcttgcgctgatatcctcaaccttgccactagagatgctgttcacatggccggagcaccgtcttatcctgtgtttacggggagaagggacggtgggacattaaatgcagacgccgtagatctgccgtcaccgtccatctcagtcgatgagtcattggcatatttcaagtccaaaggtcttgacgttttggatatgactactcttctaggagcacactcaatggggaagacacattgtagctacgtagtggacagactatacaacttcaagaacacagggaaaccagatccgaccatgaacacgacattggtgtcacaacttcgatatctttgtcctccaagaacacaaaagggccaaaccgatccactggtttacctaaatccagactcaggctcgagcaacagattcacaagctcatactactctcgtgtcttgtctcataacgctgttttacgggtggaccaagagttgctcaacaacgatgactcgaaggagatcacgcaagagtttgcttccggttttgaagatttcagaaagtcttttgctttggcaatgtcgagaatgggatctatcaatgttttgacgggaacagctggagagattcgtcgagactgcagagttaccaacgctaatgacggggcctaa

SEQ ID NO: 79896 - protein, 340 aa, Arabidopsis thaliana
  peptide (1)..(340): Ceres Seq. ID no. 12653673
MQFVNFFPLLALVVISLAGKATVEAATGLNPPVKLVWHYYKLTNTCDDAETYIRYQVEKFYKNDSSIAPKLLRLLYSDCMVNGCDGSILLQGPNSERTAPQNRGLGGFVIIDKIKQVLESRCPGVVSCADILNLATRDAVHMAGAPSYPVFTGRRDGGTLNADAVDLPSPSISVDESLAYFKSKGLDVLDMTTLLGAHSMGKTHCSYVVDRLYNFKNTGKPDPTMNTTLVSQLRYLCPPRTQKGQTDPLVYLNPDSGSSNRFTSSYYSRVLSHNAVLRVDQELLNNDDSKEITQEFASGFEDFRKSFALAMSRMGSINVLTGTAGEIRRDCRVTNANDGA

SEQ ID NO: 79897 - protein, 261 aa, Arabidopsis thaliana
  peptide (1)..(261): Ceres Seq. ID no. 12653674
MVNGCDGSILLQGPNSERTAPQNRGLGGFVIIDKIKQVLESRCPGVVSCADILNLATRDAVHMAGAPSYPVFTGRRDGGTLNADAVDLPSPSISVDESLAYFKSKGLDVLDMTTLLGAHSMGKTHCSYVVDRLYNFKNTGKPDPTMNTTLVSQLRYLCPPRTQKGQTDPLVYLNPDSGSSNRFTSSYYSRVLSHNAVLRVDQELLNNDDSKEITQEFASGFEDFRKSFALAMSRMGSINVLTGTAGEIRRDCRVTNANDGA

SEQ ID NO: 79898 - protein, 199 aa, Arabidopsis thaliana
  peptide (1)..(199): Ceres Seq. ID no. 12653675
MAGAPSYPVFTGRRDGGTLNADAVDLPSPSISVDESLAYFKSKGLDVLDMTTLLGAHSMGKTHCSYVVDRLYNFKNTGKPDPTMNTTLVSQLRYLCPPRTQKGQTDPLVYLNPDSGSSNRFTSSYYSRVLSHNAVLRVDQELLNNDDSKEITQEFASGFEDFRKSFALAMSRMGSINVLTGTAGEIRRDCRVTNANDGA

SEQ ID NO: 79899 - DNA, 909 bp, Arabidopsis thaliana
  misc_feature (1)..(909): Ceres Seq. ID no. 12653676
  misc_feature (1)..(909): Ortholog of  Ceres SEQ ID NO 12583280 as cited in SEQ ID NO 56136
  misc_feature (1)..(909): Ortholog of  Ceres SEQ ID NO 13595979 as cited in SEQ ID NO 68468
  misc_feature (1)..(909): Ortholog of  Ceres SEQ ID NO 13654715 as cited in SEQ ID NO 68676
atgaccaacatgactcttcgcaagcatgttatatactttcttttcttcataagctgctctcttagcaaaccctccgatgcatccagaggtggcatagccatctattggggccaaaacggaaacgaaggtaacctctctgccacgtgtgccaccggccggtatgcttacgtcaacgtcgcctttcttgtgaaattcggaaatggccaaacaccggagctcaaccttgccggccactgcaaccctgcggcgaacacttgcacccattttggctctcaggtcaaagattgtcagtctcgtggcatcaaggttatgttgtctctcggcggcgggattggaaactactcgattgggtcgagggaggacgcaaaagttatcgctgattatctgtggaacaacttcttgggaggaaaatcatcatcacgtcccttaggtgatgctgttctagatggtatcgatttcaatatcgagcttggctctcctcaacactgggatgatctcgccaggactctctcaaagtttagccacagaggaagaaaaatatatctaacaggagctcctcaatgtccatttccagacagattaatgggaagtgctctcaacactaaacgttttgactatgtttggattcaattctacaataatccaccgtgttcatacagttcaggtaatactcaaaacctcttcgattcatggaacaagtggaccacttcaatcgcagcccaaaaattcttcttgggtctaccggcagctcctgaagctgccggaagtggctatatcccaccagatgtactgacttcacagattcttccgactttaaagaagtctaggaagtatggaggtgtaatgctttggtctaaattctgggatgataaaaatggatacagttcatctatattggctagtgtgtga

SEQ ID NO: 79900 - protein, 302 aa, Arabidopsis thaliana
  peptide (1)..(302): Ceres Seq. ID no. 12653677
MTNMTLRKHVIYFLFFISCSLSKPSDASRGGIAIYWGQNGNEGNLSATCATGRYAYVNVAFLVKFGNGQTPELNLAGHCNPAANTCTHFGSQVKDCQSRGIKVMLSLGGGIGNYSIGSREDAKVIADYLWNNFLGGKSSSRPLGDAVLDGIDFNIELGSPQHWDDLARTLSKFSHRGRKIYLTGAPQCPFPDRLMGSALNTKRFDYVWIQFYNNPPCSYSSGNTQNLFDSWNKWTTSIAAQKFFLGLPAAPEAAGSGYIPPDVLTSQILPTLKKSRKYGGVMLWSKFWDDKNGYSSSILASV

SEQ ID NO: 79901 - protein, 299 aa, Arabidopsis thaliana
  peptide (1)..(299): Ceres Seq. ID no. 12653678
MTLRKHVIYFLFFISCSLSKPSDASRGGIAIYWGQNGNEGNLSATCATGRYAYVNVAFLVKFGNGQTPELNLAGHCNPAANTCTHFGSQVKDCQSRGIKVMLSLGGGIGNYSIGSREDAKVIADYLWNNFLGGKSSSRPLGDAVLDGIDFNIELGSPQHWDDLARTLSKFSHRGRKIYLTGAPQCPFPDRLMGSALNTKRFDYVWIQFYNNPPCSYSSGNTQNLFDSWNKWTTSIAAQKFFLGLPAAPEAAGSGYIPPDVLTSQILPTLKKSRKYGGVMLWSKFWDDKNGYSSSILASV

SEQ ID NO: 79902 - protein, 199 aa, Arabidopsis thaliana
  peptide (1)..(199): Ceres Seq. ID no. 12653679
MLSLGGGIGNYSIGSREDAKVIADYLWNNFLGGKSSSRPLGDAVLDGIDFNIELGSPQHWDDLARTLSKFSHRGRKIYLTGAPQCPFPDRLMGSALNTKRFDYVWIQFYNNPPCSYSSGNTQNLFDSWNKWTTSIAAQKFFLGLPAAPEAAGSGYIPPDVLTSQILPTLKKSRKYGGVMLWSKFWDDKNGYSSSILASV

SEQ ID NO: 79903 - DNA, 1000 bp, Arabidopsis thaliana
  misc_feature (1)..(1000): Ceres Seq. ID no. 12653702
  misc_feature (1)..(1000): Ortholog of  Ceres SEQ ID NO 14306297 as cited in SEQ ID NO 56907
aggaccatttttagtagaagtaaaaccagcgaaaacgaatcgtgagaaaagcaaaggctaataacagttgagagaagggtgtgtttgtatgggctgctctgtatcgaagaagaagaagaagaatgcaatgcgaccaccgggatatgaggatcccgagcttcttgcatccgtcacgccattcacggtagaagaagtggaggctttgtatgaactgttcaagaagctaagcagctcaattatcgatgatggtcttattcataaggaagaatttcagctggctttattcagaaataggaaccggaggaatctcttcgctgatcggatatttgatgtatttgatgtgaagcgaaatggagtgatcgagtttggtgaatttgtccggtccttaggtgtcttccatccaagcgcgccggtccatgaaaaagtcaaatttgctttcaagttgtacgatttacgacaaactggattcatcgagcgagaagaattgaaagagatggtagtagcgcttcttcacgaatccgaactagttctttccgaagatatgattgaagtaatggtggataaggctttcgtgcaagcagaccgcaaaaacgacggaaaaatcgatatagatgaatggaaagactttgtatccttgaatccatcgctcatcaagaacatgactttgccatatctaaaggacataaataggacgtttccaagtttcgtttcatcttgtgaagaggaagaaatggaattgcaaaacgtatcttcctaatataagccatgcaaggaaagataaatatacataaaacgaatatttttgtacaatatcttaaaagaggaagatagagatgtaagctaggatttggaaataaaccgatcttgataacgatattggacttgccttgtgtactgtatatatttagttatttacatagcgactctccatctcacatacataattactaattaaatatttacaaatctagtctattattgcttcattgttgtatatacc

SEQ ID NO: 79904 - protein, 222 aa, Arabidopsis thaliana; identical to SEQ ID NO: 75990
  peptide (1)..(222): Ceres Seq. ID no. 12653703

SEQ ID NO: 79905 - protein, 209 aa, Arabidopsis thaliana; identical to SEQ ID NO: 75991
  peptide (1)..(209): Ceres Seq. ID no. 12653704

SEQ ID NO: 79906 - DNA, 786 bp, Arabidopsis thaliana
  misc_feature (1)..(786): Ceres Seq. ID no. 12653721
  misc_feature (1)..(786): Ortholog of  Ceres SEQ ID NO 12609394 as cited in SEQ ID NO 52095
atggcatctgttttggagaaaacgaagagtaagaagattgtgtttcccacaaagaaagaattatcggaggctatggccacgtacacggccaatctctcagccaagttttgcaaggagagaggctatttcaccgtcgttctttccggtggcgacctcatctcctggctcagtgaattgttggaaccaaagtatcaagaaagtatcgaatggtcaaagtggcacattttttgggtcgatgagagggttgttccattagaccatgaggacagcaactacaaactcgcctttgatggttttctctccaaggttccaataccaattgcaaacatatatccaatcgacaaagactgtgcagcccttggtgatgccaaaagtgcagcattactctacgaagaatgtctcaaaagactggtgaaccgaaacatcattcgcacatacaaatcgtctggcttcccacagttcgacctccagctcttaggaatgggtccagacggtcacatggcgtctttgttcccgggacattatcaaatcaaggagaaggcaaatttggtaacctatatcactgattccccaaaaccgcctccgaagagaatcacctttactttaccggttattaactgcgcttcatacaacctcatggctgtatgtgatgaggctcaagccgatgcggtagctaaggttttcaaccataacttcgacttgcctgctgcttggctcacagctgacgtagaagctatctggtttcttgaccaagccgctgcatctaagatcccaaaaggactttga

SEQ ID NO: 79907 - protein, 261 aa, Arabidopsis thaliana
  peptide (1)..(261): Ceres Seq. ID no. 12653722
MASVLEKTKSKKIVFPTKKELSEAMATYTANLSAKFCKERGYFTVVLSGGDLISWLSELLEPKYQESIEWSKWHIFWVDERVVPLDHEDSNYKLAFDGFLSKVPIPIANIYPIDKDCAALGDAKSAALLYEECLKRLVNRNIIRTYKSSGFPQFDLQLLGMGPDGHMASLFPGHYQIKEKANLVTYITDSPKPPPKRITFTLPVINCASYNLMAVCDEAQADAVAKVFNHNFDLPAAWLTADVEAIWFLDQAAASKIPKGL

SEQ ID NO: 79908 - protein, 237 aa, Arabidopsis thaliana
  peptide (1)..(237): Ceres Seq. ID no. 12653723
MATYTANLSAKFCKERGYFTVVLSGGDLISWLSELLEPKYQESIEWSKWHIFWVDERVVPLDHEDSNYKLAFDGFLSKVPIPIANIYPIDKDCAALGDAKSAALLYEECLKRLVNRNIIRTYKSSGFPQFDLQLLGMGPDGHMASLFPGHYQIKEKANLVTYITDSPKPPPKRITFTLPVINCASYNLMAVCDEAQADAVAKVFNHNFDLPAAWLTADVEAIWFLDQAAASKIPKGL

SEQ ID NO: 79909 - DNA, 2202 bp, Arabidopsis thaliana
  misc_feature (1)..(2202): Ceres Seq. ID no. 12653732
  misc_feature (1)..(2202): Ortholog of  Ceres SEQ ID NO 13623250 as cited in SEQ ID NO 0
atgtggcaaacgtggccacgtcagccaattctactagatattttttcaaatccaaatactctttccacaaccgttagatcatggtcggttcgccacccactttcaatcataaccgttaaaacattcgctagattttttctagatattttcttttctccacactattatagaaagaataaagttcttttttttgctctcttctcatttatctctccactcacaaatattttgatttgttttgtaactgtttctctttctctggagctttcttcttcttcttcaataatcgatttaggtttttcaaagctaagtgtttgtgttgtgataatgactagtagcgaggaagtagttgaagtgacggtggttaaagcacctgaagctggcggaggaaagttatcacgtcggaagattcggaagaaagacgccggtgttgatggtttggtgaagtgggagagatttctcccgaaaatcgcgcttagagttttgctcgttgaagctgatgattctactagacagattatcgctgctcttctcaggaaatgtagttacagagttgctgcagtacctgatggcttaaaagcttgggagatgctaaaaggaaagcctgaaagtgttgatttgatattaacagaggttgatctaccttcaatatctggatatgctctgctaacacttatcatggagcatgatatttgcaagaacattcctgttataatgatgtcgacacaggactcggtgaatactgtgtataagtgtatgttgaaaggtgcggctgattatcttgttaagccgttgaggaggaatgagcttagaaatctttggcagcatgtctggagaagacaaacttcacttgctcctgatagctttccatggaatgagagtgttggacagcagaaagccgagggtgcgtctgcaaacaactcgaacggaaagagagacgatcatgttgtgagtgggaatggtggtgatgcccagagctcgtgtacaagaccagagatggaaggtgagagcgcagacgtggaggttagtgcgagagacgcagtacagatggagtgcgcaaagtctcagtttaatgagacacggcttctagcaaatgagttgcagagtaagcaagcagaagccattgacttcatgggagcatcgtttagaagaactggacgacgtaacagagaagaaagtgttgctcaatacgaatctcggatagagcttgatctttctctgagaagacctaatgcttctgagaaccaatcttctggagaccggccttctcttcatccttctagtgcctcagctttcacacggtacgttcacaggccgttgcagacacaatgttcagcctccccagtggttactgatcaaagaaagaatgttgcagcaagtcaagatgataacattgtgctaatgaaccaatacaatacatctgaaccgcctccaaatgctccaagaagaaacgacaccagcttttacactggagctgactcacctggtccaccgtttagtaatcagctgaattcttggccgggacagagttcataccctacgccaacccctatcaacaatatacagttcagagatcccaacacagcttatacatctgcaatggctcctgcttcactctccccaagccctagttccgttagcccgcatgagtacagttccatgtttcacccattcaacagtaaacccgaggggttacaagaccgggattgttccatggatgtagatgagaggagatacgtctcttctgcaaccgaacatagtgcaataggcaatcacattgatcagcttattgagaagaagaacgaagatggctattcattatccgtcgggaaaattcagcaatctcttcaacgagaagccgctttaaccaaattccgaatgaagcgaaaggacagatgttatgagaaaaaggttcgttacgagagccggaagaaattagcagagcaacgaccacgaatcaaaggccaattcgttcgtcaagtccaatccacacaagctccatagtgatccaacaaattgatatattatatacagttcaattttgtatcatcaactagaggaattttgttttctccgatgcaggagctgttctttgtacaactaattccacatacgttagatttggtgacacatttgtgtgtacatacacatctttcgagcttgttgttgagttttagttagaatctacgttagatctgtaac

SEQ ID NO: 79910 - protein, 667 aa, Arabidopsis thaliana
  peptide (1)..(667): Ceres Seq. ID no. 12653733
MWQTWPRQPILLDIFSNPNTLSTTVRSWSVRHPLSIITVKTFARFFLDIFFSPHYYRKNKVLFFALFSFISPLTNILICFVTVSLSLELSSSSSIIDLGFSKLSVCVVIMTSSEEVVEVTVVKAPEAGGGKLSRRKIRKKDAGVDGLVKWERFLPKIALRVLLVEADDSTRQIIAALLRKCSYRVAAVPDGLKAWEMLKGKPESVDLILTEVDLPSISGYALLTLIMEHDICKNIPVIMMSTQDSVNTVYKCMLKGAADYLVKPLRRNELRNLWQHVWRRQTSLAPDSFPWNESVGQQKAEGASANNSNGKRDDHVVSGNGGDAQSSCTRPEMEGESADVEVSARDAVQMECAKSQFNETRLLANELQSKQAEAIDFMGASFRRTGRRNREESVAQYESRIELDLSLRRPNASENQSSGDRPSLHPSSASAFTRYVHRPLQTQCSASPVVTDQRKNVAASQDDNIVLMNQYNTSEPPPNAPRRNDTSFYTGADSPGPPFSNQLNSWPGQSSYPTPTPINNIQFRDPNTAYTSAMAPASLSPSPSSVSPHEYSSMFHPFNSKPEGLQDRDCSMDVDERRYVSSATEHSAIGNHIDQLIEKKNEDGYSLSVGKIQQSLQREAALTKFRMKRKDRCYEKKVRYESRKKLAEQRPRIKGQFVRQVQSTQAP

SEQ ID NO: 79911 - protein, 558 aa, Arabidopsis thaliana
  peptide (1)..(558): Ceres Seq. ID no. 12653734
MTSSEEVVEVTVVKAPEAGGGKLSRRKIRKKDAGVDGLVKWERFLPKIALRVLLVEADDSTRQIIAALLRKCSYRVAAVPDGLKAWEMLKGKPESVDLILTEVDLPSISGYALLTLIMEHDICKNIPVIMMSTQDSVNTVYKCMLKGAADYLVKPLRRNELRNLWQHVWRRQTSLAPDSFPWNESVGQQKAEGASANNSNGKRDDHVVSGNGGDAQSSCTRPEMEGESADVEVSARDAVQMECAKSQFNETRLLANELQSKQAEAIDFMGASFRRTGRRNREESVAQYESRIELDLSLRRPNASENQSSGDRPSLHPSSASAFTRYVHRPLQTQCSASPVVTDQRKNVAASQDDNIVLMNQYNTSEPPPNAPRRNDTSFYTGADSPGPPFSNQLNSWPGQSSYPTPTPINNIQFRDPNTAYTSAMAPASLSPSPSSVSPHEYSSMFHPFNSKPEGLQDRDCSMDVDERRYVSSATEHSAIGNHIDQLIEKKNEDGYSLSVGKIQQSLQREAALTKFRMKRKDRCYEKKVRYESRKKLAEQRPRIKGQFVRQVQSTQAP

SEQ ID NO: 79912 - protein, 471 aa, Arabidopsis thaliana
  peptide (1)..(471): Ceres Seq. ID no. 12653735
MLKGKPESVDLILTEVDLPSISGYALLTLIMEHDICKNIPVIMMSTQDSVNTVYKCMLKGAADYLVKPLRRNELRNLWQHVWRRQTSLAPDSFPWNESVGQQKAEGASANNSNGKRDDHVVSGNGGDAQSSCTRPEMEGESADVEVSARDAVQMECAKSQFNETRLLANELQSKQAEAIDFMGASFRRTGRRNREESVAQYESRIELDLSLRRPNASENQSSGDRPSLHPSSASAFTRYVHRPLQTQCSASPVVTDQRKNVAASQDDNIVLMNQYNTSEPPPNAPRRNDTSFYTGADSPGPPFSNQLNSWPGQSSYPTPTPINNIQFRDPNTAYTSAMAPASLSPSPSSVSPHEYSSMFHPFNSKPEGLQDRDCSMDVDERRYVSSATEHSAIGNHIDQLIEKKNEDGYSLSVGKIQQSLQREAALTKFRMKRKDRCYEKKVRYESRKKLAEQRPRIKGQFVRQVQSTQAP

SEQ ID NO: 79913 - DNA, 1605 bp, Arabidopsis thaliana
  misc_feature (1)..(1605): Ceres Seq. ID no. 12653740
  misc_feature (1)..(1605): Ortholog of  Ceres SEQ ID NO 13600220 as cited in SEQ ID NO 0
atggcaattaagctcattgcactagtaatcacactatgtgtagcatcatgggatgttgcacagggcagatctttaagattttctacaactcctctaaatcgttatagcttccctcctcattttgattttggtgttgcctcttccgcttatcagtatgaaggtgcagtagaagaaggagggaggagtctaagcatatgggacaatttcacacatgcatttccagaaaggacgaacatggacaatggagatgttgccgttgatttttaccatcgttataaggaagacatcaaactaataaaggaaatgaatatggatagtttcagattttccctgtcctggtcaagaatattaccaagtggaaaactaagtgatggggtcaataaagaaggtgttcaattctacaagaatcttattgatgaacttatcgagaacggtatcaaaccttttgtaacaatttatcactgggatatccctcaagctcttgatgatgagtatggtagctttttaagtcctcgaatcatagatgattttcgaaactatgccagattttgtttccaagagtttggggacaaggtcagtatgtggacaactttcaacgagccatatgtttatagcgtttcgggttatgatgcgggtaataaggcaatgggtcgatgttctaaatgggtaaacagtttatgtatcgccggtgactcgggcacggagccttatttagtctcccaccaccttcttctcgctcacgctgctgctgttgaagagttcaggaaatgtgacaagatttcgcaagattccaagataggcatagtgttgtctccttattggttcgagccatatgacagtgcttctaatgctgataaagaagcagttgaaagggctcttgctttcaatattggttggcatctcagccctctagttttcggagactatccagagacgataaagataagcgctggaaatagactgccatcttttaccaaagagcaatctatgatggttaaaaattcgtttgattttatcggtgtaaattactacactgcacggtttgttgctcacgatcttaacgtcgatatttcacggcctcgcttcatgaccgaccaacacctccaatacaaattgacaaatcgtaccggcgacaccatctcattggaatcggatggtaccaaaattctctggtcatatccggaagggttacgaaagattcttaattatatcaaaaataagtacaacaatccaactatctacataactgaaaacggtttcgatgactacgaaaatggaacggtgacacgtgaagagatactagaagacacaaagagaatagagtaccaccaaaaacatcttcaagaactccagaaagcgatcactgaggatgggtgtgacgtgaaaggctacttcacatggtcgttattggataattttgaatgggaacatggatatgcagtgagatttggtttgtactacgttgactataaaaatggtcttcaacgacatgctaaacattcagctatgtggttcaaacattttcttgagagatccggaaagccaatgccgatggatctgtttaagagtgtcaagagatggtggtctacattacagatgatttaa

SEQ ID NO: 79914 - protein, 534 aa, Arabidopsis thaliana
  peptide (1)..(534): Ceres Seq. ID no. 12653741
MAIKLIALVITLCVASWDVAQGRSLRFSTTPLNRYSFPPHFDFGVASSAYQYEGAVEEGGRSLSIWDNFTHAFPERTNMDNGDVAVDFYHRYKEDIKLIKEMNMDSFRFSLSWSRILPSGKLSDGVNKEGVQFYKNLIDELIENGIKPFVTIYHWDIPQALDDEYGSFLSPRIIDDFRNYARFCFQEFGDKVSMWTTFNEPYVYSVSGYDAGNKAMGRCSKWVNSLCIAGDSGTEPYLVSHHLLLAHAAAVEEFRKCDKISQDSKIGIVLSPYWFEPYDSASNADKEAVERALAFNIGWHLSPLVFGDYPETIKISAGNRLPSFTKEQSMMVKNSFDFIGVNYYTARFVAHDLNVDISRPRFMTDQHLQYKLTNRTGDTISLESDGTKILWSYPEGLRKILNYIKNKYNNPTIYITENGFDDYENGTVTREEILEDTKRIEYHQKHLQELQKAITEDGCDVKGYFTWSLLDNFEWEHGYAVRFGLYYVDYKNGLQRHAKHSAMWFKHFLERSGKPMPMDLFKSVKRWWSTLQMI

SEQ ID NO: 79915 - protein, 456 aa, Arabidopsis thaliana
  peptide (1)..(456): Ceres Seq. ID no. 12653742
MDNGDVAVDFYHRYKEDIKLIKEMNMDSFRFSLSWSRILPSGKLSDGVNKEGVQFYKNLIDELIENGIKPFVTIYHWDIPQALDDEYGSFLSPRIIDDFRNYARFCFQEFGDKVSMWTTFNEPYVYSVSGYDAGNKAMGRCSKWVNSLCIAGDSGTEPYLVSHHLLLAHAAAVEEFRKCDKISQDSKIGIVLSPYWFEPYDSASNADKEAVERALAFNIGWHLSPLVFGDYPETIKISAGNRLPSFTKEQSMMVKNSFDFIGVNYYTARFVAHDLNVDISRPRFMTDQHLQYKLTNRTGDTISLESDGTKILWSYPEGLRKILNYIKNKYNNPTIYITENGFDDYENGTVTREEILEDTKRIEYHQKHLQELQKAITEDGCDVKGYFTWSLLDNFEWEHGYAVRFGLYYVDYKNGLQRHAKHSAMWFKHFLERSGKPMPMDLFKSVKRWWSTLQMI

SEQ ID NO: 79916 - protein, 433 aa, Arabidopsis thaliana
  peptide (1)..(433): Ceres Seq. ID no. 12653743
MNMDSFRFSLSWSRILPSGKLSDGVNKEGVQFYKNLIDELIENGIKPFVTIYHWDIPQALDDEYGSFLSPRIIDDFRNYARFCFQEFGDKVSMWTTFNEPYVYSVSGYDAGNKAMGRCSKWVNSLCIAGDSGTEPYLVSHHLLLAHAAAVEEFRKCDKISQDSKIGIVLSPYWFEPYDSASNADKEAVERALAFNIGWHLSPLVFGDYPETIKISAGNRLPSFTKEQSMMVKNSFDFIGVNYYTARFVAHDLNVDISRPRFMTDQHLQYKLTNRTGDTISLESDGTKILWSYPEGLRKILNYIKNKYNNPTIYITENGFDDYENGTVTREEILEDTKRIEYHQKHLQELQKAITEDGCDVKGYFTWSLLDNFEWEHGYAVRFGLYYVDYKNGLQRHAKHSAMWFKHFLERSGKPMPMDLFKSVKRWWSTLQMI

SEQ ID NO: 79917 - DNA, 687 bp, Arabidopsis thaliana
  misc_feature (1)..(687): Ceres Seq. ID no. 12653751
  misc_feature (1)..(687): Ortholog of  Ceres SEQ ID NO 13581804 as cited in SEQ ID NO 51424
  misc_feature (1)..(687): Ortholog of  Ceres SEQ ID NO 13663874 as cited in SEQ ID NO 67003
atgggaagagggaagattgtgatccaaaggatcgatgattcaacgagtagacaagtcactttctccaaacgaagaaagggccttatcaagaaagccaaagagctagctattctctgtgatgccgaggtcggtctcatcatcttctctagcaccggaaagctctatgactttgcaagctccagcatgaagtcggttattgatagatacaacaagagcaagatcgagcaacaacaactattgaaccccgcatcagaagtcaagttttggcagagagaagctgctgttctaagacaagaactgcatgctttgcaagaaaatcatcggcaaatgatgggagaacagctaaatggtttaagtgttaacgagctaaacagtcttgagaatcaaattgagataagtttgcgtggaattcgtatgagaaaggaacaactgttgactcaagaaatccaagaactaagccaaaagaggaatcttattcatcaggaaaacctcgatttatctaggaaagtacaacggattcatcaagaaaatgtggagctctacaagaaggcttatatggcaaacacaaacgggtttacacaccgtgaagtagctgttgcggatgatgaatcacacactcagattcggctgcaactaagccagcctgaacattccgattatgacactccaccaagagcaaacgaataa

SEQ ID NO: 79918 - protein, 228 aa, Arabidopsis thaliana
  peptide (1)..(228): Ceres Seq. ID no. 12653752
MGRGKIVIQRIDDSTSRQVTFSKRRKGLIKKAKELAILCDAEVGLIIFSSTGKLYDFASSSMKSVIDRYNKSKIEQQQLLNPASEVKFWQREAAVLRQELHALQENHRQMMGEQLNGLSVNELNSLENQIEISLRGIRMRKEQLLTQEIQELSQKRNLIHQENLDLSRKVQRIHQENVELYKKAYMANTNGFTHREVAVADDESHTQIRLQLSQPEHSDYDTPPRANE

SEQ ID NO: 79919 - protein, 167 aa, Arabidopsis thaliana
  peptide (1)..(167): Ceres Seq. ID no. 12653753
MKSVIDRYNKSKIEQQQLLNPASEVKFWQREAAVLRQELHALQENHRQMMGEQLNGLSVNELNSLENQIEISLRGIRMRKEQLLTQEIQELSQKRNLIHQENLDLSRKVQRIHQENVELYKKAYMANTNGFTHREVAVADDESHTQIRLQLSQPEHSDYDTPPRANE

SEQ ID NO: 79920 - protein, 119 aa, Arabidopsis thaliana
  peptide (1)..(119): Ceres Seq. ID no. 12653754
MMGEQLNGLSVNELNSLENQIEISLRGIRMRKEQLLTQEIQELSQKRNLIHQENLDLSRKVQRIHQENVELYKKAYMANTNGFTHREVAVADDESHTQIRLQLSQPEHSDYDTPPRANE

SEQ ID NO: 79921 - DNA, 1092 bp, Arabidopsis thaliana
  misc_feature (1)..(1092): Ceres Seq. ID no. 12653763
  misc_feature (1)..(1092): Ortholog of  Ceres SEQ ID NO 13596048 as cited in SEQ ID NO 68476
  misc_feature (1)..(1092): Ortholog of  Ceres SEQ ID NO 12589137 as cited in SEQ ID NO 0
atggagagattatcaggagagaaagagcagagcgtagaggcgtttggatgggccgcgagagactcctcaggccatctctctccctttgtcttttctagaaggaaaacaggagaagaggaagtgagagtgaaggtgttatattgtggaatatgtcatagtgatctccattgtctcaagaacgaatggcattcctctatttaccctttggttcctggtcacgagattattggagaagtgagtgaaatagggaacaaagtaagtaaattcaatcttggagacaaagtcggtgtgggatgcatcgtagattcctgcagaacttgcgagagttgccgagaagatcaagaaaactactgcacaaaagcaatcgcaacctataacggagttcaccacgatggaacgattaactacggtggatactccgaccatatcgtcgtcgatgaacgttacgctgtcaaaattccacacacattgcctctagtttcggccgcacctttgctttgtgcaggcatctcgatgtacagtcctatgaagtacttcggattgaccggaccggataaacatgtcggaatcgtggggctaggtggtcttggacacattggtgtgagatttgctaaagcatttgggacaaaagtcacggtggttagttcgaccactgggaaatctaaggatgctcttgacactcttggagctgatggattcttggttagtactgatgaagaccaaatgaaggctgcaatgggaactatggatggcataattgatacagtttctgcatcgcattcgatttcacctttgattggactactcaaatccaacggtaaacttgttctactcggtgcaacggagaagccatttgatatatctgcattttccttaatattgggacgaaaatcgatagcgggaagtggtattggaggaatgcaagagacacaagagatgattgactttgcggcagagcatggcataaaagcagaaattgagatcatatccatggattatgtgaacaccgccatggatagacttgccaaaggggatgttagatatcgatttgtcattgacatttctaatacattggctgctactcgatcttaa

SEQ ID NO: 79922 - protein, 363 aa, Arabidopsis thaliana
  peptide (1)..(363): Ceres Seq. ID no. 12653764
MERLSGEKEQSVEAFGWAARDSSGHLSPFVFSRRKTGEEEVRVKVLYCGICHSDLHCLKNEWHSSIYPLVPGHEIIGEVSEIGNKVSKFNLGDKVGVGCIVDSCRTCESCREDQENYCTKAIATYNGVHHDGTINYGGYSDHIVVDERYAVKIPHTLPLVSAAPLLCAGISMYSPMKYFGLTGPDKHVGIVGLGGLGHIGVRFAKAFGTKVTVVSSTTGKSKDALDTLGADGFLVSTDEDQMKAAMGTMDGIIDTVSASHSISPLIGLLKSNGKLVLLGATEKPFDISAFSLILGRKSIAGSGIGGMQETQEMIDFAAEHGIKAEIEIISMDYVNTAMDRLAKGDVRYRFVIDISNTLAATRS

SEQ ID NO: 79923 - protein, 192 aa, Arabidopsis thaliana
  peptide (1)..(192): Ceres Seq. ID no. 12653765
MYSPMKYFGLTGPDKHVGIVGLGGLGHIGVRFAKAFGTKVTVVSSTTGKSKDALDTLGADGFLVSTDEDQMKAAMGTMDGIIDTVSASHSISPLIGLLKSNGKLVLLGATEKPFDISAFSLILGRKSIAGSGIGGMQETQEMIDFAAEHGIKAEIEIISMDYVNTAMDRLAKGDVRYRFVIDISNTLAATRS

SEQ ID NO: 79924 - protein, 188 aa, Arabidopsis thaliana
  peptide (1)..(188): Ceres Seq. ID no. 12653766
MKYFGLTGPDKHVGIVGLGGLGHIGVRFAKAFGTKVTVVSSTTGKSKDALDTLGADGFLVSTDEDQMKAAMGTMDGIIDTVSASHSISPLIGLLKSNGKLVLLGATEKPFDISAFSLILGRKSIAGSGIGGMQETQEMIDFAAEHGIKAEIEIISMDYVNTAMDRLAKGDVRYRFVIDISNTLAATRS

SEQ ID NO: 79925 - DNA, 1403 bp, Arabidopsis thaliana
  misc_feature (1)..(1403): Ceres Seq. ID no. 12653767
  misc_feature (1)..(1403): Ortholog of  Ceres SEQ ID NO 13596048 as cited in SEQ ID NO 68476
  misc_feature (1)..(1403): Ortholog of  Ceres SEQ ID NO 12589137 as cited in SEQ ID NO 0
aataagtgtcattcaaaagaataaaatcaaatacttacttttgaatccgtttttttcattgtttgatcgattatgggaaaggttcttcagaaagaggcgttcggattagccgcgaaagacaattccggagttctctcgcctttcagtttcactagaagggaaacaggagaaaaggatgtgaggttcaaagtgttattttgtggaatttgtcactctgatttgcatatggtcaagaacgagtggggaatgtctacttatcctcttgtcccagggcatgagatcgtgggcgtggtgactgaagtcggagccaaagtgactaaattcaaaaccggagaaaaagtcggagttgggtgtttggtcagctcgtgcgggtcatgtgacagctgcaccgaaggtatggaaaactattgtccaaaatcaatccaaacgtacggattcccgtactacgacaacaccataacatacggtggttactccgaccacatggtttgcgaggaaggtttcgtcatccgtattccagacaatctccccttggacgccgccgcaccgctcctctgtgccggtatcacggtctattcccctatgaagtatcacgggctcgacaaacccggtatgcacatcggtgtggtaggattaggcggtttaggtcatgtaggagtgaaatttgccaaggctatgggtactaaggttacggttattagtacttcggagaaaaagagagatgaggcgattaatcggcttggtgcggatgctttcttggtgagccgtgacccaaaacagattaaggatgcaatgggtactatggatggtataattgataccgtctctgcgactcattcacttcttccgttgctcggtttgctgaagcataagggaaaacttgttatggttggtgcacccgagaagccactcgagctacctgtcatgcctctcatctttgagaggaagatggtaatgggaagtatgataggagggataaaagagacccaggaaatgatagatatggccgggaaacacaacatcactgcggatattgagcttatctctgccgattatgtcaacaccgccatggaacggctagagaaagccgacgttaggtaccgctttgtgattgatgttgccaacacattgaagcctaatcctaatttataagttttaagcattaaacttcctcaaatgttattttcttgtttggtttgtcgtactaattaagttttgtgttgttgtataactatataatttggtatgcttaatccaataaatgaatagtatgatatatatgataagattttgggggtaagccaagagttatatattagtatctaaggtttggataaagaacagtactgttaaataccaaaaatgtaaagatgatgaaagaataaaaatcattttacagtgtg

SEQ ID NO: 79926 - protein, 359 aa, Arabidopsis thaliana
  peptide (1)..(359): Ceres Seq. ID no. 12653768
MGKVLQKEAFGLAAKDNSGVLSPFSFTRRETGEKDVRFKVLFCGICHSDLHMVKNEWGMSTYPLVPGHEIVGVVTEVGAKVTKFKTGEKVGVGCLVSSCGSCDSCTEGMENYCPKSIQTYGFPYYDNTITYGGYSDHMVCEEGFVIRIPDNLPLDAAAPLLCAGITVYSPMKYHGLDKPGMHIGVVGLGGLGHVGVKFAKAMGTKVTVISTSEKKRDEAINRLGADAFLVSRDPKQIKDAMGTMDGIIDTVSATHSLLPLLGLLKHKGKLVMVGAPEKPLELPVMPLIFERKMVMGSMIGGIKETQEMIDMAGKHNITADIELISADYVNTAMERLEKADVRYRFVIDVANTLKPNPNL

SEQ ID NO: 79927 - protein, 308 aa, Arabidopsis thaliana
  peptide (1)..(308): Ceres Seq. ID no. 12653769
MVKNEWGMSTYPLVPGHEIVGVVTEVGAKVTKFKTGEKVGVGCLVSSCGSCDSCTEGMENYCPKSIQTYGFPYYDNTITYGGYSDHMVCEEGFVIRIPDNLPLDAAAPLLCAGITVYSPMKYHGLDKPGMHIGVVGLGGLGHVGVKFAKAMGTKVTVISTSEKKRDEAINRLGADAFLVSRDPKQIKDAMGTMDGIIDTVSATHSLLPLLGLLKHKGKLVMVGAPEKPLELPVMPLIFERKMVMGSMIGGIKETQEMIDMAGKHNITADIELISADYVNTAMERLEKADVRYRFVIDVANTLKPNPNL

SEQ ID NO: 79928 - protein, 301 aa, Arabidopsis thaliana
  peptide (1)..(301): Ceres Seq. ID no. 12653770
MSTYPLVPGHEIVGVVTEVGAKVTKFKTGEKVGVGCLVSSCGSCDSCTEGMENYCPKSIQTYGFPYYDNTITYGGYSDHMVCEEGFVIRIPDNLPLDAAAPLLCAGITVYSPMKYHGLDKPGMHIGVVGLGGLGHVGVKFAKAMGTKVTVISTSEKKRDEAINRLGADAFLVSRDPKQIKDAMGTMDGIIDTVSATHSLLPLLGLLKHKGKLVMVGAPEKPLELPVMPLIFERKMVMGSMIGGIKETQEMIDMAGKHNITADIELISADYVNTAMERLEKADVRYRFVIDVANTLKPNPNL

SEQ ID NO: 79929 - DNA, 1455 bp, Arabidopsis thaliana
  misc_feature (1)..(1455): Ceres Seq. ID no. 12653777
  misc_feature (1)..(1455): Ortholog of  Ceres SEQ ID NO 13659971 as cited in SEQ ID NO 67565
  misc_feature (1)..(1455): Ortholog of  Ceres SEQ ID NO 13500385 as cited in SEQ ID NO 67583
atgaagcacagcggtgggaaccaagcctgctatgttcttggtcaaaagaccccaagcatccgagatctctactcgttgggacacaaactaggtcaaggacagtttgggacgacttacatgtgcaaagagatctcaacagggcgtgaatacgcatgcaagtctataacaaaacgaaagttgatatcaaaggaagatgtggaagacgtacgcagggaaattcaaatcatgcaccatctggctggctacaagaacattgtcaccattaaaggtgcttacgaggatccattgtatgttcacatcgtgatggagctttgctcaggtggggaattgtttgacagaattatccagagaggacattacagcgagagaaaagcagctgagctgataaagatcatcgttggtgttgttgaggcttgccattcgcttggtgtcatgcatagagatctaaagcccgaaaatttcttgttggttaacaaggacgacgacttctctctcaaagccattgattttgggctttccgtgttcttcaaaccaggtcaaatattcgaggatgtggttggaagtccgtattatgttgctcctgaggttctgctcaagcactacggacccgaggctgatgtgtggaccgcaggggtcatactgtacatattggtgagcggagtccctccgttctgggcagaaacacagcaagggatatttgatgcagtgctgaagggacatattgactttgactccgacccttggcccctaatatccgactctgcaaaaaacttgatccgtggcatgctatgttcccggccctctgagcgactgacagctcatcaagtattgcgccatccttggatctgtgaaaatggagttgcgccagacagagcactagatcctgctgtgctttctcgtcttaaacagttctctgcgatgaataaactaaagcagatggctttacgggtaatagctgagagtctctcggaggaagaaattgctggactgaaggaaatgttcaaagcaatggacacggataacagtggagcgattacgtttgacgagctgaaagccgggttgcgaagatatggttcaaccctcaaggatactgagattcgtgaccttatggaggctgcagatattgacaagagtgggaccatagattatggtgaattcattgctgcaacaatccatctgaacaaattagagcgtgaagaacatcttctgtcagccttcaggtactttgacaaagatgggagcggttacatcactatcgatgagctacagcacgcatgtgctgaacagggaatgagtgatgtctttctagaagatgtgatcaaggaagtcgaccaagacaatgatggaaggattgactacggggagtttgtagctatgatgcagaaaggcattgttggaagaacaatgaggaaaagcataaacatgagcatcaggaacaatgccgtctcgcagtga

SEQ ID NO: 79930 - protein, 484 aa, Arabidopsis thaliana
  peptide (1)..(484): Ceres Seq. ID no. 12653778
MKHSGGNQACYVLGQKTPSIRDLYSLGHKLGQGQFGTTYMCKEISTGREYACKSITKRKLISKEDVEDVRREIQIMHHLAGYKNIVTIKGAYEDPLYVHIVMELCSGGELFDRIIQRGHYSERKAAELIKIIVGVVEACHSLGVMHRDLKPENFLLVNKDDDFSLKAIDFGLSVFFKPGQIFEDVVGSPYYVAPEVLLKHYGPEADVWTAGVILYILVSGVPPFWAETQQGIFDAVLKGHIDFDSDPWPLISDSAKNLIRGMLCSRPSERLTAHQVLRHPWICENGVAPDRALDPAVLSRLKQFSAMNKLKQMALRVIAESLSEEEIAGLKEMFKAMDTDNSGAITFDELKAGLRRYGSTLKDTEIRDLMEAADIDKSGTIDYGEFIAATIHLNKLEREEHLLSAFRYFDKDGSGYITIDELQHACAEQGMSDVFLEDVIKEVDQDNDGRIDYGEFVAMMQKGIVGRTMRKSINMSIRNNAVSQ

SEQ ID NO: 79931 - protein, 445 aa, Arabidopsis thaliana
  peptide (1)..(445): Ceres Seq. ID no. 12653779
MCKEISTGREYACKSITKRKLISKEDVEDVRREIQIMHHLAGYKNIVTIKGAYEDPLYVHIVMELCSGGELFDRIIQRGHYSERKAAELIKIIVGVVEACHSLGVMHRDLKPENFLLVNKDDDFSLKAIDFGLSVFFKPGQIFEDVVGSPYYVAPEVLLKHYGPEADVWTAGVILYILVSGVPPFWAETQQGIFDAVLKGHIDFDSDPWPLISDSAKNLIRGMLCSRPSERLTAHQVLRHPWICENGVAPDRALDPAVLSRLKQFSAMNKLKQMALRVIAESLSEEEIAGLKEMFKAMDTDNSGAITFDELKAGLRRYGSTLKDTEIRDLMEAADIDKSGTIDYGEFIAATIHLNKLEREEHLLSAFRYFDKDGSGYITIDELQHACAEQGMSDVFLEDVIKEVDQDNDGRIDYGEFVAMMQKGIVGRTMRKSINMSIRNNAVSQ

SEQ ID NO: 79932 - protein, 409 aa, Arabidopsis thaliana
  peptide (1)..(409): Ceres Seq. ID no. 12653780
MHHLAGYKNIVTIKGAYEDPLYVHIVMELCSGGELFDRIIQRGHYSERKAAELIKIIVGVVEACHSLGVMHRDLKPENFLLVNKDDDFSLKAIDFGLSVFFKPGQIFEDVVGSPYYVAPEVLLKHYGPEADVWTAGVILYILVSGVPPFWAETQQGIFDAVLKGHIDFDSDPWPLISDSAKNLIRGMLCSRPSERLTAHQVLRHPWICENGVAPDRALDPAVLSRLKQFSAMNKLKQMALRVIAESLSEEEIAGLKEMFKAMDTDNSGAITFDELKAGLRRYGSTLKDTEIRDLMEAADIDKSGTIDYGEFIAATIHLNKLEREEHLLSAFRYFDKDGSGYITIDELQHACAEQGMSDVFLEDVIKEVDQDNDGRIDYGEFVAMMQKGIVGRTMRKSINMSIRNNAVSQ

SEQ ID NO: 79933 - DNA, 1014 bp, Arabidopsis thaliana
  misc_feature (1)..(1014): Ceres Seq. ID no. 12653781
  misc_feature (1)..(1014): Ortholog of  Ceres SEQ ID NO 13656460 as cited in SEQ ID NO 65861
gacgacgactttgattagagcagagagatggttggttcgttggttcgtcggaggagaagagaatgtgcatagcagtatttctgtggcaatcgcatccgctgtacccttttcttctatttctcaacagagatgaagatcacaacagggcgacagaggcgctgcgttggtgggaagacggagagacggtgggaggaagagaccttgttggcggcgggacgtggctgggctgcacgaggcatggccgtctggctttcctcaccaatttcaaggaagcctcctccttccctgctgctaaatcccgtggagatctgcctcttcgttacttgcagagcgaaaagagtccggccgagtttgccgaggagatccaagacgaaatttcactctacaatggctttaacctggttgtcgctcatgtcttgtccaaatccatgatttacattaccaaccgaccaccccacggtgacaagctcgtgacgcaagtctctcccgggatccatgtcctttccaacgccaacctcgactccccttggcccaagtgtctgaggctgagggagggtttccaacagcttctggctgagaacgggagcggtgaattcccggtgaagaccatggtggaggaggtgatgaccaatactgtcaaggacgaagaaaccgagctacctcacgttttcacaccagagacggaataccatctcagctccatcttcgtcgacatgcagagaccaactgggcgttatgggaccagaagcatctctgcgatcatcgtcaagtcccatggagatggtggtggtgatggtgagatttgcttctacgagaggcatcttgaagaaggcgattcatggaaggaacacactcaacagtttgtaataatacaaaaccaaagcatttgattagctagccaggcttatttcgcgagcttcccttgcttgtaacattgagaaatcaaaactctcacatatgttgtacatgtaaacacaaaacagaagacagagctgatctcttttattccaaacc

SEQ ID NO: 79934 - protein, 275 aa, Arabidopsis thaliana
  peptide (1)..(275): Ceres Seq. ID no. 12653782
MCIAVFLWQSHPLYPFLLFLNRDEDHNRATEALRWWEDGETVGGRDLVGGGTWLGCTRHGRLAFLTNFKEASSFPAAKSRGDLPLRYLQSEKSPAEFAEEIQDEISLYNGFNLVVAHVLSKSMIYITNRPPHGDKLVTQVSPGIHVLSNANLDSPWPKCLRLREGFQQLLAENGSGEFPVKTMVEEVMTNTVKDEETELPHVFTPETEYHLSSIFVDMQRPTGRYGTRSISAIIVKSHGDGGGDGEICFYERHLEEGDSWKEHTQQFVIIQNQSI

SEQ ID NO: 79935 - protein, 153 aa, Arabidopsis thaliana
  peptide (1)..(153): Ceres Seq. ID no. 12653783
MIYITNRPPHGDKLVTQVSPGIHVLSNANLDSPWPKCLRLREGFQQLLAENGSGEFPVKTMVEEVMTNTVKDEETELPHVFTPETEYHLSSIFVDMQRPTGRYGTRSISAIIVKSHGDGGGDGEICFYERHLEEGDSWKEHTQQFVIIQNQSI

SEQ ID NO: 79936 - DNA, 1656 bp, Arabidopsis thaliana
  misc_feature (1)..(1656): Ceres Seq. ID no. 12653795
  misc_feature (1)..(1656): Ortholog of  Ceres SEQ ID NO 15170885 as cited in SEQ ID NO 54326
  misc_feature (1)..(1656): Ortholog of  Ceres SEQ ID NO 14311609 as cited in SEQ ID NO 58341
atggcctctttgaagttgaagaaaagggataatggcgctgaacccgacaagaaaaagctggtcatcgccggtattcgccaccagttactccttctccttcgccgccgtcaccgtctatttccgctggtatctgccgtctccggctgtctcctcctcatcctcttctcattctccaccctctctcctcctccattgatccatcataacaatcaagtggccgtcgaacccaatccaaccactccatttcgtgtacccgaaaatggcggaaggtcggatcgccagttatggagctcgagattgtccaacttgtactatgcctgcagtaatgcaactgacacctttcaagttacggatacgagaagccaaaccaatcggtatttactgatcgcaacaagcggagggttaaaccaacagcggacagggataatagatgctgtagtagcggcatacattctaaacgccactcttgtggtccctaaacttgaccagaagtcgtactggaaggacaccagcaactttgaggatatatttgatgttgattggttcatatcgcatctctccaaagacgtgaagatcatcaaggagcttcctaaagaagagcagtcaagaatatccaccagcctacagtcaatgcgtgtcccaaggaagtgcacgccttcttgctacttgcagcgtgttttgcccattcttactaagaaacatgttgtacaactctccaaattcgattacaggctgtccaacgctcttgatacagagctccagaaactgcgttgtagagtcaactaccatgccgtcaggtatacagagtctatcaacaggatgggccaattgttggttgaccggatgagaaaaaaggccaaacattttgttgcccttcatctcagattcgaacctgatatgctggccttctccggatgctattacggcggtggtcaaaaggagagactcgaactcggagctatgagaagaaggtggaaaacgttacatgcggcaaaccctgaaaaggtacggcggcacgggagatgtcccctgacgccagaggagattggtctgatgctcagaggcttaggttttgggaaagaggttcacttgtacgttgcatcaggcgaggtatacggaggggaggatacattggcacctttaagagctctgtttccgaatcttcatacaaaagagacactgacctccaagaaagaactggctccgtttgcaaacttctcatcacgcatggctgctcttgacttcattgtctgtgataagagcgacgcatttgtcacaaacaacaacggcaacatggctcgaatcttagctgggagaaggagatacttgggacacaaagtaaccatccgtccaaacgccaagaaactctacgaaatcttcaaaaatagacacaacatgacatggggtgagttctcatcgaaggtcagaagataccagacgggtttcatgggggagccagatgaaatgaaaccaggagagggggagttccatgagaacccagcctcctgcatttgtcgaacctctgaagcaagagtcaaagaaaaagcaaaacatgtaaatgaagatgactcatcggagtactcagagattggtaatgtccccatatccagtagaagcgatttggatcactcacaatttgatgaagtgatcttctga

SEQ ID NO: 79937 - protein, 551 aa, Arabidopsis thaliana
  peptide (1)..(551): Ceres Seq. ID no. 12653796
MASLKLKKRDNGAEPDKKKLVIAGIRHQLLLLLRRRHRLFPLVSAVSGCLLLILFSFSTLSPPPLIHHNNQVAVEPNPTTPFRVPENGGRSDRQLWSSRLSNLYYACSNATDTFQVTDTRSQTNRYLLIATSGGLNQQRTGIIDAVVAAYILNATLVVPKLDQKSYWKDTSNFEDIFDVDWFISHLSKDVKIIKELPKEEQSRISTSLQSMRVPRKCTPSCYLQRVLPILTKKHVVQLSKFDYRLSNALDTELQKLRCRVNYHAVRYTESINRMGQLLVDRMRKKAKHFVALHLRFEPDMLAFSGCYYGGGQKERLELGAMRRRWKTLHAANPEKVRRHGRCPLTPEEIGLMLRGLGFGKEVHLYVASGEVYGGEDTLAPLRALFPNLHTKETLTSKKELAPFANFSSRMAALDFIVCDKSDAFVTNNNGNMARILAGRRRYLGHKVTIRPNAKKLYEIFKNRHNMTWGEFSSKVRRYQTGFMGEPDEMKPGEGEFHENPASCICRTSEARVKEKAKHVNEDDSSEYSEIGNVPISSRSDLDHSQFDEVIF

SEQ ID NO: 79938 - protein, 341 aa, Arabidopsis thaliana
  peptide (1)..(341): Ceres Seq. ID no. 12653797
MRVPRKCTPSCYLQRVLPILTKKHVVQLSKFDYRLSNALDTELQKLRCRVNYHAVRYTESINRMGQLLVDRMRKKAKHFVALHLRFEPDMLAFSGCYYGGGQKERLELGAMRRRWKTLHAANPEKVRRHGRCPLTPEEIGLMLRGLGFGKEVHLYVASGEVYGGEDTLAPLRALFPNLHTKETLTSKKELAPFANFSSRMAALDFIVCDKSDAFVTNNNGNMARILAGRRRYLGHKVTIRPNAKKLYEIFKNRHNMTWGEFSSKVRRYQTGFMGEPDEMKPGEGEFHENPASCICRTSEARVKEKAKHVNEDDSSEYSEIGNVPISSRSDLDHSQFDEVIF

SEQ ID NO: 79939 - protein, 278 aa, Arabidopsis thaliana
  peptide (1)..(278): Ceres Seq. ID no. 12653798
MGQLLVDRMRKKAKHFVALHLRFEPDMLAFSGCYYGGGQKERLELGAMRRRWKTLHAANPEKVRRHGRCPLTPEEIGLMLRGLGFGKEVHLYVASGEVYGGEDTLAPLRALFPNLHTKETLTSKKELAPFANFSSRMAALDFIVCDKSDAFVTNNNGNMARILAGRRRYLGHKVTIRPNAKKLYEIFKNRHNMTWGEFSSKVRRYQTGFMGEPDEMKPGEGEFHENPASCICRTSEARVKEKAKHVNEDDSSEYSEIGNVPISSRSDLDHSQFDEVIF

SEQ ID NO: 79940 - DNA, 1728 bp, Arabidopsis thaliana
  misc_feature (1)..(1728): Ceres Seq. ID no. 12653811
  misc_feature (1)..(1728): Ortholog of  Ceres SEQ ID NO 13593889 as cited in SEQ ID NO 53305
  misc_feature (1)..(1728): Ortholog of  Ceres SEQ ID NO 13581959 as cited in SEQ ID NO 56156
  misc_feature (1)..(1728): Ortholog of  Ceres SEQ ID NO 15171809 as cited in SEQ ID NO 57329
atggtgatggaggacaacgagagttgcgctagtagagttattttcgacgccttacctacctcccaggccactatggaccgccgtgagcgcatcaaaatggaggtcttcgatgaggttctccgccgtctccgtcaatcggacattgaagacgcccatctccctggtttcgaagacgacctctggaatcacttcaatcgcctccctgccaggtatgctttggatgtgaatgtggagagggctgaagacgtcttgatgcacaagcgattgctgcattctgcttacgatccccagaatcggcctgctatcgaagttcatctcgtccaggttcaacctgccgggatctctgctgacttggactctacttctaatgatgctggtcattcttctcctacccgaaaaagcattcatccgccgcctgcctttggttcatcccctaatcttgaagcacttgcacttgcagctagtttatcccaagacgaggatgcagacaactctgttcataacaattcactctattcacggcccttgcatgagataaccttttccacagaagacaagcctaaactcctttttcagttaactgccttgcttgctgagcttgggctgaacattcaagaggcacatgctttctctacaactgatggctactcactagatgtttttgttgttgatggctggccgtacgaggaaacagagagacttaggatatcattggagaaagaagcagcaaagatcgagttgcagagccaaagctggcctatgcagcaatccttctctccggaaaaggaaaatgggcaaacaggtgccagaacgcatgttccaatacccaatgacggaactgatgtttgggaaatcaaccttaaacacctaaaatttgggcataaaatagcgtctggttcttatggagatctgtataaaggtacatactgtagccaggaagttgctatcaaagtcctaaagccagagcgtctagactcagatctagagaaagagtttgcccaagaagtctttattatgaggaaagttagacacaaaaatgttgttcagttcattggtgcttgcaccaagcctccacatctgtgtatcgttacagaattcatgcccggtggaagtgtatatgactatctacacaagcaaaagggcgtctttaagcttccaactttgtttaaagtagctatagatatttgcaaagggatgagctacttacaccaaaataacataattcacagagatttgaaggctgccaacctcttaatggacgaaaatgaggtggttaaggttgcagactttggggtggctagagtgaaagcacaaactggagttatgacagctgaaactggaacatatcgctggatggctccagaggtgatagaacacaagccatatgatcacaaggctgacgtattcagctacgggattgtgctatgggagttgttgactgggaagcttccatatgaatacatgacgccgttgcaggcagcagtaggggttgtccaaaagggattaaggccaacaataccaaagaacacgcatccgaaattggcagagctattggagagattgtgggagcatgattcgacgcagagaccagacttctcagagatcatagagcagcttcaagagatagccaaggaggtaggagaagagggagaggagaagaaaaagtcgtcaacaggactaggagggggtatatttgcagccctgaggagaagcaccacacatcattga

SEQ ID NO: 79941 - protein, 575 aa, Arabidopsis thaliana
  peptide (1)..(575): Ceres Seq. ID no. 12653812
MVMEDNESCASRVIFDALPTSQATMDRRERIKMEVFDEVLRRLRQSDIEDAHLPGFEDDLWNHFNRLPARYALDVNVERAEDVLMHKRLLHSAYDPQNRPAIEVHLVQVQPAGISADLDSTSNDAGHSSPTRKSIHPPPAFGSSPNLEALALAASLSQDEDADNSVHNNSLYSRPLHEITFSTEDKPKLLFQLTALLAELGLNIQEAHAFSTTDGYSLDVFVVDGWPYEETERLRISLEKEAAKIELQSQSWPMQQSFSPEKENGQTGARTHVPIPNDGTDVWEINLKHLKFGHKIASGSYGDLYKGTYCSQEVAIKVLKPERLDSDLEKEFAQEVFIMRKVRHKNVVQFIGACTKPPHLCIVTEFMPGGSVYDYLHKQKGVFKLPTLFKVAIDICKGMSYLHQNNIIHRDLKAANLLMDENEVVKVADFGVARVKAQTGVMTAETGTYRWMAPEVIEHKPYDHKADVFSYGIVLWELLTGKLPYEYMTPLQAAVGVVQKGLRPTIPKNTHPKLAELLERLWEHDSTQRPDFSEIIEQLQEIAKEVGEEGEEKKKSSTGLGGGIFAALRRSTTHH

SEQ ID NO: 79942 - protein, 573 aa, Arabidopsis thaliana
  peptide (1)..(573): Ceres Seq. ID no. 12653813
MEDNESCASRVIFDALPTSQATMDRRERIKMEVFDEVLRRLRQSDIEDAHLPGFEDDLWNHFNRLPARYALDVNVERAEDVLMHKRLLHSAYDPQNRPAIEVHLVQVQPAGISADLDSTSNDAGHSSPTRKSIHPPPAFGSSPNLEALALAASLSQDEDADNSVHNNSLYSRPLHEITFSTEDKPKLLFQLTALLAELGLNIQEAHAFSTTDGYSLDVFVVDGWPYEETERLRISLEKEAAKIELQSQSWPMQQSFSPEKENGQTGARTHVPIPNDGTDVWEINLKHLKFGHKIASGSYGDLYKGTYCSQEVAIKVLKPERLDSDLEKEFAQEVFIMRKVRHKNVVQFIGACTKPPHLCIVTEFMPGGSVYDYLHKQKGVFKLPTLFKVAIDICKGMSYLHQNNIIHRDLKAANLLMDENEVVKVADFGVARVKAQTGVMTAETGTYRWMAPEVIEHKPYDHKADVFSYGIVLWELLTGKLPYEYMTPLQAAVGVVQKGLRPTIPKNTHPKLAELLERLWEHDSTQRPDFSEIIEQLQEIAKEVGEEGEEKKKSSTGLGGGIFAALRRSTTHH

SEQ ID NO: 79943 - protein, 551 aa, Arabidopsis thaliana
  peptide (1)..(551): Ceres Seq. ID no. 12653814
MDRRERIKMEVFDEVLRRLRQSDIEDAHLPGFEDDLWNHFNRLPARYALDVNVERAEDVLMHKRLLHSAYDPQNRPAIEVHLVQVQPAGISADLDSTSNDAGHSSPTRKSIHPPPAFGSSPNLEALALAASLSQDEDADNSVHNNSLYSRPLHEITFSTEDKPKLLFQLTALLAELGLNIQEAHAFSTTDGYSLDVFVVDGWPYEETERLRISLEKEAAKIELQSQSWPMQQSFSPEKENGQTGARTHVPIPNDGTDVWEINLKHLKFGHKIASGSYGDLYKGTYCSQEVAIKVLKPERLDSDLEKEFAQEVFIMRKVRHKNVVQFIGACTKPPHLCIVTEFMPGGSVYDYLHKQKGVFKLPTLFKVAIDICKGMSYLHQNNIIHRDLKAANLLMDENEVVKVADFGVARVKAQTGVMTAETGTYRWMAPEVIEHKPYDHKADVFSYGIVLWELLTGKLPYEYMTPLQAAVGVVQKGLRPTIPKNTHPKLAELLERLWEHDSTQRPDFSEIIEQLQEIAKEVGEEGEEKKKSSTGLGGGIFAALRRSTTHH

SEQ ID NO: 79944 - DNA, 2967 bp, Arabidopsis thaliana
  misc_feature (1)..(2967): Ceres Seq. ID no. 12653831
  misc_feature (1)..(2967): Ortholog of  Ceres SEQ ID NO 13600595 as cited in SEQ ID NO 629
  misc_feature (1)..(2967): Ortholog of  Ceres SEQ ID NO 13593379 as cited in SEQ ID NO 20573
atgtggcccagtatcattgacaaagctagaattgggggacttaacaccatccaaacttatgttttctggaatgtccatgagcctgaacaaggcaagtatgatttcaaggggagatttgacttggtgaaattcatcaaactaatccacgagaaaggtctctatgtcactctcagactcggaccctttatccaagccgaatggaaccacggagggttgccgtactggctacgcgaggtcccagatgtttacttccgtacaaataatgaaccttttaaggaacatacagagagatatgtgaggaaaatacttgggatgatgaaggaagagaagctgttcgcttcacaaggaggtcccatcatcttgggacagatagagaatgagtacaacgcggttcagctagcctacaaggagaatggagagaagtatataaaatgggcagcaaatttggtggagtcaatgaatctgggaatcccctgggttatgtgcaaacaaaacgatgctcctggcaatctgattaatgcttgtaatggaaggcattgcggagatactttcccaggaccaaacagacacgataagccctccttatggaccgagaattggactactcagtttcgagtttttggggatcctccaacacagagaacagtcgaagatattgcattctcagtcgctagatacttctctaagaacggatcccatgtcaactactacatgtaccatggcggaacaaacttcggacgcacgtctgctcatttcgttaccactcgttactatgacgatgcgccacttgacgaatttggtttggagaaagctccaaaatacggtcacctaaaacatgtgcacagagcacttagattgtgcaagaaggcacttttttggggtcaacttcgcgcccagacacttggtcccgataccgaggttaggtactacgagcagccagggacaaaagtgtgtgcggctttcttatcgaacaataacacaagagatactaatacgattaaattcaaaggtcaagattacgttttaccgtctcgttctatcagcatcttaccggattgtaaaacagtcgtttacaatactgcacagattgtagcccaacacagttggagagattttgtcaagtcagagaagacaagcaaaggtctcaaatttgagatgtttagtgaaaatattccttccttacttgacggtgattctttgattccgggggagctttattacttaactaaagacaaaacagattatgcttggtataccacaagcgtaaagattgacgaagatgactttccagaccaaaaaggtctgaagactatactgagagtagcgagtcttggtcacgcactgatcgtttacgttaacggagagtacgcagggaaagcacatggacgccatgaaatgaagagtttcgagtttgcaaaaccagtgaactttaaaaccggagataatcgcatttcaattttgggtgtactaaccggattaccagacagtggatcatacatggaacacaggtttgctggtccacgtgctatttcaatcatcggtttaaagtcaggaacgcgagatttgaccgagaacaatgaatggggacacttggccggtttggaaggtgaaaagaaagaggtgtacacagaggaaggatctaagaaggtgaaatgggagaaagatggtaaacgtaagcctcttacgtggtacaagacctactttgagacaccagagggagtgaacgcggtcgcgattaggatgaaagcaatggggaagggattgatttgggttaatggaattggcgtagggagatattggatgtctttcctttctccactgggagagccaactcaaacggagtaccatataccgagatctttcatgaagggggagaagaagaagaacatgctggtgattctcgaggaagaaccaggggtgaagttagagtctattgatttcgtgttggtgaatagagacacaatctgtagtaatgtcggggaggattacccagtatcggtgaaatcgtggaagagagaagggccaaagatagtttcgagaagcaaagatatgaggctaaaggcagtgatgaggtgtccaccggagaaacaaatggtggaagtacaatttgcaagcttcggagatccgacaggaacttgtggtaacttcacaatggggaagtgctctgcatctaagtcaaaggaggtggtcgagaaggagtgtttgggtaggaattattgttccatagtagtagcgagggagacttttggggacaaagggtgtccggagatagtgaagacattggcagtgcaagtcaagtgtgagaagaaagaaggaaaacaagatgagaagaagaagaaagaagataaagacgaagaggaagaggacgatgaagatgatgatgaagaagaagaagaagaagacaaagagaacaaagatacaaaggatatggagaacaaaaatcaagatattcttgattccgattctgccctggtgtcggatctaggttttggccctttctctacggtagttgttaatgtccctctaatcggtggagcggctccgcctcagccccgcttcaatttaatgcctccgtcaaactatgtcgctggtttgggtcgtggggctgcagggtttactacccgctccgatattggtcctgctcgtgctaatggcgatggaaacgctgacgtgaatcacaagtttgatgattttgaagggcatgatgccggattgttcgctaatgccgagagtgatgaccaagacaaagaggctgatgctatttgggacgcaattgataggaggatggattcgaggaggaaagacagaagagaagcgaagctcaagcaagaaatcgagaattacagagcctccaaccctaaagtttctgggcagtttgtggatttgacgagaaagttgcatactttgtctgaggatgaatgggatagtattccagagattgggaattactcgcatagattgtattag

SEQ ID NO: 79945 - protein, 988 aa, Arabidopsis thaliana
  peptide (1)..(988): Ceres Seq. ID no. 12653832
MWPSIIDKARIGGLNTIQTYVFWNVHEPEQGKYDFKGRFDLVKFIKLIHEKGLYVTLRLGPFIQAEWNHGGLPYWLREVPDVYFRTNNEPFKEHTERYVRKILGMMKEEKLFASQGGPIILGQIENEYNAVQLAYKENGEKYIKWAANLVESMNLGIPWVMCKQNDAPGNLINACNGRHCGDTFPGPNRHDKPSLWTENWTTQFRVFGDPPTQRTVEDIAFSVARYFSKNGSHVNYYMYHGGTNFGRTSAHFVTTRYYDDAPLDEFGLEKAPKYGHLKHVHRALRLCKKALFWGQLRAQTLGPDTEVRYYEQPGTKVCAAFLSNNNTRDTNTIKFKGQDYVLPSRSISILPDCKTVVYNTAQIVAQHSWRDFVKSEKTSKGLKFEMFSENIPSLLDGDSLIPGELYYLTKDKTDYAWYTTSVKIDEDDFPDQKGLKTILRVASLGHALIVYVNGEYAGKAHGRHEMKSFEFAKPVNFKTGDNRISILGVLTGLPDSGSYMEHRFAGPRAISIIGLKSGTRDLTENNEWGHLAGLEGEKKEVYTEEGSKKVKWEKDGKRKPLTWYKTYFETPEGVNAVAIRMKAMGKGLIWVNGIGVGRYWMSFLSPLGEPTQTEYHIPRSFMKGEKKKNMLVILEEEPGVKLESIDFVLVNRDTICSNVGEDYPVSVKSWKREGPKIVSRSKDMRLKAVMRCPPEKQMVEVQFASFGDPTGTCGNFTMGKCSASKSKEVVEKECLGRNYCSIVVARETFGDKGCPEIVKTLAVQVKCEKKEGKQDEKKKKEDKDEEEEDDEDDDEEEEEEDKENKDTKDMENKNQDILDSDSALVSDLGFGPFSTVVVNVPLIGGAAPPQPRFNLMPPSNYVAGLGRGAAGFTTRSDIGPARANGDGNADVNHKFDDFEGHDAGLFANAESDDQDKEADAIWDAIDRRMDSRRKDRREAKLKQEIENYRASNPKVSGQFVDLTRKLHTLSEDEWDSIPEIGNYSHRLY

SEQ ID NO: 79946 - protein, 884 aa, Arabidopsis thaliana
  peptide (1)..(884): Ceres Seq. ID no. 12653833
MMKEEKLFASQGGPIILGQIENEYNAVQLAYKENGEKYIKWAANLVESMNLGIPWVMCKQNDAPGNLINACNGRHCGDTFPGPNRHDKPSLWTENWTTQFRVFGDPPTQRTVEDIAFSVARYFSKNGSHVNYYMYHGGTNFGRTSAHFVTTRYYDDAPLDEFGLEKAPKYGHLKHVHRALRLCKKALFWGQLRAQTLGPDTEVRYYEQPGTKVCAAFLSNNNTRDTNTIKFKGQDYVLPSRSISILPDCKTVVYNTAQIVAQHSWRDFVKSEKTSKGLKFEMFSENIPSLLDGDSLIPGELYYLTKDKTDYAWYTTSVKIDEDDFPDQKGLKTILRVASLGHALIVYVNGEYAGKAHGRHEMKSFEFAKPVNFKTGDNRISILGVLTGLPDSGSYMEHRFAGPRAISIIGLKSGTRDLTENNEWGHLAGLEGEKKEVYTEEGSKKVKWEKDGKRKPLTWYKTYFETPEGVNAVAIRMKAMGKGLIWVNGIGVGRYWMSFLSPLGEPTQTEYHIPRSFMKGEKKKNMLVILEEEPGVKLESIDFVLVNRDTICSNVGEDYPVSVKSWKREGPKIVSRSKDMRLKAVMRCPPEKQMVEVQFASFGDPTGTCGNFTMGKCSASKSKEVVEKECLGRNYCSIVVARETFGDKGCPEIVKTLAVQVKCEKKEGKQDEKKKKEDKDEEEEDDEDDDEEEEEEDKENKDTKDMENKNQDILDSDSALVSDLGFGPFSTVVVNVPLIGGAAPPQPRFNLMPPSNYVAGLGRGAAGFTTRSDIGPARANGDGNADVNHKFDDFEGHDAGLFANAESDDQDKEADAIWDAIDRRMDSRRKDRREAKLKQEIENYRASNPKVSGQFVDLTRKLHTLSEDEWDSIPEIGNYSHRLY

SEQ ID NO: 79947 - protein, 883 aa, Arabidopsis thaliana
  peptide (1)..(883): Ceres Seq. ID no. 12653834
MKEEKLFASQGGPIILGQIENEYNAVQLAYKENGEKYIKWAANLVESMNLGIPWVMCKQNDAPGNLINACNGRHCGDTFPGPNRHDKPSLWTENWTTQFRVFGDPPTQRTVEDIAFSVARYFSKNGSHVNYYMYHGGTNFGRTSAHFVTTRYYDDAPLDEFGLEKAPKYGHLKHVHRALRLCKKALFWGQLRAQTLGPDTEVRYYEQPGTKVCAAFLSNNNTRDTNTIKFKGQDYVLPSRSISILPDCKTVVYNTAQIVAQHSWRDFVKSEKTSKGLKFEMFSENIPSLLDGDSLIPGELYYLTKDKTDYAWYTTSVKIDEDDFPDQKGLKTILRVASLGHALIVYVNGEYAGKAHGRHEMKSFEFAKPVNFKTGDNRISILGVLTGLPDSGSYMEHRFAGPRAISIIGLKSGTRDLTENNEWGHLAGLEGEKKEVYTEEGSKKVKWEKDGKRKPLTWYKTYFETPEGVNAVAIRMKAMGKGLIWVNGIGVGRYWMSFLSPLGEPTQTEYHIPRSFMKGEKKKNMLVILEEEPGVKLESIDFVLVNRDTICSNVGEDYPVSVKSWKREGPKIVSRSKDMRLKAVMRCPPEKQMVEVQFASFGDPTGTCGNFTMGKCSASKSKEVVEKECLGRNYCSIVVARETFGDKGCPEIVKTLAVQVKCEKKEGKQDEKKKKEDKDEEEEDDEDDDEEEEEEDKENKDTKDMENKNQDILDSDSALVSDLGFGPFSTVVVNVPLIGGAAPPQPRFNLMPPSNYVAGLGRGAAGFTTRSDIGPARANGDGNADVNHKFDDFEGHDAGLFANAESDDQDKEADAIWDAIDRRMDSRRKDRREAKLKQEIENYRASNPKVSGQFVDLTRKLHTLSEDEWDSIPEIGNYSHRLY

SEQ ID NO: 79948 - DNA, 1302 bp, Arabidopsis thaliana
  misc_feature (1)..(1302): Ceres Seq. ID no. 12653835
  misc_feature (1)..(1302): Ortholog of  Ceres SEQ ID NO 14313288 as cited in SEQ ID NO 67419
atggttgctggtctttcctcaaaggaggattccttcttgattctccttacatcagaggacgatggtaagatccaattacaagtgacgagtgcctctcttcagccattcacgcaggagcaatggaggaacaaccaagattacttcataaataccgtaatacacacactaatttctaacgcgagaaaacgagcagtgacaattcacgtgtcaaaagaaaacggagagagcgttgaaggagcagaggtgacagtagagcagatctctaaagacttctccattggatctgccatctccaaaactatccttggaaacattccttaccaagaatggttcgtcaagagattcgacgccacggtattcgagaacgagctgaaatggtacgcgacggagcccgatcaaggcaaactcaactacacattggctgataagatgatgaatttcgtcagagccaacagaatcatcgctcgcggtcacaacatattctgggaggatcccaaatacaatcccgattgggttcgtaatctaaccggcgaagatctccggtcggcggttaaccggcgaatcaagagtctgatgactcggtacagaggagagttcgtgcattgggacgtgagcaacgagatgcttcactttgacttctacgagactcgactggggaagaacgcgtcgtacggattcttcgccgcggctcgtgagattgactcattggcgactctgttcttcaatgatttcaacgtggtggagacttgcagcgacgagaagtcaacggttgacgaatacatcgcgagggtgagggaactccaacggtacgacggcgtaaggatggacggaataggtctcgagggtcacttcacgacgccaaacgtagcgctgatgagagccatcctcgataaactcgctacgctccagctcccaatctggctcaccgagattgatatcagcagcagcctcgaccaccgctctcaggcgatttatttggagcaagtgttacgtgaaggattctcgcacccatcggtaaacggtataatgctatggaccgcacttcacccaaacggctgttaccaaatgtgcctcactgacgataaattccggaaccttccagccggagacgtggtggatcagaagcttctagaatggaagactggtgaagttaaggcgacgacagatgaccatggttcctttagcttcttcggctttttgggagagtatagagttggcatcatgtaccaaggtaagacggttaattcgtctttctcgttatctcaaggccctgagaccaaacatgtgaggcttcaaatctaa

SEQ ID NO: 79949 - protein, 433 aa, Arabidopsis thaliana
  peptide (1)..(433): Ceres Seq. ID no. 12653836
MVAGLSSKEDSFLILLTSEDDGKIQLQVTSASLQPFTQEQWRNNQDYFINTVIHTLISNARKRAVTIHVSKENGESVEGAEVTVEQISKDFSIGSAISKTILGNIPYQEWFVKRFDATVFENELKWYATEPDQGKLNYTLADKMMNFVRANRIIARGHNIFWEDPKYNPDWVRNLTGEDLRSAVNRRIKSLMTRYRGEFVHWDVSNEMLHFDFYETRLGKNASYGFFAAAREIDSLATLFFNDFNVVETCSDEKSTVDEYIARVRELQRYDGVRMDGIGLEGHFTTPNVALMRAILDKLATLQLPIWLTEIDISSSLDHRSQAIYLEQVLREGFSHPSVNGIMLWTALHPNGCYQMCLTDDKFRNLPAGDVVDQKLLEWKTGEVKATTDDHGSFSFFGFLGEYRVGIMYQGKTVNSSFSLSQGPETKHVRLQI

SEQ ID NO: 79950 - protein, 290 aa, Arabidopsis thaliana
  peptide (1)..(290): Ceres Seq. ID no. 12653837
MMNFVRANRIIARGHNIFWEDPKYNPDWVRNLTGEDLRSAVNRRIKSLMTRYRGEFVHWDVSNEMLHFDFYETRLGKNASYGFFAAAREIDSLATLFFNDFNVVETCSDEKSTVDEYIARVRELQRYDGVRMDGIGLEGHFTTPNVALMRAILDKLATLQLPIWLTEIDISSSLDHRSQAIYLEQVLREGFSHPSVNGIMLWTALHPNGCYQMCLTDDKFRNLPAGDVVDQKLLEWKTGEVKATTDDHGSFSFFGFLGEYRVGIMYQGKTVNSSFSLSQGPETKHVRLQI

SEQ ID NO: 79951 - protein, 289 aa, Arabidopsis thaliana
  peptide (1)..(289): Ceres Seq. ID no. 12653838
MNFVRANRIIARGHNIFWEDPKYNPDWVRNLTGEDLRSAVNRRIKSLMTRYRGEFVHWDVSNEMLHFDFYETRLGKNASYGFFAAAREIDSLATLFFNDFNVVETCSDEKSTVDEYIARVRELQRYDGVRMDGIGLEGHFTTPNVALMRAILDKLATLQLPIWLTEIDISSSLDHRSQAIYLEQVLREGFSHPSVNGIMLWTALHPNGCYQMCLTDDKFRNLPAGDVVDQKLLEWKTGEVKATTDDHGSFSFFGFLGEYRVGIMYQGKTVNSSFSLSQGPETKHVRLQI

SEQ ID NO: 79952 - DNA, 531 bp, Arabidopsis thaliana
  misc_feature (1)..(531): Ceres Seq. ID no. 12653839
  misc_feature (1)..(531): Ortholog of  Ceres SEQ ID NO 13598935 as cited in SEQ ID NO 1239
atggccgttatggcgcgtcacgaatcctactatggcaacaccaaaccggctaaactgaatgaggagaaagtgacacgtgtcagattttatctccatgatactctcagtggccaaaatcctaccgccgttagaatcgcacatgcaaatctaaccggtggctcagcttcgccggtaggttttggaagcctgtttgtgatagacgatccgctcaccgtcgggccggagaaacactcgaaagagatcgggaatggtcaagggatgtatgtctccgggtgcaaagacttgagcaaattcacgatcgtcatgtacgctgatttggctttcacggcagggaagtttaatggaagctcgatcagtatcttctcgaggaatccggtggcggaagaggtcggagagcgagaaatcgcgattgttggtggccgtgggaaattcagaatggcgagaggttttgtcaaagtaaaaacaaataagattgacatgaagactggtgatgctgttctccgatatgatgctactgtttatcattattaa

SEQ ID NO: 79953 - protein, 176 aa, Arabidopsis thaliana
  peptide (1)..(176): Ceres Seq. ID no. 12653840
MAVMARHESYYGNTKPAKLNEEKVTRVRFYLHDTLSGQNPTAVRIAHANLTGGSASPVGFGSLFVIDDPLTVGPEKHSKEIGNGQGMYVSGCKDLSKFTIVMYADLAFTAGKFNGSSISIFSRNPVAEEVGEREIAIVGGRGKFRMARGFVKVKTNKIDMKTGDAVLRYDATVYHY

SEQ ID NO: 79954 - protein, 173 aa, Arabidopsis thaliana
  peptide (1)..(173): Ceres Seq. ID no. 12653841
MARHESYYGNTKPAKLNEEKVTRVRFYLHDTLSGQNPTAVRIAHANLTGGSASPVGFGSLFVIDDPLTVGPEKHSKEIGNGQGMYVSGCKDLSKFTIVMYADLAFTAGKFNGSSISIFSRNPVAEEVGEREIAIVGGRGKFRMARGFVKVKTNKIDMKTGDAVLRYDATVYHY

SEQ ID NO: 79955 - protein, 90 aa, Arabidopsis thaliana
  peptide (1)..(90): Ceres Seq. ID no. 12653842
MYVSGCKDLSKFTIVMYADLAFTAGKFNGSSISIFSRNPVAEEVGEREIAIVGGRGKFRMARGFVKVKTNKIDMKTGDAVLRYDATVYHY

SEQ ID NO: 79956 - DNA, 1998 bp, Arabidopsis thaliana
  misc_feature (1)..(1998): Ceres Seq. ID no. 12653850
  misc_feature (1)..(1998): Ortholog of  Ceres SEQ ID NO 14312351 as cited in SEQ ID NO 55278
  misc_feature (1)..(1998): Ortholog of  Ceres SEQ ID NO 13659840 as cited in SEQ ID NO 66970
  misc_feature (1)..(1998): Ortholog of  Ceres SEQ ID NO 13660544 as cited in SEQ ID NO 67401
  misc_feature (1)..(1998): Ortholog of  Ceres SEQ ID NO 13584744 as cited in SEQ ID NO 69137
atgttgtctcttcttcttcctctgatctcactcttattccaaatccaatgcttcaccgttaagtcgcaaccggttccgttaaaccaaatatgctcaaacgtcacaggcaacttcaccgttaacaccccttacgccgtcaacctcgaccgcctcatctcctctttatcatctctccgacgtaacgttaacggattttacaacatctcagtgggagactccgatgaaaaagtcaattcaatctcacagtgtagaggcgatgtcaaacttgaagtttgcatcaactgcatcgcaatggctggaaaaagacttgtcacgctgtgtccggttcagaaagaggcgattatttggtatgacaaatgtacgtttagatactcaaaccggacaatcttcaatagattggagatttcccctcacacaagtataacgggaacaagaaacttcaccggagatcgtgatagttgggagaaatctttaaggggtttactcgaagggcttaaaaacagagcctctgttattggtcggagcaagaagaattttgttgtaggcgaaacgagcgggccttcatttcagacattgttcggtctggttcagtgcacaccggatatttcggaagaggattgttcgtattgtttgtctcagggtattgcaaagatcccaagctgttgtgatatgaaaatgggtagttatgtgatgtctcctagctgtatgttggcttatgctccctggagattctatgatccagtggacactgatgatccaagctcagtgcctgcaacgccatcacggccgccaaagaatgagacaagaagtgtcacacaaggggataaaaacagaggtgtacctaaagctttgatctttgcttctgcttcagttgctattgttgtcttatttatagtactcttagtcgttttcctaaagctgagaaggaaggagaacatcagaaattcagaaaacaaacatgaaaatgaaaatattagcacggattccatgaaatttgatttcagtgtattacaagatgcaacaagtcatttttcactagaaaataaacttggagaaggtggattcggagcagtttataagggtgtgctttctgatggacaaaaaatagcggtgaaaaggttgtcgaaaaatgcacaacaaggtgaaaccgaattcaagaacgagttcttgttggtggctaagcttcagcatcgcaatctcgtgaagctcttaggttactcaatagaaggaactgaaaggcttcttgtctatgagttcctcccacacactagtctcgacaagttcatcttcgatccgatccaaggtaatgaattggagtgggaaatacgatacaaaatcattggaggtgtagctcgaggacttctttatcttcatcaagattctcgtctgcggattatacaccgtgatcttaaagctagtaacatattattagacgaggaaatgaccccaaaaatcgcagatttcggaatggctaggcttttcgatatcgaccacacgactcaacgctacacgaataggatcgttgggacttttggatacatggctccagagtatgtaatgcacggacagttctcgttcaagacagatgtttacagtttcggagttttagttcttgagatcatcagtggtaagaaaaacagtggtttcagcagtgaggacagcatgggagatctcatcagcttcgcttggagaaattggaaggaaggcgttgctttgaatcttgtggacaagattttgatgacaatgtcgagttattcatcgaatatgatcatgagatgcataaacattggtcttctttgtgtccaagagaaagttgcagagagaccaagcatggcttctgttgttctgatgttagatggacatactattgctctttcagaaccatcaaaacctgcatttttctcacacagcaatgcggtatcagatagttcttcttctttaggacataatgcaaaaacttcaaactataattccaacactgagttgtatcctcggtga

SEQ ID NO: 79957 - protein, 665 aa, Arabidopsis thaliana
  peptide (1)..(665): Ceres Seq. ID no. 12653851
MLSLLLPLISLLFQIQCFTVKSQPVPLNQICSNVTGNFTVNTPYAVNLDRLISSLSSLRRNVNGFYNISVGDSDEKVNSISQCRGDVKLEVCINCIAMAGKRLVTLCPVQKEAIIWYDKCTFRYSNRTIFNRLEISPHTSITGTRNFTGDRDSWEKSLRGLLEGLKNRASVIGRSKKNFVVGETSGPSFQTLFGLVQCTPDISEEDCSYCLSQGIAKIPSCCDMKMGSYVMSPSCMLAYAPWRFYDPVDTDDPSSVPATPSRPPKNETRSVTQGDKNRGVPKALIFASASVAIVVLFIVLLVVFLKLRRKENIRNSENKHENENISTDSMKFDFSVLQDATSHFSLENKLGEGGFGAVYKGVLSDGQKIAVKRLSKNAQQGETEFKNEFLLVAKLQHRNLVKLLGYSIEGTERLLVYEFLPHTSLDKFIFDPIQGNELEWEIRYKIIGGVARGLLYLHQDSRLRIIHRDLKASNILLDEEMTPKIADFGMARLFDIDHTTQRYTNRIVGTFGYMAPEYVMHGQFSFKTDVYSFGVLVLEIISGKKNSGFSSEDSMGDLISFAWRNWKEGVALNLVDKILMTMSSYSSNMIMRCINIGLLCVQEKVAERPSMASVVLMLDGHTIALSEPSKPAFFSHSNAVSDSSSSLGHNAKTSNYNSNTELYPR

SEQ ID NO: 79958 - protein, 568 aa, Arabidopsis thaliana
  peptide (1)..(568): Ceres Seq. ID no. 12653852
MAGKRLVTLCPVQKEAIIWYDKCTFRYSNRTIFNRLEISPHTSITGTRNFTGDRDSWEKSLRGLLEGLKNRASVIGRSKKNFVVGETSGPSFQTLFGLVQCTPDISEEDCSYCLSQGIAKIPSCCDMKMGSYVMSPSCMLAYAPWRFYDPVDTDDPSSVPATPSRPPKNETRSVTQGDKNRGVPKALIFASASVAIVVLFIVLLVVFLKLRRKENIRNSENKHENENISTDSMKFDFSVLQDATSHFSLENKLGEGGFGAVYKGVLSDGQKIAVKRLSKNAQQGETEFKNEFLLVAKLQHRNLVKLLGYSIEGTERLLVYEFLPHTSLDKFIFDPIQGNELEWEIRYKIIGGVARGLLYLHQDSRLRIIHRDLKASNILLDEEMTPKIADFGMARLFDIDHTTQRYTNRIVGTFGYMAPEYVMHGQFSFKTDVYSFGVLVLEIISGKKNSGFSSEDSMGDLISFAWRNWKEGVALNLVDKILMTMSSYSSNMIMRCINIGLLCVQEKVAERPSMASVVLMLDGHTIALSEPSKPAFFSHSNAVSDSSSSLGHNAKTSNYNSNTELYPR

SEQ ID NO: 79959 - protein, 442 aa, Arabidopsis thaliana
  peptide (1)..(442): Ceres Seq. ID no. 12653853
MKMGSYVMSPSCMLAYAPWRFYDPVDTDDPSSVPATPSRPPKNETRSVTQGDKNRGVPKALIFASASVAIVVLFIVLLVVFLKLRRKENIRNSENKHENENISTDSMKFDFSVLQDATSHFSLENKLGEGGFGAVYKGVLSDGQKIAVKRLSKNAQQGETEFKNEFLLVAKLQHRNLVKLLGYSIEGTERLLVYEFLPHTSLDKFIFDPIQGNELEWEIRYKIIGGVARGLLYLHQDSRLRIIHRDLKASNILLDEEMTPKIADFGMARLFDIDHTTQRYTNRIVGTFGYMAPEYVMHGQFSFKTDVYSFGVLVLEIISGKKNSGFSSEDSMGDLISFAWRNWKEGVALNLVDKILMTMSSYSSNMIMRCINIGLLCVQEKVAERPSMASVVLMLDGHTIALSEPSKPAFFSHSNAVSDSSSSLGHNAKTSNYNSNTELYPR

SEQ ID NO: 79960 - DNA, 1632 bp, Arabidopsis thaliana
  misc_feature (1)..(1632): Ceres Seq. ID no. 12653877
  misc_feature (1)..(1632): Ortholog of  Ceres SEQ ID NO 15171610 as cited in SEQ ID NO 57317
atgctaatcaaatcccaaagattgactcttttctctcctctcttgtccaaaacaagacggatcccggttaactcccaccaaacactggtcgcagaatcggtgataactcggagaacactcggtgcgatcaccgcaactccgagttttcataaaaatccggtggtgattcgacggaggatcaaattagagagagttacgaggaactgcgtcagaattgatcgggaaatcgacgaagaagaagaagaagaggagaaggagagaggggatctggtgaaacagagcatatgggaacagatgaaagagatagtgaagttcacaggtccggcgatggggatgtggatttgtggaccgttgatgagtctcatcgacacggtcgtcatcggccaaggaagctccatcgaactcgctgctcttggaccgggaacagtactatgcgaccacatgagttatgtcttcatgttcctctccgtggctacatccaatatggttgctacttctcttgccaaacaggacaagaaagaagcgcaacatcaaatctctgttttactctttattggattggtttgtggactaatgatgcttctgctcacaagattattcggtccttgggctgttactgcttttacaagggggaagaacattgagattgtccctgcagctaataagtatattcagattcgaggcttagcgtggccgtttatccttgttggattggttgctcaaagtgcaagtcttggaatgaagaactcatggggacctcttaaagcattagctgcagcaacgatcattaacggtcttggcgatacaatcctatgcttgtttcttggacaaggtatcgctggagctgcttgggcaacaactgcttcacagattgtttcggcttatatgatgatggattctctgaacaaagaaggctacaatgcttactcttttgcgatcccttcaccgcaagaactatggaagatctctgcactcgctgcacctgtttttatctccattttctccaagattgctttctactctttcataatttactgtgctacttccatgggaactcacgttttagccgctcatcaggtgatggctcagacgtataggatgtgcaatgtatggggtgagccactctctcaaacggctcagtcatttatgccagagatgttatatggtgcgaaccgtaatcttcccaaggctagaacgttgcttaagtccctgatgattattggagccacgcttggattagtcttgggagttatcggaacagcggttccaggcctgtttcctggtgtctacacacatgataaagtcatcatatccgagatgcatagactgcttatacctttcttcatggcgttgtctgcattgcccatgacagtatccctcgagggtacattgctggcgggacgtgatctcaaattcgtcagctcagtgatgagttcaagcttcataattggttgtctcacactaatgttcgtgacaagaagtggctatggtttactcggctgctggttcgttctcgtcggatttcaatggggccggtttggtctatatctacgacggcttctttcgcctggaggcatacttaattcagatgggccgagtccatacacggtggagaagattaaatccatttaa

SEQ ID NO: 79961 - protein, 543 aa, Arabidopsis thaliana
  peptide (1)..(543): Ceres Seq. ID no. 12653878
MLIKSQRLTLFSPLLSKTRRIPVNSHQTLVAESVITRRTLGAITATPSFHKNPVVIRRRIKLERVTRNCVRIDREIDEEEEEEEKERGDLVKQSIWEQMKEIVKFTGPAMGMWICGPLMSLIDTVVIGQGSSIELAALGPGTVLCDHMSYVFMFLSVATSNMVATSLAKQDKKEAQHQISVLLFIGLVCGLMMLLLTRLFGPWAVTAFTRGKNIEIVPAANKYIQIRGLAWPFILVGLVAQSASLGMKNSWGPLKALAAATIINGLGDTILCLFLGQGIAGAAWATTASQIVSAYMMMDSLNKEGYNAYSFAIPSPQELWKISALAAPVFISIFSKIAFYSFIIYCATSMGTHVLAAHQVMAQTYRMCNVWGEPLSQTAQSFMPEMLYGANRNLPKARTLLKSLMIIGATLGLVLGVIGTAVPGLFPGVYTHDKVIISEMHRLLIPFFMALSALPMTVSLEGTLLAGRDLKFVSSVMSSSFIIGCLTLMFVTRSGYGLLGCWFVLVGFQWGRFGLYLRRLLSPGGILNSDGPSPYTVEKIKSI

SEQ ID NO: 79962 - protein, 445 aa, Arabidopsis thaliana
  peptide (1)..(445): Ceres Seq. ID no. 12653879
MKEIVKFTGPAMGMWICGPLMSLIDTVVIGQGSSIELAALGPGTVLCDHMSYVFMFLSVATSNMVATSLAKQDKKEAQHQISVLLFIGLVCGLMMLLLTRLFGPWAVTAFTRGKNIEIVPAANKYIQIRGLAWPFILVGLVAQSASLGMKNSWGPLKALAAATIINGLGDTILCLFLGQGIAGAAWATTASQIVSAYMMMDSLNKEGYNAYSFAIPSPQELWKISALAAPVFISIFSKIAFYSFIIYCATSMGTHVLAAHQVMAQTYRMCNVWGEPLSQTAQSFMPEMLYGANRNLPKARTLLKSLMIIGATLGLVLGVIGTAVPGLFPGVYTHDKVIISEMHRLLIPFFMALSALPMTVSLEGTLLAGRDLKFVSSVMSSSFIIGCLTLMFVTRSGYGLLGCWFVLVGFQWGRFGLYLRRLLSPGGILNSDGPSPYTVEKIKSI

SEQ ID NO: 79963 - protein, 434 aa, Arabidopsis thaliana
  peptide (1)..(434): Ceres Seq. ID no. 12653880
MGMWICGPLMSLIDTVVIGQGSSIELAALGPGTVLCDHMSYVFMFLSVATSNMVATSLAKQDKKEAQHQISVLLFIGLVCGLMMLLLTRLFGPWAVTAFTRGKNIEIVPAANKYIQIRGLAWPFILVGLVAQSASLGMKNSWGPLKALAAATIINGLGDTILCLFLGQGIAGAAWATTASQIVSAYMMMDSLNKEGYNAYSFAIPSPQELWKISALAAPVFISIFSKIAFYSFIIYCATSMGTHVLAAHQVMAQTYRMCNVWGEPLSQTAQSFMPEMLYGANRNLPKARTLLKSLMIIGATLGLVLGVIGTAVPGLFPGVYTHDKVIISEMHRLLIPFFMALSALPMTVSLEGTLLAGRDLKFVSSVMSSSFIIGCLTLMFVTRSGYGLLGCWFVLVGFQWGRFGLYLRRLLSPGGILNSDGPSPYTVEKIKSI

SEQ ID NO: 79964 - DNA, 2637 bp, Arabidopsis thaliana
  misc_feature (1)..(2637): Ceres Seq. ID no. 12653883
  misc_feature (1)..(2637): Ortholog of  Ceres SEQ ID NO 12638191 as cited in SEQ ID NO 674
  misc_feature (1)..(2637): Ortholog of  Ceres SEQ ID NO 13654989 as cited in SEQ ID NO 63117
  misc_feature (1)..(2637): Ortholog of  Ceres SEQ ID NO 14303105 as cited in SEQ ID NO 66589
  misc_feature (1)..(2637): Ortholog of  Ceres SEQ ID NO 13584744 as cited in SEQ ID NO 69137
atggagataagaaagaaaccaaacatattcacggttctcgtcattgatttttcttcaaagccttccatggctctccttctggctattctccttttcctctcaggcccttctgcatctgcggtagctgcagctgctgtgggacctgctactggttttaaaccggcagatgatattctcattgattgtggaagcaaatcgtcatcaaaaacccctgatggaagagtctttaagagtgaccaagaaacaatccaatacatagaagccaaggaagatattcaggtctcagccccgccttcagacaaggtcgcatctcctatctacctaactgcaaggatcttccgtgaggaagccacctacaaattccatttgactcgacctggttggcattgggttcgcctgcatttcttggccttccctaatgacaagttcgatctccaacaagcaaccttttccgttttaacggagaaatatgtgctgcttcataacttcaaaataagtaacaacaacaatgatagtcaagctgctgttcagaaggagtatctcgtcaacatgacagatgctcaattcgccctcaggttcagacctatgaaaagctctgcagcgttcatcaacgctatcgaagtcgtgtcagctccagacgaactgatctctgattctggcactgcccttttccctgtcattgggttctcgggtctgtctgactacgcttaccagtctgtttatagagtcaatgtcggcggtcccttgatcatgcctcagaatgatacattaggaagaacctggatacccgataaggaattcttgaaagatgagaacttggcaaaggacgttaaaacaaccccttcggcaatcaagtacccaccggaagttacacctttgattgctccacagacggtttatgcaacagctgtagaaatggctaattctctcaccatagaccctaattttaacgtctcctggaatttcccctccaacccatcgtttaactaccttatccggcttcatttctgtgatatcgttagcaagtctctcaatgacctgtactttaatgtgtacattaacgggaaaactgccatttctggactggatttgtccactgtcgctgggaatctagctgctccttactacaaagacatcgttgtgaacgcaacacttatgggccctgagctccaagtccagattggtcccatgggagaagatacagggaccaaaaacgcgatcttgaacggtgttgaggttctgaagatgagcaattccgtgaacagccttgatggagagtttggagtggatggtagaaccactggcatggggaagcatggtatggtagcaaccgcggggtttgtgatgatgtttggagctttcattggtctgggagccatggtttacaagtggaagaagaggccacaagattggcagaagagaaatagtttctcctcttggttgctaccaatacatgctggtgatagcactttcatgacaagcaaaggtggttctcagaaatccaacttctacaactcaacacttggtctcggccgctatttctccctttcagagcttcaagaagccacaaagaactttgaagcatcccagattatcggtgttggaggattcggtaacgtctacattggaaccctcgacgatggaaccaaagtcgctgtcaaaagaggtaatccacagtctgaacaaggaatcactgagtttcagacagagatccagatgctttctaagctcagacacagacacttggtctccttgattggttactgtgacgagaactctgagatgatcttagtctatgagttcatgtccaatggtccattcagggaccacttgtatggaaagaaccttgctcctctaacctggaaacaaagactcgagatatgtatcggatctgcacgtgggcttcactacttacacacaggaacagctcaggggattatccaccgtgatgtcaaatccaccaacattcttctcgatgaagctttagttgcaaaagtcgctgactttggtctttctaaagatgtagcttttggacaaaaccatgtcagcacggccgtgaaaggaagtttcgggtacttagacccggagtactttagaagacaacaacttaccgacaaatccgatgtttattcctttggtgtcgttcttctagaagctctgtgcgcaagaccagccatcaatcctcagctaccaagagagcaggttaacttagctgaatgggcgatgcaatggaaacgaaaaggacttcttgaaaagatcattgatcctcatttggctggaacgattaatcctgaatcgatgaagaagtttgctgaagctgcagagaagtgtttagaagactacggtgtcgataggccaacaatgggagatgttctgtggaacttggagtatgctcttcagcttcaagaggcattcactcagggcaaagcagaagagaccgagaacgctaagcctgatgtggtgacacctggctcggtgcctgtgtctgatccatctccgatcactccctcagtcaccaccaacgaagcggctactgttccggttcctgctaaggtggaagagaacagtggcacggccgtggatgaacactctggaacagccatgtttactcagtttgctaaccttaacggaagataa

SEQ ID NO: 79965 - protein, 878 aa, Arabidopsis thaliana
  peptide (1)..(878): Ceres Seq. ID no. 12653884
MEIRKKPNIFTVLVIDFSSKPSMALLLAILLFLSGPSASAVAAAAVGPATGFKPADDILIDCGSKSSSKTPDGRVFKSDQETIQYIEAKEDIQVSAPPSDKVASPIYLTARIFREEATYKFHLTRPGWHWVRLHFLAFPNDKFDLQQATFSVLTEKYVLLHNFKISNNNNDSQAAVQKEYLVNMTDAQFALRFRPMKSSAAFINAIEVVSAPDELISDSGTALFPVIGFSGLSDYAYQSVYRVNVGGPLIMPQNDTLGRTWIPDKEFLKDENLAKDVKTTPSAIKYPPEVTPLIAPQTVYATAVEMANSLTIDPNFNVSWNFPSNPSFNYLIRLHFCDIVSKSLNDLYFNVYINGKTAISGLDLSTVAGNLAAPYYKDIVVNATLMGPELQVQIGPMGEDTGTKNAILNGVEVLKMSNSVNSLDGEFGVDGRTTGMGKHGMVATAGFVMMFGAFIGLGAMVYKWKKRPQDWQKRNSFSSWLLPIHAGDSTFMTSKGGSQKSNFYNSTLGLGRYFSLSELQEATKNFEASQIIGVGGFGNVYIGTLDDGTKVAVKRGNPQSEQGITEFQTEIQMLSKLRHRHLVSLIGYCDENSEMILVYEFMSNGPFRDHLYGKNLAPLTWKQRLEICIGSARGLHYLHTGTAQGIIHRDVKSTNILLDEALVAKVADFGLSKDVAFGQNHVSTAVKGSFGYLDPEYFRRQQLTDKSDVYSFGVVLLEALCARPAINPQLPREQVNLAEWAMQWKRKGLLEKIIDPHLAGTINPESMKKFAEAAEKCLEDYGVDRPTMGDVLWNLEYALQLQEAFTQGKAEETENAKPDVVTPGSVPVSDPSPITPSVTTNEAATVPVPAKVEENSGTAVDEHSGTAMFTQFANLNGR

SEQ ID NO: 79966 - protein, 856 aa, Arabidopsis thaliana
  peptide (1)..(856): Ceres Seq. ID no. 12653885
MALLLAILLFLSGPSASAVAAAAVGPATGFKPADDILIDCGSKSSSKTPDGRVFKSDQETIQYIEAKEDIQVSAPPSDKVASPIYLTARIFREEATYKFHLTRPGWHWVRLHFLAFPNDKFDLQQATFSVLTEKYVLLHNFKISNNNNDSQAAVQKEYLVNMTDAQFALRFRPMKSSAAFINAIEVVSAPDELISDSGTALFPVIGFSGLSDYAYQSVYRVNVGGPLIMPQNDTLGRTWIPDKEFLKDENLAKDVKTTPSAIKYPPEVTPLIAPQTVYATAVEMANSLTIDPNFNVSWNFPSNPSFNYLIRLHFCDIVSKSLNDLYFNVYINGKTAISGLDLSTVAGNLAAPYYKDIVVNATLMGPELQVQIGPMGEDTGTKNAILNGVEVLKMSNSVNSLDGEFGVDGRTTGMGKHGMVATAGFVMMFGAFIGLGAMVYKWKKRPQDWQKRNSFSSWLLPIHAGDSTFMTSKGGSQKSNFYNSTLGLGRYFSLSELQEATKNFEASQIIGVGGFGNVYIGTLDDGTKVAVKRGNPQSEQGITEFQTEIQMLSKLRHRHLVSLIGYCDENSEMILVYEFMSNGPFRDHLYGKNLAPLTWKQRLEICIGSARGLHYLHTGTAQGIIHRDVKSTNILLDEALVAKVADFGLSKDVAFGQNHVSTAVKGSFGYLDPEYFRRQQLTDKSDVYSFGVVLLEALCARPAINPQLPREQVNLAEWAMQWKRKGLLEKIIDPHLAGTINPESMKKFAEAAEKCLEDYGVDRPTMGDVLWNLEYALQLQEAFTQGKAEETENAKPDVVTPGSVPVSDPSPITPSVTTNEAATVPVPAKVEENSGTAVDEHSGTAMFTQFANLNGR

SEQ ID NO: 79967 - protein, 695 aa, Arabidopsis thaliana
  peptide (1)..(695): Ceres Seq. ID no. 12653886
MTDAQFALRFRPMKSSAAFINAIEVVSAPDELISDSGTALFPVIGFSGLSDYAYQSVYRVNVGGPLIMPQNDTLGRTWIPDKEFLKDENLAKDVKTTPSAIKYPPEVTPLIAPQTVYATAVEMANSLTIDPNFNVSWNFPSNPSFNYLIRLHFCDIVSKSLNDLYFNVYINGKTAISGLDLSTVAGNLAAPYYKDIVVNATLMGPELQVQIGPMGEDTGTKNAILNGVEVLKMSNSVNSLDGEFGVDGRTTGMGKHGMVATAGFVMMFGAFIGLGAMVYKWKKRPQDWQKRNSFSSWLLPIHAGDSTFMTSKGGSQKSNFYNSTLGLGRYFSLSELQEATKNFEASQIIGVGGFGNVYIGTLDDGTKVAVKRGNPQSEQGITEFQTEIQMLSKLRHRHLVSLIGYCDENSEMILVYEFMSNGPFRDHLYGKNLAPLTWKQRLEICIGSARGLHYLHTGTAQGIIHRDVKSTNILLDEALVAKVADFGLSKDVAFGQNHVSTAVKGSFGYLDPEYFRRQQLTDKSDVYSFGVVLLEALCARPAINPQLPREQVNLAEWAMQWKRKGLLEKIIDPHLAGTINPESMKKFAEAAEKCLEDYGVDRPTMGDVLWNLEYALQLQEAFTQGKAEETENAKPDVVTPGSVPVSDPSPITPSVTTNEAATVPVPAKVEENSGTAVDEHSGTAMFTQFANLNGR

SEQ ID NO: 79968 - DNA, 3096 bp, Arabidopsis thaliana
  misc_feature (1)..(3096): Ceres Seq. ID no. 12653902
  misc_feature (1)..(3096): Ortholog of  Ceres SEQ ID NO 13518411 as cited in SEQ ID NO 55230
  misc_feature (1)..(3096): Ortholog of  Ceres SEQ ID NO 13598724 as cited in SEQ ID NO 61069
agactttccatctttctctctctaaatctaggacaaaaaaaaacatggaagagttagagagagagagaggcagcagaaaatgattggtaaacaacaatgaatcgtttttgattctgaagtgcacagagaaaagtaattgccagagaaagtcgcagaggtaacagagtgaagaaccttttttagtatatatctttgttgaataatcacaaaaagaaagtttcctttattgatcggattcgaaggaaacccaaaaaaaaaagagatttgattatttccataaatcgcgaagcttttttccaattgaatcttaggcaatgaatggctttaagtttttcgaagtactagtcgtcaccagggtttagagaaaccatggtggttctgaggaagacatccttgttggtcttcttcttattcctcctcttgttgttagagtcaacgtttgagcaacagacaagttctctgaatgagaaatcggcgcttctgctgttaaggtcttctcttgggttacgaagcagagattggcctgtaaaaggcaatccttgtctgaactggaacggcatcaaatgtgatcagaatggtagagtaactaagatcaacatttcagggttcagaaggacaaggattgggaatcaaaacccggaattctcagttggttctctcgtcaatctcacccgtctagcttccttcaacgcctcaaggttctatcttccaggtccaatcccggctttgtttggatcgagtctgttgactttagaggtgttggaccttagctcctgttcaatcacaggaaccatccctgaaagtttgactcggttatcacatctcaaagttcttgatctttcaaagaatgcgatcaatggggatattcctctgtctcttacctctcttcagaatctatcaatccttgatctttcctcaaactcggtgtttggttcgattcctgctaatattggggcactctcaaagctccagcgtctgaatctttcgcgtaacaccttgacttcttcaatacctccatcactcggagacctctctgttttaattgaccttgatctcagcttcaacggaatgtcaggttcggttccatcagatttgaaagggctaaggaacttgcagacattggtaattgcgggaaatcgcctttcaggatccctacctcctgatctgtttagtttgctgagtaaacttcagatcattgacttcagaggcagtggtttcataggcgctttaccgtccaggttatggtcgttaccggagctcaagtttctagatatttctggaaatcacttctctgacatgctgcctaataccactgtcagttttgattctactgtctccatgcttaacatatccgggaacatgttttacggcaatctcacacttttactgacaaggttccaagttgttgacctgtcagaaaactattttgaaggtaaaattcctgactttgtgccaaccagagcttcattgagcaacaattgtcttcagggcccagagaagcagcggaagttgtcggattgcactttgttttattcaaaaaagggcttaactttcaacaatttcggacaacatgaagagaagaagagttctaaaacttcctggttaagccacacgaaaatagttatacttgctgcagttggagggtctatattgcttatgctcattctcatagtgttaccaataacagtgagtttctgtgtccgtcgaagaaacagatcatcaacaagtaatcatcctagaggaagacacaacggtgttggcccattacctcctgatgaaacacttccctcaagaggaggagtctctataaactttgggagtcttggatcatcatttacctatcagcagttgctcaatgccaccaaggagttcagtgattcaaacctgatcaagaaaggacaatctggggatcttttcaagggagttctagaaaacggagttcagatcgttgtgaaaagaatcagcttggaatctacaaagaacaacgaagcttatctaaccgagttggatttcttcagccggtttgcgcatccgagaataatcccattcgtagggaagagcttagagagcgcaactcataagttcttggtatacaagtacatgctgaatagggatttaccaagctcattgttctataaatccaattccctagttgacaacggattgagatctctcgattggatcaccagactgaaaatagcattgggagtagcagagggacttgcttacctgcaccatgattgctcaccatccgtcgtccacagggatattcaagcaagtagcattctcttggatgataagtttgaagttaggcttggaagctttagcaaagcttgtcatcaagaaaacaatggccgtccacggaaaatagcccgattgctcagactatcccagtcttctcaagaaagtgttcctgggtctgcagctacagcaacatgtgcctacgatgtgtactgcttcggcaagatacttctggagcttatcacagggaaactcggaatcagctcatgtaaagaaacccaattcaaaaaaatcctaaccgagatcatgccttacatttcatcgcaagagaaagaacccgtaatgaacattctagaccaatctcttctggtcgacgaagacctcttagaagaagtctgggcaatggcaatcgtcgctagatcttgtcttaacccaaaaccaacgagacggccgcttatgagacacatagtacaagccttggagaatccactgagagttgtgagagaagacagcagcgaatctgagagattccgtacgactggatcttcgagaggatcttcgagtagcggtcgaatatttggtagttggagacagagcgtgtctgatcctgtcgcagcgggaacaagtagccttctgtctcaggcggagggtttagcgactggatcgtcagcgagaggaagtagccgtggcgcgtcgagtcgacggagtatgaaagatgtatagaaagaaagacacacacacacacgatcaatatttattttttgacgtcaatttttaattattttttatgtgtggttatgatttgatctcttgttgataaaaaattcccgttaatttataatatttttcgatgat

SEQ ID NO: 79969 - protein, 864 aa, Arabidopsis thaliana
  peptide (1)..(864): Ceres Seq. ID no. 12653903
MVVLRKTSLLVFFLFLLLLLESTFEQQTSSLNEKSALLLLRSSLGLRSRDWPVKGNPCLNWNGIKCDQNGRVTKINISGFRRTRIGNQNPEFSVGSLVNLTRLASFNASRFYLPGPIPALFGSSLLTLEVLDLSSCSITGTIPESLTRLSHLKVLDLSKNAINGDIPLSLTSLQNLSILDLSSNSVFGSIPANIGALSKLQRLNLSRNTLTSSIPPSLGDLSVLIDLDLSFNGMSGSVPSDLKGLRNLQTLVIAGNRLSGSLPPDLFSLLSKLQIIDFRGSGFIGALPSRLWSLPELKFLDISGNHFSDMLPNTTVSFDSTVSMLNISGNMFYGNLTLLLTRFQVVDLSENYFEGKIPDFVPTRASLSNNCLQGPEKQRKLSDCTLFYSKKGLTFNNFGQHEEKKSSKTSWLSHTKIVILAAVGGSILLMLILIVLPITVSFCVRRRNRSSTSNHPRGRHNGVGPLPPDETLPSRGGVSINFGSLGSSFTYQQLLNATKEFSDSNLIKKGQSGDLFKGVLENGVQIVVKRISLESTKNNEAYLTELDFFSRFAHPRIIPFVGKSLESATHKFLVYKYMLNRDLPSSLFYKSNSLVDNGLRSLDWITRLKIALGVAEGLAYLHHDCSPSVVHRDIQASSILLDDKFEVRLGSFSKACHQENNGRPRKIARLLRLSQSSQESVPGSAATATCAYDVYCFGKILLELITGKLGISSCKETQFKKILTEIMPYISSQEKEPVMNILDQSLLVDEDLLEEVWAMAIVARSCLNPKPTRRPLMRHIVQALENPLRVVREDSSESERFRTTGSSRGSSSSGRIFGSWRQSVSDPVAAGTSSLLSQAEGLATGSSARGSSRGASSRRSMKDV

SEQ ID NO: 79970 - protein, 631 aa, Arabidopsis thaliana
  peptide (1)..(631): Ceres Seq. ID no. 12653904
MSGSVPSDLKGLRNLQTLVIAGNRLSGSLPPDLFSLLSKLQIIDFRGSGFIGALPSRLWSLPELKFLDISGNHFSDMLPNTTVSFDSTVSMLNISGNMFYGNLTLLLTRFQVVDLSENYFEGKIPDFVPTRASLSNNCLQGPEKQRKLSDCTLFYSKKGLTFNNFGQHEEKKSSKTSWLSHTKIVILAAVGGSILLMLILIVLPITVSFCVRRRNRSSTSNHPRGRHNGVGPLPPDETLPSRGGVSINFGSLGSSFTYQQLLNATKEFSDSNLIKKGQSGDLFKGVLENGVQIVVKRISLESTKNNEAYLTELDFFSRFAHPRIIPFVGKSLESATHKFLVYKYMLNRDLPSSLFYKSNSLVDNGLRSLDWITRLKIALGVAEGLAYLHHDCSPSVVHRDIQASSILLDDKFEVRLGSFSKACHQENNGRPRKIARLLRLSQSSQESVPGSAATATCAYDVYCFGKILLELITGKLGISSCKETQFKKILTEIMPYISSQEKEPVMNILDQSLLVDEDLLEEVWAMAIVARSCLNPKPTRRPLMRHIVQALENPLRVVREDSSESERFRTTGSSRGSSSSGRIFGSWRQSVSDPVAAGTSSLLSQAEGLATGSSARGSSRGASSRRSMKDV

SEQ ID NO: 79971 - protein, 555 aa, Arabidopsis thaliana
  peptide (1)..(555): Ceres Seq. ID no. 12653905
MLPNTTVSFDSTVSMLNISGNMFYGNLTLLLTRFQVVDLSENYFEGKIPDFVPTRASLSNNCLQGPEKQRKLSDCTLFYSKKGLTFNNFGQHEEKKSSKTSWLSHTKIVILAAVGGSILLMLILIVLPITVSFCVRRRNRSSTSNHPRGRHNGVGPLPPDETLPSRGGVSINFGSLGSSFTYQQLLNATKEFSDSNLIKKGQSGDLFKGVLENGVQIVVKRISLESTKNNEAYLTELDFFSRFAHPRIIPFVGKSLESATHKFLVYKYMLNRDLPSSLFYKSNSLVDNGLRSLDWITRLKIALGVAEGLAYLHHDCSPSVVHRDIQASSILLDDKFEVRLGSFSKACHQENNGRPRKIARLLRLSQSSQESVPGSAATATCAYDVYCFGKILLELITGKLGISSCKETQFKKILTEIMPYISSQEKEPVMNILDQSLLVDEDLLEEVWAMAIVARSCLNPKPTRRPLMRHIVQALENPLRVVREDSSESERFRTTGSSRGSSSSGRIFGSWRQSVSDPVAAGTSSLLSQAEGLATGSSARGSSRGASSRRSMKDV

SEQ ID NO: 79972 - DNA, 1883 bp, Arabidopsis thaliana
  misc_feature (1)..(1883): Ceres Seq. ID no. 12653943
  misc_feature (1)..(1883): Ortholog of  Ceres SEQ ID NO 14305409 as cited in SEQ ID NO 55679
atttgaaacttttgggcagagagtctgaacaatcgctttgttgtcgtcaagaacgatacgtccctataaattagcaatgtcgctggttcgaacagtgacgatcgttctttttataatcgcgtttctgcaaaacgctgcggctcagaaaagacagcaaagtattgttaagtctcgcggtgcggttgcgacagatgatggacggtgttctgttatcgggatgcgtgttcttcgtgaaggaggaaacgcgattgatgcgtctgtggctgctgctctgtgtttgggcgttgtaagtcccgcgtctagcggtataggcggtggagcgtttacagtggttaagatagctggtgggaaagaaattgcttatgattctagagaaaccgctcctctaagagccactgagaatatgtatggaggtaatgttgacctaaagaagaaaggagccttatcagtaggcgttcccggggaagttgcaggtctattcacggcttggaaacaacatgggaagctaccgtggaagcggttagtgactcctgcagagaaacttgcagagggattcaagatttccaagtatctttatatgcagatgaacgcgactagaagcgatatcttagcagacaaaggtctctctgacctatttgtttcaaatggagagctcaagaaaccagggacgatttgccataacccaaaattggctttaaccttgaagctaattggagagtacggtccaaaagcattttacaatggcacagttggggttaacctagcgagagatatcaaaaaatctggaggaataataactttgaaagatctgcaaagttatagagttaagattaaagaaccgttgtctgcagacattcttggatatagagtccttggtatgcctcctccttcatctggtggcgctgcaatgatgcttgttttgaacattctttctcaatatgggattccatcaggtgtttcaggccctctcggtgttcatcgactaatcgaggctctgaaacatgcattcgcagttagaatgaacctcggggatccagatttcactgatgttaccaaggttgtttcggatatgttgtcgccaaagtttgcaaaagacttgaagagcaagataaacgaccaaaaaacttttgatccaaaatattacgggggcatgtggaatcagatcgacgaccacgggacaagtcatttatcgatcatagaccgcgagaggaacgctgtgtctatgactagtacaataaatggttactttggggcattgatgctatctccgagcacaggaatagttctgaacaacgaaatggacgatttctcaatccctatgaaatctaacggtaacttagatgttccaccaccagcaccagctaacttcatccgtcctggaaaacgacctttgtcctctatgtcacccaccattgtactcaaggacggtaaagtgaaagccgctgtgggtgcgagcggaggagccaacattattgccgggacaacggaagtttacttgaatcattttttcctcaagatggatcctctttcttccgtcttagctccaagaatctaccatcagctgataccaaacagagcttcgtacgagaactggacaacagtattcaatgatcatttcgagattcctaaagcaacaagagttgtgttggagaagaaaggtcatgtcctatctcctattgccggagggacgattgctcagttcatagttcaagaatccggtgagaactccggtggaagaagtgagcttgtggcagttagtgatcctcgaaaaggagggttcccttcaggatattgagaattttagatcgagatttattttatgtttttattgtttctttgattattgaaccgaactttgtgatgaatatatttttatttcacta

SEQ ID NO: 79973 - protein, 572 aa, Arabidopsis thaliana
  peptide (1)..(572): Ceres Seq. ID no. 12653944
MSLVRTVTIVLFIIAFLQNAAAQKRQQSIVKSRGAVATDDGRCSVIGMRVLREGGNAIDASVAAALCLGVVSPASSGIGGGAFTVVKIAGGKEIAYDSRETAPLRATENMYGGNVDLKKKGALSVGVPGEVAGLFTAWKQHGKLPWKRLVTPAEKLAEGFKISKYLYMQMNATRSDILADKGLSDLFVSNGELKKPGTICHNPKLALTLKLIGEYGPKAFYNGTVGVNLARDIKKSGGIITLKDLQSYRVKIKEPLSADILGYRVLGMPPPSSGGAAMMLVLNILSQYGIPSGVSGPLGVHRLIEALKHAFAVRMNLGDPDFTDVTKVVSDMLSPKFAKDLKSKINDQKTFDPKYYGGMWNQIDDHGTSHLSIIDRERNAVSMTSTINGYFGALMLSPSTGIVLNNEMDDFSIPMKSNGNLDVPPPAPANFIRPGKRPLSSMSPTIVLKDGKVKAAVGASGGANIIAGTTEVYLNHFFLKMDPLSSVLAPRIYHQLIPNRASYENWTTVFNDHFEIPKATRVVLEKKGHVLSPIAGGTIAQFIVQESGENSGGRSELVAVSDPRKGGFPSGY

SEQ ID NO: 79974 - protein, 525 aa, Arabidopsis thaliana
  peptide (1)..(525): Ceres Seq. ID no. 12653945
MRVLREGGNAIDASVAAALCLGVVSPASSGIGGGAFTVVKIAGGKEIAYDSRETAPLRATENMYGGNVDLKKKGALSVGVPGEVAGLFTAWKQHGKLPWKRLVTPAEKLAEGFKISKYLYMQMNATRSDILADKGLSDLFVSNGELKKPGTICHNPKLALTLKLIGEYGPKAFYNGTVGVNLARDIKKSGGIITLKDLQSYRVKIKEPLSADILGYRVLGMPPPSSGGAAMMLVLNILSQYGIPSGVSGPLGVHRLIEALKHAFAVRMNLGDPDFTDVTKVVSDMLSPKFAKDLKSKINDQKTFDPKYYGGMWNQIDDHGTSHLSIIDRERNAVSMTSTINGYFGALMLSPSTGIVLNNEMDDFSIPMKSNGNLDVPPPAPANFIRPGKRPLSSMSPTIVLKDGKVKAAVGASGGANIIAGTTEVYLNHFFLKMDPLSSVLAPRIYHQLIPNRASYENWTTVFNDHFEIPKATRVVLEKKGHVLSPIAGGTIAQFIVQESGENSGGRSELVAVSDPRKGGFPSGY

SEQ ID NO: 79975 - protein, 463 aa, Arabidopsis thaliana
  peptide (1)..(463): Ceres Seq. ID no. 12653946
MYGGNVDLKKKGALSVGVPGEVAGLFTAWKQHGKLPWKRLVTPAEKLAEGFKISKYLYMQMNATRSDILADKGLSDLFVSNGELKKPGTICHNPKLALTLKLIGEYGPKAFYNGTVGVNLARDIKKSGGIITLKDLQSYRVKIKEPLSADILGYRVLGMPPPSSGGAAMMLVLNILSQYGIPSGVSGPLGVHRLIEALKHAFAVRMNLGDPDFTDVTKVVSDMLSPKFAKDLKSKINDQKTFDPKYYGGMWNQIDDHGTSHLSIIDRERNAVSMTSTINGYFGALMLSPSTGIVLNNEMDDFSIPMKSNGNLDVPPPAPANFIRPGKRPLSSMSPTIVLKDGKVKAAVGASGGANIIAGTTEVYLNHFFLKMDPLSSVLAPRIYHQLIPNRASYENWTTVFNDHFEIPKATRVVLEKKGHVLSPIAGGTIAQFIVQESGENSGGRSELVAVSDPRKGGFPSGY

SEQ ID NO: 79976 - DNA, 1725 bp, Arabidopsis thaliana
  misc_feature (1)..(1725): Ceres Seq. ID no. 12653947
  misc_feature (1)..(1725): Ortholog of  Ceres SEQ ID NO 14305409 as cited in SEQ ID NO 55679
atgtcgctcgttcgtactgcgacgatcgctcttcttctaatcgcgtttctgcaaaacgctaacgctgtgaaaaatctgcaaagtattgttgcgtatcacggtgcggttgcgacagacgatggacggtgttctgcaatagggacgaatgttcttcgtcaaggaggaaacgcgattgatgcgtcggtggctgctgctctttgtttgggcgttgtcagtcccgcatctagcggtataggcggtggagcgtttacaatgattaagctagctaatggcacggaagttgcttatgattccagagaaaccgctcctctaagcgccactgaggatatgtatggtgataatcctgagcgaaagaagaaaggatccttgtcagtaggcgttcccggggaagtcgcgggtctatacacggcttggacacaacacgggaagttaccgtggaagcagttagtagaacctgctgagaaacttgcagctgaaggattcaagatttcaaaatatctctatatgcagatgaatgcgactagaagcgatatcttagcggacaaaggtctctctgagctatttgtttcaaatggagagctcaagaaaccaggggcgatttgccgtaacccgaaattggctgatacactaagccaaatcgctgaatacggtccaaaagcgttttacaatggcacggttgggtttaacctagtgagtgatatacaaaaagccggagggataataactttgaaagatttgcagaattacaacgttaaggttaaagaaccattatctacggagattcttggataccgattactcggcatgcctcctccttcatctggtggccctgcaatgatgcttattttgaacattcttgctcaatatggtattccatcgggtgtttccggccccctcggtgttcatcgactagttgaggctctcaaacatgcattcgcagttagaatgaacctcggggatccagattttgtccctgaagttactaatgttgttgcagatatgttatctccaaagtttgcacaagacttgaagagcaagataaacgatgagaagacctttgatccaaaatattacggtggcaaatggggtcagatcaaggatcatgggacgagccatttatcgataatagattctgagagaaatgctgtttcaatgactagtacaatcaacggatactttggggcaataatgctgtctccgagcaccggaatcgttctaaacaacgaaatggacgatttctcgatcccgacgaaatccggaggtgacccagatgtgcccccaccagcaccggctaacttcatccgaccggggaaacgacctttgtcctctatgactcccaccattgtactcaaggacggtaaagtgaaagcagcattgggtgcgagtggaggaatgtacatcatcgccggtacaacacaagtttacttaaatcatttcttcctcaacatggatcctctctcttccgttgttgctccaagaatctaccaccagctgataccgaacaaagcttcgtatgagaattggacgacagtgtatagtgaccatttcgagattcctgaagagataagacttgtgttggagaagaaaggtcaagtcctaacgccgatcgccggagggacgatttctcagctcatagttgaacaatccgatggaaaatccggtggaattagtaagcttgtggcggttagtgatccaaggaaaggagggttcccttcaggatattga

SEQ ID NO: 79977 - protein, 574 aa, Arabidopsis thaliana
  peptide (1)..(574): Ceres Seq. ID no. 12653948
MSLVRTATIALLLIAFLQNANAVKNLQSIVAYHGAVATDDGRCSAIGTNVLRQGGNAIDASVAAALCLGVVSPASSGIGGGAFTMIKLANGTEVAYDSRETAPLSATEDMYGDNPERKKKGSLSVGVPGEVAGLYTAWTQHGKLPWKQLVEPAEKLAAEGFKISKYLYMQMNATRSDILADKGLSELFVSNGELKKPGAICRNPKLADTLSQIAEYGPKAFYNGTVGFNLVSDIQKAGGIITLKDLQNYNVKVKEPLSTEILGYRLLGMPPPSSGGPAMMLILNILAQYGIPSGVSGPLGVHRLVEALKHAFAVRMNLGDPDFVPEVTNVVADMLSPKFAQDLKSKINDEKTFDPKYYGGKWGQIKDHGTSHLSIIDSERNAVSMTSTINGYFGAIMLSPSTGIVLNNEMDDFSIPTKSGGDPDVPPPAPANFIRPGKRPLSSMTPTIVLKDGKVKAALGASGGMYIIAGTTQVYLNHFFLNMDPLSSVVAPRIYHQLIPNKASYENWTTVYSDHFEIPEEIRLVLEKKGQVLTPIAGGTISQLIVEQSDGKSGGISKLVAVSDPRKGGFPSGY

SEQ ID NO: 79978 - protein, 490 aa, Arabidopsis thaliana
  peptide (1)..(490): Ceres Seq. ID no. 12653949
MIKLANGTEVAYDSRETAPLSATEDMYGDNPERKKKGSLSVGVPGEVAGLYTAWTQHGKLPWKQLVEPAEKLAAEGFKISKYLYMQMNATRSDILADKGLSELFVSNGELKKPGAICRNPKLADTLSQIAEYGPKAFYNGTVGFNLVSDIQKAGGIITLKDLQNYNVKVKEPLSTEILGYRLLGMPPPSSGGPAMMLILNILAQYGIPSGVSGPLGVHRLVEALKHAFAVRMNLGDPDFVPEVTNVVADMLSPKFAQDLKSKINDEKTFDPKYYGGKWGQIKDHGTSHLSIIDSERNAVSMTSTINGYFGAIMLSPSTGIVLNNEMDDFSIPTKSGGDPDVPPPAPANFIRPGKRPLSSMTPTIVLKDGKVKAALGASGGMYIIAGTTQVYLNHFFLNMDPLSSVVAPRIYHQLIPNKASYENWTTVYSDHFEIPEEIRLVLEKKGQVLTPIAGGTISQLIVEQSDGKSGGISKLVAVSDPRKGGFPSGY

SEQ ID NO: 79979 - protein, 465 aa, Arabidopsis thaliana
  peptide (1)..(465): Ceres Seq. ID no. 12653950
MYGDNPERKKKGSLSVGVPGEVAGLYTAWTQHGKLPWKQLVEPAEKLAAEGFKISKYLYMQMNATRSDILADKGLSELFVSNGELKKPGAICRNPKLADTLSQIAEYGPKAFYNGTVGFNLVSDIQKAGGIITLKDLQNYNVKVKEPLSTEILGYRLLGMPPPSSGGPAMMLILNILAQYGIPSGVSGPLGVHRLVEALKHAFAVRMNLGDPDFVPEVTNVVADMLSPKFAQDLKSKINDEKTFDPKYYGGKWGQIKDHGTSHLSIIDSERNAVSMTSTINGYFGAIMLSPSTGIVLNNEMDDFSIPTKSGGDPDVPPPAPANFIRPGKRPLSSMTPTIVLKDGKVKAALGASGGMYIIAGTTQVYLNHFFLNMDPLSSVVAPRIYHQLIPNKASYENWTTVYSDHFEIPEEIRLVLEKKGQVLTPIAGGTISQLIVEQSDGKSGGISKLVAVSDPRKGGFPSGY

SEQ ID NO: 79980 - DNA, 2376 bp, Arabidopsis thaliana
  misc_feature (1)..(2376): Ceres Seq. ID no. 12653951
  misc_feature (1)..(2376): Ortholog of  Ceres SEQ ID NO 15170370 as cited in SEQ ID NO 55304
  misc_feature (1)..(2376): Ortholog of  Ceres SEQ ID NO 14310427 as cited in SEQ ID NO 55529
accggaggctccgagtcttctccgtccgtcgtaacatcttcgctctctcgttcggcgtttgtatcaccagagacgcgacgcgataatgcttcggaagtcggttctcgagctgtcttctcgtttgtcaataaagagattcccgaggaatttgggagctcagaggtttcatttgagctcttcgagaaatgcatctacatctggtaaaaatggtctccctggagctaaacccgttgggaaaccagatgcctcaaaagttgatcctccaaaagtgactcctcctcctcctactaaaggaaattcttcaaaagtggttataggaggtgttgcaatcgctggggcttttctggtagcgtatcagactggctatttggatcaatatctggggaaagaacagcagaaattaagtgagcgaattcattctgatgctctaactgaaaagctggaggaggctcatcatttgaatgtaccttccggtgttgaagattctactgaaaaagatggaaaagttgaaacgcaacctcaagttactcattctgaagcttccgagggagtgcagagtgacatagaactgcaacccgagtctgatctatcatctgaccgttttacatatatttcttctaaccaagaggagacacctcaagaaactgtcattgatagagcagagataaacttgcctatttctgcatctgaagattcaggagctaagccggacatgccatcagaaattatttctgaggcagaaagtgtgaagttggaagctgtacccaaacctggggatagtcctattattgttaatgcccagtctagttcggttcatagagaaagcgaaacggaatctgcttcaccaaaggatcctgccgctctaaagacacctgaggatggcattgagcgggaagtacaattaccaggttctctccttaaggaatataatctagaaggcagtgatactgaaagcactgggtcctcgtcaataggggagcaaataactaaagaaactgaggcctttcctaactcaaccgaggggctgaaagatagttacatgactgaggatggaaagttggtacttgattttctggctgccattcatgcagctgagaagcaacaggcccatttagatgcccaggtttttgctgaagaattacgagccttgaaggagaagtatgaaaatgagttaagagaccttagggcacgtgagctaatgcgtatagaggaggcagcaatattggataaggagctaaaaagagaacgaacaaaagcagcagctgctattaaagcaatccaggagagaatggaagataagctcaaagctgaacttgaacaaaaggaaactgaagcgcagttggctttgagtaaagctgaagaattggcaaaagctgagatgatttcgacaattgcaaaagaaaaggcagcacagattgaaaaaatggcagaggcagatcttaatataaaggcactgagtatggcattctatgcgcgctctgaagaggctcgccaaagtcattcagttcacaagcttgcattgggtgcacttgcgctggatgatacactctcgaaaggactgccagtccaaaaagaaatcgatacgcttcagacttatcttgaagggactcataaagattcaatcctaggcctggtattatcatctcttccagaagaagcacgatccaatggaaccgacacagtgctgcaattgaatcagaagtttgataccttgaaaggaacacttagacatttcagtctcattccacctggtggcggaggcatcttagcacattccctagcacatgtagcatcttcgctaaagtttaaagaagtggatcaagctaatggaggcatcgaatctgtaattaaaaaggtggataattacttggcggaaggaaaactagcagaagcagcagcaacactagaagaaggtgttaaaggaagtaaagcagaggaaatagtgagtgattgggtgcgacgtgcaagaaacagagccattacagaacaagctcttacgcttctccaatcttatgcaacttgtgttagcctcacttgaatcccttccagatcttccattgaggtacattgcttcttctttttttttaattcgatactgagattcctggagttaacaattattttgcgggaagtagtaccaactctttttctggtgaagaggaagaattacgattctctattccaatgtttatgtttgaatcacagctgttcatgttatctgaattagaatgttaccagaaagtttgatacaaaaataagatcgaatctcacgaatttatgatatttgtctggaatgggatcaggagatgttgatttggtgatgaatgttgttgctgtactgatgtggcatcatgtggtatatcactgggcttataa

SEQ ID NO: 79981 - protein, 650 aa, Arabidopsis thaliana
  peptide (1)..(650): Ceres Seq. ID no. 12653952
MLRKSVLELSSRLSIKRFPRNLGAQRFHLSSSRNASTSGKNGLPGAKPVGKPDASKVDPPKVTPPPPTKGNSSKVVIGGVAIAGAFLVAYQTGYLDQYLGKEQQKLSERIHSDALTEKLEEAHHLNVPSGVEDSTEKDGKVETQPQVTHSEASEGVQSDIELQPESDLSSDRFTYISSNQEETPQETVIDRAEINLPISASEDSGAKPDMPSEIISEAESVKLEAVPKPGDSPIIVNAQSSSVHRESETESASPKDPAALKTPEDGIEREVQLPGSLLKEYNLEGSDTESTGSSSIGEQITKETEAFPNSTEGLKDSYMTEDGKLVLDFLAAIHAAEKQQAHLDAQVFAEELRALKEKYENELRDLRARELMRIEEAAILDKELKRERTKAAAAIKAIQERMEDKLKAELEQKETEAQLALSKAEELAKAEMISTIAKEKAAQIEKMAEADLNIKALSMAFYARSEEARQSHSVHKLALGALALDDTLSKGLPVQKEIDTLQTYLEGTHKDSILGLVLSSLPEEARSNGTDTVLQLNQKFDTLKGTLRHFSLIPPGGGGILAHSLAHVASSLKFKEVDQANGGIESVIKKVDNYLAEGKLAEAAATLEEGVKGSKAEEIVSDWVRRARNRAITEQALTLLQSYATCVSLT

SEQ ID NO: 79982 - protein, 441 aa, Arabidopsis thaliana
  peptide (1)..(441): Ceres Seq. ID no. 12653953
MPSEIISEAESVKLEAVPKPGDSPIIVNAQSSSVHRESETESASPKDPAALKTPEDGIEREVQLPGSLLKEYNLEGSDTESTGSSSIGEQITKETEAFPNSTEGLKDSYMTEDGKLVLDFLAAIHAAEKQQAHLDAQVFAEELRALKEKYENELRDLRARELMRIEEAAILDKELKRERTKAAAAIKAIQERMEDKLKAELEQKETEAQLALSKAEELAKAEMISTIAKEKAAQIEKMAEADLNIKALSMAFYARSEEARQSHSVHKLALGALALDDTLSKGLPVQKEIDTLQTYLEGTHKDSILGLVLSSLPEEARSNGTDTVLQLNQKFDTLKGTLRHFSLIPPGGGGILAHSLAHVASSLKFKEVDQANGGIESVIKKVDNYLAEGKLAEAAATLEEGVKGSKAEEIVSDWVRRARNRAITEQALTLLQSYATCVSLT

SEQ ID NO: 79983 - protein, 332 aa, Arabidopsis thaliana
  peptide (1)..(332): Ceres Seq. ID no. 12653954
MTEDGKLVLDFLAAIHAAEKQQAHLDAQVFAEELRALKEKYENELRDLRARELMRIEEAAILDKELKRERTKAAAAIKAIQERMEDKLKAELEQKETEAQLALSKAEELAKAEMISTIAKEKAAQIEKMAEADLNIKALSMAFYARSEEARQSHSVHKLALGALALDDTLSKGLPVQKEIDTLQTYLEGTHKDSILGLVLSSLPEEARSNGTDTVLQLNQKFDTLKGTLRHFSLIPPGGGGILAHSLAHVASSLKFKEVDQANGGIESVIKKVDNYLAEGKLAEAAATLEEGVKGSKAEEIVSDWVRRARNRAITEQALTLLQSYATCVSLT

SEQ ID NO: 79984 - DNA, 477 bp, Arabidopsis thaliana
  misc_feature (1)..(477): Ceres Seq. ID no. 12653955
  misc_feature (1)..(477): Ortholog of  Ceres SEQ ID NO 15177004 as cited in SEQ ID NO 57554
  misc_feature (1)..(477): Ortholog of  Ceres SEQ ID NO 13662587 as cited in SEQ ID NO 63275
  misc_feature (1)..(477): Ortholog of  Ceres SEQ ID NO 13599500 as cited in SEQ ID NO 0
atgggagttgggggaacgttggagtatatatcagagctaatagggaatggaggaagccatagttatggaaaaaggaagaagaagaagcagtttcaaacagtagagctcaaagttaggatggattgtgatggttgtgtcctcaaaatcaaaaactctctttcttctctaaaaggagtgaaaacggtggagataaacaagaagcaacagaaggtgacagtgagtggttatgcggatgcgagcaaggtgctgaagaaggctaaagcgacggggaagaaagccgagatatggccgtacgtaccgtacaacttggtggctcagccgtacatagctcaggcttatgataagaaagcaccgcctggttacgtcagaaaagttgacccaaacgtcaccaccgggacgatggctgtttactacgatgacccttcttatacttctttgtttagtgatgataatcctaatgcttgctctattatgtag

SEQ ID NO: 79985 - protein, 158 aa, Arabidopsis thaliana
  peptide (1)..(158): Ceres Seq. ID no. 12653956
MGVGGTLEYISELIGNGGSHSYGKRKKKKQFQTVELKVRMDCDGCVLKIKNSLSSLKGVKTVEINKKQQKVTVSGYADASKVLKKAKATGKKAEIWPYVPYNLVAQPYIAQAYDKKAPPGYVRKVDPNVTTGTMAVYYDDPSYTSLFSDDNPNACSIM

SEQ ID NO: 79986 - protein, 119 aa, Arabidopsis thaliana
  peptide (1)..(119): Ceres Seq. ID no. 12653957
MDCDGCVLKIKNSLSSLKGVKTVEINKKQQKVTVSGYADASKVLKKAKATGKKAEIWPYVPYNLVAQPYIAQAYDKKAPPGYVRKVDPNVTTGTMAVYYDDPSYTSLFSDDNPNACSIM

SEQ ID NO: 79987 - DNA, 866 bp, Arabidopsis thaliana
  misc_feature (1)..(866): Ceres Seq. ID no. 12653958
  misc_feature (1)..(866): Ortholog of  Ceres SEQ ID NO 12608262 as cited in SEQ ID NO 57800
ggaagcagagatcgaaacgaagactcaaagaagaatggcgatttctactttaacactcacacaatctctctatacacgttccttcagaccaaccatcttcttttcttcttcttcttcctcgtccttttcgtgtctctgttcttcttcctccgattgcgagccgaaactctccgtcaagaaacgcgttttcggagtgggtttagggttcctagcttcttcgattctctctctaacgcctctggacgcagacgccacgaggattgactactacgccactgtaggagatcctctctgcgaatacagctacgcaaaatcaggacttggattttgcgatctcgatgttggatttggtgatgaagcccctcgtggcgtactcgtcaatatccattacacggcgaggtttgcagatggaacgttgtttgacagtagctataagcgtgcaagaccacttactatgcgaattggagtcggcaaggtaattaggggactagaccaggggattcttggaggcgaaggagtacctcctatgcgagtaggcggaaagcgtaaacttcagattccacctaagttagcttatggaccagagcctgcaggatgcttttctggtgactgcaacatacctggcaatgcaactttgctctatgatatcaactttgttgagatctacccaggaagtaatacaagatgaagccaactccaatcccgtttggtaaaggaacaaacaactatgtatgtgatgtatatcaccaggtgattacttttgacaagcttcagattataatttctgtaacctaaaacattgatgatttccaactgaatccaatgtctaacctcctattaaagaacaagacacatcttctctgtgc

SEQ ID NO: 79988 - protein, 228 aa, Arabidopsis thaliana
  peptide (1)..(228): Ceres Seq. ID no. 12653959
EAEIETKTQRRMAISTLTLTQSLYTRSFRPTIFFSSSSSSSFSCLCSSSSDCEPKLSVKKRVFGVGLGFLASSILSLTPLDADATRIDYYATVGDPLCEYSYAKSGLGFCDLDVGFGDEAPRGVLVNIHYTARFADGTLFDSSYKRARPLTMRIGVGKVIRGLDQGILGGEGVPPMRVGGKRKLQIPPKLAYGPEPAGCFSGDCNIPGNATLLYDINFVEIYPGSNTR

SEQ ID NO: 79989 - protein, 217 aa, Arabidopsis thaliana
  peptide (1)..(217): Ceres Seq. ID no. 12653960
MAISTLTLTQSLYTRSFRPTIFFSSSSSSSFSCLCSSSSDCEPKLSVKKRVFGVGLGFLASSILSLTPLDADATRIDYYATVGDPLCEYSYAKSGLGFCDLDVGFGDEAPRGVLVNIHYTARFADGTLFDSSYKRARPLTMRIGVGKVIRGLDQGILGGEGVPPMRVGGKRKLQIPPKLAYGPEPAGCFSGDCNIPGNATLLYDINFVEIYPGSNTR

SEQ ID NO: 79990 - DNA, 819 bp, Arabidopsis thaliana
  misc_feature (1)..(819): Ceres Seq. ID no. 12653971
  misc_feature (1)..(819): Ortholog of  Ceres SEQ ID NO 15227289 as cited in SEQ ID NO 58851
  misc_feature (1)..(819): Ortholog of  Ceres SEQ ID NO 13584416 as cited in SEQ ID NO 63441
atggcagccatagatatgttcaatagcaacacagatccttttcaagaagagctcatgaaagcacttcaaccttataccaccaacactgattcttcttctcctacgtattcaaacacagtcttcggtttcaatcaaaccacatctctcggtctaaaccagctcacaccttaccaaatccaccaaatccaaaaccagcttaaccagagacgtaacataatctctccaaatctagccccaaagcctgtcccaatgaagaacatgaccgctcagaaactctatagaggagttagacaaaggcactggggaaaatgggtagctgagatccgtttacccaagaaccggacccgactctggcttggaactttcgacacagctgaagaagcagccatggcttatgacctagctgcttacaagctaagaggcgagttcgcgagacttaatttcccacagttcagacacgaggatggatactacggaggaggtagctgtttcaatcctcttcattcctctgtcgacgcaaagctccaagagatttgtcagagcttgagaaaaacagaggatattgacctcccctgttctgaaacagagcttttcccgccaaaaacagagtatcaagaaagtgaatatgggttcttgagatctgatgagaattcgttttcagatgagtctcatgtggaatcttcttcgccggaatctggtattactacgttcttggacttttcggattctggatttgatgagattgggagtttcgggctggagaagtttccttctgtggagattgattgggatgcgattagcaaattgtccgaatcttaa

SEQ ID NO: 79991 - protein, 272 aa, Arabidopsis thaliana
  peptide (1)..(272): Ceres Seq. ID no. 12653972
MAAIDMFNSNTDPFQEELMKALQPYTTNTDSSSPTYSNTVFGFNQTTSLGLNQLTPYQIHQIQNQLNQRRNIISPNLAPKPVPMKNMTAQKLYRGVRQRHWGKWVAEIRLPKNRTRLWLGTFDTAEEAAMAYDLAAYKLRGEFARLNFPQFRHEDGYYGGGSCFNPLHSSVDAKLQEICQSLRKTEDIDLPCSETELFPPKTEYQESEYGFLRSDENSFSDESHVESSSPESGITTFLDFSDSGFDEIGSFGLEKFPSVEIDWDAISKLSES

SEQ ID NO: 79992 - protein, 267 aa, Arabidopsis thaliana
  peptide (1)..(267): Ceres Seq. ID no. 12653973
MFNSNTDPFQEELMKALQPYTTNTDSSSPTYSNTVFGFNQTTSLGLNQLTPYQIHQIQNQLNQRRNIISPNLAPKPVPMKNMTAQKLYRGVRQRHWGKWVAEIRLPKNRTRLWLGTFDTAEEAAMAYDLAAYKLRGEFARLNFPQFRHEDGYYGGGSCFNPLHSSVDAKLQEICQSLRKTEDIDLPCSETELFPPKTEYQESEYGFLRSDENSFSDESHVESSSPESGITTFLDFSDSGFDEIGSFGLEKFPSVEIDWDAISKLSES

SEQ ID NO: 79993 - protein, 254 aa, Arabidopsis thaliana
  peptide (1)..(254): Ceres Seq. ID no. 12653974
MKALQPYTTNTDSSSPTYSNTVFGFNQTTSLGLNQLTPYQIHQIQNQLNQRRNIISPNLAPKPVPMKNMTAQKLYRGVRQRHWGKWVAEIRLPKNRTRLWLGTFDTAEEAAMAYDLAAYKLRGEFARLNFPQFRHEDGYYGGGSCFNPLHSSVDAKLQEICQSLRKTEDIDLPCSETELFPPKTEYQESEYGFLRSDENSFSDESHVESSSPESGITTFLDFSDSGFDEIGSFGLEKFPSVEIDWDAISKLSES

SEQ ID NO: 79994 - DNA, 1911 bp, Arabidopsis thaliana
  misc_feature (1)..(1911): Ceres Seq. ID no. 12653988
  misc_feature (1)..(1911): Ortholog of  Ceres SEQ ID NO 13585332 as cited in SEQ ID NO 60654
  misc_feature (1)..(1911): Ortholog of  Ceres SEQ ID NO 13502874 as cited in SEQ ID NO 66298
atccatgcagagacaacagaaaccacaacaaaaactttgagtcctcttcttctctatacacaaacatgaacacttttacctcaaactcttcggatctcactaccactgcaaccgaaacatcgtcctttagcaccttgtatctcctctcaacacttcaagcttttgtggctataaccttagtgatgctactcaagaaattgatgacggatcccaacaaaaagaaaccgtatctgccaccgggtcccacaggatggccgatcattggaatgattccgacgatgctaaagagccggcccgttttccggtggctccacagcatcatgaagcagctcaatactgagatagcatgcgtgaagttaggaaacactcatgtgatcaccgtcacgtgccctaagatagcacgtgagatactcaagcaacaagacgctctcttcgcgtcgaggcctttaacttacgctcagaagatcctctctaacggctacaaaacctgcgtgatcactccctttggtgaccaattcaagaaaatgaggaaagttgtgatgacggaactcgtatgtccagcgagacacaggtggctccaccagaagagatcagaagaaaacgatcatttaaccgcttgggtatacaacatggttaagaactcgggctctgtcgatttccggttcatgactaggcattactgtggaaatgcaatcaagaagcttatgttcgggacgagaacgttctctaagaacactgcacctgacggtggacccaccgtagaagatgtagagcacatggaagcaatgtttgaagcattagggtttaccttcgctttttgcatctctgattatctgccgatgctcactggacttgatcttaacggtcacgagaagattatgagagaatcaagtgcgattatggacaagtatcatgacccaatcatcgacgagaggatcaagatgtggagagaaggaaagagaactcaaatcgaagattttcttgatattttcatctctatcaaagacgaacaaggcaacccattgcttaccgccgatgaaatcaaacccaccattaaggagcttgtaatggcggcgccagacaatccatcaaacgccgtggaatgggccatggcggagatggtgaacaaaccggagattctccgtaaagcaatggaagagatcgacagagtcgtcgggaaagagagactcgttcaagaatccgacatcccaaaactaaactacgtcaaagctatcctccgcgaagctttccgtctccatcccgtcgccgccttcaacctcccccacgtggcactttctgacacaaccgtcgccggatatcacatccctaaaggaagtcaagtccttcttagccgatatgggctgggccgtaacccaaaagtttgggccgacccactttgctttaaaccggagagacatctcaacgaatgctccgaagttactttgaccgagaacgatctccggtttatctcgttcagtaccgggaaaagaggttgtgcggctccggcgctaggaacggcgttgaccacgatgatgctcgcgagacttcttcaaggtttcacttggaagctacctgagaatgagacacgtgtcgagctgatggagtctagtcacgatatgtttctggctaaaccgttggttatggtcggtgaccttagattgccggagcatctctacccgacggtgaagtgagatgagacgacgccgtatatattttatgaaactacttttatataatcgcccaaccaagtttggtcaattccggttaccagaagataattggtcaaattgtgaacaaacttgtgtgttggtttcttggttctttttgggacacttgaattgtgtctcctttacctcttcttttgttgttttcaataaaaacttttattaccatttcaataaaaagatcatc

SEQ ID NO: 79995 - protein, 562 aa, Arabidopsis thaliana
  peptide (1)..(562): Ceres Seq. ID no. 12653989
PCRDNRNHNKNFESSSSLYTNMNTFTSNSSDLTTTATETSSFSTLYLLSTLQAFVAITLVMLLKKLMTDPNKKKPYLPPGPTGWPIIGMIPTMLKSRPVFRWLHSIMKQLNTEIACVKLGNTHVITVTCPKIAREILKQQDALFASRPLTYAQKILSNGYKTCVITPFGDQFKKMRKVVMTELVCPARHRWLHQKRSEENDHLTAWVYNMVKNSGSVDFRFMTRHYCGNAIKKLMFGTRTFSKNTAPDGGPTVEDVEHMEAMFEALGFTFAFCISDYLPMLTGLDLNGHEKIMRESSAIMDKYHDPIIDERIKMWREGKRTQIEDFLDIFISIKDEQGNPLLTADEIKPTIKELVMAAPDNPSNAVEWAMAEMVNKPEILRKAMEEIDRVVGKERLVQESDIPKLNYVKAILREAFRLHPVAAFNLPHVALSDTTVAGYHIPKGSQVLLSRYGLGRNPKVWADPLCFKPERHLNECSEVTLTENDLRFISFSTGKRGCAAPALGTALTTMMLARLLQGFTWKLPENETRVELMESSHDMFLAKPLVMVGDLRLPEHLYPTVK

SEQ ID NO: 79996 - protein, 541 aa, Arabidopsis thaliana
  peptide (1)..(541): Ceres Seq. ID no. 12653990
MNTFTSNSSDLTTTATETSSFSTLYLLSTLQAFVAITLVMLLKKLMTDPNKKKPYLPPGPTGWPIIGMIPTMLKSRPVFRWLHSIMKQLNTEIACVKLGNTHVITVTCPKIAREILKQQDALFASRPLTYAQKILSNGYKTCVITPFGDQFKKMRKVVMTELVCPARHRWLHQKRSEENDHLTAWVYNMVKNSGSVDFRFMTRHYCGNAIKKLMFGTRTFSKNTAPDGGPTVEDVEHMEAMFEALGFTFAFCISDYLPMLTGLDLNGHEKIMRESSAIMDKYHDPIIDERIKMWREGKRTQIEDFLDIFISIKDEQGNPLLTADEIKPTIKELVMAAPDNPSNAVEWAMAEMVNKPEILRKAMEEIDRVVGKERLVQESDIPKLNYVKAILREAFRLHPVAAFNLPHVALSDTTVAGYHIPKGSQVLLSRYGLGRNPKVWADPLCFKPERHLNECSEVTLTENDLRFISFSTGKRGCAAPALGTALTTMMLARLLQGFTWKLPENETRVELMESSHDMFLAKPLVMVGDLRLPEHLYPTVK

SEQ ID NO: 79997 - protein, 502 aa, Arabidopsis thaliana
  peptide (1)..(502): Ceres Seq. ID no. 12653991
MLLKKLMTDPNKKKPYLPPGPTGWPIIGMIPTMLKSRPVFRWLHSIMKQLNTEIACVKLGNTHVITVTCPKIAREILKQQDALFASRPLTYAQKILSNGYKTCVITPFGDQFKKMRKVVMTELVCPARHRWLHQKRSEENDHLTAWVYNMVKNSGSVDFRFMTRHYCGNAIKKLMFGTRTFSKNTAPDGGPTVEDVEHMEAMFEALGFTFAFCISDYLPMLTGLDLNGHEKIMRESSAIMDKYHDPIIDERIKMWREGKRTQIEDFLDIFISIKDEQGNPLLTADEIKPTIKELVMAAPDNPSNAVEWAMAEMVNKPEILRKAMEEIDRVVGKERLVQESDIPKLNYVKAILREAFRLHPVAAFNLPHVALSDTTVAGYHIPKGSQVLLSRYGLGRNPKVWADPLCFKPERHLNECSEVTLTENDLRFISFSTGKRGCAAPALGTALTTMMLARLLQGFTWKLPENETRVELMESSHDMFLAKPLVMVGDLRLPEHLYPTVK

SEQ ID NO: 79998 - DNA, 2181 bp, Arabidopsis thaliana
  misc_feature (1)..(2181): Ceres Seq. ID no. 12653992
  misc_feature (1)..(2181): Ortholog of  Ceres SEQ ID NO 12586556 as cited in SEQ ID NO 64667
  misc_feature (1)..(2181): Ortholog of  Ceres SEQ ID NO 13660894 as cited in SEQ ID NO 67475
atgttgcgtcgtctcttgaaacccaatcttgttgttactctacgcaaactctcttcttcttccgcaagctacgtcgatcgtcatattagtgtgattctctgcgatcagagcttgagcttagagtctctgcgcaaacacaacgctcttatcatcaccggaggactctcggaaaacatcttcgtcgcatcgaagctaatttcatcttacgcttcttacgggaaacccaatttgtcttccagagtcttccatttggttactcgaagagatatctttctttggaattctattatcaaagcacatttctccaatggggattatgctcgatccttgtgtttcttcttctcaatgctcttgtctggccaatcccctgatcatttcactgctcccatggttgtttctgcttgtgcggagcttttgtggtttcatgttgggactttcgttcacgggcttgttttgaaacatggaggttttgatagaaacactgctgtgggagcttcctttgtgtatttctactcaaagtgtgggtttttacaagatgcgtgtcttgtgttcgacgaaatgcctgacagagatgttgttgcttggactgccattatatctgggcatgtgcagaacggcgagagcgagggaggtttgggttatctttgcaagatgcatagtgctggttctgatgttgataagccgaatcccagaacattggaatgcggattccaagcttgttctaatctgggagctttgaaagaaggaagatgtcttcatggatttgcggtgaaaaatggtttagcttcttccaagtttgtccagtcttccatgttttcattctattcgaaatctgggaatccatccgaggcttatctttctttccgtgaacttggggatgaagatatgttttcatggacttcgattatagcgtcactggcgagatcaggtgacatggaggaaagttttgatatgttctgggaaatgcagaacaagggaatgcacccagatggggttgtcattagctgtttgattaatgaactaggtaagatgatgcttgtccctcagggtaaagcctttcacggtacagtttgcaattccttgttatcgatgtactgcaaattcgagcttctgtctgtggctgagaagcttttctgtaggataagcgaagaaggaaacaaagaagcttggaatacaatgcttaaaggctatggagcggtgctactagggaagtcgttgcattgctatgttgtcaaaactagcctggatcttaccatctcagtggtcaattccctcattgatttgtatggaaaaatgggagacttgactgtagcttggaggatgttttgtgaagcagatactaacgttatcacttggaacgcaatgattgcgtcttatgttcactgtgagcaatccgaaaaagccattgcattgttcgatagaatggtttctgagaatttcaaacccagctcaataactttggtgactctgcttatggcttgtgtcaatactggctctctggagagaggacagatgattcatcggtacatcactgaaacagagcacgagatgaatctttctctttcagctgctctcattgacatgtacgcgaaatgtggccaccttgaaaagtcacgagaactgtttgatgctggaaatcagaaggatgccgtttgttggaatgtgatgatatcaggttatggaatgcacggagatgttgaatcggccatagcactttttgatcaaatggaagagtctgatgttaaaccaaccggacctacatttcttgcgcttctatcggcttgcacgcacgctggtttagtagaacaagggaaaaaactatttctcaagatgcatcagtacgatgtgaaacccaacttaaagcattactcttgtcttgtggatcttctttccaggtctggtaatttggaggaagctgaaagcacagtcatgtctatgccattctcaccagacggggtcatatggggaacattgttgagctcatgcatgacccatggggagtttgagatgggaattcgaatggcagaacgtgcggttgctagtgatccgcagaacgatgggtattatataatgcttgcgaacatgtacagtgctgcaggtaagtgggaagaagcggaaagggcacgagagatgatgagggaaagcggagttggtaagagagctggtcatagtgtagtctaa

SEQ ID NO: 79999 - protein, 726 aa, Arabidopsis thaliana
  peptide (1)..(726): Ceres Seq. ID no. 12653993
MLRRLLKPNLVVTLRKLSSSSASYVDRHISVILCDQSLSLESLRKHNALIITGGLSENIFVASKLISSYASYGKPNLSSRVFHLVTRRDIFLWNSIIKAHFSNGDYARSLCFFFSMLLSGQSPDHFTAPMVVSACAELLWFHVGTFVHGLVLKHGGFDRNTAVGASFVYFYSKCGFLQDACLVFDEMPDRDVVAWTAIISGHVQNGESEGGLGYLCKMHSAGSDVDKPNPRTLECGFQACSNLGALKEGRCLHGFAVKNGLASSKFVQSSMFSFYSKSGNPSEAYLSFRELGDEDMFSWTSIIASLARSGDMEESFDMFWEMQNKGMHPDGVVISCLINELGKMMLVPQGKAFHGTVCNSLLSMYCKFELLSVAEKLFCRISEEGNKEAWNTMLKGYGAVLLGKSLHCYVVKTSLDLTISVVNSLIDLYGKMGDLTVAWRMFCEADTNVITWNAMIASYVHCEQSEKAIALFDRMVSENFKPSSITLVTLLMACVNTGSLERGQMIHRYITETEHEMNLSLSAALIDMYAKCGHLEKSRELFDAGNQKDAVCWNVMISGYGMHGDVESAIALFDQMEESDVKPTGPTFLALLSACTHAGLVEQGKKLFLKMHQYDVKPNLKHYSCLVDLLSRSGNLEEAESTVMSMPFSPDGVIWGTLLSSCMTHGEFEMGIRMAERAVASDPQNDGYYIMLANMYSAAGKWEEAERAREMMRESGVGKRAGHSVV

SEQ ID NO: 80000 - protein, 611 aa, Arabidopsis thaliana
  peptide (1)..(611): Ceres Seq. ID no. 12653994
MLLSGQSPDHFTAPMVVSACAELLWFHVGTFVHGLVLKHGGFDRNTAVGASFVYFYSKCGFLQDACLVFDEMPDRDVVAWTAIISGHVQNGESEGGLGYLCKMHSAGSDVDKPNPRTLECGFQACSNLGALKEGRCLHGFAVKNGLASSKFVQSSMFSFYSKSGNPSEAYLSFRELGDEDMFSWTSIIASLARSGDMEESFDMFWEMQNKGMHPDGVVISCLINELGKMMLVPQGKAFHGTVCNSLLSMYCKFELLSVAEKLFCRISEEGNKEAWNTMLKGYGAVLLGKSLHCYVVKTSLDLTISVVNSLIDLYGKMGDLTVAWRMFCEADTNVITWNAMIASYVHCEQSEKAIALFDRMVSENFKPSSITLVTLLMACVNTGSLERGQMIHRYITETEHEMNLSLSAALIDMYAKCGHLEKSRELFDAGNQKDAVCWNVMISGYGMHGDVESAIALFDQMEESDVKPTGPTFLALLSACTHAGLVEQGKKLFLKMHQYDVKPNLKHYSCLVDLLSRSGNLEEAESTVMSMPFSPDGVIWGTLLSSCMTHGEFEMGIRMAERAVASDPQNDGYYIMLANMYSAAGKWEEAERAREMMRESGVGKRAGHSVV

SEQ ID NO: 80001 - protein, 597 aa, Arabidopsis thaliana
  peptide (1)..(597): Ceres Seq. ID no. 12653995
MVVSACAELLWFHVGTFVHGLVLKHGGFDRNTAVGASFVYFYSKCGFLQDACLVFDEMPDRDVVAWTAIISGHVQNGESEGGLGYLCKMHSAGSDVDKPNPRTLECGFQACSNLGALKEGRCLHGFAVKNGLASSKFVQSSMFSFYSKSGNPSEAYLSFRELGDEDMFSWTSIIASLARSGDMEESFDMFWEMQNKGMHPDGVVISCLINELGKMMLVPQGKAFHGTVCNSLLSMYCKFELLSVAEKLFCRISEEGNKEAWNTMLKGYGAVLLGKSLHCYVVKTSLDLTISVVNSLIDLYGKMGDLTVAWRMFCEADTNVITWNAMIASYVHCEQSEKAIALFDRMVSENFKPSSITLVTLLMACVNTGSLERGQMIHRYITETEHEMNLSLSAALIDMYAKCGHLEKSRELFDAGNQKDAVCWNVMISGYGMHGDVESAIALFDQMEESDVKPTGPTFLALLSACTHAGLVEQGKKLFLKMHQYDVKPNLKHYSCLVDLLSRSGNLEEAESTVMSMPFSPDGVIWGTLLSSCMTHGEFEMGIRMAERAVASDPQNDGYYIMLANMYSAAGKWEEAERAREMMRESGVGKRAGHSVV

SEQ ID NO: 80002 - DNA, 1690 bp, Arabidopsis thaliana
  misc_feature (1)..(1690): Ceres Seq. ID no. 12653996
  misc_feature (1)..(1690): Ortholog of  Ceres SEQ ID NO 13639663 as cited in SEQ ID NO 57850
atctatcgcaaaactctcccgtcgtcaccattcgattacgggagtgtaatggctcttatacaatttggaagttcatgtgttgctcaatgggggattcttcgtcctcggtttgctgttaaagctttttatccaagcagattggagtctcaccaagacaattgcatcagccaaataaattgtctgggagcttcaaggtcgagtatgtttgcacagggctctttacccttcttgtcattgacgggagtatctcctaatacacattctcgtagaggagctcgcttcactgttagagctgatactgatttctattctgtccttggagtctcgaaaaatgcaaccaaagctgagattaaaagcgcttatcggaagctcgctaggagttatcatccagatgtgaacaaggatgctggggcagaagataaatttaaagaaataagtaatgcatatgagatcttatcagatgatgagaaaagatctctatacgacagatatggcgaggcaggagttaaaggcgctggaatgggaggcatgggggattatagtaatccgtttgatctatttgagtcattattcgaaggaatgggtgggatgggaggaatgggcggtggaatgggtagtagaggttcaaggagcagagctatcgatggtgaagatgagtattactcactaatcttgaatttcaaagaagcggttttcggtattgagaaagaaattgagatatctcggttagagagctgtgggacttgcaatggttctggagctaaagcgggaaccaaaccaaccaaatgcaaaacatgtggcgggcaaggacaggtggtagcatcaacgaggacaccactcggtgtattccaacaagtgatgacttgctctccgtgtaacggaactggggagatatcaaaaccgtgtggtgcatgctcaggagatggacgtgtgagaaggacaaagcggattagtcttaaagttcctgcgggtgtggattctggaagtaggttaagagtgaggggagaagggaatgcaggaaagagaggtggatcaccgggagatctctttgcggttattgaggttattccagatccggttttgaagcgtgatgatacaaatatactttatacgtgtaagatatcgtatgtagatgccatattggggacgactttgaaggtaccaacagtggatggagaggtggatttgaaagtaccggcagggacacaaccaagcacgacattggtgatggctaaaaaaggagttccggttttgaataagagcaagatgagaggtgatcagttagtgagagtgcaagttgagattcctaagagattgagtaaagaagagaagatgcttgttgaggagctggctgatatgagcaagaacaaggtagctaatagcaggagataaaccaacacacaatattagtgaaatgtgatgttatatagattcatcattctctgcttgtcgtctttctaatggttcgtctaacgatggagaagataagcaagaggcaaaagaaagacttattaggtgagaggaaaatttgaagaactctggttttgggttttcctcttcaatttttgtgttttacttttaaaacaaattttatggatttatcaggattcagggtaggtcttgattgtattgtactgctatttttatacatttgaatcttcttttcttattaatgaaaattttatcaaac

SEQ ID NO: 80003 - protein, 463 aa, Arabidopsis thaliana
  peptide (1)..(463): Ceres Seq. ID no. 12653997
IYRKTLPSSPFDYGSVMALIQFGSSCVAQWGILRPRFAVKAFYPSRLESHQDNCISQINCLGASRSSMFAQGSLPFLSLTGVSPNTHSRRGARFTVRADTDFYSVLGVSKNATKAEIKSAYRKLARSYHPDVNKDAGAEDKFKEISNAYEILSDDEKRSLYDRYGEAGVKGAGMGGMGDYSNPFDLFESLFEGMGGMGGMGGGMGSRGSRSRAIDGEDEYYSLILNFKEAVFGIEKEIEISRLESCGTCNGSGAKAGTKPTKCKTCGGQGQVVASTRTPLGVFQQVMTCSPCNGTGEISKPCGACSGDGRVRRTKRISLKVPAGVDSGSRLRVRGEGNAGKRGGSPGDLFAVIEVIPDPVLKRDDTNILYTCKISYVDAILGTTLKVPTVDGEVDLKVPAGTQPSTTLVMAKKGVPVLNKSKMRGDQLVRVQVEIPKRLSKEEKMLVEELADMSKNKVANSRR

SEQ ID NO: 80004 - protein, 447 aa, Arabidopsis thaliana
  peptide (1)..(447): Ceres Seq. ID no. 12653998
MALIQFGSSCVAQWGILRPRFAVKAFYPSRLESHQDNCISQINCLGASRSSMFAQGSLPFLSLTGVSPNTHSRRGARFTVRADTDFYSVLGVSKNATKAEIKSAYRKLARSYHPDVNKDAGAEDKFKEISNAYEILSDDEKRSLYDRYGEAGVKGAGMGGMGDYSNPFDLFESLFEGMGGMGGMGGGMGSRGSRSRAIDGEDEYYSLILNFKEAVFGIEKEIEISRLESCGTCNGSGAKAGTKPTKCKTCGGQGQVVASTRTPLGVFQQVMTCSPCNGTGEISKPCGACSGDGRVRRTKRISLKVPAGVDSGSRLRVRGEGNAGKRGGSPGDLFAVIEVIPDPVLKRDDTNILYTCKISYVDAILGTTLKVPTVDGEVDLKVPAGTQPSTTLVMAKKGVPVLNKSKMRGDQLVRVQVEIPKRLSKEEKMLVEELADMSKNKVANSRR

SEQ ID NO: 80005 - protein, 396 aa, Arabidopsis thaliana
  peptide (1)..(396): Ceres Seq. ID no. 12653999
MFAQGSLPFLSLTGVSPNTHSRRGARFTVRADTDFYSVLGVSKNATKAEIKSAYRKLARSYHPDVNKDAGAEDKFKEISNAYEILSDDEKRSLYDRYGEAGVKGAGMGGMGDYSNPFDLFESLFEGMGGMGGMGGGMGSRGSRSRAIDGEDEYYSLILNFKEAVFGIEKEIEISRLESCGTCNGSGAKAGTKPTKCKTCGGQGQVVASTRTPLGVFQQVMTCSPCNGTGEISKPCGACSGDGRVRRTKRISLKVPAGVDSGSRLRVRGEGNAGKRGGSPGDLFAVIEVIPDPVLKRDDTNILYTCKISYVDAILGTTLKVPTVDGEVDLKVPAGTQPSTTLVMAKKGVPVLNKSKMRGDQLVRVQVEIPKRLSKEEKMLVEELADMSKNKVANSRR

SEQ ID NO: 80006 - DNA, 1578 bp, Arabidopsis thaliana
  misc_feature (1)..(1578): Ceres Seq. ID no. 12654000
  misc_feature (1)..(1578): Ortholog of  Ceres SEQ ID NO 15174547 as cited in SEQ ID NO 59586
  misc_feature (1)..(1578): Ortholog of  Ceres SEQ ID NO 15169470 as cited in SEQ ID NO 66036
atggctctttccaacgcctcctctctctccaccagatctatctacggcggtgatctttctcaccgtccaagcaaccgtcaatcatccttcacatttcatcccgccgtcaacaccaagcctaaatccgttaacctcgtcacggctgtacacgcggctgagccagctagaaacgctgtttcagtcaaagaatccgttgcgtcttcttcgtctggtgcattgaaatggactccagagagctggaaactgaagaaggctctgcaacttcctgattatcctaacgccaatgagcttgagtctgtgcttaaaacgatagaggcttttcctccgattgtgttcgccggagaagctaggaatcttgaagagagattggctgatgctgctgttggtaaagcttttcttctccaaggaggtgattgtgctgagagtttcaaggagttcaatgctactaatatcagagacaccttcagggttctgcttcagatgagtattgttcttacattcggtggccaggttccggtcattaaggttgggaggatggctggtcaatttgcaaagcctagatctgatgcatttgaggagaaggatggagtgaaattaccaagctacaagggagataacatcaatggtgatacttttgatgagaaatccaggattcctgatcctaataggatgattcgagcttacactcaatctgcagctactttgaatcttcttagagcctttgccactggaggttacgctgctattcaaagagttactcaatggaaccttgattttgttgaacaaagtgagcaagctgacaggtaccaggaattagctaatagggttgatgaggccttggggttcatgtctgcatgtggacttggcacggatcatccacttatgactacaactgatttctacacatcccatgagtgtttgcttctgccttatgaacagtcccttacaaggttggattcaacttctggtctctactatgattgttctgcacacatggtctggtgcggagagcgtaccagacaattggatggcgctcatgtcgagtttctcagggggattgctaatcctctgggcattaaggtgagcaacaaaatggatccctttgagctggttaagctagtagaaatcctgaatcctaataacaagcctggaagaatcactgtaattgtgagaatgggtgccgagaacatgagagttaagcttccccacctgatcagagcagtccgcagatcaggccagattgtgacatgggtctgcgatccaatgcatggaaacaccatcaaagcaccttgcggtcttaaaacacgtgcctttgactcaatactggctgaagtccgagcattccttgatgtgcacgagcaagaaggaagccacgcgggcggtatccatctcgagatgacaggtcagaacgtgacagaatgcattggagggtcccgcactgtgacctacgatgacctcagttctcgctaccacacacactgtgacccaaggctgaacgcgtcacagtctcttgaacttgccttcattgttgcagaacggctcaggaagagaagaacgggtagccagcgtgtgtcttga

SEQ ID NO: 80007 - protein, 525 aa, Arabidopsis thaliana; identical to SEQ ID NO: 30916
  peptide (1)..(525): Ceres Seq. ID no. 12654001

SEQ ID NO: 80008 - protein, 365 aa, Arabidopsis thaliana; identical to SEQ ID NO: 30917
  peptide (1)..(365): Ceres Seq. ID no. 12654002

SEQ ID NO: 80009 - protein, 347 aa, Arabidopsis thaliana
  peptide (1)..(347): Ceres Seq. ID no. 12654003
MAGQFAKPRSDAFEEKDGVKLPSYKGDNINGDTFDEKSRIPDPNRMIRAYTQSAATLNLLRAFATGGYAAIQRVTQWNLDFVEQSEQADRYQELANRVDEALGFMSACGLGTDHPLMTTTDFYTSHECLLLPYEQSLTRLDSTSGLYYDCSAHMVWCGERTRQLDGAHVEFLRGIANPLGIKVSNKMDPFELVKLVEILNPNNKPGRITVIVRMGAENMRVKLPHLIRAVRRSGQIVTWVCDPMHGNTIKAPCGLKTRAFDSILAEVRAFLDVHEQEGSHAGGIHLEMTGQNVTECIGGSRTVTYDDLSSRYHTHCDPRLNASQSLELAFIVAERLRKRRTGSQRVS

SEQ ID NO: 80010 - DNA, 1900 bp, Arabidopsis thaliana
  misc_feature (1)..(1900): Ceres Seq. ID no. 12654012
  misc_feature (1)..(1900): Ortholog of  Ceres SEQ ID NO 15174547 as cited in SEQ ID NO 59586
  misc_feature (1)..(1900): Ortholog of  Ceres SEQ ID NO 15169470 as cited in SEQ ID NO 66036
acatcaaaaccgcctccatttctcattctctctctctctaaaaaaccaaatccagagtcagagaaaatctgtgatggctctttccaacgcctcctctctctccaccagatctatctacggcggtgatctttctcaccgtccaagcaaccgtcaatcatccttcacatttcatcccgccgtcaacaccaagcctaaatccgttaacctcgtcacggctgtacacgcggctgagccagctagaaacgctgtttcagtcaaagaatccgttgcgtcttcttcgtctggtgcattgaaatggactccagagagctggaaactgaagaaggctctgcaacttcctgattatcctaacgccaatgagcttgagtctgtgcttaaaacgatagaggcttttcctccgattgtgttcgccggagaagctaggaatcttgaagagagattggctgatgctgctgttggtaaagcttttcttctccaaggaggtgattgtgctgagagtttcaaggagttcaatgctactaatatcagagacaccttcagggttctgcttcagatgagtattgttcttacattcggtggccaggttccggtcattaaggttgggaggatggctggtcaatttgcaaagcctagatctgatgcatttgaggagaaggatggagtgaaattaccaagctacaagggagataacatcaatggtgatacttttgatgagaaatccaggattcctgatcctaataggatgattcgagcttacactcaatctgcagctactttgaatcttcttagagcctttgccactggaggttacgctgctattcaaagagttactcaatggaaccttgattttgttgaacaaagtgagcaagctgacaggtaccaggaattagctaatagggttgatgaggccttggggttcatgtctgcatgtggacttggcacggatcatccacttatgactacaactgatttctacacatcccatgagtgtttgcttctgccttatgaacagtcccttacaaggttggattcaacttctggtctctactatgattgttctgcacacatggtctggtgcggagagcgtaccagacaattggatggcgctcatgtcgagtttctcagggggattgctaatcctctgggcattaaggtgagcaacaaaatggatccctttgagctggttaagctagtagaaatcctgaatcctaataacaagcctggaagaatcactgtaattgtgagaatgggtgccgagaacatgagagttaagcttccccacctgatcagagcagtccgcagatcaggccagattgtgacatgggtctgcgatccaatgcatggaaacaccatcaaagcaccttgcggtcttaaaacacgtgcctttgactcaatactggctgaagtccgagcattccttgatgtgcacgagcaagaaggaagccacgcgggcggtatccatctcgagatgacaggtcagaacgtgacagaatgcattggagggtcccgcactgtgacctacgatgacctcagttctcgctaccacacacactgtgacccaaggctgaacgcgtcacagtctcttgaacttgccttcattgttgcagaacggctcaggaagagaagaacgggtagccagcgtgtgtcttgagtccggttcttcccttttatacactttttgattccaaacaaatcttttctctttgtcctgtgactgtgagttggtgtctttatgacctaagttaaaagccccaaaagcctctctaggaggagtaaacctgtttctgctgtggacagaccatgtcatgtcattgttctttatgttaactttaatgtcaaaccgtgtcacttacactagtgtatatttctttttacatatctacacgaacatgaaacttgt

SEQ ID NO: 80011 - protein, 549 aa, Arabidopsis thaliana; identical to SEQ ID NO: 30915
  peptide (1)..(549): Ceres Seq. ID no. 12654013

SEQ ID NO: 80012 - protein, 525 aa, Arabidopsis thaliana; identical to SEQ ID NO: 30916
  peptide (1)..(525): Ceres Seq. ID no. 12654014

SEQ ID NO: 80013 - protein, 365 aa, Arabidopsis thaliana; identical to SEQ ID NO: 30917
  peptide (1)..(365): Ceres Seq. ID no. 12654015

SEQ ID NO: 80014 - DNA, 804 bp, Arabidopsis thaliana
  misc_feature (1)..(804): Ceres Seq. ID no. 12654051
  misc_feature (1)..(804): Ortholog of  Ceres SEQ ID NO 13638441 as cited in SEQ ID NO 58066
atgtcatcgtcgacgatgtacagaggagttaatatgttttcaccggcaaacacaaactggatttttcaagaagtcagagaagccacgtggacggcggaggagaacaaacggttcgagaaagctctcgcttatctggacgacaaagacaatcttgagagctggtccaagatcgcagatttgattcccggcaaaacagtagctgacgtcattaaacgatacaaggagctagaggatgatgtcagcgacatcgaagccggacttatccccattccgggatacggcggcgacgcctcctccgctgcaaacagtgactatttctttggtctagaaaactccagctacggttatgattacgtcgttggaggaaagaggagttcgccggcgatgactgattgttttaggtctccgatgccggaaaaggagaggaagaaaggagttccgtggaccgaggacgaacacctacgatttctgatgggtttgaagaaatatggaaaaggagattggagaaacatagcaaaaagctttgtgacgactcgaacgccgacgcaagtcgcttcacacgctcagaaatattttcttcgacaactcacagatggtaaagacaaaagacgatcaagtattcacgatatcaccactgttaacatccctgacgcagacgcatccgcaaccgccacgaccgctgacgtagcactctctcctactccagccaattcttttgacgttttccttcagccaaatcctcattacagtttcgcgtctgcgtctgcgtctagctattataatgcgtttccgcagtggagttaa

SEQ ID NO: 80015 - protein, 267 aa, Arabidopsis thaliana
  peptide (1)..(267): Ceres Seq. ID no. 12654052
MSSSTMYRGVNMFSPANTNWIFQEVREATWTAEENKRFEKALAYLDDKDNLESWSKIADLIPGKTVADVIKRYKELEDDVSDIEAGLIPIPGYGGDASSAANSDYFFGLENSSYGYDYVVGGKRSSPAMTDCFRSPMPEKERKKGVPWTEDEHLRFLMGLKKYGKGDWRNIAKSFVTTRTPTQVASHAQKYFLRQLTDGKDKRRSSIHDITTVNIPDADASATATTADVALSPTPANSFDVFLQPNPHYSFASASASSYYNAFPQWS

SEQ ID NO: 80016 - protein, 262 aa, Arabidopsis thaliana
  peptide (1)..(262): Ceres Seq. ID no. 12654053
MYRGVNMFSPANTNWIFQEVREATWTAEENKRFEKALAYLDDKDNLESWSKIADLIPGKTVADVIKRYKELEDDVSDIEAGLIPIPGYGGDASSAANSDYFFGLENSSYGYDYVVGGKRSSPAMTDCFRSPMPEKERKKGVPWTEDEHLRFLMGLKKYGKGDWRNIAKSFVTTRTPTQVASHAQKYFLRQLTDGKDKRRSSIHDITTVNIPDADASATATTADVALSPTPANSFDVFLQPNPHYSFASASASSYYNAFPQWS

SEQ ID NO: 80017 - protein, 256 aa, Arabidopsis thaliana
  peptide (1)..(256): Ceres Seq. ID no. 12654054
MFSPANTNWIFQEVREATWTAEENKRFEKALAYLDDKDNLESWSKIADLIPGKTVADVIKRYKELEDDVSDIEAGLIPIPGYGGDASSAANSDYFFGLENSSYGYDYVVGGKRSSPAMTDCFRSPMPEKERKKGVPWTEDEHLRFLMGLKKYGKGDWRNIAKSFVTTRTPTQVASHAQKYFLRQLTDGKDKRRSSIHDITTVNIPDADASATATTADVALSPTPANSFDVFLQPNPHYSFASASASSYYNAFPQWS

SEQ ID NO: 80018 - DNA, 1998 bp, Arabidopsis thaliana
  misc_feature (1)..(1998): Ceres Seq. ID no. 12654091
  misc_feature (1)..(1998): Ortholog of  Ceres SEQ ID NO 12616176 as cited in SEQ ID NO 63339
atgaggtatcaatggcgatcgcttcttttccggagctaccgttcgtctcctcgtccatttctttctcatcactcgcggttccaggtaatctccaattcgactcgatctttctcttctttcctccacgaacgttttggagtgcaacaaagacagtgtctttttgccttgcgatcgccattggcgagctctgttagccgacgcttttcatctgagtctgcgatagaagagaaacttcctgctgagactgttgtgattgatgtttttagcagattgaatggtaaggatgagattacgaaagagctggattcgaatgatgttgtgattagccatgaattagcattgagagttctgagggaacttgaatcaagccctgatgttgcggggaggtttttcaaatggggtttggaggcttatcctcaaaaactttcttccaagagttataacacgatgctgcgtatttttggtgttaatggattagttgatgagttttggaggttggttgatgatatgaagaagaaagggcatggtgtttcagctaatgttagggacagagtcggtgacaagtttaagaaagatggactagaaaatgatttggagaggctgaaagagctatttgcttcaggttctatggataactctgttgacaaggtttgcaatagggtgtgtaagattgtgatgaaggaagtgtggggtgctgatgtagagaaacagctaagggatttgaagctcgagtttaaaagtgatgtggtaaagatggttttggaaaaacttgacgtggatccgaggaaagctttgttgttctttaggtggattgatgagtctggaagttttaaacatgatgagaagacgtataatgctatggccagggttttagggaaagagaagtttcttgataggtttcagcacatgatagaagaaattaggagtgctggttacgagatggaaatggagacttatgttagggtttcagcaaggttctgtcagactaaaatgattaaagaagctgttgagttgtttgagtttgcaatggcaggtagcattagcaacacacccaccccacactgctgcagtttactgctcaagaaaattgtcactgcaaagaaattggacatggacttatttacaagaactttgaaagcttatactgggaatggcaacgttgtgccggatgttatgctgcaacatgtcctcaagtctttgagaagcgttgataggtttggacagagcaacgaggtgttgaaagcgatgaacgaaggtggatatgttcctagcggtgatttgcagagtgtgattgcatcaggacttagtcgtaagggcaagaaagatgaagcaaacgaacttgtgaactttatggaagcttctggaaaccatttagatgataaagcaatggcatctttagttgaagggcactgtgatgctaaagatctcgaagaagcttcagagtgtttcaagaagatgattgggaaagagggagtctcttatgcaggttatgcatttgagaagttggtacttgcttattgcaacagttttcaggcaagagatgtatacaagcttttcagtgagctagtgaaacaaaatcagttgaaaccttggcacagtacatacaaaattatggtgaggaatctgttgatgaagaaggtagcaagagatggtgggtttgaagaagctttgagtcttctacctatgatgagaaatcacgggttccctcctttcgtggacccgttcatggattacttatcgaatagtggaacaagcgcagaggctttcgcttttctgaaggctgtgacttcaaagaagtttccatctaattcaatggttctgcgtgtattcgaagctatgttgaagtctgcaaggcatagtgaagctcaggatttactgtctatgtccccaagttatatccgtcgcaatgcagaagttctagaacttttcaataccatgaaacctgaaaaatgttctttagagaaacctttgcctgctcctgctcaaattgaagcttaa

SEQ ID NO: 80019 - protein, 665 aa, Arabidopsis thaliana
  peptide (1)..(665): Ceres Seq. ID no. 12654092
MRYQWRSLLFRSYRSSPRPFLSHHSRFQVISNSTRSFSSFLHERFGVQQRQCLFALRSPLASSVSRRFSSESAIEEKLPAETVVIDVFSRLNGKDEITKELDSNDVVISHELALRVLRELESSPDVAGRFFKWGLEAYPQKLSSKSYNTMLRIFGVNGLVDEFWRLVDDMKKKGHGVSANVRDRVGDKFKKDGLENDLERLKELFASGSMDNSVDKVCNRVCKIVMKEVWGADVEKQLRDLKLEFKSDVVKMVLEKLDVDPRKALLFFRWIDESGSFKHDEKTYNAMARVLGKEKFLDRFQHMIEEIRSAGYEMEMETYVRVSARFCQTKMIKEAVELFEFAMAGSISNTPTPHCCSLLLKKIVTAKKLDMDLFTRTLKAYTGNGNVVPDVMLQHVLKSLRSVDRFGQSNEVLKAMNEGGYVPSGDLQSVIASGLSRKGKKDEANELVNFMEASGNHLDDKAMASLVEGHCDAKDLEEASECFKKMIGKEGVSYAGYAFEKLVLAYCNSFQARDVYKLFSELVKQNQLKPWHSTYKIMVRNLLMKKVARDGGFEEALSLLPMMRNHGFPPFVDPFMDYLSNSGTSAEAFAFLKAVTSKKFPSNSMVLRVFEAMLKSARHSEAQDLLSMSPSYIRRNAEVLELFNTMKPEKCSLEKPLPAPAQIEA

SEQ ID NO: 80020 - protein, 516 aa, Arabidopsis thaliana
  peptide (1)..(516): Ceres Seq. ID no. 12654093
MLRIFGVNGLVDEFWRLVDDMKKKGHGVSANVRDRVGDKFKKDGLENDLERLKELFASGSMDNSVDKVCNRVCKIVMKEVWGADVEKQLRDLKLEFKSDVVKMVLEKLDVDPRKALLFFRWIDESGSFKHDEKTYNAMARVLGKEKFLDRFQHMIEEIRSAGYEMEMETYVRVSARFCQTKMIKEAVELFEFAMAGSISNTPTPHCCSLLLKKIVTAKKLDMDLFTRTLKAYTGNGNVVPDVMLQHVLKSLRSVDRFGQSNEVLKAMNEGGYVPSGDLQSVIASGLSRKGKKDEANELVNFMEASGNHLDDKAMASLVEGHCDAKDLEEASECFKKMIGKEGVSYAGYAFEKLVLAYCNSFQARDVYKLFSELVKQNQLKPWHSTYKIMVRNLLMKKVARDGGFEEALSLLPMMRNHGFPPFVDPFMDYLSNSGTSAEAFAFLKAVTSKKFPSNSMVLRVFEAMLKSARHSEAQDLLSMSPSYIRRNAEVLELFNTMKPEKCSLEKPLPAPAQIEA

SEQ ID NO: 80021 - protein, 496 aa, Arabidopsis thaliana
  peptide (1)..(496): Ceres Seq. ID no. 12654094
MKKKGHGVSANVRDRVGDKFKKDGLENDLERLKELFASGSMDNSVDKVCNRVCKIVMKEVWGADVEKQLRDLKLEFKSDVVKMVLEKLDVDPRKALLFFRWIDESGSFKHDEKTYNAMARVLGKEKFLDRFQHMIEEIRSAGYEMEMETYVRVSARFCQTKMIKEAVELFEFAMAGSISNTPTPHCCSLLLKKIVTAKKLDMDLFTRTLKAYTGNGNVVPDVMLQHVLKSLRSVDRFGQSNEVLKAMNEGGYVPSGDLQSVIASGLSRKGKKDEANELVNFMEASGNHLDDKAMASLVEGHCDAKDLEEASECFKKMIGKEGVSYAGYAFEKLVLAYCNSFQARDVYKLFSELVKQNQLKPWHSTYKIMVRNLLMKKVARDGGFEEALSLLPMMRNHGFPPFVDPFMDYLSNSGTSAEAFAFLKAVTSKKFPSNSMVLRVFEAMLKSARHSEAQDLLSMSPSYIRRNAEVLELFNTMKPEKCSLEKPLPAPAQIEA

SEQ ID NO: 80022 - DNA, 2589 bp, Arabidopsis thaliana
  misc_feature (1)..(2589): Ceres Seq. ID no. 12654110
  misc_feature (1)..(2589): Ortholog of  Ceres SEQ ID NO 14310620 as cited in SEQ ID NO 53662
agagaaagagaaagagagagaaaaacagagaggttgtcttcttcgtcaaatatccgattatctggtatcgtgattcggaggtgtaatgggaggtagtagcggcggcggagtttcttatcgtagcggcggcgaatcagacgtggaattagaggattacgaggttgatgatttcagagatgggattgtagaatcgcgaggaaacagattcaatcctctcaccaatttcttagggttagacttcgccggcggtagcggtggaaagttcaccgtcattaatggaatcagagatatctccagaggctccattgttcatcccgataaccggtggtacaaggcgtggacgatgtttatattgatatgggcactttattcttccttcttcactccattggaattcggattcttcaggggattaccagagaatctgttcatcctcgatatcgctggccaaatcgctttcttagtagatattgtcttgacattcttcgttgcttatcgtgatagccgaacttatagaatgatctataaacgcagctcaattgctttacggtacttaaaatcaacttttataattgacttacttgcttgcatgccatgggatatcatctacaaggctgcaggcgaaaaagaagaagtgagatacctattgttgataaggctatatcgagttcatagagtaatcctgtttttccacaaaatggagaaagatataagaatcaattacctttttacaagaatcgtcaagcttatattcgtcgagctttattgcactcacaccgcagcttgtatcttctattacttggccacgacgcttcctgcttctcaagaagggtacacttggattggaagcttgaagttaggagattacagttactcgaagtttagagagatcgatctctggactcgatacactacttctatgtactttgcagttgttactatggcaactgttggttatggagatatacacgcggttaatatgcgggaaatgatattcgcgatggtctacatttcattcgatatgattctaggagcttacttgattggtaacatgacagctttgattgtaaaaggttcgaaaacagagagattccgggataagatggctgatatcatgcggtatatgaaccgaaacaaactcggtaggaacatccgtggtcagattaccggacatttgcggttgcagtacgaaagcagctacactgaagcagctgttcttcaagacattcctgtctctatccgtgctaagattgcgcaaactttatacttgccgtatattgagaaagttcctctctttcgcggatgctcatctgaattcattaaccagattgttataagacttcatgaagagttctttcttcctggagaagttataatggagcaaggaagcgtcgttgatcagctctactttgtttgtcacggtgtattggaggagataggtataacaaaggatggatctgaagaaatagtggcagttctacaaccagatcattcttttggagagatttcaatcctctgcaatattcctcagccttacacggttagagttgcagagctatgtcggattctaaggcttgacaagcaatctttcatgaacatactcgagatatttttccatgatggacggaggattctcaacaatctgcttgaagggaaagaatctaatgtccggattaagcaactagaatccgatataacctttcatatcagtaaacaagaggcagagctagctctgaagttgaatagtgcggctttctacggtgatctttatcagcttaagagtttgattcgagctggaggtgacccgaataagacagattatgacggaagatcgcctttgcatcttgcagcctctagaggatatgaagatattacattatatcttatacaagaatcagttgatgtaaatatcaaagataaattggggagcacacctttactagaagcaatcaagaatgggaatgatcgtgttgcggcgttgcttgttaaagaaggagctacgttgaacatagagaacgcagggactttcctttgcaccgtggttgcgaaaggagacagcgatttcttgaaacggcttcttagtaacggaattgatcctaattccaaagattatgatcacagaacacctcttcatgtagctgcctctgaaggattttatgtcttggcgatccaattggtagaagcaagtgctaatgttcttgcaaaagacagatggggaaacacacctcttgatgaagctttgggttgtgggaacaagatgttgataaagttactcgaagacgctaagaattctcaaatctcttcgtttccgagtggctccaaagagcctaaagataaagtctataagaagaaatgtacagtgtatttttcacatcctggtgattcgaaagagaaaagaaggcgcgggattgtactgtgggtacctcgaagcatcgaggagcttataagaacagcaaaggagcagctgaatgttccggaggcttcttgtgtattatctgaagatgaagccaaaattattgatgtagatttgataagtgatggacaaaaactgtatttggctgttgaaacataatgattcgagcaaatttc

SEQ ID NO: 80023 - protein, 828 aa, Arabidopsis thaliana
  peptide (1)..(828): Ceres Seq. ID no. 12654111
MGGSSGGGVSYRSGGESDVELEDYEVDDFRDGIVESRGNRFNPLTNFLGLDFAGGSGGKFTVINGIRDISRGSIVHPDNRWYKAWTMFILIWALYSSFFTPLEFGFFRGLPENLFILDIAGQIAFLVDIVLTFFVAYRDSRTYRMIYKRSSIALRYLKSTFIIDLLACMPWDIIYKAAGEKEEVRYLLLIRLYRVHRVILFFHKMEKDIRINYLFTRIVKLIFVELYCTHTAACIFYYLATTLPASQEGYTWIGSLKLGDYSYSKFREIDLWTRYTTSMYFAVVTMATVGYGDIHAVNMREMIFAMVYISFDMILGAYLIGNMTALIVKGSKTERFRDKMADIMRYMNRNKLGRNIRGQITGHLRLQYESSYTEAAVLQDIPVSIRAKIAQTLYLPYIEKVPLFRGCSSEFINQIVIRLHEEFFLPGEVIMEQGSVVDQLYFVCHGVLEEIGITKDGSEEIVAVLQPDHSFGEISILCNIPQPYTVRVAELCRILRLDKQSFMNILEIFFHDGRRILNNLLEGKESNVRIKQLESDITFHISKQEAELALKLNSAAFYGDLYQLKSLIRAGGDPNKTDYDGRSPLHLAASRGYEDITLYLIQESVDVNIKDKLGSTPLLEAIKNGNDRVAALLVKEGATLNIENAGTFLCTVVAKGDSDFLKRLLSNGIDPNSKDYDHRTPLHVAASEGFYVLAIQLVEASANVLAKDRWGNTPLDEALGCGNKMLIKLLEDAKNSQISSFPSGSKEPKDKVYKKKCTVYFSHPGDSKEKRRRGIVLWVPRSIEELIRTAKEQLNVPEASCVLSEDEAKIIDVDLISDGQKLYLAVET

SEQ ID NO: 80024 - protein, 742 aa, Arabidopsis thaliana
  peptide (1)..(742): Ceres Seq. ID no. 12654112
MFILIWALYSSFFTPLEFGFFRGLPENLFILDIAGQIAFLVDIVLTFFVAYRDSRTYRMIYKRSSIALRYLKSTFIIDLLACMPWDIIYKAAGEKEEVRYLLLIRLYRVHRVILFFHKMEKDIRINYLFTRIVKLIFVELYCTHTAACIFYYLATTLPASQEGYTWIGSLKLGDYSYSKFREIDLWTRYTTSMYFAVVTMATVGYGDIHAVNMREMIFAMVYISFDMILGAYLIGNMTALIVKGSKTERFRDKMADIMRYMNRNKLGRNIRGQITGHLRLQYESSYTEAAVLQDIPVSIRAKIAQTLYLPYIEKVPLFRGCSSEFINQIVIRLHEEFFLPGEVIMEQGSVVDQLYFVCHGVLEEIGITKDGSEEIVAVLQPDHSFGEISILCNIPQPYTVRVAELCRILRLDKQSFMNILEIFFHDGRRILNNLLEGKESNVRIKQLESDITFHISKQEAELALKLNSAAFYGDLYQLKSLIRAGGDPNKTDYDGRSPLHLAASRGYEDITLYLIQESVDVNIKDKLGSTPLLEAIKNGNDRVAALLVKEGATLNIENAGTFLCTVVAKGDSDFLKRLLSNGIDPNSKDYDHRTPLHVAASEGFYVLAIQLVEASANVLAKDRWGNTPLDEALGCGNKMLIKLLEDAKNSQISSFPSGSKEPKDKVYKKKCTVYFSHPGDSKEKRRRGIVLWVPRSIEELIRTAKEQLNVPEASCVLSEDEAKIIDVDLISDGQKLYLAVET

SEQ ID NO: 80025 - protein, 684 aa, Arabidopsis thaliana
  peptide (1)..(684): Ceres Seq. ID no. 12654113
MIYKRSSIALRYLKSTFIIDLLACMPWDIIYKAAGEKEEVRYLLLIRLYRVHRVILFFHKMEKDIRINYLFTRIVKLIFVELYCTHTAACIFYYLATTLPASQEGYTWIGSLKLGDYSYSKFREIDLWTRYTTSMYFAVVTMATVGYGDIHAVNMREMIFAMVYISFDMILGAYLIGNMTALIVKGSKTERFRDKMADIMRYMNRNKLGRNIRGQITGHLRLQYESSYTEAAVLQDIPVSIRAKIAQTLYLPYIEKVPLFRGCSSEFINQIVIRLHEEFFLPGEVIMEQGSVVDQLYFVCHGVLEEIGITKDGSEEIVAVLQPDHSFGEISILCNIPQPYTVRVAELCRILRLDKQSFMNILEIFFHDGRRILNNLLEGKESNVRIKQLESDITFHISKQEAELALKLNSAAFYGDLYQLKSLIRAGGDPNKTDYDGRSPLHLAASRGYEDITLYLIQESVDVNIKDKLGSTPLLEAIKNGNDRVAALLVKEGATLNIENAGTFLCTVVAKGDSDFLKRLLSNGIDPNSKDYDHRTPLHVAASEGFYVLAIQLVEASANVLAKDRWGNTPLDEALGCGNKMLIKLLEDAKNSQISSFPSGSKEPKDKVYKKKCTVYFSHPGDSKEKRRRGIVLWVPRSIEELIRTAKEQLNVPEASCVLSEDEAKIIDVDLISDGQKLYLAVET

SEQ ID NO: 80026 - DNA, 1228 bp, Arabidopsis thaliana
  misc_feature (1)..(1228): Ceres Seq. ID no. 12654117
  misc_feature (1)..(1228): Ortholog of  Ceres SEQ ID NO 14303324 as cited in SEQ ID NO 54563
  misc_feature (1)..(1228): Ortholog of  Ceres SEQ ID NO 14316404 as cited in SEQ ID NO 57641
actaagatcttgccttcaccatttttctctcttctcgattatatctctaacctcaaaggtacatttaatagctagatgttataacaaaatggggagatcaccgtgttgcgatgagagcggattaaagaaagggccatggacgccagaagaagatcagaaactgataaatcacataagaaaacacggccatggaagctggagagctctacccaagcaagccggtttaaaccggtgtgggaagagttgcagattgagatggactaattacttgagaccagatatcaaaagaggaaacttcacagctgaggaagaacaaactatcattaaccttcattctcttcttgggaacaagtggtcgtctatagctggtcatctcccaggaagaacggataacgaaataaagaactattggaacacgcatattagaaagaaacttattcagatgggaatcgatccggtgacccataggccaagaaccgaccatctaaacgttctagccgctctcccgcaactactagctgccgcaaatttcaacaacctcttgaatctaaatcaaaatatacaattggatgcaacaagtgttgcgaaagcccaactgttacatagtatgattcaagtccttagcaacaacaatacctcttcttcctttgacattcatcacacaaccaataatctctttggccaatcttctttcttagagaacctaccaaatattgaaaatccttatgatcaaacccaaggcctctctcacattgacgatcagcctctggattcgttttctagcccgattcgagtagttgcttatcaacatgatcagaattttattccgcccttgatttcgacatctcctgatgagtctaaggaaacccaaatgatggtcaagaacaaggaaatcatgaagtataatgatcatacttcaaacccttcgtcgacctcaacttttacacaagatcaccagccatggtgtgacataattgatgatgaagcaagtgattcttattggaaagagatcatagagcaaacttgttcggagccttggccatttcgtgaatagagatgaaagtaaaacattagtcttatttttttctgtggatatagatatatacatatacgttgttaattaactttcatacaatttgtgtcttaattattttccaaccatgtatacaaacacattgatactgtacaaaactgattatcattatatataagaaaattaattcatgac

SEQ ID NO: 80027 - protein, 350 aa, Arabidopsis thaliana
  peptide (1)..(350): Ceres Seq. ID no. 12654118
LRSCLHHFSLFSIISLTSKVHLIARCYNKMGRSPCCDESGLKKGPWTPEEDQKLINHIRKHGHGSWRALPKQAGLNRCGKSCRLRWTNYLRPDIKRGNFTAEEEQTIINLHSLLGNKWSSIAGHLPGRTDNEIKNYWNTHIRKKLIQMGIDPVTHRPRTDHLNVLAALPQLLAAANFNNLLNLNQNIQLDATSVAKAQLLHSMIQVLSNNNTSSSFDIHHTTNNLFGQSSFLENLPNIENPYDQTQGLSHIDDQPLDSFSSPIRVVAYQHDQNFIPPLISTSPDESKETQMMVKNKEIMKYNDHTSNPSSTSTFTQDHQPWCDIIDDEASDSYWKEIIEQTCSEPWPFRE

SEQ ID NO: 80028 - protein, 321 aa, Arabidopsis thaliana
  peptide (1)..(321): Ceres Seq. ID no. 12654119
MGRSPCCDESGLKKGPWTPEEDQKLINHIRKHGHGSWRALPKQAGLNRCGKSCRLRWTNYLRPDIKRGNFTAEEEQTIINLHSLLGNKWSSIAGHLPGRTDNEIKNYWNTHIRKKLIQMGIDPVTHRPRTDHLNVLAALPQLLAAANFNNLLNLNQNIQLDATSVAKAQLLHSMIQVLSNNNTSSSFDIHHTTNNLFGQSSFLENLPNIENPYDQTQGLSHIDDQPLDSFSSPIRVVAYQHDQNFIPPLISTSPDESKETQMMVKNKEIMKYNDHTSNPSSTSTFTQDHQPWCDIIDDEASDSYWKEIIEQTCSEPWPFRE

SEQ ID NO: 80029 - protein, 203 aa, Arabidopsis thaliana
  peptide (1)..(203): Ceres Seq. ID no. 12654120
MGIDPVTHRPRTDHLNVLAALPQLLAAANFNNLLNLNQNIQLDATSVAKAQLLHSMIQVLSNNNTSSSFDIHHTTNNLFGQSSFLENLPNIENPYDQTQGLSHIDDQPLDSFSSPIRVVAYQHDQNFIPPLISTSPDESKETQMMVKNKEIMKYNDHTSNPSSTSTFTQDHQPWCDIIDDEASDSYWKEIIEQTCSEPWPFRE

SEQ ID NO: 80030 - DNA, 1819 bp, Arabidopsis thaliana
  misc_feature (1)..(1819): Ceres Seq. ID no. 12654121
  misc_feature (1)..(1819): Ortholog of  Ceres SEQ ID NO 15171606 as cited in SEQ ID NO 57214
  misc_feature (1)..(1819): Ortholog of  Ceres SEQ ID NO 13596921 as cited in SEQ ID NO 62368
cgaatataaatctctgtaaggtttgcgaagaccggagtagtgaatctcggaattgttgaagaagacggtacaccggaatcaattgcgattttgatttatgggaacggtttgcgaatctgtagcgacggcgaaatcttcgacggcggtgatgagctccattccgccttttctgagcaaaacgtacgatatggttgacgatccattgacggacgacgtggtgtcttggagcagcggaaacaacagcttcgtggtttggaacgtgcctgagttcgccaaacagtttctaccaaagtatttcaagcacaacaatttctccagcttcgtcagacagctcaatacttatggttttagaaaagttgatccagaccgctgggagtttgcaaacgagggctttttaagaggccaaaagcaaatactaaagagtattgtccggcgaaaacctgcacaagtgcagcctccacaacaacctcaagttcagcactcatctgtgggtgcgtgcgttgaagtgggcaaatttggactcgaagaggaagtggaaagacttcagcgcgataagaacgtccttatgcaggaacttgtaaggttgaggcagcaacaacaagttaccgaacatcatctgcagaatgtggggcagaaagttcatgtgatggagcagaggcagcaacagatgatgtcctttctagcaaaggctgtccaaagtccaggtttcttaaaccaattttctcagcagagtaatgaagcaaaccaacacatttctgaaagcaacaaaaagaggaggctacctgttgaggaccagatgaattctggcagtcatggggttaatggtcttagccgccagattgtgagatatcagtcatcgatgaacgatgcaacaaacactatgcttcaacagatacagcagatgagtaatgcacctagccatgaatctctctcaagcaataatggtagctttcttttgggcgatgttccaaattctaacatttcagacaatgggagctcctcaaatggatcacctgaagttacattggcagatgtttcatccattcctgcaggcttctatcctgcaatgaagtaccacgagccttgtgaaacaaatcaagtcatggagaccaatttgcctttttctcaaggtgatctcttacctccaacgcaaggagcagcagcttctgggagctcaagttcggatcttgttggatgcgagacagataatggagagtgtttggatccaataatggctgttttggatggcgcactcgaactagaagctgataccttaaatgagttgcttcctgaagtccaagattctttttgggaacagttcattggtgagagcccagtgattggtgagacagatgagttaatctcaggatcagtggaaaatgaactgatattggagcaactagagttacaatcaaccctgagtaatgtgtggagcaagaatcaacaaatgaaccatcttactgaacagatgggacttctcacatcagatgctctcagaaaatgagattgccacaggccacaatctttcctcacgagatgggttaagattttgtggagccgcaacaacaaaaagaatatgaccaaaggaggtactatgtatgtatgtatcaaactgttgtaactctaattcttgtcaatgtataataaaataagagaaatattgccttaaaagatttttgcattgcaatatctttgtttgttactgacagaatgaaaaggagatgcttcaaagtgagagatattcttctgttcttgtgtatgtctttagagatccttgtttatttttgttacattaagtgcaaaaattggcattttggtt

SEQ ID NO: 80031 - protein, 468 aa, Arabidopsis thaliana
  peptide (1)..(468): Ceres Seq. ID no. 12654122
MGTVCESVATAKSSTAVMSSIPPFLSKTYDMVDDPLTDDVVSWSSGNNSFVVWNVPEFAKQFLPKYFKHNNFSSFVRQLNTYGFRKVDPDRWEFANEGFLRGQKQILKSIVRRKPAQVQPPQQPQVQHSSVGACVEVGKFGLEEEVERLQRDKNVLMQELVRLRQQQQVTEHHLQNVGQKVHVMEQRQQQMMSFLAKAVQSPGFLNQFSQQSNEANQHISESNKKRRLPVEDQMNSGSHGVNGLSRQIVRYQSSMNDATNTMLQQIQQMSNAPSHESLSSNNGSFLLGDVPNSNISDNGSSSNGSPEVTLADVSSIPAGFYPAMKYHEPCETNQVMETNLPFSQGDLLPPTQGAAASGSSSSDLVGCETDNGECLDPIMAVLDGALELEADTLNELLPEVQDSFWEQFIGESPVIGETDELISGSVENELILEQLELQSTLSNVWSKNQQMNHLTEQMGLLTSDALRK

SEQ ID NO: 80032 - protein, 451 aa, Arabidopsis thaliana
  peptide (1)..(451): Ceres Seq. ID no. 12654123
MSSIPPFLSKTYDMVDDPLTDDVVSWSSGNNSFVVWNVPEFAKQFLPKYFKHNNFSSFVRQLNTYGFRKVDPDRWEFANEGFLRGQKQILKSIVRRKPAQVQPPQQPQVQHSSVGACVEVGKFGLEEEVERLQRDKNVLMQELVRLRQQQQVTEHHLQNVGQKVHVMEQRQQQMMSFLAKAVQSPGFLNQFSQQSNEANQHISESNKKRRLPVEDQMNSGSHGVNGLSRQIVRYQSSMNDATNTMLQQIQQMSNAPSHESLSSNNGSFLLGDVPNSNISDNGSSSNGSPEVTLADVSSIPAGFYPAMKYHEPCETNQVMETNLPFSQGDLLPPTQGAAASGSSSSDLVGCETDNGECLDPIMAVLDGALELEADTLNELLPEVQDSFWEQFIGESPVIGETDELISGSVENELILEQLELQSTLSNVWSKNQQMNHLTEQMGLLTSDALRK

SEQ ID NO: 80033 - protein, 438 aa, Arabidopsis thaliana
  peptide (1)..(438): Ceres Seq. ID no. 12654124
MVDDPLTDDVVSWSSGNNSFVVWNVPEFAKQFLPKYFKHNNFSSFVRQLNTYGFRKVDPDRWEFANEGFLRGQKQILKSIVRRKPAQVQPPQQPQVQHSSVGACVEVGKFGLEEEVERLQRDKNVLMQELVRLRQQQQVTEHHLQNVGQKVHVMEQRQQQMMSFLAKAVQSPGFLNQFSQQSNEANQHISESNKKRRLPVEDQMNSGSHGVNGLSRQIVRYQSSMNDATNTMLQQIQQMSNAPSHESLSSNNGSFLLGDVPNSNISDNGSSSNGSPEVTLADVSSIPAGFYPAMKYHEPCETNQVMETNLPFSQGDLLPPTQGAAASGSSSSDLVGCETDNGECLDPIMAVLDGALELEADTLNELLPEVQDSFWEQFIGESPVIGETDELISGSVENELILEQLELQSTLSNVWSKNQQMNHLTEQMGLLTSDALRK

SEQ ID NO: 80034 - DNA, 1053 bp, Arabidopsis thaliana
  misc_feature (1)..(1053): Ceres Seq. ID no. 12654137
  misc_feature (1)..(1053): Ortholog of  Ceres SEQ ID NO 13596891 as cited in SEQ ID NO 62868
  misc_feature (1)..(1053): Ortholog of  Ceres SEQ ID NO 12617235 as cited in SEQ ID NO 63990
  misc_feature (1)..(1053): Ortholog of  Ceres SEQ ID NO 13655371 as cited in SEQ ID NO 68945
atggcaacctcaggcaatgcgacggtggccaataagcaggtcatactgcgagattacgtcaccggtttccccaaggaatcagacctcatcttcaccgattccaccatcgatttaaagattccggagggatccaagacggttctggtgaagaatctctacttgtcttgcgatccttacatgcgcattcgcatggggaagcccgatcccggcactgctgcgctcgctccacattacattcctggcgagccaatttatgggttttcagtgtcaaaagtgatagattctgggcatccagattacaaaaagggagacttactttggggattagttggatggggggagtacagtcttatcactccagatttttcacattacaagatccaacacaccgatgttcccttatcctactacactggacttctcggtatgcccggtatgactgcctatgctggattttatgaaatatgttctcctaagaaaggagaaaccgtattcgtgtcagctgcgtctggtgcagttggtcagctcgtgggacaatttgcaaagattatgggctgctatgttgttggaagtgcaggcagtaatgaaaaggttgatcttctcaagaacaaattcgggtttgatgatgcattcaattacaaagcagagccagaccttaatgctgccctgaagaggtgtttcccggaaggaatcgacatatactttgagaatgtaggaggcaaaatgctagacgcagtgctcctaaacatgaaactacacggccgtatcgcagtatgtggtatgatctcacagtacaaccttgaggaccaagaaggtgtacacaacctagcaaacgtgatctacaagcggattcggattaaagggttcgtggtctctgattacttcgacaaacacttgaagttcctggattttgtgcttccgtatataagagaagggaagataacgtatgttgaggatgtagttgaaggacttgagaacggaccttcagctttgcttggactattccatggtaagaacgtcggcaaacaactcatagcggttgctcgtgaatga

SEQ ID NO: 80035 - protein, 350 aa, Arabidopsis thaliana
  peptide (1)..(350): Ceres Seq. ID no. 12654138
MATSGNATVANKQVILRDYVTGFPKESDLIFTDSTIDLKIPEGSKTVLVKNLYLSCDPYMRIRMGKPDPGTAALAPHYIPGEPIYGFSVSKVIDSGHPDYKKGDLLWGLVGWGEYSLITPDFSHYKIQHTDVPLSYYTGLLGMPGMTAYAGFYEICSPKKGETVFVSAASGAVGQLVGQFAKIMGCYVVGSAGSNEKVDLLKNKFGFDDAFNYKAEPDLNAALKRCFPEGIDIYFENVGGKMLDAVLLNMKLHGRIAVCGMISQYNLEDQEGVHNLANVIYKRIRIKGFVVSDYFDKHLKFLDFVLPYIREGKITYVEDVVEGLENGPSALLGLFHGKNVGKQLIAVARE

SEQ ID NO: 80036 - protein, 291 aa, Arabidopsis thaliana
  peptide (1)..(291): Ceres Seq. ID no. 12654139
MRIRMGKPDPGTAALAPHYIPGEPIYGFSVSKVIDSGHPDYKKGDLLWGLVGWGEYSLITPDFSHYKIQHTDVPLSYYTGLLGMPGMTAYAGFYEICSPKKGETVFVSAASGAVGQLVGQFAKIMGCYVVGSAGSNEKVDLLKNKFGFDDAFNYKAEPDLNAALKRCFPEGIDIYFENVGGKMLDAVLLNMKLHGRIAVCGMISQYNLEDQEGVHNLANVIYKRIRIKGFVVSDYFDKHLKFLDFVLPYIREGKITYVEDVVEGLENGPSALLGLFHGKNVGKQLIAVARE

SEQ ID NO: 80037 - protein, 287 aa, Arabidopsis thaliana
  peptide (1)..(287): Ceres Seq. ID no. 12654140
MGKPDPGTAALAPHYIPGEPIYGFSVSKVIDSGHPDYKKGDLLWGLVGWGEYSLITPDFSHYKIQHTDVPLSYYTGLLGMPGMTAYAGFYEICSPKKGETVFVSAASGAVGQLVGQFAKIMGCYVVGSAGSNEKVDLLKNKFGFDDAFNYKAEPDLNAALKRCFPEGIDIYFENVGGKMLDAVLLNMKLHGRIAVCGMISQYNLEDQEGVHNLANVIYKRIRIKGFVVSDYFDKHLKFLDFVLPYIREGKITYVEDVVEGLENGPSALLGLFHGKNVGKQLIAVARE

SEQ ID NO: 80038 - DNA, 3418 bp, Arabidopsis thaliana
  misc_feature (1)..(3418): Ceres Seq. ID no. 12654141
  misc_feature (1)..(3418): Ortholog of  Ceres SEQ ID NO 12388487 as cited in SEQ ID NO 20511
atggctgccgagaagttaagagacttgagtcagccgattgacgtcgttttactcgatgccactgttgaggccttttactctaccggatctaaggaagaaagagcttctgcggataatatcttgcgggatttgaaagctaatcctgatacttggcttcaagttgttcacattctacagaacaccagtagtacgcataccaaattttttgcccttcaggtgctggaaggtgttataaaatataggtggaatgcattacccgttgaacaacgtgatggaatgaaaaattacatctctgatgtcattgtgcagctgtcaagggatgaagcatctttcagaacggaaaggctttatgtcaacaagttaaatatcatcctggttcagatcgtgaaacaggagtggccggcaaagtggaaaagctttattcctgatttagttatagctgctaagactagtgaaactatctgtgagaattgcatggctattttgaaactcctaagtgaagaggtctttgatttctcaaaaggagagatgactcagcaaaagataaaagaactgaaacagtctctaaacagcgagtttcaactcattcacgagttatgcctatatgtcctctcagcttcccaaagacaagagcttatacgtgctacactctctgcattgcatgcctatctttcttggattccgttgggatacatatttgagtcccctttgctggagatcctacttaaattcttccctgttccagcatataggaatctcacacttcaatgtttgtcagaggttgcatctcttaattttggggacttctacgatatgcaatatgtcaagatgtacagcattttcatgaatcagttgcaggcaattctccctttaaatttaaatatccctgaggcatattcaactggaagtagtgaagaacaggcaagtgcttttatccagaacttggcactgtttttcacttcgtttttcaagttacatataaaaatcctagaatctgcacccgaaaatatttctctattacttgcgggtctgggatatctcattagcatatcgtatgttgatgacactgaagtattcaagaatggtcccatgttatctgttgacgctttggaaactgacagcttttgcttgcttacgagtgaacagatggctttccttcctagtacagttgatggtgttaaatctgaagtcactgagcggcaaaaactttattcagatccaatgtcaaaattaaggggactcatgattagtcgcacggctaagcctgaagaagtgttaattgttgaggacgaaaatgggaacattgttcgtgaaactatgaaggataatgatgttcttgtccagtataagataatgcgggagacattaatctacctctcacaccttgatcatgaagataccgaaaaacagatgttgagtaagctaagcaaacagttgagcggggaggaatgggcatggaacaatctaaacactttatgctgggctattgggtctatttctgggtccatggtagtagaacaggaaaacagatttctcgtgatggttatccgtgatttgttaagtttatgtgaagtcgtcaagggaaaagacaataaagctgttattgcgagcaacatcatgtacgttgttggacaatattcaagattcttaagagcccattggaagtttttgaagacagttgtccataagctgtttgaatttatgcatgagacgcatcctggtgttcaggacatggcttgcgacacattcttaaaaattgttcagaagtgtaagcgaaaatttgttattgttcaggttggagaaagtgagccatttgtgtctgaacttctatcaggccttgctacaatcgtcggagatcttcaacctcatcagattcatacattttatgaatctgttggtagtatgatccaggcagaatcagatcctcagaagaggggggaatacctccagaggttgatggctctcccgaatcagaaatgggcagaaattataggacaagcacgtcaaagtgcagatatcctcaaggaaccagatgtgatacgtactgtgcttaatatcctccagacaaatacgcgcgttgcaacttcactaggaacattcttcctgtctcaaatttcgttgatcttcttggatatgctgaatgtttacagaatgtatagtgaactcgtttcaagcagcattgctaatggtggcccatacgcttcgagaacatctcttgttaaacttttaaggtctgttaagagggaaattcttaagctgatagagacgtttttagataaagctgaaaaccagccacacattggaaaacagtttgttccaccaatgatggatcaagtacttggcgactatgcaagaaatgttcctgatgcaagagaatcagaagtcttgtcactctttgcgacaataatcaacaaatacaaggttgtaatgcgagatgaagttcccctcatatttgaagctgttttccagtgcacattggagatgattactaagaattttgaagattacccagagcaccgtctcaagtttttctcgttacttcgtgctattgctacattttgtttccgtgcgttgatacagttgtcaagtgagcaactgaagctagtgatggattcagttatctgggcatttaggcatactgaaagaaatatcgctgaaactgggctcaatctcttgctcgagatgctgaaaaactttcagaaatctgacttttgtaacaaattctaccaaacatactttctgcaaattgagcaagaagtatttgctgtcttgaccgataccttccacaagcctgggttcaagttgcatgtgttggtgttgcagcacttatttagcctggttgagagcggatcattggcagaaccattgtgggatgctgcaacggtaccgcatccttattcaaataatgtcgcctttgtgcttgagtacaccaccaagcttctaagctcatcattccccaacatgactacaacagaggtgacacagtttgtgaatggactttacgagtcgagaaacgatgttggcagatttaaggataacatacgcgacttccttatacagtccaaggaattttctgctcaggataacaaagatttatatgctgaggaagctgctgcccaaatggagagagagagacaaagaatgctttcgattcctggacttatagctcccagcgaaattcaagacgacatggccgattcttaagtcttgtttttatattttataagaagaaggctctcgaaaagagaaatggaattttttttgtagagatcttgagaaatggaaagcttagaaaagacaagtgttaggttttctaaattacaatcttttttgttggatttgttactattaaatgaaaaatgtttaggatctcaaaattaatcgaacctcaaaccggttataaaccggtcttaatttc

SEQ ID NO: 80039 - protein, 1067 aa, Arabidopsis thaliana
  peptide (1)..(1067): Ceres Seq. ID no. 12654142
MAAEKLRDLSQPIDVVLLDATVEAFYSTGSKEERASADNILRDLKANPDTWLQVVHILQNTSSTHTKFFALQVLEGVIKYRWNALPVEQRDGMKNYISDVIVQLSRDEASFRTERLYVNKLNIILVQIVKQEWPAKWKSFIPDLVIAAKTSETICENCMAILKLLSEEVFDFSKGEMTQQKIKELKQSLNSEFQLIHELCLYVLSASQRQELIRATLSALHAYLSWIPLGYIFESPLLEILLKFFPVPAYRNLTLQCLSEVASLNFGDFYDMQYVKMYSIFMNQLQAILPLNLNIPEAYSTGSSEEQASAFIQNLALFFTSFFKLHIKILESAPENISLLLAGLGYLISISYVDDTEVFKNGPMLSVDALETDSFCLLTSEQMAFLPSTVDGVKSEVTERQKLYSDPMSKLRGLMISRTAKPEEVLIVEDENGNIVRETMKDNDVLVQYKIMRETLIYLSHLDHEDTEKQMLSKLSKQLSGEEWAWNNLNTLCWAIGSISGSMVVEQENRFLVMVIRDLLSLCEVVKGKDNKAVIASNIMYVVGQYSRFLRAHWKFLKTVVHKLFEFMHETHPGVQDMACDTFLKIVQKCKRKFVIVQVGESEPFVSELLSGLATIVGDLQPHQIHTFYESVGSMIQAESDPQKRGEYLQRLMALPNQKWAEIIGQARQSADILKEPDVIRTVLNILQTNTRVATSLGTFFLSQISLIFLDMLNVYRMYSELVSSSIANGGPYASRTSLVKLLRSVKREILKLIETFLDKAENQPHIGKQFVPPMMDQVLGDYARNVPDARESEVLSLFATIINKYKVVMRDEVPLIFEAVFQCTLEMITKNFEDYPEHRLKFFSLLRAIATFCFRALIQLSSEQLKLVMDSVIWAFRHTERNIAETGLNLLLEMLKNFQKSDFCNKFYQTYFLQIEQEVFAVLTDTFHKPGFKLHVLVLQHLFSLVESGSLAEPLWDAATVPHPYSNNVAFVLEYTTKLLSSSFPNMTTTEVTQFVNGLYESRNDVGRFKDNIRDFLIQSKEFSAQDNKDLYAEEAAAQMERERQRMLSIPGLIAPSEIQDDMADS

SEQ ID NO: 80040 - protein, 975 aa, Arabidopsis thaliana
  peptide (1)..(975): Ceres Seq. ID no. 12654143
MKNYISDVIVQLSRDEASFRTERLYVNKLNIILVQIVKQEWPAKWKSFIPDLVIAAKTSETICENCMAILKLLSEEVFDFSKGEMTQQKIKELKQSLNSEFQLIHELCLYVLSASQRQELIRATLSALHAYLSWIPLGYIFESPLLEILLKFFPVPAYRNLTLQCLSEVASLNFGDFYDMQYVKMYSIFMNQLQAILPLNLNIPEAYSTGSSEEQASAFIQNLALFFTSFFKLHIKILESAPENISLLLAGLGYLISISYVDDTEVFKNGPMLSVDALETDSFCLLTSEQMAFLPSTVDGVKSEVTERQKLYSDPMSKLRGLMISRTAKPEEVLIVEDENGNIVRETMKDNDVLVQYKIMRETLIYLSHLDHEDTEKQMLSKLSKQLSGEEWAWNNLNTLCWAIGSISGSMVVEQENRFLVMVIRDLLSLCEVVKGKDNKAVIASNIMYVVGQYSRFLRAHWKFLKTVVHKLFEFMHETHPGVQDMACDTFLKIVQKCKRKFVIVQVGESEPFVSELLSGLATIVGDLQPHQIHTFYESVGSMIQAESDPQKRGEYLQRLMALPNQKWAEIIGQARQSADILKEPDVIRTVLNILQTNTRVATSLGTFFLSQISLIFLDMLNVYRMYSELVSSSIANGGPYASRTSLVKLLRSVKREILKLIETFLDKAENQPHIGKQFVPPMMDQVLGDYARNVPDARESEVLSLFATIINKYKVVMRDEVPLIFEAVFQCTLEMITKNFEDYPEHRLKFFSLLRAIATFCFRALIQLSSEQLKLVMDSVIWAFRHTERNIAETGLNLLLEMLKNFQKSDFCNKFYQTYFLQIEQEVFAVLTDTFHKPGFKLHVLVLQHLFSLVESGSLAEPLWDAATVPHPYSNNVAFVLEYTTKLLSSSFPNMTTTEVTQFVNGLYESRNDVGRFKDNIRDFLIQSKEFSAQDNKDLYAEEAAAQMERERQRMLSIPGLIAPSEIQDDMADS

SEQ ID NO: 80041 - protein, 909 aa, Arabidopsis thaliana
  peptide (1)..(909): Ceres Seq. ID no. 12654144
MAILKLLSEEVFDFSKGEMTQQKIKELKQSLNSEFQLIHELCLYVLSASQRQELIRATLSALHAYLSWIPLGYIFESPLLEILLKFFPVPAYRNLTLQCLSEVASLNFGDFYDMQYVKMYSIFMNQLQAILPLNLNIPEAYSTGSSEEQASAFIQNLALFFTSFFKLHIKILESAPENISLLLAGLGYLISISYVDDTEVFKNGPMLSVDALETDSFCLLTSEQMAFLPSTVDGVKSEVTERQKLYSDPMSKLRGLMISRTAKPEEVLIVEDENGNIVRETMKDNDVLVQYKIMRETLIYLSHLDHEDTEKQMLSKLSKQLSGEEWAWNNLNTLCWAIGSISGSMVVEQENRFLVMVIRDLLSLCEVVKGKDNKAVIASNIMYVVGQYSRFLRAHWKFLKTVVHKLFEFMHETHPGVQDMACDTFLKIVQKCKRKFVIVQVGESEPFVSELLSGLATIVGDLQPHQIHTFYESVGSMIQAESDPQKRGEYLQRLMALPNQKWAEIIGQARQSADILKEPDVIRTVLNILQTNTRVATSLGTFFLSQISLIFLDMLNVYRMYSELVSSSIANGGPYASRTSLVKLLRSVKREILKLIETFLDKAENQPHIGKQFVPPMMDQVLGDYARNVPDARESEVLSLFATIINKYKVVMRDEVPLIFEAVFQCTLEMITKNFEDYPEHRLKFFSLLRAIATFCFRALIQLSSEQLKLVMDSVIWAFRHTERNIAETGLNLLLEMLKNFQKSDFCNKFYQTYFLQIEQEVFAVLTDTFHKPGFKLHVLVLQHLFSLVESGSLAEPLWDAATVPHPYSNNVAFVLEYTTKLLSSSFPNMTTTEVTQFVNGLYESRNDVGRFKDNIRDFLIQSKEFSAQDNKDLYAEEAAAQMERERQRMLSIPGLIAPSEIQDDMADS

SEQ ID NO: 80042 - DNA, 797 bp, Arabidopsis thaliana
  misc_feature (1)..(797): Ceres Seq. ID no. 12654153
  misc_feature (1)..(797): Ortholog of  Ceres SEQ ID NO 14301396 as cited in SEQ ID NO 51789
  misc_feature (1)..(797): Ortholog of  Ceres SEQ ID NO 12610031 as cited in SEQ ID NO 55811
  misc_feature (1)..(797): Ortholog of  Ceres SEQ ID NO 12610896 as cited in SEQ ID NO 55861
  misc_feature (1)..(797): Ortholog of  Ceres SEQ ID NO 12619664 as cited in SEQ ID NO 66048
  misc_feature (1)..(797): Ortholog of  Ceres SEQ ID NO 12635952 as cited in SEQ ID NO 0
acaatttcatatcaatagttacgtataaacatataatcagaaaatggtggtcaaagtatatgggcagataaaagcagctaatccacaaagagtattgctctgctttttggaaaaagacatcgagtttgaagtaattcatgtcgatctcgataaacttgaacagaaaaaaccacaacatcttcttcgtcagccgtttggtcaagttccagctattgaagatggatatctgaagctttttgaatcgcgagccatagcgaggtactacgcgacaaagtatgcggaccaaggaacggacctattgggcaagactttggagggacgagccattgtggaccagtgggtggaagttgagaataactatttctacgctgtggctctacccttagttatgaacgtcgtctttaagcccaagtctggtaagccatgcgacgtcgctttggttgaggagctaaaggtcaagttcgacaaggtcctggatgtgtatgagaaccggttagctacgaaccggtacttgggcggtgatgaattcacattagctgatttgagtcatatgcccggtatgagatatatcatgaatgaaaccagtttgagtggtttggttacgtctcgagagaatctcaaccggtggtggaatgagatttcggctagaccggcttggaagaagctcatggaattggctgcctattaatttgtctagtagttcttgtagtcctccgttaatggcttgagtcaagccgcttgacgcttgtactccattcaaatatttgatgatatactaatttaaatttggatcgtct

SEQ ID NO: 80043 - protein, 214 aa, Arabidopsis thaliana
  peptide (1)..(214): Ceres Seq. ID no. 12654154
MVVKVYGQIKAANPQRVLLCFLEKDIEFEVIHVDLDKLEQKKPQHLLRQPFGQVPAIEDGYLKLFESRAIARYYATKYADQGTDLLGKTLEGRAIVDQWVEVENNYFYAVALPLVMNVVFKPKSGKPCDVALVEELKVKFDKVLDVYENRLATNRYLGGDEFTLADLSHMPGMRYIMNETSLSGLVTSRENLNRWWNEISARPAWKKLMELAAY

SEQ ID NO: 80044 - DNA, 1059 bp, Arabidopsis thaliana
  misc_feature (1)..(1059): Ceres Seq. ID no. 12654174
  misc_feature (1)..(1059): Ortholog of  Ceres SEQ ID NO 14307123 as cited in SEQ ID NO 54182
atggatatgggaccatgcccaaaggtgcactctttgcagcttcggaaagaataccgagaagcaagggcaaaaggtgttgataactacgacagggaattggaagatgccatagacaggcttatcgttgagtgtgataggaagattggtagggcccttaagcgtcttcaagaagaggacgccaaagctgccattgccatttctgtctctgaagtcactcagtcgcctgaaattctcgagttatcggagaaaatcaaagagaagatgaaggaagcagatatccacgatcttgaaggcaaaatggatcttaagattagagctcttgagttagtcgaagagatgaggaccaagagagctgaccaacaggcggtgttgctgttggaagccttcaacaaagatagagcatccttgccacagcccgttccagctcaaccaccatcttccgaattacctccaccggatcctcgcactcaagaaatgataaatgagaaactgaagaaggcagaagatcttggtgaacaaggaatggttgatgaagcccagaaagccctggaagaggctgaagctcttaagaagcttacagttagacgagaacctccagcagattcaacgaagtacaccgctgttgatgtgcgcatcacagaccaaaagttgcgtctatgtgacatatgtggagcattcttgagcgtctatgacagtgatcgccgtttagctgatcattttggggggaagcttcatctaggatacatgctagtccgggacaaattaacagagcttctggatgagaaggccaatatacgcaaggaaagatcaaaggaacggaacagtaaggagagagaatcaagtaaagaccgagagaaagaacaagaaactagtcgtgaacatcgaagagattatgatcgcaggagtagagatcgagataggcaccatgaccgtgatcgtgaacaagacagagactatgatcggtcacactcaagaagcagacgtaggtcacgctcacggtccaggtcaagagatagaccaagggactatgatcgccacaggcgtcacaaccgctactag

SEQ ID NO: 80045 - protein, 352 aa, Arabidopsis thaliana; identical to SEQ ID NO: 25845
  peptide (1)..(352): Ceres Seq. ID no. 12654175

SEQ ID NO: 80046 - protein, 350 aa, Arabidopsis thaliana; identical to SEQ ID NO: 72287
  peptide (1)..(350): Ceres Seq. ID no. 12654176

SEQ ID NO: 80047 - protein, 265 aa, Arabidopsis thaliana
  peptide (1)..(265): Ceres Seq. ID no. 12654177
MKEADIHDLEGKMDLKIRALELVEEMRTKRADQQAVLLLEAFNKDRASLPQPVPAQPPSSELPPPDPRTQEMINEKLKKAEDLGEQGMVDEAQKALEEAEALKKLTVRREPPADSTKYTAVDVRITDQKLRLCDICGAFLSVYDSDRRLADHFGGKLHLGYMLVRDKLTELLDEKANIRKERSKERNSKERESSKDREKEQETSREHRRDYDRRSRDRDRHHDRDREQDRDYDRSHSRSRRRSRSRSRSRDRPRDYDRHRRHNRY

SEQ ID NO: 80048 - DNA, 1841 bp, Arabidopsis thaliana
  misc_feature (1)..(1841): Ceres Seq. ID no. 12654194
  misc_feature (1)..(1841): Ortholog of  Ceres SEQ ID NO 13655463 as cited in SEQ ID NO 69035
  misc_feature (1)..(1841): Ortholog of  Ceres SEQ ID NO 15180063 as cited in SEQ ID NO 0
acccaaaacgtttaacattcgaaaaagaaaagaaacggaatgatcgagacgaccaaaggcggttcaggatcgtatccgatcaaaaccatcgtcgttttggttcaagaaaatcgttcttttgaccacaccctaggctggtttaaagaactaaaccgggaaatcgacggcgtcacgaaatctgatcccaaatccaacacggtttcgtcatccgacacaaactctcttcgtgtagtcttcggggatcagtctcagtacgttaacccggatccaggtcactccattcaggatatctacgaacaagtgtttggtaagccatgggattcaggtaaaccggatccaaacccgggtcatcctaacatgtccggttttgctcaaaacgccgagagaaacaagaaagggatgtcctccgcggttatgaacggatttaaaccgaatgctttgccggtttacaaggagttggttcaaaatttcgccatatgtgataggtggtttgcgtcggttccagcgtcgacgcagccaaaccgattgtacgtacactcggcaacatcacatggagcaacgagcaacgacaagaaattgctactcgaagggtttccacagaagacgatattcgagtctctcgatgaagctggttttagctttggcatttactaccaattccctccttccactctcttttataggaatttgagaaagctgaaatatttgacacatttccaccaatacggaatacaattcaagaaagattgcaaagaaggaaagctacccaactacgtcgtggtcgaacaacgttggtttgatctattgtcaactccagccaatgacgatcacccttctcacgatgtctccgagggtcaaaagctcgtgaaagaggtctacgaggcattgagatcgagtcctcaatggaatgagattttatttatcataacgtacgacgagcatggtggattttacgaccatgtacctactccagtcgacggagttcctaatccggatggtatcttgggacctccaccatataattttgagtttaaccggctcggtgttagggttccgactttcttcatctctccttggattgagcctggcacagttattcatgggccaaatgggccgtacccaaggtcacaatatgagcattcgtcaattcccgcaacggtcaagacaattttcaaactcaaagatttcttgtcaaagagagattcatgggctggcacttttgaatctgttattacgagagactcaccaagacaagattgccctgaaacattatcaactccgattaaactaagagggacaatggcaaaagaaaatgcacaattaagcgaatttcaagaagatctcgttataatggctgcgggattaaaaggagactacaaaaacgaagaattaatccacaagctatgtaaagaaacttgcgttgcagatgcatccaaatacgttacaaatgcgtttgagaagtttctggaagagtcaagaaaggcaagagatagaggatgtgatgagaacgacatcgtttattgcgttgatgatgatgatgatcatgttgtgataccaccacaatcacattcagaagcatcaaatgctgctgctcaaccaaaaacgcaaacgtcttttttcaataagttattctcttgctttattcgccatgattgaaagagactaagagaataaatgttataataataatttgtagtcacttctcttgtgtgtgggtggaatttatttaagacaaaaaaaaagaaaaccttactagtctcttgcatatttaatttcgttgtataagaacttccacaattatttgcacatttgatattcttgtataaaaattatatgttaga

SEQ ID NO: 80049 - protein, 538 aa, Arabidopsis thaliana
  peptide (1)..(538): Ceres Seq. ID no. 12654195
MIETTKGGSGSYPIKTIVVLVQENRSFDHTLGWFKELNREIDGVTKSDPKSNTVSSSDTNSLRVVFGDQSQYVNPDPGHSIQDIYEQVFGKPWDSGKPDPNPGHPNMSGFAQNAERNKKGMSSAVMNGFKPNALPVYKELVQNFAICDRWFASVPASTQPNRLYVHSATSHGATSNDKKLLLEGFPQKTIFESLDEAGFSFGIYYQFPPSTLFYRNLRKLKYLTHFHQYGIQFKKDCKEGKLPNYVVVEQRWFDLLSTPANDDHPSHDVSEGQKLVKEVYEALRSSPQWNEILFIITYDEHGGFYDHVPTPVDGVPNPDGILGPPPYNFEFNRLGVRVPTFFISPWIEPGTVIHGPNGPYPRSQYEHSSIPATVKTIFKLKDFLSKRDSWAGTFESVITRDSPRQDCPETLSTPIKLRGTMAKENAQLSEFQEDLVIMAAGLKGDYKNEELIHKLCKETCVADASKYVTNAFEKFLEESRKARDRGCDENDIVYCVDDDDDHVVIPPQSHSEASNAAAQPKTQTSFFNKLFSCFIRHD

SEQ ID NO: 80050 - protein, 432 aa, Arabidopsis thaliana
  peptide (1)..(432): Ceres Seq. ID no. 12654196
MSGFAQNAERNKKGMSSAVMNGFKPNALPVYKELVQNFAICDRWFASVPASTQPNRLYVHSATSHGATSNDKKLLLEGFPQKTIFESLDEAGFSFGIYYQFPPSTLFYRNLRKLKYLTHFHQYGIQFKKDCKEGKLPNYVVVEQRWFDLLSTPANDDHPSHDVSEGQKLVKEVYEALRSSPQWNEILFIITYDEHGGFYDHVPTPVDGVPNPDGILGPPPYNFEFNRLGVRVPTFFISPWIEPGTVIHGPNGPYPRSQYEHSSIPATVKTIFKLKDFLSKRDSWAGTFESVITRDSPRQDCPETLSTPIKLRGTMAKENAQLSEFQEDLVIMAAGLKGDYKNEELIHKLCKETCVADASKYVTNAFEKFLEESRKARDRGCDENDIVYCVDDDDDHVVIPPQSHSEASNAAAQPKTQTSFFNKLFSCFIRHD

SEQ ID NO: 80051 - protein, 418 aa, Arabidopsis thaliana
  peptide (1)..(418): Ceres Seq. ID no. 12654197
MSSAVMNGFKPNALPVYKELVQNFAICDRWFASVPASTQPNRLYVHSATSHGATSNDKKLLLEGFPQKTIFESLDEAGFSFGIYYQFPPSTLFYRNLRKLKYLTHFHQYGIQFKKDCKEGKLPNYVVVEQRWFDLLSTPANDDHPSHDVSEGQKLVKEVYEALRSSPQWNEILFIITYDEHGGFYDHVPTPVDGVPNPDGILGPPPYNFEFNRLGVRVPTFFISPWIEPGTVIHGPNGPYPRSQYEHSSIPATVKTIFKLKDFLSKRDSWAGTFESVITRDSPRQDCPETLSTPIKLRGTMAKENAQLSEFQEDLVIMAAGLKGDYKNEELIHKLCKETCVADASKYVTNAFEKFLEESRKARDRGCDENDIVYCVDDDDDHVVIPPQSHSEASNAAAQPKTQTSFFNKLFSCFIRHD

SEQ ID NO: 80052 - DNA, 1566 bp, Arabidopsis thaliana
  misc_feature (1)..(1566): Ceres Seq. ID no. 12654198
  misc_feature (1)..(1566): Ortholog of  Ceres SEQ ID NO 13655463 as cited in SEQ ID NO 69035
  misc_feature (1)..(1566): Ortholog of  Ceres SEQ ID NO 15180063 as cited in SEQ ID NO 0
atggccgagacgaaaaaaggctcagaatcgtatccgatcaaaaccatcgtcgttttggttcaagagaatcgttctttcgaccacacacttggctggttcaaagagctaaaccgggaaattgacggagtcatgaaatcggaccagaaattcaacccgggtttttcctctgacctaaattcccacaacgtcgtctttggcgaccagtctcagtacgttgacccgaatccaggtcactccattcgggatatttacgaacaagtgttcggtaaaccatgggattcgggtcacccggacccaaacccgggtccagctacaatgtccggatttgcccaaaacgccgagcgaaagatgaaagggatgtcttctgcggttatgaacggatttaaaccggacgctttgccggtttacaaggaattggttcaaaatttcgctatatgtgataggtggtttgcgtcggttccgggtgcaacacagccaaaccgattgtttatacattcggcaacatcacacggaacaacgaacaacgagaggaaattactgatcgaaggttttccacaaaagacgatattcgagtcactcgatgaagctggttttacctttgggatttattaccaatgttttcctactactctcttttataggaatttgagaaaactcaagtatttgacacgtttccacgactacggactacaattcaagaaagattgtaaagaagggaatctaccgaactatgttgtggttgaacaacgttggtatgatctattgttgaatcccgctaacgatgatcatccatcacatgacgtctccgaaggccaaaagctcgtgaaagaagtttacgaggccttgagatcgagtcctcaatggaatgagattttattcattataacatatgacgaacacggtggattctacgaccatgtccctactcccctcgacggagttcctaatccggatggtatcttgggacctccaccgtacaattttgaatttaaccggctcggcgttagggttccgactttcttcatctccccttggattgagcctggcacagttcttcatgggtcaaatgggccgtacctaatgtcacaatatgagcattcgtcaattcccgcaacggtcaagaaaattttcaaactcaaagattttttgacaaagagagattcgtgggctggcacttttgaatctgttattacgagaaactcaccaagacaagattgccctgaaacattgtcaaatccggtcaaaatgagagggacggtggcaaaagaaaatgcagaattgagcgactttcaagaagagcttgtaatagttgctgcgggtttaaaaggagactacaaaaacgaagaattgctatacaaactatgcaaaaaaacttgcgtttcagatgcttctaaatacgttacgaaagcgtttgataagtttgtagaagagtctaaaaaggcaagagaaaggggaggtgatgagaacgacatcgttttttgcgttgatgatgatgatgatcataatgttgtgaaaccaccaccatcacaatcagagccatcacatgctactccttggtcaaattaa

SEQ ID NO: 80053 - protein, 521 aa, Arabidopsis thaliana
  peptide (1)..(521): Ceres Seq. ID no. 12654199
MAETKKGSESYPIKTIVVLVQENRSFDHTLGWFKELNREIDGVMKSDQKFNPGFSSDLNSHNVVFGDQSQYVDPNPGHSIRDIYEQVFGKPWDSGHPDPNPGPATMSGFAQNAERKMKGMSSAVMNGFKPDALPVYKELVQNFAICDRWFASVPGATQPNRLFIHSATSHGTTNNERKLLIEGFPQKTIFESLDEAGFTFGIYYQCFPTTLFYRNLRKLKYLTRFHDYGLQFKKDCKEGNLPNYVVVEQRWYDLLLNPANDDHPSHDVSEGQKLVKEVYEALRSSPQWNEILFIITYDEHGGFYDHVPTPLDGVPNPDGILGPPPYNFEFNRLGVRVPTFFISPWIEPGTVLHGSNGPYLMSQYEHSSIPATVKKIFKLKDFLTKRDSWAGTFESVITRNSPRQDCPETLSNPVKMRGTVAKENAELSDFQEELVIVAAGLKGDYKNEELLYKLCKKTCVSDASKYVTKAFDKFVEESKKARERGGDENDIVFCVDDDDDHNVVKPPPSQSEPSHATPWSN

SEQ ID NO: 80054 - protein, 478 aa, Arabidopsis thaliana
  peptide (1)..(478): Ceres Seq. ID no. 12654200
MKSDQKFNPGFSSDLNSHNVVFGDQSQYVDPNPGHSIRDIYEQVFGKPWDSGHPDPNPGPATMSGFAQNAERKMKGMSSAVMNGFKPDALPVYKELVQNFAICDRWFASVPGATQPNRLFIHSATSHGTTNNERKLLIEGFPQKTIFESLDEAGFTFGIYYQCFPTTLFYRNLRKLKYLTRFHDYGLQFKKDCKEGNLPNYVVVEQRWYDLLLNPANDDHPSHDVSEGQKLVKEVYEALRSSPQWNEILFIITYDEHGGFYDHVPTPLDGVPNPDGILGPPPYNFEFNRLGVRVPTFFISPWIEPGTVLHGSNGPYLMSQYEHSSIPATVKKIFKLKDFLTKRDSWAGTFESVITRNSPRQDCPETLSNPVKMRGTVAKENAELSDFQEELVIVAAGLKGDYKNEELLYKLCKKTCVSDASKYVTKAFDKFVEESKKARERGGDENDIVFCVDDDDDHNVVKPPPSQSEPSHATPWSN

SEQ ID NO: 80055 - protein, 416 aa, Arabidopsis thaliana
  peptide (1)..(416): Ceres Seq. ID no. 12654201
MSGFAQNAERKMKGMSSAVMNGFKPDALPVYKELVQNFAICDRWFASVPGATQPNRLFIHSATSHGTTNNERKLLIEGFPQKTIFESLDEAGFTFGIYYQCFPTTLFYRNLRKLKYLTRFHDYGLQFKKDCKEGNLPNYVVVEQRWYDLLLNPANDDHPSHDVSEGQKLVKEVYEALRSSPQWNEILFIITYDEHGGFYDHVPTPLDGVPNPDGILGPPPYNFEFNRLGVRVPTFFISPWIEPGTVLHGSNGPYLMSQYEHSSIPATVKKIFKLKDFLTKRDSWAGTFESVITRNSPRQDCPETLSNPVKMRGTVAKENAELSDFQEELVIVAAGLKGDYKNEELLYKLCKKTCVSDASKYVTKAFDKFVEESKKARERGGDENDIVFCVDDDDDHNVVKPPPSQSEPSHATPWSN

SEQ ID NO: 80056 - DNA, 1056 bp, Arabidopsis thaliana
  misc_feature (1)..(1056): Ceres Seq. ID no. 12654210
  misc_feature (1)..(1056): Ortholog of  Ceres SEQ ID NO 14315896 as cited in SEQ ID NO 57597
aaactaacttcgctagagaataatggcatctgtttactccaccctaacctactggctcgtccaccacccctacattgccaacttcacgtggaccgaaggtgaaacactaggctccaccgttttctttgtctttgtcgtcgtctccctttacctctccgccacattcctcctccgatacaccgtcgattcactccccacactcggtccccgcattctcaaaccaatcacagccgttcacagcctcattctcttcctcctctccttaaccatggccgttggttgcactctctccctaatctcttcctcggacccgaaggcgcgtctcttcgacgccgtttgtttccccctcgacgtgaaacctaagggaccgcttttcttttgggctcaagtcttttacctctcgaagatccttgagttcgtagacacacttctcatcatactcaacaaatcaatccaacggctctcgttcctccacgtctaccaccacgcaacggttgtgattttgtgctacctctggttacgaacacgtcaatcgatgtttcctgttgggctcgtgttgaactcgacggtccatgtgattatgtacgggtactatttcctctgcgctatcggatcgaggcccaagtggaagaagttggtgacgaattttcaaatggttcagtttgctttcggcatggggttaggagccgcttggatgctcccagagcattatttcgggtcgggttgcgccgggatttggacagtttatttcaatggtgtgtttactgcttctctattggctctcttctacaacttccactccaagaactatgagaagactacaacgtcgcctttgtataagatcgaatcctttatatttattcacggagagaggtgggcaaataaagcgattacattattttccaagaaaaacgattaaattgtcatgattattatatatatatctagtttggatatgttgatgtgtgttgttagttgttactgtaaaatgttgggatgcatggtttgaaattgttttatatattaacgaataagatgacaaaatatataaaaatg

SEQ ID NO: 80057 - protein, 298 aa, Arabidopsis thaliana
  peptide (1)..(298): Ceres Seq. ID no. 12654211
MASVYSTLTYWLVHHPYIANFTWTEGETLGSTVFFVFVVVSLYLSATFLLRYTVDSLPTLGPRILKPITAVHSLILFLLSLTMAVGCTLSLISSSDPKARLFDAVCFPLDVKPKGPLFFWAQVFYLSKILEFVDTLLIILNKSIQRLSFLHVYHHATVVILCYLWLRTRQSMFPVGLVLNSTVHVIMYGYYFLCAIGSRPKWKKLVTNFQMVQFAFGMGLGAAWMLPEHYFGSGCAGIWTVYFNGVFTASLLALFYNFHSKNYEKTTTSPLYKIESFIFIHGERWANKAITLFSKKND

SEQ ID NO: 80058 - protein, 216 aa, Arabidopsis thaliana
  peptide (1)..(216): Ceres Seq. ID no. 12654212
MAVGCTLSLISSSDPKARLFDAVCFPLDVKPKGPLFFWAQVFYLSKILEFVDTLLIILNKSIQRLSFLHVYHHATVVILCYLWLRTRQSMFPVGLVLNSTVHVIMYGYYFLCAIGSRPKWKKLVTNFQMVQFAFGMGLGAAWMLPEHYFGSGCAGIWTVYFNGVFTASLLALFYNFHSKNYEKTTTSPLYKIESFIFIHGERWANKAITLFSKKND

SEQ ID NO: 80059 - DNA, 1082 bp, Arabidopsis thaliana
  misc_feature (1)..(1082): Ceres Seq. ID no. 12654213
  misc_feature (1)..(1082): Ortholog of  Ceres SEQ ID NO 14315896 as cited in SEQ ID NO 57597
aaacttcgtcggcgattcaccggaggctatggcatcaatttactcctctttaacctactggctcgttaaccacccctacatctccaattttacttggatcgaaggtgaaaccctaggctccaccgtctttttcgtatccgtcgtagtctccgtttacctctccgccacgttcctcctccgatccgccatcgattcactcccatcactcagtccacgtatcctcaaaccgatcacagccgtccacagcctaatcctctgtctcctctccttagtcatggccgtcggttgcactctctcaataacctcatctcacgcgtcttcagatccgatggcgcgtttccttcacgcgatttgctttcccgtcgacgttaaacctaacggaccgcttttcttctgggctcaagtcttctacctctcgaagatcctcgagttcggagacacgatcctcatcatactcggcaaatcaatccaacggctatccttcctccacgtgtaccaccacgcgacggttgtggtcatgtgttatctctggctccgaactcgccaatcgatgtttccgattgcgctcgtgacgaattcgacggtacacgtcatcatgtacggttactacttcctctgcgccgttggatcgaggcccaagtggaagagattggtgacggattgtcagattgttcagtttgttttcagtttcgggttatccggttggatgctccgagagcacttattcgggtcgggttgcaccgggatttggggatggtgtttcaacgctgcatttaatgcttctcttttggctctcttttccaacttccattcaaagaattatgtcaagaagccaacgagagaggatggcaaaaaaagcgattagattggtttcttggacaataagtaaaacctctcattgtgtcttgaattgttgattagtttccacacaaaaggattaattgtcttgaattgttgtttattttgaaatttttgtctgtgttgtacttgcaaatgttgagatacttttgtacttgtatgaatataagatgacagaaaatatcaaaatatcacaaaagtcatgacatggactcatcatctct

SEQ ID NO: 80060 - protein, 287 aa, Arabidopsis thaliana
  peptide (1)..(287): Ceres Seq. ID no. 12654214
NFVGDSPEAMASIYSSLTYWLVNHPYISNFTWIEGETLGSTVFFVSVVVSVYLSATFLLRSAIDSLPSLSPRILKPITAVHSLILCLLSLVMAVGCTLSITSSHASSDPMARFLHAICFPVDVKPNGPLFFWAQVFYLSKILEFGDTILIILGKSIQRLSFLHVYHHATVVVMCYLWLRTRQSMFPIALVTNSTVHVIMYGYYFLCAVGSRPKWKRLVTDCQIVQFVFSFGLSGWMLREHLFGSGCTGIWGWCFNAAFNASLLALFSNFHSKNYVKKPTREDGKKSD

SEQ ID NO: 80061 - protein, 278 aa, Arabidopsis thaliana
  peptide (1)..(278): Ceres Seq. ID no. 12654215
MASIYSSLTYWLVNHPYISNFTWIEGETLGSTVFFVSVVVSVYLSATFLLRSAIDSLPSLSPRILKPITAVHSLILCLLSLVMAVGCTLSITSSHASSDPMARFLHAICFPVDVKPNGPLFFWAQVFYLSKILEFGDTILIILGKSIQRLSFLHVYHHATVVVMCYLWLRTRQSMFPIALVTNSTVHVIMYGYYFLCAVGSRPKWKRLVTDCQIVQFVFSFGLSGWMLREHLFGSGCTGIWGWCFNAAFNASLLALFSNFHSKNYVKKPTREDGKKSD

SEQ ID NO: 80062 - protein, 196 aa, Arabidopsis thaliana
  peptide (1)..(196): Ceres Seq. ID no. 12654216
MAVGCTLSITSSHASSDPMARFLHAICFPVDVKPNGPLFFWAQVFYLSKILEFGDTILIILGKSIQRLSFLHVYHHATVVVMCYLWLRTRQSMFPIALVTNSTVHVIMYGYYFLCAVGSRPKWKRLVTDCQIVQFVFSFGLSGWMLREHLFGSGCTGIWGWCFNAAFNASLLALFSNFHSKNYVKKPTREDGKKSD

SEQ ID NO: 80063 - DNA, 3267 bp, Arabidopsis thaliana
  misc_feature (1)..(3267): Ceres Seq. ID no. 12654217
  misc_feature (1)..(3267): Ortholog of  Ceres SEQ ID NO 13656177 as cited in SEQ ID NO 64997
atggccacaacagaagatactccagcttctgctggtccaagatatgctccagaggacccaactcttccccaaccatggaagggacttattgatggaagcacaggaattctctattactggaatcctgaaaccaatgtcactcagtatgaaagaccttctgcgcctcctccccactctgccacaacaccgaagctagctcagattcctgtaccctcttcaggacaaggtcaccaagctcagcatgaacaagcaaaaccagttggtcatgtgtctcagcagcatggtttccaacaacagccacagcaatttccatcccaacatgtaagaccccaaatgatgcagcagcatccggcccagcaaatgcctcaacaatcaggtcaacagtttccccaacaacagagccaatcgatggtgccgcacccacatgggcatccttctgtacagacttatcagccaacgacgcagcagcagcagcaagggatgcagaatcagcattcacaaatgcctcagcagctgagccatcagtatgctcattcacaacaacattacatgggttttcggcctcacatgcaaacgcaaggacttcaaaattcacatcagacacctcagggtggtccccatggtcagcagtttccgagccagcaagagtacaactcattggctccgaagagggagggggatgagttccatgggggtaagaaaactgggttttctcaaccccatttaccaaattctgaacgttcaccatctcaaaatacccactttgaagccaatgcagcatcacaaaagacgaatgcaaacttggctatggctcagaaatgcaatggacctcaagcaaatgctgcagtcacacagtttcaacagccaggggcgaacctaattcaccagcaacttggacctagggcgccaaatcaaatggaccagacaatgttgcaccagaagtctcacgtttcccctttccaatcaaataatacttatgagaataatctacaatctaggcctggtaatgactcgtacgttaacatgagaatggaagtgccggttaggggtgcccaaccacttcatcctgcagcaatgcctaaggatataaggataagtggtggtccaccaacaaatgctgatcccgccatggggcaaacagggcatggaacatatggacacgctggtccagcttttccaaataaatccttggtgcggcctcattttgtcacatctcctgatgttccccatctctctcccgttgaaatataccgaaaacaacatgaagtcacaacaactggcgagaacattccagcaccatacatcacatttgaatctagtggtctcccacctgaaatccttagagagttgctttctgctggatttccatcgccaacaccgatccaggcccaaacatggccaattgctctgcaaagcagggatatagttgcaattgcaaaaactggttctggtaaaacattgggatacttgatccctgccttcattcttctaaggcactgtcgtaacgactcccgcaatggccccacagttttgatcctagctcctactcgggagctagccacacaaatacaagacgaagcactaaggtttggacggtcttccaggatatcatgcacttgtttgtatggtggagctccaaagggtcctcaattgaaagagttggaacgaggagctgatattgtggtggcaactcctgggcgtctaaatgatatactggagatgaagatgattgatttccagcaggtttcccttcttgtgcttgacgaggcagaccgaatgcttgacatgggttttgaaccccaaatccgtaagattgtgaatgaaatacctcctcggagacagactcttatgtacacagccacttggccaaaagaagtaagaaaaattgcaagcgatcttcttgtgaaccctgtccaagttaacataggcagggtagatgagttggctgctaacaaagcaataacgcagtatgttgaagtagtcccacaaatggagaaagagagacgtttggagcaaatccttaggtcacaagaacgaggttcaaaagttataatattttgctccacgaagaggctttgtgaccatcttgcacgtagtgtcggacgtcattttggcgctgttgtgatccatggagacaagactcaaggtgagagagattgggtgcttaaccagttccgaagcgggaagtcttgtgtactgatagctactgacgttgctgcccggggactcgacataaaagacatacgagttgtgatcaactacgattttccaactggagttgaagactatgtccaccgtattgggagaaccggtcgagctggtgcaactggagttgcattcactttctttacagagcaagattggaaatacgcacctgatttgatcaaagtcctggaaggagcgaaccagcaagtaccgcctcaagtaagagatattgcaatgcgtggtggtggtggtggtggtcccggttatagccaggatcgaagaggtatggttaaccggtttgactctggcggtggtggtacccgttgggattctggtggtgggtttggtgggcgtggtggtgggtttagtggccgtgagggtgggtttggaggccgtgagggtggatttgggggccgtgagggtggatttggaggccgtgggggaagatttggaatgagagatgactcatttggacgtggcgggaatcgtggtcggggttttactggtcctgatgctggtcatatgaatgtgggtggtagaggcggatttggtcggtttggcaataataataatatggagagccgaggctttggtcgtggtagtggtagaggctttggtcgtggtgttggacggtttgacaacagaagaggtagaagtcgcagcagaagtcctgatttggttcggccacggcgccgtagctcgagctatagccggagtcgaagccggagcgggagctatagtcgtagccgtagccgtagcaggagctggtcacgttcaaggagtcgcagccctagacatagccgtgaccgaggtggtcataacaggagcagaagctatagccgtagtcctagtccggtttatgaaagacgagatagagcgccacgtgtttctgggtttgatattaaaccaccagttgaatctgtagtgaacctggacatgaatgccgcggcagcgattgaaaacgtggttcctacatccttgtctgagagacaagggaatggggttgttgaatcggaggtagaagcggctttagtacgaccagtggttgatgaagaaccctaa

SEQ ID NO: 80064 - protein, 1088 aa, Arabidopsis thaliana
  peptide (1)..(1088): Ceres Seq. ID no. 12654218
MATTEDTPASAGPRYAPEDPTLPQPWKGLIDGSTGILYYWNPETNVTQYERPSAPPPHSATTPKLAQIPVPSSGQGHQAQHEQAKPVGHVSQQHGFQQQPQQFPSQHVRPQMMQQHPAQQMPQQSGQQFPQQQSQSMVPHPHGHPSVQTYQPTTQQQQQGMQNQHSQMPQQLSHQYAHSQQHYMGFRPHMQTQGLQNSHQTPQGGPHGQQFPSQQEYNSLAPKREGDEFHGGKKTGFSQPHLPNSERSPSQNTHFEANAASQKTNANLAMAQKCNGPQANAAVTQFQQPGANLIHQQLGPRAPNQMDQTMLHQKSHVSPFQSNNTYENNLQSRPGNDSYVNMRMEVPVRGAQPLHPAAMPKDIRISGGPPTNADPAMGQTGHGTYGHAGPAFPNKSLVRPHFVTSPDVPHLSPVEIYRKQHEVTTTGENIPAPYITFESSGLPPEILRELLSAGFPSPTPIQAQTWPIALQSRDIVAIAKTGSGKTLGYLIPAFILLRHCRNDSRNGPTVLILAPTRELATQIQDEALRFGRSSRISCTCLYGGAPKGPQLKELERGADIVVATPGRLNDILEMKMIDFQQVSLLVLDEADRMLDMGFEPQIRKIVNEIPPRRQTLMYTATWPKEVRKIASDLLVNPVQVNIGRVDELAANKAITQYVEVVPQMEKERRLEQILRSQERGSKVIIFCSTKRLCDHLARSVGRHFGAVVIHGDKTQGERDWVLNQFRSGKSCVLIATDVAARGLDIKDIRVVINYDFPTGVEDYVHRIGRTGRAGATGVAFTFFTEQDWKYAPDLIKVLEGANQQVPPQVRDIAMRGGGGGGPGYSQDRRGMVNRFDSGGGGTRWDSGGGFGGRGGGFSGREGGFGGREGGFGGREGGFGGRGGRFGMRDDSFGRGGNRGRGFTGPDAGHMNVGGRGGFGRFGNNNNMESRGFGRGSGRGFGRGVGRFDNRRGRSRSRSPDLVRPRRRSSSYSRSRSRSGSYSRSRSRSRSWSRSRSRSPRHSRDRGGHNRSRSYSRSPSPVYERRDRAPRVSGFDIKPPVESVVNLDMNAAAAIENVVPTSLSERQGNGVVESEVEAALVRPVVDEEP

SEQ ID NO: 80065 - protein, 977 aa, Arabidopsis thaliana
  peptide (1)..(977): Ceres Seq. ID no. 12654219
MMQQHPAQQMPQQSGQQFPQQQSQSMVPHPHGHPSVQTYQPTTQQQQQGMQNQHSQMPQQLSHQYAHSQQHYMGFRPHMQTQGLQNSHQTPQGGPHGQQFPSQQEYNSLAPKREGDEFHGGKKTGFSQPHLPNSERSPSQNTHFEANAASQKTNANLAMAQKCNGPQANAAVTQFQQPGANLIHQQLGPRAPNQMDQTMLHQKSHVSPFQSNNTYENNLQSRPGNDSYVNMRMEVPVRGAQPLHPAAMPKDIRISGGPPTNADPAMGQTGHGTYGHAGPAFPNKSLVRPHFVTSPDVPHLSPVEIYRKQHEVTTTGENIPAPYITFESSGLPPEILRELLSAGFPSPTPIQAQTWPIALQSRDIVAIAKTGSGKTLGYLIPAFILLRHCRNDSRNGPTVLILAPTRELATQIQDEALRFGRSSRISCTCLYGGAPKGPQLKELERGADIVVATPGRLNDILEMKMIDFQQVSLLVLDEADRMLDMGFEPQIRKIVNEIPPRRQTLMYTATWPKEVRKIASDLLVNPVQVNIGRVDELAANKAITQYVEVVPQMEKERRLEQILRSQERGSKVIIFCSTKRLCDHLARSVGRHFGAVVIHGDKTQGERDWVLNQFRSGKSCVLIATDVAARGLDIKDIRVVINYDFPTGVEDYVHRIGRTGRAGATGVAFTFFTEQDWKYAPDLIKVLEGANQQVPPQVRDIAMRGGGGGGPGYSQDRRGMVNRFDSGGGGTRWDSGGGFGGRGGGFSGREGGFGGREGGFGGREGGFGGRGGRFGMRDDSFGRGGNRGRGFTGPDAGHMNVGGRGGFGRFGNNNNMESRGFGRGSGRGFGRGVGRFDNRRGRSRSRSPDLVRPRRRSSSYSRSRSRSGSYSRSRSRSRSWSRSRSRSPRHSRDRGGHNRSRSYSRSPSPVYERRDRAPRVSGFDIKPPVESVVNLDMNAAAAIENVVPTSLSERQGNGVVESEVEAALVRPVVDEEP

SEQ ID NO: 80066 - protein, 976 aa, Arabidopsis thaliana
  peptide (1)..(976): Ceres Seq. ID no. 12654220
MQQHPAQQMPQQSGQQFPQQQSQSMVPHPHGHPSVQTYQPTTQQQQQGMQNQHSQMPQQLSHQYAHSQQHYMGFRPHMQTQGLQNSHQTPQGGPHGQQFPSQQEYNSLAPKREGDEFHGGKKTGFSQPHLPNSERSPSQNTHFEANAASQKTNANLAMAQKCNGPQANAAVTQFQQPGANLIHQQLGPRAPNQMDQTMLHQKSHVSPFQSNNTYENNLQSRPGNDSYVNMRMEVPVRGAQPLHPAAMPKDIRISGGPPTNADPAMGQTGHGTYGHAGPAFPNKSLVRPHFVTSPDVPHLSPVEIYRKQHEVTTTGENIPAPYITFESSGLPPEILRELLSAGFPSPTPIQAQTWPIALQSRDIVAIAKTGSGKTLGYLIPAFILLRHCRNDSRNGPTVLILAPTRELATQIQDEALRFGRSSRISCTCLYGGAPKGPQLKELERGADIVVATPGRLNDILEMKMIDFQQVSLLVLDEADRMLDMGFEPQIRKIVNEIPPRRQTLMYTATWPKEVRKIASDLLVNPVQVNIGRVDELAANKAITQYVEVVPQMEKERRLEQILRSQERGSKVIIFCSTKRLCDHLARSVGRHFGAVVIHGDKTQGERDWVLNQFRSGKSCVLIATDVAARGLDIKDIRVVINYDFPTGVEDYVHRIGRTGRAGATGVAFTFFTEQDWKYAPDLIKVLEGANQQVPPQVRDIAMRGGGGGGPGYSQDRRGMVNRFDSGGGGTRWDSGGGFGGRGGGFSGREGGFGGREGGFGGREGGFGGRGGRFGMRDDSFGRGGNRGRGFTGPDAGHMNVGGRGGFGRFGNNNNMESRGFGRGSGRGFGRGVGRFDNRRGRSRSRSPDLVRPRRRSSSYSRSRSRSGSYSRSRSRSRSWSRSRSRSPRHSRDRGGHNRSRSYSRSPSPVYERRDRAPRVSGFDIKPPVESVVNLDMNAAAAIENVVPTSLSERQGNGVVESEVEAALVRPVVDEEP

SEQ ID NO: 80067 - DNA, 1392 bp, Arabidopsis thaliana
  misc_feature (1)..(1392): Ceres Seq. ID no. 12654221
  misc_feature (1)..(1392): Ortholog of  Ceres SEQ ID NO 14313599 as cited in SEQ ID NO 54989
  misc_feature (1)..(1392): Ortholog of  Ceres SEQ ID NO 15176204 as cited in SEQ ID NO 55608
  misc_feature (1)..(1392): Ortholog of  Ceres SEQ ID NO 15225111 as cited in SEQ ID NO 58444
  misc_feature (1)..(1392): Ortholog of  Ceres SEQ ID NO 14313064 as cited in SEQ ID NO 59543
  misc_feature (1)..(1392): Ortholog of  Ceres SEQ ID NO 13584238 as cited in SEQ ID NO 64216
  misc_feature (1)..(1392): Ortholog of  Ceres SEQ ID NO 13661001 as cited in SEQ ID NO 67531
attcaaaactcatcctatctctatctacacataactccaaaaaacaaacaaattttctctctctatctctcttcgcaaaacaacatagaaaaaaagtagaaagtctcaatctttttgctgaacaatcttgttgtggtctcttctgtgtatatcaatggatgaaaaaggaagaagcttgaagaacaacaacatggaagacgagatggacctaaagagaggtccgtggactgctgaagaagattttaagctcatgaattacattgctactaatggagaaggtcgctggaactctctttctcgttgcgccggcctccaacgcaccggtaaaagctgtagactaaggtggttaaactatctccgccctgacgtccgccgtggaaacattacacttgaagaacaactcttgatcctcgaacttcattcccgttggggaaatagatggtcaaaaatcgcacaatatttaccgggaagaacggacaacgagatcaagaactactggaggacgcgggtgcaaaagcatgcgaaacagttgaaatgtgatgtgaatagccaacaattcaaagacacaatgaagtacttgtggatgcctcgactagtcgagaggattcagtcagcctcggcctcatccgcagcagcagccaccaccacaaccaccaccaccacaggatcagccggcacgtcatcttgcatcacaacctctaacaatcaattcatgaattacgactacaacaacaacaacatgggacaacagtttggtgtaatgagcaacaatgattatatcacgcctgaaaattccagcgtggcagtgtctccggcgtcagacttaacggagtactacagcgctccaaaccctaacccggaatactattcgggtcaaatggggaatagttattatccagatcagaatttagtgagttcacaattattaccggataattatttcgactatagtggattattagacgaagatctaacggctatgcaagagcagagtaacctcagctggtttgaaaacattaatggtgctgcttcttcttcagacagtttatggaacattggagaaactgatgaagaattctggttcttacagcagcaacaacagttcaacaataatggtagcttctgaagttagaaaaaaaaaatagaaatcgttttaagttaaattatacactatagtatacgtgtgaaaggaatttgttgtaagggaataattaaaaacaaagaattgttcataggatatatgatcaggttttttataccaagcttgatcatatatcatggcgttttaacaaagcgctaaacttgattggttttgttttttgggggggattgcaatgatattttgtggataattgataaacttggatgaaataatttatgatttaatgtttg

SEQ ID NO: 80068 - protein, 323 aa, Arabidopsis thaliana
  peptide (1)..(323): Ceres Seq. ID no. 12654222
MDEKGRSLKNNNMEDEMDLKRGPWTAEEDFKLMNYIATNGEGRWNSLSRCAGLQRTGKSCRLRWLNYLRPDVRRGNITLEEQLLILELHSRWGNRWSKIAQYLPGRTDNEIKNYWRTRVQKHAKQLKCDVNSQQFKDTMKYLWMPRLVERIQSASASSAAAATTTTTTTTGSAGTSSCITTSNNQFMNYDYNNNNMGQQFGVMSNNDYITPENSSVAVSPASDLTEYYSAPNPNPEYYSGQMGNSYYPDQNLVSSQLLPDNYFDYSGLLDEDLTAMQEQSNLSWFENINGAASSSDSLWNIGETDEEFWFLQQQQQFNNNGSF

SEQ ID NO: 80069 - protein, 311 aa, Arabidopsis thaliana
  peptide (1)..(311): Ceres Seq. ID no. 12654223
MEDEMDLKRGPWTAEEDFKLMNYIATNGEGRWNSLSRCAGLQRTGKSCRLRWLNYLRPDVRRGNITLEEQLLILELHSRWGNRWSKIAQYLPGRTDNEIKNYWRTRVQKHAKQLKCDVNSQQFKDTMKYLWMPRLVERIQSASASSAAAATTTTTTTTGSAGTSSCITTSNNQFMNYDYNNNNMGQQFGVMSNNDYITPENSSVAVSPASDLTEYYSAPNPNPEYYSGQMGNSYYPDQNLVSSQLLPDNYFDYSGLLDEDLTAMQEQSNLSWFENINGAASSSDSLWNIGETDEEFWFLQQQQQFNNNGSF

SEQ ID NO: 80070 - protein, 307 aa, Arabidopsis thaliana
  peptide (1)..(307): Ceres Seq. ID no. 12654224
MDLKRGPWTAEEDFKLMNYIATNGEGRWNSLSRCAGLQRTGKSCRLRWLNYLRPDVRRGNITLEEQLLILELHSRWGNRWSKIAQYLPGRTDNEIKNYWRTRVQKHAKQLKCDVNSQQFKDTMKYLWMPRLVERIQSASASSAAAATTTTTTTTGSAGTSSCITTSNNQFMNYDYNNNNMGQQFGVMSNNDYITPENSSVAVSPASDLTEYYSAPNPNPEYYSGQMGNSYYPDQNLVSSQLLPDNYFDYSGLLDEDLTAMQEQSNLSWFENINGAASSSDSLWNIGETDEEFWFLQQQQQFNNNGSF

SEQ ID NO: 80071 - DNA, 2525 bp, Arabidopsis thaliana
  misc_feature (1)..(2525): Ceres Seq. ID no. 12654306
  misc_feature (1)..(2525): Ortholog of  Ceres SEQ ID NO 15177561 as cited in SEQ ID NO 53065
  misc_feature (1)..(2525): Ortholog of  Ceres SEQ ID NO 13595521 as cited in SEQ ID NO 59840
ctcccaaattctcagatctaatcagatcgacgattcctgatttcatcagcttcgagagagatccttcttttgttcttcgttgaatgtctcgctcccagaacgaggagtttcaacaatggtggaacaagcaacgagataggaacaatcacgacgttctttacgccggcgacgatgaagcattcctcaccgttgaaatccgtactccggccaccgttgaccctgataaggatcggatccggactcgtaccgttcgtcagctctctcgtctctacctcctcaagttcaagcaactcgcatcttccttcctctggatcggtaactctttcctttaccttgttcgcaccgccaatcgccgcattgccaacgataatcctccatccgtgtcttcctccgctagattgtaccgtttaatcaagggatttctcgttgttgttgtgcttcttctctgtttcgagcttgccgcttatttcaagggatggcacttcacacctccctctgttgcctccgccgaggtcgctgtggaggtggtttacgcttggtggttggagatcagggcgtcttaccttgcgccaccgcttcagagcttgaccaatgtatgtatagttctcttcttgattcaatcggttgaccgtctggtgcttgtgcttggatgcttctggatcaagctccgccgtattaagcctgttgcatctatggagtacccgactaaattggttggagagggagttagattggaagattatccaatggtgattgttcagattcctatgtgcaatgaaaaggaggtttaccaacaatctataggagctgtgtgtatgcttgactggccaagggaaagaatgctagttcaggttcttgatgactccagtgaattggatgttcagcagcttataaaagcggaagtacaaaaatggcaacaaaggggtgttcggatagtgtatagacatcgtctcatacgtactggttacaaggctggaaaccttaaagctgcaatgaactgtgaatatgtcaaagactacgagtttgtcgccatatttgatgcagatttccagccacctgcggatttcttgaagaaaactgtgcctcattttaagggtaatgaagaattagccttggtccaaacacggtgggcttttgtgaacaaagacgaaaacttgcttacaagactccagaacataaatttgtctttccactttgaagttgaacagcaggtcaatggtgtttttattaacttctttggctttaatggaactgctggtgtttggagaatcaaagccctcgaggattgcgggggatggttggagcgaacaactgttgaggacatggatattgccgttcgtgcgcatctttgtggatggaagttcatttatctgaatgatgttaagtgtctctgtgaacttccggagtcctatgaggcatataaaaaacagcaataccgctggcattcgggtccaatgcaactgttccgtttgtgcttctttgacattcttcggtcaaaggtgagtgctgccaagaaagcaaatatgatatttctcttcttcttgctacggaagcttatcttgccattctactcattcacgctcttctgcgtcattcttccattaacgatgttcttcccagaggctaacttaccatcttgggttgtttgctatatccctgggatcatgtccatcttaaacatcatcccagccccaagatccttccctttcatagttccgtatctccttttcgaaaacaccatgtcagttaccaaatttggagccatgatctctggtttgttcaagtttgatagttcttacgagtgggtagtcaccaaaaagctagggagatcctctgaggcggatctggttgcatacgcagagtccggctctttggttgagtccacaaccatccaacgatcatcctctgattcaggtctgaccgagcttagcaaactaggagcagcaaagaaagctggcaaaaccaaaagaaaccgtctgtacagaacggaaatcgcactcgcgtttatcctcttggcagcctcggtgagaagcttgttgtctgcgcaagggatccatttctacttcctcttgttccaaggaatcacgttcgttattgtcggtctagatttgatcggggaacaggtcagttagtttatataaccctttttctcagtttaaaactacattgaaccataccaccagaagaacgaacaagacccaaagatcaagtcaggaaggaacgaaccaactcactcgcaggtcttttcgttacagatagatacataaaaacaattcatttaaagtttctgtcttgggaacatgattttatactctacttgggttggtttagattcttcctttttttacggatagtattagagaatggcagaaacaaccgtcggagaggattccaaagacttgcctacctgtctttgttgtggtattaagccaaaccttggtttttttgttgtgcaaaaattgttgttaggttgttggttttttgtttcggatgatgtggcagaaacatattttaagctttgctct

SEQ ID NO: 80072 - protein, 682 aa, Arabidopsis thaliana
  peptide (1)..(682): Ceres Seq. ID no. 12654307
MSRSQNEEFQQWWNKQRDRNNHDVLYAGDDEAFLTVEIRTPATVDPDKDRIRTRTVRQLSRLYLLKFKQLASSFLWIGNSFLYLVRTANRRIANDNPPSVSSSARLYRLIKGFLVVVVLLLCFELAAYFKGWHFTPPSVASAEVAVEVVYAWWLEIRASYLAPPLQSLTNVCIVLFLIQSVDRLVLVLGCFWIKLRRIKPVASMEYPTKLVGEGVRLEDYPMVIVQIPMCNEKEVYQQSIGAVCMLDWPRERMLVQVLDDSSELDVQQLIKAEVQKWQQRGVRIVYRHRLIRTGYKAGNLKAAMNCEYVKDYEFVAIFDADFQPPADFLKKTVPHFKGNEELALVQTRWAFVNKDENLLTRLQNINLSFHFEVEQQVNGVFINFFGFNGTAGVWRIKALEDCGGWLERTTVEDMDIAVRAHLCGWKFIYLNDVKCLCELPESYEAYKKQQYRWHSGPMQLFRLCFFDILRSKVSAAKKANMIFLFFLLRKLILPFYSFTLFCVILPLTMFFPEANLPSWVVCYIPGIMSILNIIPAPRSFPFIVPYLLFENTMSVTKFGAMISGLFKFDSSYEWVVTKKLGRSSEADLVAYAESGSLVESTTIQRSSSDSGLTELSKLGAAKKAGKTKRNRLYRTEIALAFILLAASVRSLLSAQGIHFYFLLFQGITFVIVGLDLIGEQVS

SEQ ID NO: 80073 - protein, 479 aa, Arabidopsis thaliana
  peptide (1)..(479): Ceres Seq. ID no. 12654308
MEYPTKLVGEGVRLEDYPMVIVQIPMCNEKEVYQQSIGAVCMLDWPRERMLVQVLDDSSELDVQQLIKAEVQKWQQRGVRIVYRHRLIRTGYKAGNLKAAMNCEYVKDYEFVAIFDADFQPPADFLKKTVPHFKGNEELALVQTRWAFVNKDENLLTRLQNINLSFHFEVEQQVNGVFINFFGFNGTAGVWRIKALEDCGGWLERTTVEDMDIAVRAHLCGWKFIYLNDVKCLCELPESYEAYKKQQYRWHSGPMQLFRLCFFDILRSKVSAAKKANMIFLFFLLRKLILPFYSFTLFCVILPLTMFFPEANLPSWVVCYIPGIMSILNIIPAPRSFPFIVPYLLFENTMSVTKFGAMISGLFKFDSSYEWVVTKKLGRSSEADLVAYAESGSLVESTTIQRSSSDSGLTELSKLGAAKKAGKTKRNRLYRTEIALAFILLAASVRSLLSAQGIHFYFLLFQGITFVIVGLDLIGEQVS

SEQ ID NO: 80074 - protein, 461 aa, Arabidopsis thaliana
  peptide (1)..(461): Ceres Seq. ID no. 12654309
MVIVQIPMCNEKEVYQQSIGAVCMLDWPRERMLVQVLDDSSELDVQQLIKAEVQKWQQRGVRIVYRHRLIRTGYKAGNLKAAMNCEYVKDYEFVAIFDADFQPPADFLKKTVPHFKGNEELALVQTRWAFVNKDENLLTRLQNINLSFHFEVEQQVNGVFINFFGFNGTAGVWRIKALEDCGGWLERTTVEDMDIAVRAHLCGWKFIYLNDVKCLCELPESYEAYKKQQYRWHSGPMQLFRLCFFDILRSKVSAAKKANMIFLFFLLRKLILPFYSFTLFCVILPLTMFFPEANLPSWVVCYIPGIMSILNIIPAPRSFPFIVPYLLFENTMSVTKFGAMISGLFKFDSSYEWVVTKKLGRSSEADLVAYAESGSLVESTTIQRSSSDSGLTELSKLGAAKKAGKTKRNRLYRTEIALAFILLAASVRSLLSAQGIHFYFLLFQGITFVIVGLDLIGEQVS

SEQ ID NO: 80075 - DNA, 645 bp, Arabidopsis thaliana
  misc_feature (1)..(645): Ceres Seq. ID no. 12654336
  misc_feature (1)..(645): Ortholog of  Ceres SEQ ID NO 14304090 as cited in SEQ ID NO 53446
  misc_feature (1)..(645): Ortholog of  Ceres SEQ ID NO 14311355 as cited in SEQ ID NO 54082
atgtttgtgtgttgtgttgtggcagtggaagggaactctttacccgaagaagatgtagagatgatggagaattcagatgtaatgaagacagtcacagatgaagcttctccaatggtggagccgttcattggtatggagtttgaatcagaagaggctgcaaagtctttctatgacaattacgctacatgcatgggtttcgttatgcgagtggatgctttcaggaggtcaatgcgagatgggactgtggtgtggcgcagactcgtgtgtaataaagaaggatttcgtaggtcgagacctcggagaagcgagagtagaaagcctcgggctataacaagagaagggtgtaaagctctgattgttgtgaaaagagagaaatccggaacatggcttgttactaaatttgagaaagagcataatcatcctctcttgcctctctcccctaatgacgagaaagacgcaaagattagggagctgagtgcagagctgagccgagagagaaggcgttgtactgctttgcaacagcagcttgatatggtccttaaggagatggaagaacattccaaccatctcaccattaacatcaatagtgttatccaaagtgttagagacattgagtccaatactttcaccaaacaacaaacataa

SEQ ID NO: 80076 - protein, 214 aa, Arabidopsis thaliana
  peptide (1)..(214): Ceres Seq. ID no. 12654337
MFVCCVVAVEGNSLPEEDVEMMENSDVMKTVTDEASPMVEPFIGMEFESEEAAKSFYDNYATCMGFVMRVDAFRRSMRDGTVVWRRLVCNKEGFRRSRPRRSESRKPRAITREGCKALIVVKREKSGTWLVTKFEKEHNHPLLPLSPNDEKDAKIRELSAELSRERRRCTALQQQLDMVLKEMEEHSNHLTININSVIQSVRDIESNTFTKQQT

SEQ ID NO: 80077 - protein, 194 aa, Arabidopsis thaliana
  peptide (1)..(194): Ceres Seq. ID no. 12654338
MMENSDVMKTVTDEASPMVEPFIGMEFESEEAAKSFYDNYATCMGFVMRVDAFRRSMRDGTVVWRRLVCNKEGFRRSRPRRSESRKPRAITREGCKALIVVKREKSGTWLVTKFEKEHNHPLLPLSPNDEKDAKIRELSAELSRERRRCTALQQQLDMVLKEMEEHSNHLTININSVIQSVRDIESNTFTKQQT

SEQ ID NO: 80078 - protein, 193 aa, Arabidopsis thaliana
  peptide (1)..(193): Ceres Seq. ID no. 12654339
MENSDVMKTVTDEASPMVEPFIGMEFESEEAAKSFYDNYATCMGFVMRVDAFRRSMRDGTVVWRRLVCNKEGFRRSRPRRSESRKPRAITREGCKALIVVKREKSGTWLVTKFEKEHNHPLLPLSPNDEKDAKIRELSAELSRERRRCTALQQQLDMVLKEMEEHSNHLTININSVIQSVRDIESNTFTKQQT

SEQ ID NO: 80079 - DNA, 2664 bp, Arabidopsis thaliana
  misc_feature (1)..(2664): Ceres Seq. ID no. 12654350
  misc_feature (1)..(2664): Ortholog of  Ceres SEQ ID NO 13600310 as cited in SEQ ID NO 5086
atggagagaacaagatcgaaaccggttcggaatctacccgagacaatccattctttgctcggtttgaaatctcatatgacttctgattgggttaaatctgtatgcaacatcgccaagaatacttcttcaacgtcaaagaaagaagaagacgactttgtttctgtcgatttacagagcattagagatcagctctctgcactaactgttcaagtcaacgatcagaacaaactgagaagacaaattcttaatgagttcttggaccttaaagggaacattcgtgtgttttgtcgagtcaaacccttgggagccaccgaaaagttgagaccaccggttgcttcggatacaagaaatgtgatcatcaagttatcagaaaccaagagaaaaacctacaacttcgacagagttttccaacctgattcatcccaagatgatgttttcttagagatcgaaccagtaatcaagtcagttatcgatggctacaacgcttgcattttcgcatacgggcaaaccggtactggaaaaacttatacaatggagggtcttccgaactctccaggtatcgttcctcgagcgatcaagggattgttcaaacaagtcgaggaaagtaatcatatgtttacaatccactttagtatgcttgagatttacatgggaaatcttaaagacttgcttctttctgaagcaactaaacccatttctccaatacctccaagtctttctattcacacagacccaaatggagagatagatattgagaacttggtgaaacttaaagtggatgactttaatgaaatcttaaggttatacaaagtaggttgtcgtagcagagcaactgcctccactaactctaactctgtttccagcagatcacactgtatgatccgtgtatcggtcactagtcttggagctcctgagagacggcgtgaaacaaacaagatttggctagtggatcttggaggaagcgagcgcgtgttgaaaacaagagccactggtcggcgttttgatgaaggcaaagccattaatctctctttatctgctcttggagatgtcatcaactctcttcaacgcaagaactctcacattccttacaggaacagcaagctcacacaggttctaaaagactctctcgggcaagactcaaaaacgttgatgcttgttcatatcagccctaaagaggatgatctatgtgaaaccatatgttctttaaactttgcaacgagggcaaagaatattcatttagggcaggacgaatcaacggaagaacaagcgaaaaaggaggctgtgatgatgaatctgcagaagatgatggaaaagattgaacaagagcgtgagatgtcgttaagaaagatgagaaatctaaacgagacgttggagaaactcactggtaagcctcatgttattgaagaagaagaaaaggatgtggttagagaagtgattcatgtgactccaaagaaaccaagaaacaaatcaagacgtgcttcagatgtttttcctagcttcatgagaccaacagctagcagcaacagaagattatcaggagcagattttagcgtaacccctaattcttcaagcttcaagtctagaaggaactcaatgatatctgtccgagctgaatctgcgtgtcttccggtgaagaagaagaagaacagatttgattctgcatgtgactcatcagacaggagcgtttcgaaatcgactagcattatgcgtcaaaatacagcagatgatgcaacggtgtatagtcaggacatatctgaatgtgacattaagttggtagtgtctgaacacaagccaaaaccgctgcagatggggcctggttctgcgacaaagtcccgctccaacatcagtaacttcgagaaagatgtgatgcagaaaataggtggaacagagttttcaaggattaacagttggcttcgttcgcaatctgaaaacaggagttacgtgcttgacaagactcaacttcctgcgactcatttcctagaaaacctaaacagatcgttggagaagtcaccaacacagagttttacaacggagaagatcactggaaatgaactggaaggtatagaagagactaaaacaaatgagacagtggttaaccctacactgatgcttaaaaaactgtttgagctgcaatgtctctgttctgctgaagaagaggatcagattttgtccagattcccaattcctggctatgaggatgatgatgagtctcgttatcctccaattttagaaaacgatggatttagccagcacatagacaatgaatggtttggagtcaataattacagtgcggattgggagcgagattcaccagccacgatcccgttgttagaatgcgaaccggatctcaaacagctgttaccggaattgggtttggatcgatcacttaaaccaagaggtttggcggtcgccgagggtgcagctccaccattgcttagagcacaagaaaccttgggagaaagaggtaaacgtttgtgttctggcgtgaaatgtttttacaaacgcaaacgcttttctaagattctgtctttttctgttgttgttgcaggaaaaggtccaacgttcatgcagaaacttcaggctttatgcttccgtattcttctgggattagggtttatggatgtgggctttggtaatgacttcttcaacgggttaacaaagtaa

SEQ ID NO: 80080 - protein, 887 aa, Arabidopsis thaliana
  peptide (1)..(887): Ceres Seq. ID no. 12654351
MERTRSKPVRNLPETIHSLLGLKSHMTSDWVKSVCNIAKNTSSTSKKEEDDFVSVDLQSIRDQLSALTVQVNDQNKLRRQILNEFLDLKGNIRVFCRVKPLGATEKLRPPVASDTRNVIIKLSETKRKTYNFDRVFQPDSSQDDVFLEIEPVIKSVIDGYNACIFAYGQTGTGKTYTMEGLPNSPGIVPRAIKGLFKQVEESNHMFTIHFSMLEIYMGNLKDLLLSEATKPISPIPPSLSIHTDPNGEIDIENLVKLKVDDFNEILRLYKVGCRSRATASTNSNSVSSRSHCMIRVSVTSLGAPERRRETNKIWLVDLGGSERVLKTRATGRRFDEGKAINLSLSALGDVINSLQRKNSHIPYRNSKLTQVLKDSLGQDSKTLMLVHISPKEDDLCETICSLNFATRAKNIHLGQDESTEEQAKKEAVMMNLQKMMEKIEQEREMSLRKMRNLNETLEKLTGKPHVIEEEEKDVVREVIHVTPKKPRNKSRRASDVFPSFMRPTASSNRRLSGADFSVTPNSSSFKSRRNSMISVRAESACLPVKKKKNRFDSACDSSDRSVSKSTSIMRQNTADDATVYSQDISECDIKLVVSEHKPKPLQMGPGSATKSRSNISNFEKDVMQKIGGTEFSRINSWLRSQSENRSYVLDKTQLPATHFLENLNRSLEKSPTQSFTTEKITGNELEGIEETKTNETVVNPTLMLKKLFELQCLCSAEEEDQILSRFPIPGYEDDDESRYPPILENDGFSQHIDNEWFGVNNYSADWERDSPATIPLLECEPDLKQLLPELGLDRSLKPRGLAVAEGAAPPLLRAQETLGERGKRLCSGVKCFYKRKRFSKILSFSVVVAGKGPTFMQKLQALCFRILLGLGFMDVGFGNDFFNGLTK

SEQ ID NO: 80081 - protein, 862 aa, Arabidopsis thaliana
  peptide (1)..(862): Ceres Seq. ID no. 12654352
MTSDWVKSVCNIAKNTSSTSKKEEDDFVSVDLQSIRDQLSALTVQVNDQNKLRRQILNEFLDLKGNIRVFCRVKPLGATEKLRPPVASDTRNVIIKLSETKRKTYNFDRVFQPDSSQDDVFLEIEPVIKSVIDGYNACIFAYGQTGTGKTYTMEGLPNSPGIVPRAIKGLFKQVEESNHMFTIHFSMLEIYMGNLKDLLLSEATKPISPIPPSLSIHTDPNGEIDIENLVKLKVDDFNEILRLYKVGCRSRATASTNSNSVSSRSHCMIRVSVTSLGAPERRRETNKIWLVDLGGSERVLKTRATGRRFDEGKAINLSLSALGDVINSLQRKNSHIPYRNSKLTQVLKDSLGQDSKTLMLVHISPKEDDLCETICSLNFATRAKNIHLGQDESTEEQAKKEAVMMNLQKMMEKIEQEREMSLRKMRNLNETLEKLTGKPHVIEEEEKDVVREVIHVTPKKPRNKSRRASDVFPSFMRPTASSNRRLSGADFSVTPNSSSFKSRRNSMISVRAESACLPVKKKKNRFDSACDSSDRSVSKSTSIMRQNTADDATVYSQDISECDIKLVVSEHKPKPLQMGPGSATKSRSNISNFEKDVMQKIGGTEFSRINSWLRSQSENRSYVLDKTQLPATHFLENLNRSLEKSPTQSFTTEKITGNELEGIEETKTNETVVNPTLMLKKLFELQCLCSAEEEDQILSRFPIPGYEDDDESRYPPILENDGFSQHIDNEWFGVNNYSADWERDSPATIPLLECEPDLKQLLPELGLDRSLKPRGLAVAEGAAPPLLRAQETLGERGKRLCSGVKCFYKRKRFSKILSFSVVVAGKGPTFMQKLQALCFRILLGLGFMDVGFGNDFFNGLTK

SEQ ID NO: 80082 - protein, 710 aa, Arabidopsis thaliana
  peptide (1)..(710): Ceres Seq. ID no. 12654353
MEGLPNSPGIVPRAIKGLFKQVEESNHMFTIHFSMLEIYMGNLKDLLLSEATKPISPIPPSLSIHTDPNGEIDIENLVKLKVDDFNEILRLYKVGCRSRATASTNSNSVSSRSHCMIRVSVTSLGAPERRRETNKIWLVDLGGSERVLKTRATGRRFDEGKAINLSLSALGDVINSLQRKNSHIPYRNSKLTQVLKDSLGQDSKTLMLVHISPKEDDLCETICSLNFATRAKNIHLGQDESTEEQAKKEAVMMNLQKMMEKIEQEREMSLRKMRNLNETLEKLTGKPHVIEEEEKDVVREVIHVTPKKPRNKSRRASDVFPSFMRPTASSNRRLSGADFSVTPNSSSFKSRRNSMISVRAESACLPVKKKKNRFDSACDSSDRSVSKSTSIMRQNTADDATVYSQDISECDIKLVVSEHKPKPLQMGPGSATKSRSNISNFEKDVMQKIGGTEFSRINSWLRSQSENRSYVLDKTQLPATHFLENLNRSLEKSPTQSFTTEKITGNELEGIEETKTNETVVNPTLMLKKLFELQCLCSAEEEDQILSRFPIPGYEDDDESRYPPILENDGFSQHIDNEWFGVNNYSADWERDSPATIPLLECEPDLKQLLPELGLDRSLKPRGLAVAEGAAPPLLRAQETLGERGKRLCSGVKCFYKRKRFSKILSFSVVVAGKGPTFMQKLQALCFRILLGLGFMDVGFGNDFFNGLTK

SEQ ID NO: 80083 - DNA, 1909 bp, Arabidopsis thaliana
  misc_feature (1)..(1909): Ceres Seq. ID no. 12654374
  misc_feature (1)..(1909): Ortholog of  Ceres SEQ ID NO 13587235 as cited in SEQ ID NO 0
tctctctctctctcttcttcttcttctccgttcgtgctctggactcgctcgaaatcgatccgatgataatttatgcagctcgaaacttaatttagaatcatacctttttctggatttggctgacgaatccgttttcaattgcacgagttgcttcgccaggtttatcaacttaagaatgtctaattatcaaggggatgatgctgagtacatggaagatgtggatgatgaaatggatgaggatgatttagatgaggattttcgtggggatgatatggctgcctctgattccgatgtcgatgagtttgactactctaataataaaatagctgacacttcagctgaccaagcccggaaagggaaagacatccaggggattccttgggacaggcttagtattacgagagagacatacagacaaactagactagaacagtataaaaattatgaaaatgtccctaactctggggaatcttcagggaaagattgcatggccacacagaaaggggctcttttttatgatttctggcggaatacaagatctatcaaatcaagtattcttcatttccagttgaggaatttggtttgggcaacttctaagcacgatgtctaccttatgtcacaatatttggtgagccactattctactttgacatccggaaagcatgatgttctcaatgttcaaggtcatgtttccccatctgagaaacatcctggaagtttgttggagggatttacaaagactcaagtgagtacactcgcagtgagagataaatttttagttgccggtggatttcaaggagaacttatatgcaagcatcttgatagacctggtgtgagcttttgttcacgtactacttatgatgataatgctataaccaatgctattgagatttataacaaacccagtggggcacttcattttactgcgtcgaataatgattgtggagtcagagattttgatatggagagataccagcttgttaaccagtttcgctttccatggccggtgaatcacacatctttaagtcctgatggtaaattgttgacgattgtgggagacaaccctgaaagccttctggtagaccccaacactggaaagacactggcaacgctatcaggacatctggacttttcctttgcatcagcatggcacccagatggattcacgttctccacaggtaaccaggacaagacctgccgggtttgggacattcgtaacctgtcaaaatctgttgctgtcttgaggggtaaccttggagcaatccgatccattcgctacacatctgatgggaagtacatggccatggctgagccggctgactttgtccatgtgtatgatgtctcaaacgggtatgaaacggagcaagagatcgacttctttggggagatctcgggaatatcatttagccccgacacagaagcactcttcataggcgtttgggaccgcacttacggaagtctaattgagtatagccggcgccacaactactcctaccttgattcatttctatgatcacccgacataccagaggaataaaagagccgatacatatgtgctgctgcactctcctgtcgctctgttaaactaagaaacccgagaaaagagaaaacataaactcaagtcgatctctaatggtgtaaatgatgtgttgtgcaagtactagtaggaatgttgtcacagagagcggatttagttagttaatgttcatttcttgtatgagtgttggagttcgtgtattgtacataagtatatgaggttcgggtgagtttgcatcaagtctcaactcttggcaaagagacaactttactcgagtctgtggctcgttatttggctatggtcacttgtagaggaactcaatttgagatgtttctgccgattgttggatcaaattatatatcatgatgtttc

SEQ ID NO: 80084 - protein, 503 aa, Arabidopsis thaliana
  peptide (1)..(503): Ceres Seq. ID no. 12654375
LSLSLLLLLRSCSGLARNRSDDNLCSSKLNLESYLFLDLADESVFNCTSCFARFINLRMSNYQGDDAEYMEDVDDEMDEDDLDEDFRGDDMAASDSDVDEFDYSNNKIADTSADQARKGKDIQGIPWDRLSITRETYRQTRLEQYKNYENVPNSGESSGKDCMATQKGALFYDFWRNTRSIKSSILHFQLRNLVWATSKHDVYLMSQYLVSHYSTLTSGKHDVLNVQGHVSPSEKHPGSLLEGFTKTQVSTLAVRDKFLVAGGFQGELICKHLDRPGVSFCSRTTYDDNAITNAIEIYNKPSGALHFTASNNDCGVRDFDMERYQLVNQFRFPWPVNHTSLSPDGKLLTIVGDNPESLLVDPNTGKTLATLSGHLDFSFASAWHPDGFTFSTGNQDKTCRVWDIRNLSKSVAVLRGNLGAIRSIRYTSDGKYMAMAEPADFVHVYDVSNGYETEQEIDFFGEISGISFSPDTEALFIGVWDRTYGSLIEYSRRHNYSYLDSFL

SEQ ID NO: 80085 - protein, 445 aa, Arabidopsis thaliana
  peptide (1)..(445): Ceres Seq. ID no. 12654376
MSNYQGDDAEYMEDVDDEMDEDDLDEDFRGDDMAASDSDVDEFDYSNNKIADTSADQARKGKDIQGIPWDRLSITRETYRQTRLEQYKNYENVPNSGESSGKDCMATQKGALFYDFWRNTRSIKSSILHFQLRNLVWATSKHDVYLMSQYLVSHYSTLTSGKHDVLNVQGHVSPSEKHPGSLLEGFTKTQVSTLAVRDKFLVAGGFQGELICKHLDRPGVSFCSRTTYDDNAITNAIEIYNKPSGALHFTASNNDCGVRDFDMERYQLVNQFRFPWPVNHTSLSPDGKLLTIVGDNPESLLVDPNTGKTLATLSGHLDFSFASAWHPDGFTFSTGNQDKTCRVWDIRNLSKSVAVLRGNLGAIRSIRYTSDGKYMAMAEPADFVHVYDVSNGYETEQEIDFFGEISGISFSPDTEALFIGVWDRTYGSLIEYSRRHNYSYLDSFL

SEQ ID NO: 80086 - protein, 434 aa, Arabidopsis thaliana
  peptide (1)..(434): Ceres Seq. ID no. 12654377
MEDVDDEMDEDDLDEDFRGDDMAASDSDVDEFDYSNNKIADTSADQARKGKDIQGIPWDRLSITRETYRQTRLEQYKNYENVPNSGESSGKDCMATQKGALFYDFWRNTRSIKSSILHFQLRNLVWATSKHDVYLMSQYLVSHYSTLTSGKHDVLNVQGHVSPSEKHPGSLLEGFTKTQVSTLAVRDKFLVAGGFQGELICKHLDRPGVSFCSRTTYDDNAITNAIEIYNKPSGALHFTASNNDCGVRDFDMERYQLVNQFRFPWPVNHTSLSPDGKLLTIVGDNPESLLVDPNTGKTLATLSGHLDFSFASAWHPDGFTFSTGNQDKTCRVWDIRNLSKSVAVLRGNLGAIRSIRYTSDGKYMAMAEPADFVHVYDVSNGYETEQEIDFFGEISGISFSPDTEALFIGVWDRTYGSLIEYSRRHNYSYLDSFL

SEQ ID NO: 80087 - DNA, 990 bp, Arabidopsis thaliana
  misc_feature (1)..(990): Ceres Seq. ID no. 12654390
  misc_feature (1)..(990): Ortholog of  Ceres SEQ ID NO 15174669 as cited in SEQ ID NO 59656
atgactgattctgcttacagagtagacaccatttctagactcgcccaatggcgaatccacaatctttcttcctccacttaccgcaagtccgatcctttcaagatgggtctttggaattggcacttgtctgtggagaaaagcaagatgctattaaatgttaagttgtatccagaggtatcaaaccttaccagagaaaatccaccggttgcttcctttgctcttcgtgttgtctcttctactggtgagagaaaggctctatctcatccagaagtaatagataagcggattaagacaaacgaagattttatttggactattgaagttcccttaactgggaaaatcatcatcgacgtcgagtttcttgacttgaaggttttgtctcaagatagtggagaactttactctatctgggccaacggttcaactgagaatcaatcgcaagtaactgcggtaacatcccttggacgtatgttgacagaaagcatttacaccgacataacgatcaatgcctctgatggaagcattggagctcaccgagcagttctcgctgcccgttcacctgttttccgcagcatgtttttacacgacctgaaagagaaagaactatcagaaataaacgtactcgacatgccacttgatgcttgccaagcttttctcagttatatctacggcaatatccaaaacgaagactttcttatacacagattggcactcctccaagcagctgagaaatatgatattgctgatttaaaagaggcgtgccacttgagtcttctagacgatatcgacacaaagaatgtgcttgagaggctacagaatgcttatctctatcaattacctgaactgaaggctagctgcatgagatatcttgtgaagtttggcaaaatatttgagatccgagacgagttcaacatattcatgcaatgcgcagacagagatttgatttctgaaatcttccacgaagtcctcagtacctggaaaggattttag

SEQ ID NO: 80088 - protein, 329 aa, Arabidopsis thaliana
  peptide (1)..(329): Ceres Seq. ID no. 12654391
MTDSAYRVDTISRLAQWRIHNLSSSTYRKSDPFKMGLWNWHLSVEKSKMLLNVKLYPEVSNLTRENPPVASFALRVVSSTGERKALSHPEVIDKRIKTNEDFIWTIEVPLTGKIIIDVEFLDLKVLSQDSGELYSIWANGSTENQSQVTAVTSLGRMLTESIYTDITINASDGSIGAHRAVLAARSPVFRSMFLHDLKEKELSEINVLDMPLDACQAFLSYIYGNIQNEDFLIHRLALLQAAEKYDIADLKEACHLSLLDDIDTKNVLERLQNAYLYQLPELKASCMRYLVKFGKIFEIRDEFNIFMQCADRDLISEIFHEVLSTWKGF

SEQ ID NO: 80089 - protein, 295 aa, Arabidopsis thaliana
  peptide (1)..(295): Ceres Seq. ID no. 12654392
MGLWNWHLSVEKSKMLLNVKLYPEVSNLTRENPPVASFALRVVSSTGERKALSHPEVIDKRIKTNEDFIWTIEVPLTGKIIIDVEFLDLKVLSQDSGELYSIWANGSTENQSQVTAVTSLGRMLTESIYTDITINASDGSIGAHRAVLAARSPVFRSMFLHDLKEKELSEINVLDMPLDACQAFLSYIYGNIQNEDFLIHRLALLQAAEKYDIADLKEACHLSLLDDIDTKNVLERLQNAYLYQLPELKASCMRYLVKFGKIFEIRDEFNIFMQCADRDLISEIFHEVLSTWKGF

SEQ ID NO: 80090 - protein, 281 aa, Arabidopsis thaliana
  peptide (1)..(281): Ceres Seq. ID no. 12654393
MLLNVKLYPEVSNLTRENPPVASFALRVVSSTGERKALSHPEVIDKRIKTNEDFIWTIEVPLTGKIIIDVEFLDLKVLSQDSGELYSIWANGSTENQSQVTAVTSLGRMLTESIYTDITINASDGSIGAHRAVLAARSPVFRSMFLHDLKEKELSEINVLDMPLDACQAFLSYIYGNIQNEDFLIHRLALLQAAEKYDIADLKEACHLSLLDDIDTKNVLERLQNAYLYQLPELKASCMRYLVKFGKIFEIRDEFNIFMQCADRDLISEIFHEVLSTWKGF

SEQ ID NO: 80091 - DNA, 2309 bp, Arabidopsis thaliana
  misc_feature (1)..(2309): Ceres Seq. ID no. 12654405
  misc_feature (1)..(2309): Ortholog of  Ceres SEQ ID NO 14311156 as cited in SEQ ID NO 54767
  misc_feature (1)..(2309): Ortholog of  Ceres SEQ ID NO 14303524 as cited in SEQ ID NO 59500
  misc_feature (1)..(2309): Ortholog of  Ceres SEQ ID NO 13658778 as cited in SEQ ID NO 66511
ctcttatccctctcaccttctcacttggcaccgttgcagagagagaaccaaacatggtaaacaaagacgaccggattagaccggttcatgaagccgacggtgaaccgctttttgagactaggagaagaaccggtagagtgattgcgtaccggtttttctcagcctcggttttcgtgtgtatctgtttgatttggttctacagaattggtgagattggtgataaccgtaccgttttagatcgattaatctggtttgttatgtttattgtggagatttggttcggtttatattgggtagtcacacaatcttcccggtggaatccggtttggcgatttcccttctccgatagactctctcggagatacggaagcgaccttccgaggctcgacgtcttcgtttgcacggcggatccggtgattgagccgccgttgttggtggtaaacacagtcttatctgtgacggctcttgactacccaccggagaaactcgccgtttatctctcagatgacggtggttctgagctgacgttctatgctctcacggaggcagctgagtttgctaaaacttgggttcccttctgcaagaagttcaacgttgagccaacatctcccgctgcttacttgtcttccaaggcaaactgtcttgattctgcggctgaggaggtggctaagctgtatagagaaatggcggcgaggattgaaacggcggcgagactgggacgaataccggaggaggcgcgggtgaagtacggtgacgggttttcacagtgggatgctgacgctactcgaagaaaccatggaaccattcttcaagttttggtagatggaagagaagggaatacaatagcaataccaacgttggtgtatttatcaagagaaaagagacctcaacatcatcataacttcaaggctggagcaatgaacgcattgctgagggtttcttcgaaaattacttgtgggaaaatcatactaaacttggactgtgatatgtacgcaaacaactcaaagtcaacacgcgacgcgctctgcatcctcctcgatgagaaagagggaaaagagattgctttcgtgcagtttccgcagtgttttgacaatgttacaagaaatgatttgtatggaagcatgatgcgagtaggaattgatgtggaatttcttggattggatggaaatggtggtccgttatacattggaactggatgctttcacagaagagatgtgatctgtggaagaaagtatggagaggaagaagaagaagaagaatctgagagaattcacgaaaatttagagcctgagatgattaaggctctcgcgagctgcacttatgaggaaaacactcaatggggaaaggagatgggtgtgaaatatggttgcccggtagaggatgtaataactggtttgacgattcagtgtcgcggatggaaatcagcctacctgaacccggaaaagcaagcatttctcggggtagcgccgaccaatttgcatcaaatgctagtgcagcagaggagatggtcagagggagactttcagattatgctttcgaagtatagtccggtttggtatggaaaaggaaagatcagtttaggactgatacttggttactgttgctattgtctttgggctccatcttcactacctgtgctcatttactctgttttgacttctctctgtctcttcaaaggcattcctctgtttccaaaggtctcgagctcgtggtttattccgtttggatacgtcactgttgcagctaccgcatatagcctagccgagttcttgtggtgcggagggacgttccgtggatggtggaacgagcaaaggatgtggctttatagaagaacaagctcgtttcttttcggatttatggacacgattaagaagctacttggagtttctgagtctgcgtttgtgatcacagcaaaagtagcagaagaagaagcagcagagagatacaaggaagaggtaatggagtttggagtggagtctcccatgtttctcgtcctcggaacactcggtatgctcaatctcttctgcttcgccgcagcggttgcgagacttgtttccggagacggtggagatttgaaaacaatggggatgcaatttgtgataacaggagtactagttgtcataaactggcctctgtataaaggtatgttgttgaggcaagacaaaggaaagatgccaatgagcgttacagttaaatcagttgttttagctttatctgcctgtacctgtttagcgtttttgtaagattgattaacaacagtcaaaaaagtaatcaaaataatgaccagcagttataatatgtaattttct

SEQ ID NO: 80092 - protein, 746 aa, Arabidopsis thaliana
  peptide (1)..(746): Ceres Seq. ID no. 12654406
LIPLTFSLGTVAEREPNMVNKDDRIRPVHEADGEPLFETRRRTGRVIAYRFFSASVFVCICLIWFYRIGEIGDNRTVLDRLIWFVMFIVEIWFGLYWVVTQSSRWNPVWRFPFSDRLSRRYGSDLPRLDVFVCTADPVIEPPLLVVNTVLSVTALDYPPEKLAVYLSDDGGSELTFYALTEAAEFAKTWVPFCKKFNVEPTSPAAYLSSKANCLDSAAEEVAKLYREMAARIETAARLGRIPEEARVKYGDGFSQWDADATRRNHGTILQVLVDGREGNTIAIPTLVYLSREKRPQHHHNFKAGAMNALLRVSSKITCGKIILNLDCDMYANNSKSTRDALCILLDEKEGKEIAFVQFPQCFDNVTRNDLYGSMMRVGIDVEFLGLDGNGGPLYIGTGCFHRRDVICGRKYGEEEEEEESERIHENLEPEMIKALASCTYEENTQWGKEMGVKYGCPVEDVITGLTIQCRGWKSAYLNPEKQAFLGVAPTNLHQMLVQQRRWSEGDFQIMLSKYSPVWYGKGKISLGLILGYCCYCLWAPSSLPVLIYSVLTSLCLFKGIPLFPKVSSSWFIPFGYVTVAATAYSLAEFLWCGGTFRGWWNEQRMWLYRRTSSFLFGFMDTIKKLLGVSESAFVITAKVAEEEAAERYKEEVMEFGVESPMFLVLGTLGMLNLFCFAAAVARLVSGDGGDLKTMGMQFVITGVLVVINWPLYKGMLLRQDKGKMPMSVTVKSVVLALSACTCLAFL

SEQ ID NO: 80093 - protein, 729 aa, Arabidopsis thaliana
  peptide (1)..(729): Ceres Seq. ID no. 12654407
MVNKDDRIRPVHEADGEPLFETRRRTGRVIAYRFFSASVFVCICLIWFYRIGEIGDNRTVLDRLIWFVMFIVEIWFGLYWVVTQSSRWNPVWRFPFSDRLSRRYGSDLPRLDVFVCTADPVIEPPLLVVNTVLSVTALDYPPEKLAVYLSDDGGSELTFYALTEAAEFAKTWVPFCKKFNVEPTSPAAYLSSKANCLDSAAEEVAKLYREMAARIETAARLGRIPEEARVKYGDGFSQWDADATRRNHGTILQVLVDGREGNTIAIPTLVYLSREKRPQHHHNFKAGAMNALLRVSSKITCGKIILNLDCDMYANNSKSTRDALCILLDEKEGKEIAFVQFPQCFDNVTRNDLYGSMMRVGIDVEFLGLDGNGGPLYIGTGCFHRRDVICGRKYGEEEEEEESERIHENLEPEMIKALASCTYEENTQWGKEMGVKYGCPVEDVITGLTIQCRGWKSAYLNPEKQAFLGVAPTNLHQMLVQQRRWSEGDFQIMLSKYSPVWYGKGKISLGLILGYCCYCLWAPSSLPVLIYSVLTSLCLFKGIPLFPKVSSSWFIPFGYVTVAATAYSLAEFLWCGGTFRGWWNEQRMWLYRRTSSFLFGFMDTIKKLLGVSESAFVITAKVAEEEAAERYKEEVMEFGVESPMFLVLGTLGMLNLFCFAAAVARLVSGDGGDLKTMGMQFVITGVLVVINWPLYKGMLLRQDKGKMPMSVTVKSVVLALSACTCLAFL

SEQ ID NO: 80094 - protein, 661 aa, Arabidopsis thaliana
  peptide (1)..(661): Ceres Seq. ID no. 12654408
MFIVEIWFGLYWVVTQSSRWNPVWRFPFSDRLSRRYGSDLPRLDVFVCTADPVIEPPLLVVNTVLSVTALDYPPEKLAVYLSDDGGSELTFYALTEAAEFAKTWVPFCKKFNVEPTSPAAYLSSKANCLDSAAEEVAKLYREMAARIETAARLGRIPEEARVKYGDGFSQWDADATRRNHGTILQVLVDGREGNTIAIPTLVYLSREKRPQHHHNFKAGAMNALLRVSSKITCGKIILNLDCDMYANNSKSTRDALCILLDEKEGKEIAFVQFPQCFDNVTRNDLYGSMMRVGIDVEFLGLDGNGGPLYIGTGCFHRRDVICGRKYGEEEEEEESERIHENLEPEMIKALASCTYEENTQWGKEMGVKYGCPVEDVITGLTIQCRGWKSAYLNPEKQAFLGVAPTNLHQMLVQQRRWSEGDFQIMLSKYSPVWYGKGKISLGLILGYCCYCLWAPSSLPVLIYSVLTSLCLFKGIPLFPKVSSSWFIPFGYVTVAATAYSLAEFLWCGGTFRGWWNEQRMWLYRRTSSFLFGFMDTIKKLLGVSESAFVITAKVAEEEAAERYKEEVMEFGVESPMFLVLGTLGMLNLFCFAAAVARLVSGDGGDLKTMGMQFVITGVLVVINWPLYKGMLLRQDKGKMPMSVTVKSVVLALSACTCLAFL

SEQ ID NO: 80095 - DNA, 1377 bp, Arabidopsis thaliana
  misc_feature (1)..(1377): Ceres Seq. ID no. 12654409
  misc_feature (1)..(1377): Ortholog of  Ceres SEQ ID NO 14309703 as cited in SEQ ID NO 55427
atgaataatggtgcgtttgtcccgccactctctggtagaccaaattatgcttcacatttcaaaatcccttttttgttgcatcgaagatcgggaaggtcagaattgtttgggtttttgaatcgaattttgagatatttgaaggtgggcatctgtgaaattgtgatgagttcggcgaatttggaagatttgaacaaggtctgggaaataaaggctttgaagaggaaacctagagaagatgaagcgaggaagattctggagaaagtagctaatcaggttcagccgattatgactagacgaaaatggcgcgtcaagcttctctctgaattctgcccaacaaatccaaggcttttgggggtgaatgtaaatagaggcgtgcaagtgaaattgaggcttaggagggtaaaccatgatttagatttcttatcgtatcatgaaattctcgacaccatgctccacgagctttgccacaacgctcatggtcctcataacgcaagtttctataagctttgggatgaacttcgaaaggaatgcgaggagttgatgtcaaagggtattacagggacgggacagggatttgatatgcctggtaagcgtttgggtggactttctcgtcagccttctctatcatttctcagagcaactgcagctacagcagcagaaaaaagagtgcgtgcgggaactcttttaccttcaggacctcaacgtcttggtggtgatagcagcattatgtcagatcttagtccaattcaggctgctgcaatggctgcagaaaggcgtttacttgatgatatttggtgtggttcccaatccacagatgctttagaagatgaagagaatgatagtgacacatataaggaacctgtttccatcagggaaacttgtacgagcgtgaatggaaagtcagtaaaacgatgtaatagctggtccaatgcccattcttgtcctccatcttccagtcatcaacagggatcagatgtcattgatttgactgaagaatcttttgaaataagatgtactaaaagaaatcgcagcccaggtgatcagggtccttcttgtgccaaagatgtaccgaacgctggtgtcatgaagtcatcgattcctttgccatcgacgagttacaatgcaaaccaaagcagagaagaatccacaatgtgggagtgtgcagaatgcaccttattgaacccgtcattggctccaatatgtgagctatgcactgccgcaaagccaaaggaaagggagatgaagcacaaagtctggtcttgcaaattctgcacgcttgaaaatgaggtgaagttagagaaatgtgaggcttgtggtcagtggaggtactcgtatggagcaccattgtcaactggtgctcctaatgtcggcacttga

SEQ ID NO: 80096 - protein, 458 aa, Arabidopsis thaliana
  peptide (1)..(458): Ceres Seq. ID no. 12654410
MNNGAFVPPLSGRPNYASHFKIPFLLHRRSGRSELFGFLNRILRYLKVGICEIVMSSANLEDLNKVWEIKALKRKPREDEARKILEKVANQVQPIMTRRKWRVKLLSEFCPTNPRLLGVNVNRGVQVKLRLRRVNHDLDFLSYHEILDTMLHELCHNAHGPHNASFYKLWDELRKECEELMSKGITGTGQGFDMPGKRLGGLSRQPSLSFLRATAATAAEKRVRAGTLLPSGPQRLGGDSSIMSDLSPIQAAAMAAERRLLDDIWCGSQSTDALEDEENDSDTYKEPVSIRETCTSVNGKSVKRCNSWSNAHSCPPSSSHQQGSDVIDLTEESFEIRCTKRNRSPGDQGPSCAKDVPNAGVMKSSIPLPSTSYNANQSREESTMWECAECTLLNPSLAPICELCTAAKPKEREMKHKVWSCKFCTLENEVKLEKCEACGQWRYSYGAPLSTGAPNVGT

SEQ ID NO: 80097 - protein, 404 aa, Arabidopsis thaliana
  peptide (1)..(404): Ceres Seq. ID no. 12654411
MSSANLEDLNKVWEIKALKRKPREDEARKILEKVANQVQPIMTRRKWRVKLLSEFCPTNPRLLGVNVNRGVQVKLRLRRVNHDLDFLSYHEILDTMLHELCHNAHGPHNASFYKLWDELRKECEELMSKGITGTGQGFDMPGKRLGGLSRQPSLSFLRATAATAAEKRVRAGTLLPSGPQRLGGDSSIMSDLSPIQAAAMAAERRLLDDIWCGSQSTDALEDEENDSDTYKEPVSIRETCTSVNGKSVKRCNSWSNAHSCPPSSSHQQGSDVIDLTEESFEIRCTKRNRSPGDQGPSCAKDVPNAGVMKSSIPLPSTSYNANQSREESTMWECAECTLLNPSLAPICELCTAAKPKEREMKHKVWSCKFCTLENEVKLEKCEACGQWRYSYGAPLSTGAPNVGT

SEQ ID NO: 80098 - protein, 363 aa, Arabidopsis thaliana
  peptide (1)..(363): Ceres Seq. ID no. 12654412
MTRRKWRVKLLSEFCPTNPRLLGVNVNRGVQVKLRLRRVNHDLDFLSYHEILDTMLHELCHNAHGPHNASFYKLWDELRKECEELMSKGITGTGQGFDMPGKRLGGLSRQPSLSFLRATAATAAEKRVRAGTLLPSGPQRLGGDSSIMSDLSPIQAAAMAAERRLLDDIWCGSQSTDALEDEENDSDTYKEPVSIRETCTSVNGKSVKRCNSWSNAHSCPPSSSHQQGSDVIDLTEESFEIRCTKRNRSPGDQGPSCAKDVPNAGVMKSSIPLPSTSYNANQSREESTMWECAECTLLNPSLAPICELCTAAKPKEREMKHKVWSCKFCTLENEVKLEKCEACGQWRYSYGAPLSTGAPNVGT

SEQ ID NO: 80099 - DNA, 1749 bp, Arabidopsis thaliana
  misc_feature (1)..(1749): Ceres Seq. ID no. 12654473
  misc_feature (1)..(1749): Ortholog of  Ceres SEQ ID NO 15225635 as cited in SEQ ID NO 53492
atgggtttggattctaaagaagctgatttggaggtaataagagatgagaaatctgaagcaaacactgtgtgtttacatgcgttttcagatttaacctatgtgtctcctgttgtgttcttatacctactcaaagaatgctataaacatggtagcttgaaggcaacaaaaaagttccaagctttacagtatcaagttcatcgagttctagctaataaacctcaaccaggacctgctactttcattattaattgtctcactttacttcctttatttggggtatatggtgaaggctttagtcatttagttatatcagctcttcgccgcttctttaaaacagtatctgaaccaactagtgaagaagatatttgtttggcgagaaagctagctgctcagttcttccttgctactgttggtggatctttaacttatgatgagaaggttatggtgcatactcttagagtgtttgatgtgaggttaactagtatcgatgaagccttgtctatctcggaagtttggcagagatatgggtttgcttgtggaaatgcgtttctggaacaatacatttctgacttgatcaagtcgaaatctttcatgacggctgtgactctgttagagcatttctctttccgtttccctggagaaacttttcttcaacaaatggttgaggataaaaatttccaagctgcagagagatgggctaccttcatgggaaggccaagtttatgcattcttgttcaagagtatggctcaaggaatatgctaaagcaggcctataatatcataaataagaactatctacagcatgactttcccgaattgtatcacaagtgtaaagaaagtgctctgaaggttctagcagaaaaagcatgttgggatgttgctgaaattaagacaaaaggtgatagacagcttctgaagtatctggtatacttggcagtggaagctggatacttggagaaggttgatgaactgtgcgatcgatattcacttcaagggctgccaaaagcacgagaggctgaggttgcttttgttgaaaaaagctttctgcgtctcaacgatctagctgtagaagatgtagtttgggttgatgaagtcaacgagttgagaaaagcaacttcttttcttgaaggatgtagagttgtgggtattgactgtgaatggaaacctaattatattaaaggcagtaaacagaacaaggtttcaatcatgcaaattggatctgataccaaaattttcatattggacttgataaagctttacaatgacgcctctgaaattctggacaactgccttagtcacattttgcaatcgaagagtacattaaagctcgtctctctgactgaggattaccctgatcataaattatcctcaggttacaattttcaatgtgacatcaagcagttggcgctttcatatggggatttgaaatgtttcgagcgatacgacatgttgctagacattcaaaatgtttttaatgaaccatttggtggtttagcaggactaacgaagaaaatattgggagtgtctttgaacaaaacaagacgcaatagcgactgggaacaaaggcctttgagccagaatcagcttgagtatgctgctcttgatgctgcagtgttgattcacatatttcgccatgttcgcgatcatcctccacatgacagtagttcagagacaacccagtggaaatctcacattgtaagtacctcttataaaagcccttatctttcatctgataattcaagacgataa

SEQ ID NO: 80100 - protein, 582 aa, Arabidopsis thaliana
  peptide (1)..(582): Ceres Seq. ID no. 12654474
MGLDSKEADLEVIRDEKSEANTVCLHAFSDLTYVSPVVFLYLLKECYKHGSLKATKKFQALQYQVHRVLANKPQPGPATFIINCLTLLPLFGVYGEGFSHLVISALRRFFKTVSEPTSEEDICLARKLAAQFFLATVGGSLTYDEKVMVHTLRVFDVRLTSIDEALSISEVWQRYGFACGNAFLEQYISDLIKSKSFMTAVTLLEHFSFRFPGETFLQQMVEDKNFQAAERWATFMGRPSLCILVQEYGSRNMLKQAYNIINKNYLQHDFPELYHKCKESALKVLAEKACWDVAEIKTKGDRQLLKYLVYLAVEAGYLEKVDELCDRYSLQGLPKAREAEVAFVEKSFLRLNDLAVEDVVWVDEVNELRKATSFLEGCRVVGIDCEWKPNYIKGSKQNKVSIMQIGSDTKIFILDLIKLYNDASEILDNCLSHILQSKSTLKLVSLTEDYPDHKLSSGYNFQCDIKQLALSYGDLKCFERYDMLLDIQNVFNEPFGGLAGLTKKILGVSLNKTRRNSDWEQRPLSQNQLEYAALDAAVLIHIFRHVRDHPPHDSSSETTQWKSHIVSTSYKSPYLSSDNSRR

SEQ ID NO: 80101 - protein, 435 aa, Arabidopsis thaliana
  peptide (1)..(435): Ceres Seq. ID no. 12654475
MVHTLRVFDVRLTSIDEALSISEVWQRYGFACGNAFLEQYISDLIKSKSFMTAVTLLEHFSFRFPGETFLQQMVEDKNFQAAERWATFMGRPSLCILVQEYGSRNMLKQAYNIINKNYLQHDFPELYHKCKESALKVLAEKACWDVAEIKTKGDRQLLKYLVYLAVEAGYLEKVDELCDRYSLQGLPKAREAEVAFVEKSFLRLNDLAVEDVVWVDEVNELRKATSFLEGCRVVGIDCEWKPNYIKGSKQNKVSIMQIGSDTKIFILDLIKLYNDASEILDNCLSHILQSKSTLKLVSLTEDYPDHKLSSGYNFQCDIKQLALSYGDLKCFERYDMLLDIQNVFNEPFGGLAGLTKKILGVSLNKTRRNSDWEQRPLSQNQLEYAALDAAVLIHIFRHVRDHPPHDSSSETTQWKSHIVSTSYKSPYLSSDNSRR

SEQ ID NO: 80102 - protein, 385 aa, Arabidopsis thaliana
  peptide (1)..(385): Ceres Seq. ID no. 12654476
MTAVTLLEHFSFRFPGETFLQQMVEDKNFQAAERWATFMGRPSLCILVQEYGSRNMLKQAYNIINKNYLQHDFPELYHKCKESALKVLAEKACWDVAEIKTKGDRQLLKYLVYLAVEAGYLEKVDELCDRYSLQGLPKAREAEVAFVEKSFLRLNDLAVEDVVWVDEVNELRKATSFLEGCRVVGIDCEWKPNYIKGSKQNKVSIMQIGSDTKIFILDLIKLYNDASEILDNCLSHILQSKSTLKLVSLTEDYPDHKLSSGYNFQCDIKQLALSYGDLKCFERYDMLLDIQNVFNEPFGGLAGLTKKILGVSLNKTRRNSDWEQRPLSQNQLEYAALDAAVLIHIFRHVRDHPPHDSSSETTQWKSHIVSTSYKSPYLSSDNSRR

SEQ ID NO: 80103 - DNA, 1401 bp, Arabidopsis thaliana
  misc_feature (1)..(1401): Ceres Seq. ID no. 12654487
  misc_feature (1)..(1401): Ortholog of  Ceres SEQ ID NO 15176433 as cited in SEQ ID NO 59539
atgaagaatctggtcatatttgccttcttgttcttaagcatcactactgtaatcaatggtggaataacaagtaaatttgtccgccaagctttaccatcgatcgaaatgtctctcgacactttcccttctcctggtggctacaacactcctgaacaggttcatctgactcaaggagaccatgatggacgtggcatgattgtctcgtgggtcacaccgttgaatctcgctggttctaacgttgttacctactggatcgctactaatggtagtgacgtaaagccagcgaaaaagagagctcatgcctccactaaatcttacagattctatgactatagttcaggatttctccatcacgccacaattaagggactcgagtacgataccaagtacatctatgaggttggtaccgataaatccgttagacaattctccttcactactcctccaaagatcggacccgatgttccatacacattcggcatcattggtgatcttggacagacttatgcttctaatgagacattgtatcattacatgtcaaaccctaaaggccaagctgttctctttgctggagacttgtcatatgcagacgaccacccgaatcatgaccagagaaagtgggatacttggggaagatttatggagccttgtgctgcttaccagcccttcatctttgctgccgggaatcatgaaattgattttgttccaaacattggtgagcctcacgcattcaagccctacactcaccgttaccctaacgcctacaaagcttcacaaagcacttctcctctttggtactcagtgagacgtgcttctgctcacatcatcgtcctctcttcttactcggcctacggaaaatacacgcctcaatacatttggcttgagcaagagctaaagaatgtgaacagagaagagactccatggttgattgtcattgttcactctccgtggtacaacagtaataactatcattacatggaaggtgagagcatgagagttatgtttgagtcgtggctcgttaacagcaaggttgatttggttttgtctggtcatgtccatgcctatgagagatctgaacgtatctccaatattaagtacaacatcaccaatggcttgagctctcctgtgaaagatcctaatgctcctatttacattactatcggagatggaggaaacattgaaggaattgcaaacagtttcgtggatccacaaccgagttactcagcatatagagaggcgagttttggccatgcggttttagagattatgaataggactcacgcgcagtacacatggcataggaaccaagacaacgagcctgtcgccgctgactctattatgttgcataacagacacttctttccggtggaggaaatagtttccagcaacattagggcctaa

SEQ ID NO: 80104 - protein, 466 aa, Arabidopsis thaliana
  peptide (1)..(466): Ceres Seq. ID no. 12654488
MKNLVIFAFLFLSITTVINGGITSKFVRQALPSIEMSLDTFPSPGGYNTPEQVHLTQGDHDGRGMIVSWVTPLNLAGSNVVTYWIATNGSDVKPAKKRAHASTKSYRFYDYSSGFLHHATIKGLEYDTKYIYEVGTDKSVRQFSFTTPPKIGPDVPYTFGIIGDLGQTYASNETLYHYMSNPKGQAVLFAGDLSYADDHPNHDQRKWDTWGRFMEPCAAYQPFIFAAGNHEIDFVPNIGEPHAFKPYTHRYPNAYKASQSTSPLWYSVRRASAHIIVLSSYSAYGKYTPQYIWLEQELKNVNREETPWLIVIVHSPWYNSNNYHYMEGESMRVMFESWLVNSKVDLVLSGHVHAYERSERISNIKYNITNGLSSPVKDPNAPIYITIGDGGNIEGIANSFVDPQPSYSAYREASFGHAVLEIMNRTHAQYTWHRNQDNEPVAADSIMLHNRHFFPVEEIVSSNIRA

SEQ ID NO: 80105 - protein, 431 aa, Arabidopsis thaliana
  peptide (1)..(431): Ceres Seq. ID no. 12654489
MSLDTFPSPGGYNTPEQVHLTQGDHDGRGMIVSWVTPLNLAGSNVVTYWIATNGSDVKPAKKRAHASTKSYRFYDYSSGFLHHATIKGLEYDTKYIYEVGTDKSVRQFSFTTPPKIGPDVPYTFGIIGDLGQTYASNETLYHYMSNPKGQAVLFAGDLSYADDHPNHDQRKWDTWGRFMEPCAAYQPFIFAAGNHEIDFVPNIGEPHAFKPYTHRYPNAYKASQSTSPLWYSVRRASAHIIVLSSYSAYGKYTPQYIWLEQELKNVNREETPWLIVIVHSPWYNSNNYHYMEGESMRVMFESWLVNSKVDLVLSGHVHAYERSERISNIKYNITNGLSSPVKDPNAPIYITIGDGGNIEGIANSFVDPQPSYSAYREASFGHAVLEIMNRTHAQYTWHRNQDNEPVAADSIMLHNRHFFPVEEIVSSNIRA

SEQ ID NO: 80106 - protein, 402 aa, Arabidopsis thaliana
  peptide (1)..(402): Ceres Seq. ID no. 12654490
MIVSWVTPLNLAGSNVVTYWIATNGSDVKPAKKRAHASTKSYRFYDYSSGFLHHATIKGLEYDTKYIYEVGTDKSVRQFSFTTPPKIGPDVPYTFGIIGDLGQTYASNETLYHYMSNPKGQAVLFAGDLSYADDHPNHDQRKWDTWGRFMEPCAAYQPFIFAAGNHEIDFVPNIGEPHAFKPYTHRYPNAYKASQSTSPLWYSVRRASAHIIVLSSYSAYGKYTPQYIWLEQELKNVNREETPWLIVIVHSPWYNSNNYHYMEGESMRVMFESWLVNSKVDLVLSGHVHAYERSERISNIKYNITNGLSSPVKDPNAPIYITIGDGGNIEGIANSFVDPQPSYSAYREASFGHAVLEIMNRTHAQYTWHRNQDNEPVAADSIMLHNRHFFPVEEIVSSNIRA

SEQ ID NO: 80107 - DNA, 1854 bp, Arabidopsis thaliana
  misc_feature (1)..(1854): Ceres Seq. ID no. 12654499
  misc_feature (1)..(1854): Ortholog of  Ceres SEQ ID NO 14303276 as cited in SEQ ID NO 1264
  misc_feature (1)..(1854): Ortholog of  Ceres SEQ ID NO 15170536 as cited in SEQ ID NO 52791
  misc_feature (1)..(1854): Ortholog of  Ceres SEQ ID NO 12465083 as cited in SEQ ID NO 68239
atggctggtaagggagaaggtccagcgatcggaatcgatcttggtactacgtactcttgtgttggagtatggcaacacgaccgtgttgagatcattgctaatgatcaaggtaacagaaccacaccttcgtacgttgctttcaccgactctgagcggttgatcggtgatgctgctaagaatcaagttgccatgaaccctgttaacaccgttttcgacgcaaagaggttgattggtcgtagattcagtgatgcatctgtccaaagcgacatgaagttttggcccttcaaggtaacccctggacaagcagacaaaccaatgattttcgtaaactacaaaggagaagagaaacaattcgctgcggaagaaatctcttcaatggttctcattaagatgcgtgagatcgctgaagcttaccttggttcttcgatcaagaacgctgtggtcactgttcctgcatacttcaatgattctcaacgtcaggctacaaaggacgctggtgtgattgctggtttgaatgttttgcgtatcatcaatgagccgacggctgctgctattgcttatggtcttgacaagaaggcaacaagtgttggaatcaagaacgtgttgatctttgatcttggtggtggtacttttgatgtttctcttcttaccattgaagaaggtatcttcgaggtcaaggcaactgctggtgacactcatcttggtggcgaagatttcgacaacagaatggttaaccattttgttcaagagtttaagaggaagaacaagaaggatatcagcggtgacgcaagagctctaaggagattgagaactgcctgcgagagagcaaagagaactctttcttcaaccgcgcaaacgactgttgaggttgactctttgtttgagggaattgatttctattctccaatcactcgtgcaaaatttgaagagatgaacatggatctctttaggaagtgtatggagcctgttatgaagtgtcttcgtgacagtaagatggacaaaagcatggtccatgatgttgtccttgtcggtggttctacccgtatccccaaagttcaacagcttttacaagatttcttcaatggtaaagagctatgcaagtctattaaccctgacgaggccgttgcatacggtgcagctgttcaggctgcgattctaagcggtgaagggaacgaaaaggttcaagatcttctcttgcttgatgtcacacctctctcccttggtattgaaaccattggtggtgtcatgaccactttgatccaaagaaacacaacaatcccagctaagaaggaacaggagttcaccactactgtagacaaccagcccgacgtgttgatccaagtctacgaaggtgagagagctagaaccatagacaacaacatccttggtcaattcgtgctttctggaatccctcctgctccacgaggtatccctcagtttactgtctgctttgacattgactccaatggtatcctcaatgtctctgctgaggacaaggccactggaaaaaagaacaagatcacaataactaatgacaaaggtcgtctgtccaaagacgatattgagaagatggtgcaagaagctgagaagtacaagtctgaggatgaggaacacaagaagaaggtggaagccaagaatggtcttgagaactacgcttacaacgtggggaacacactccgtgacatgggtgagaagcttccagctgcagacaagaagaagtttgaagactctattgaggaggtaatccaatggcttgacgataaccaattggctgaggctgacgagtttgaacacaagatgaaggagttggagagtgtctggagtaccatcatcactaagatgtatcaaggatga

SEQ ID NO: 80108 - protein, 617 aa, Arabidopsis thaliana
  peptide (1)..(617): Ceres Seq. ID no. 12654500
MAGKGEGPAIGIDLGTTYSCVGVWQHDRVEIIANDQGNRTTPSYVAFTDSERLIGDAAKNQVAMNPVNTVFDAKRLIGRRFSDASVQSDMKFWPFKVTPGQADKPMIFVNYKGEEKQFAAEEISSMVLIKMREIAEAYLGSSIKNAVVTVPAYFNDSQRQATKDAGVIAGLNVLRIINEPTAAAIAYGLDKKATSVGIKNVLIFDLGGGTFDVSLLTIEEGIFEVKATAGDTHLGGEDFDNRMVNHFVQEFKRKNKKDISGDARALRRLRTACERAKRTLSSTAQTTVEVDSLFEGIDFYSPITRAKFEEMNMDLFRKCMEPVMKCLRDSKMDKSMVHDVVLVGGSTRIPKVQQLLQDFFNGKELCKSINPDEAVAYGAAVQAAILSGEGNEKVQDLLLLDVTPLSLGIETIGGVMTTLIQRNTTIPAKKEQEFTTTVDNQPDVLIQVYEGERARTIDNNILGQFVLSGIPPAPRGIPQFTVCFDIDSNGILNVSAEDKATGKKNKITITNDKGRLSKDDIEKMVQEAEKYKSEDEEHKKKVEAKNGLENYAYNVGNTLRDMGEKLPAADKKKFEDSIEEVIQWLDDNQLAEADEFEHKMKELESVWSTIITKMYQG

SEQ ID NO: 80109 - protein, 554 aa, Arabidopsis thaliana
  peptide (1)..(554): Ceres Seq. ID no. 12654501
MNPVNTVFDAKRLIGRRFSDASVQSDMKFWPFKVTPGQADKPMIFVNYKGEEKQFAAEEISSMVLIKMREIAEAYLGSSIKNAVVTVPAYFNDSQRQATKDAGVIAGLNVLRIINEPTAAAIAYGLDKKATSVGIKNVLIFDLGGGTFDVSLLTIEEGIFEVKATAGDTHLGGEDFDNRMVNHFVQEFKRKNKKDISGDARALRRLRTACERAKRTLSSTAQTTVEVDSLFEGIDFYSPITRAKFEEMNMDLFRKCMEPVMKCLRDSKMDKSMVHDVVLVGGSTRIPKVQQLLQDFFNGKELCKSINPDEAVAYGAAVQAAILSGEGNEKVQDLLLLDVTPLSLGIETIGGVMTTLIQRNTTIPAKKEQEFTTTVDNQPDVLIQVYEGERARTIDNNILGQFVLSGIPPAPRGIPQFTVCFDIDSNGILNVSAEDKATGKKNKITITNDKGRLSKDDIEKMVQEAEKYKSEDEEHKKKVEAKNGLENYAYNVGNTLRDMGEKLPAADKKKFEDSIEEVIQWLDDNQLAEADEFEHKMKELESVWSTIITKMYQG

SEQ ID NO: 80110 - protein, 528 aa, Arabidopsis thaliana
  peptide (1)..(528): Ceres Seq. ID no. 12654502
MKFWPFKVTPGQADKPMIFVNYKGEEKQFAAEEISSMVLIKMREIAEAYLGSSIKNAVVTVPAYFNDSQRQATKDAGVIAGLNVLRIINEPTAAAIAYGLDKKATSVGIKNVLIFDLGGGTFDVSLLTIEEGIFEVKATAGDTHLGGEDFDNRMVNHFVQEFKRKNKKDISGDARALRRLRTACERAKRTLSSTAQTTVEVDSLFEGIDFYSPITRAKFEEMNMDLFRKCMEPVMKCLRDSKMDKSMVHDVVLVGGSTRIPKVQQLLQDFFNGKELCKSINPDEAVAYGAAVQAAILSGEGNEKVQDLLLLDVTPLSLGIETIGGVMTTLIQRNTTIPAKKEQEFTTTVDNQPDVLIQVYEGERARTIDNNILGQFVLSGIPPAPRGIPQFTVCFDIDSNGILNVSAEDKATGKKNKITITNDKGRLSKDDIEKMVQEAEKYKSEDEEHKKKVEAKNGLENYAYNVGNTLRDMGEKLPAADKKKFEDSIEEVIQWLDDNQLAEADEFEHKMKELESVWSTIITKMYQG

SEQ ID NO: 80111 - DNA, 552 bp, Arabidopsis thaliana
  misc_feature (1)..(552): Ceres Seq. ID no. 12654503
  misc_feature (1)..(552): Ortholog of  Ceres SEQ ID NO 15225038 as cited in SEQ ID NO 61017
atgtcgtcttcttcagtaattaaaccagaagacgttcttgaacatcttatgaacgatggtactatcgatgctctccgattaaggatcatcaatcagctcaaagccaatgaagagttaaagagcacaacgattaaaatggcggaagagagtaaagttctgaacacacctggtgctgagaaacagactaaaagagaactctttgatgctcttcgccaagaactcgaaggtccagtgctagagaaggcatcaaaatcagtttgggatttgattattgagaaagatgggttaggaaaagagataaacgaaacagtagaacgtgtcttttgtcatctaagtgggcaagaaccacctttttattcttcatcaaacgtggagaaaactccgatggagatagataaggagacggaggtgaaggatagctcaaagacgaaaccaaagaaaagaagtcttagtgaggtaaattcctctgaaggtatcgatgaagttgcaacgacgaagaagaagcaaggtgattcctcaactgtaactttagaatctaggaaaacgccttga

SEQ ID NO: 80112 - protein, 183 aa, Arabidopsis thaliana
  peptide (1)..(183): Ceres Seq. ID no. 12654504
MSSSSVIKPEDVLEHLMNDGTIDALRLRIINQLKANEELKSTTIKMAEESKVLNTPGAEKQTKRELFDALRQELEGPVLEKASKSVWDLIIEKDGLGKEINETVERVFCHLSGQEPPFYSSSNVEKTPMEIDKETEVKDSSKTKPKKRSLSEVNSSEGIDEVATTKKKQGDSSTVTLESRKTP

SEQ ID NO: 80113 - protein, 167 aa, Arabidopsis thaliana
  peptide (1)..(167): Ceres Seq. ID no. 12654505
MNDGTIDALRLRIINQLKANEELKSTTIKMAEESKVLNTPGAEKQTKRELFDALRQELEGPVLEKASKSVWDLIIEKDGLGKEINETVERVFCHLSGQEPPFYSSSNVEKTPMEIDKETEVKDSSKTKPKKRSLSEVNSSEGIDEVATTKKKQGDSSTVTLESRKTP

SEQ ID NO: 80114 - protein, 138 aa, Arabidopsis thaliana
  peptide (1)..(138): Ceres Seq. ID no. 12654506
MAEESKVLNTPGAEKQTKRELFDALRQELEGPVLEKASKSVWDLIIEKDGLGKEINETVERVFCHLSGQEPPFYSSSNVEKTPMEIDKETEVKDSSKTKPKKRSLSEVNSSEGIDEVATTKKKQGDSSTVTLESRKTP

SEQ ID NO: 80115 - DNA, 1144 bp, Arabidopsis thaliana
  misc_feature (1)..(1144): Ceres Seq. ID no. 12654507
  misc_feature (1)..(1144): Ortholog of  Ceres SEQ ID NO 14302306 as cited in SEQ ID NO 62834
  misc_feature (1)..(1144): Ortholog of  Ceres SEQ ID NO 14303305 as cited in SEQ ID NO 0
acctgaaaaacataactcttaagaaagaaaaaaagttcacttttcattttcttttctcgtaaaacctcatagtgtcgacatgggttattgccaagacgaccaactcgtaaacaagatctgcgatctttacgaaaagatctcgaagcttgagaccctaaagccttgtgaagatgtcgacactctcttcaagcagctcgtgtccacatgcataccaccaaaccctaacatcgacgtcaccaagatgtctgaaaacatccaagagatgagatcaaacctcatcaaaatctgtggtgaggctgaaggttacttagagcatcacttctcttcaatcttaacctcttttgaagataacccccttcatcatttgaatctttttccttactacaacaactacctcaaactaagcaagctcgagtttgatctcctcgaacagaacctaaacggttttgttccaaggactgtagctttcattggctctggtcctctccctcttacttccgtcgttcttgcctcttcccatctcaaagactcgatctttcataactttgacatcgacccatcagcgaatatggtagcagctcgtttggtttcgtctgatcctgatctttctcaacgtatgtttttccatactgttgatataatggatgtaaccgagagcttgaagggcttcgacgttgtgttcttggctgctcttgtagggatggataaaaaggagaaggttaaggtggtcgagcatcttgagaaacacatgtctcctggtgctttgctcatgctgagaagcgctcatggacctagagcttttctctatccaatcgttgagccttgtgatctcgaaggtttcgaagttttatcggtttatcaccctaccgatgaagttatcaactccattgtaatctcaaggaagctaggtgaagatgctaatggtgttgttcatgatcatatagatcaagcttcggatctcgcgtgtaactgttccaagatccacgtgattatgaacaagaagaagagcattatcgaggagttcgcaggtgctaatgaagaacaacttacctagaaaaatgctgtgttcttgatcaatctatgatgtctttttttttttaattacgaaaatgttggctgtttttgctacagtcttgttcttgtc

SEQ ID NO: 80116 - protein, 324 aa, Arabidopsis thaliana
  peptide (1)..(324): Ceres Seq. ID no. 12654508
MGYCQDDQLVNKICDLYEKISKLETLKPCEDVDTLFKQLVSTCIPPNPNIDVTKMSENIQEMRSNLIKICGEAEGYLEHHFSSILTSFEDNPLHHLNLFPYYNNYLKLSKLEFDLLEQNLNGFVPRTVAFIGSGPLPLTSVVLASSHLKDSIFHNFDIDPSANMVAARLVSSDPDLSQRMFFHTVDIMDVTESLKGFDVVFLAALVGMDKKEKVKVVEHLEKHMSPGALLMLRSAHGPRAFLYPIVEPCDLEGFEVLSVYHPTDEVINSIVISRKLGEDANGVVHDHIDQASDLACNCSKIHVIMNKKKSIIEEFAGANEEQLT

SEQ ID NO: 80117 - protein, 270 aa, Arabidopsis thaliana
  peptide (1)..(270): Ceres Seq. ID no. 12654509
MSENIQEMRSNLIKICGEAEGYLEHHFSSILTSFEDNPLHHLNLFPYYNNYLKLSKLEFDLLEQNLNGFVPRTVAFIGSGPLPLTSVVLASSHLKDSIFHNFDIDPSANMVAARLVSSDPDLSQRMFFHTVDIMDVTESLKGFDVVFLAALVGMDKKEKVKVVEHLEKHMSPGALLMLRSAHGPRAFLYPIVEPCDLEGFEVLSVYHPTDEVINSIVISRKLGEDANGVVHDHIDQASDLACNCSKIHVIMNKKKSIIEEFAGANEEQLT

SEQ ID NO: 80118 - protein, 263 aa, Arabidopsis thaliana
  peptide (1)..(263): Ceres Seq. ID no. 12654510
MRSNLIKICGEAEGYLEHHFSSILTSFEDNPLHHLNLFPYYNNYLKLSKLEFDLLEQNLNGFVPRTVAFIGSGPLPLTSVVLASSHLKDSIFHNFDIDPSANMVAARLVSSDPDLSQRMFFHTVDIMDVTESLKGFDVVFLAALVGMDKKEKVKVVEHLEKHMSPGALLMLRSAHGPRAFLYPIVEPCDLEGFEVLSVYHPTDEVINSIVISRKLGEDANGVVHDHIDQASDLACNCSKIHVIMNKKKSIIEEFAGANEEQLT

SEQ ID NO: 80119 - DNA, 1491 bp, Arabidopsis thaliana
  misc_feature (1)..(1491): Ceres Seq. ID no. 12654534
  misc_feature (1)..(1491): Ortholog of  Ceres SEQ ID NO 13594189 as cited in SEQ ID NO 58890
gcagattcacgcatcgaggttagagatgcttcaatgtatctttctcatctccgattctggagaggtaatgctagagaagcagcttactggtcatcgcgttgatagatccatatgtgcttggttctgggatcaatatatttctcaaggcgattcctttaaggcacttccagtgattgcttcaccaacacattatctatttcaaattgttcgtgacggaattacgttcttagcttgtagtcaagttgaaatgccaccgttgatggcaatcgagagttgctgatgttttgtctgagtaccttggtgggctaaatgaagatctcattaaggataatttcatcattgtctatgagcttttggatgagatgatcgataatggtttccctctcacaacagaacctagtatcctgaaggaaatgatagctccaccgaatctagtcagcaaaatgttgagtgttgtaacgggaaatgcttcgaatgttagtgacacgcttccgagtggggcgggctcttgtgttccttggcgaccgacagatccaaagtactctagcaacgaagtttatgtcgaccttgttgaagagatggatgcaattgtaaacagggatggagaattggtaaaatgcgagatttatggcgaagtccaaatgaattctcagctcactggttttccagatttgacattgtcgtttgcgaatccatcaatcctagaagacatgaggtttcacccgtgtgtccgctacagaccatgggaatctcatcaagttctctcctttgtccctccagatggagagttcaagcttatgagttacagggtgaagaagctaaagaacacacctgtatatgtaaaacctcaaataacatcagattcgggtacatgtcgaattagcgtgctagtgggaatccgaagcgatccagggaaaacaattgagtcgataaccttgagtttccagcttcctcactgtgtatcatctgcagatctctcatcaaatcatggaactgtaacaatcctctctaacaagacatgtacatggacaatcgggcgaatcccaaaggacaaaactccgtgtttgtcgggaacactagcgctggaaccagggttagaacggcttcacgtgtttccgacattcaaactcgggtttaagataatgggcattgctctttctggcctaagaatcgagaaacttgatcttcaaactatccctcctcgtttgtacaaagggtttcgtgctcagacacgcgctggtgagttcgatgtcaggttgtagctttctaatacggtcatgccatgccggtcaaaagtcttgactttgggctcctgtgaattgtttgtgccaaatggttttatacatccaatggtttttgtgatctaagttatgatattataagggctctcatcgctaacaatccaaacttgatgtaactatgaattctcattccatttttttttatcgaatatttcgattctccgtggcaatgaaagattctgccgatgtt

SEQ ID NO: 80120 - protein, 299 aa, Arabidopsis thaliana
  peptide (1)..(299): Ceres Seq. ID no. 12654535
MIDNGFPLTTEPSILKEMIAPPNLVSKMLSVVTGNASNVSDTLPSGAGSCVPWRPTDPKYSSNEVYVDLVEEMDAIVNRDGELVKCEIYGEVQMNSQLTGFPDLTLSFANPSILEDMRFHPCVRYRPWESHQVLSFVPPDGEFKLMSYRVKKLKNTPVYVKPQITSDSGTCRISVLVGIRSDPGKTIESITLSFQLPHCVSSADLSSNHGTVTILSNKTCTWTIGRIPKDKTPCLSGTLALEPGLERLHVFPTFKLGFKIMGIALSGLRIEKLDLQTIPPRLYKGFRAQTRAGEFDVRL

SEQ ID NO: 80121 - protein, 282 aa, Arabidopsis thaliana
  peptide (1)..(282): Ceres Seq. ID no. 12654536
MIAPPNLVSKMLSVVTGNASNVSDTLPSGAGSCVPWRPTDPKYSSNEVYVDLVEEMDAIVNRDGELVKCEIYGEVQMNSQLTGFPDLTLSFANPSILEDMRFHPCVRYRPWESHQVLSFVPPDGEFKLMSYRVKKLKNTPVYVKPQITSDSGTCRISVLVGIRSDPGKTIESITLSFQLPHCVSSADLSSNHGTVTILSNKTCTWTIGRIPKDKTPCLSGTLALEPGLERLHVFPTFKLGFKIMGIALSGLRIEKLDLQTIPPRLYKGFRAQTRAGEFDVRL

SEQ ID NO: 80122 - protein, 272 aa, Arabidopsis thaliana
  peptide (1)..(272): Ceres Seq. ID no. 12654537
MLSVVTGNASNVSDTLPSGAGSCVPWRPTDPKYSSNEVYVDLVEEMDAIVNRDGELVKCEIYGEVQMNSQLTGFPDLTLSFANPSILEDMRFHPCVRYRPWESHQVLSFVPPDGEFKLMSYRVKKLKNTPVYVKPQITSDSGTCRISVLVGIRSDPGKTIESITLSFQLPHCVSSADLSSNHGTVTILSNKTCTWTIGRIPKDKTPCLSGTLALEPGLERLHVFPTFKLGFKIMGIALSGLRIEKLDLQTIPPRLYKGFRAQTRAGEFDVRL

SEQ ID NO: 80123 - DNA, 1381 bp, Arabidopsis thaliana
  misc_feature (1)..(1381): Ceres Seq. ID no. 12654538
  misc_feature (1)..(1381): Ortholog of  Ceres SEQ ID NO 13662367 as cited in SEQ ID NO 67774
actcagcacactacacacaaactaaacgaaacaaaaacaaacacaaacacaaacacagaagtattttctaaaagacaaagaagatggcacctgagatcaataccaaactcaccgtaccggtccactcagcaaccggcggagaaaagagggcgtacgtgactttccttgctggaactggagactacgtgaaaggggtggtgggtcttgctaaggggctaaggaaagctaagagcaagtacccactcgtggtggcggttttgccggatgtaccggaggatcaccggaaacagttggtggatcaaggctgtgttgttaaggagatagagccggtttatccaccggagaatcaaaccgagtttgctatggcttactatgtcattaactactctaagcttcgtatctgggagttcgtggagtacaacaagatgatatacttggacggtgacatacaagtgttcgacaacatagatcacttgtttgatcttccaaacggccaattctatgcagttatggactgtttttgcgagaagacatggagtcactcgccacagtacaagatcggttattgccaacagtgtccggacaaggtgacatggccagaggccaagcttggtcctaagccgcctttgtacttcaacgccggtatgttcgtttacgagcctaacctctccacttatcataacctcttggagacggtcaaaattgtgcctcccactctttttgctgaacaggattttttgaatatgtacttcaaggacatatacaagccaataccaccagtgtataacttggtcttggcaatgctttggaggcatccagagaatatagagcttgaccaagtcaaagttgttcactactgtgctgctggtgctaaaccttggagattcactggagaagaagagaacatggacagagaagacattaagatgctggtcaagaaatggtgggacatttacaatgacgagtctcttgattacaagaatgttgtcattggggacagccacaagaagcaacagacacttcagcagtttatcgaagctttgtctgaagccggtgcgcttcagtatgtcaaagctccatctgcagcttagccacaatataatcatcgagctcgttgctgcatacgcctcttcatgactataatattgcttattgctttagtttgaaacttgtttataggaccatatagttatacatatactatatgagattgtgttactattttaatttttatgggttttggaggattttttaaatttccacatccgtttttacttatcatatactagcttgttgattaggaacaatgctcccgacaatattgtaaagtatacttgtttaagttgttatccatgagaatacaaacgtatatagttcagtt

SEQ ID NO: 80124 - protein, 335 aa, Arabidopsis thaliana
  peptide (1)..(335): Ceres Seq. ID no. 12654539
MAPEINTKLTVPVHSATGGEKRAYVTFLAGTGDYVKGVVGLAKGLRKAKSKYPLVVAVLPDVPEDHRKQLVDQGCVVKEIEPVYPPENQTEFAMAYYVINYSKLRIWEFVEYNKMIYLDGDIQVFDNIDHLFDLPNGQFYAVMDCFCEKTWSHSPQYKIGYCQQCPDKVTWPEAKLGPKPPLYFNAGMFVYEPNLSTYHNLLETVKIVPPTLFAEQDFLNMYFKDIYKPIPPVYNLVLAMLWRHPENIELDQVKVVHYCAAGAKPWRFTGEEENMDREDIKMLVKKWWDIYNDESLDYKNVVIGDSHKKQQTLQQFIEALSEAGALQYVKAPSAA

SEQ ID NO: 80125 - protein, 242 aa, Arabidopsis thaliana
  peptide (1)..(242): Ceres Seq. ID no. 12654540
MAYYVINYSKLRIWEFVEYNKMIYLDGDIQVFDNIDHLFDLPNGQFYAVMDCFCEKTWSHSPQYKIGYCQQCPDKVTWPEAKLGPKPPLYFNAGMFVYEPNLSTYHNLLETVKIVPPTLFAEQDFLNMYFKDIYKPIPPVYNLVLAMLWRHPENIELDQVKVVHYCAAGAKPWRFTGEEENMDREDIKMLVKKWWDIYNDESLDYKNVVIGDSHKKQQTLQQFIEALSEAGALQYVKAPSAA

SEQ ID NO: 80126 - protein, 221 aa, Arabidopsis thaliana
  peptide (1)..(221): Ceres Seq. ID no. 12654541
MIYLDGDIQVFDNIDHLFDLPNGQFYAVMDCFCEKTWSHSPQYKIGYCQQCPDKVTWPEAKLGPKPPLYFNAGMFVYEPNLSTYHNLLETVKIVPPTLFAEQDFLNMYFKDIYKPIPPVYNLVLAMLWRHPENIELDQVKVVHYCAAGAKPWRFTGEEENMDREDIKMLVKKWWDIYNDESLDYKNVVIGDSHKKQQTLQQFIEALSEAGALQYVKAPSAA

SEQ ID NO: 80127 - DNA, 2115 bp, Arabidopsis thaliana
  misc_feature (1)..(2115): Ceres Seq. ID no. 12654552
  misc_feature (1)..(2115): Ortholog of  Ceres SEQ ID NO 12586556 as cited in SEQ ID NO 64667
  misc_feature (1)..(2115): Ortholog of  Ceres SEQ ID NO 13660894 as cited in SEQ ID NO 67475
atgaagcgtttaaagctaatcttacgcagaacttacttgacaagcactggagtgaattgcagttttgagatctcacgtctctcacgaatcgggaaaatcaatgaagcacgaaagtttttcgattcgttacagtttaaagcaatcggttcatggaactcaattgtatctgggtatttctcaaacgggttaccgaaagaagcacgccaactgttcgacgaaatgtctgagagaaatgtagtttcctggaacgggttggtttcagggtatattaagaataggatgattgtagaagctaggaatgtgtttgagctaatgcctgagaggaatgttgtgtcgtggaccgcgatggttaaaggttacatgcaagaaggtatggttggtgaagcggagtcgctgttttggagaatgcctgagaggaatgaggtttcttggactgtgatgtttggtggtttgattgatgatggacgtattgataaagcaaggaagttgtatgatatgatgcctgttaaagatgttgtagcgagtactaatatgattggtgggttgtgtagagaaggaagagttgatgaggcaaggttgatttttgatgagatgagggagaggaatgttgttacttggactacgatgattactggatacaggcagaataatcgagtggatgttgctaggaagttgtttgaagtgatgccggagaagactgaagtttcgtggacttctatgcttttggggtatactttgagtgggagaattgaggatgctgaggagttttttgaggtgatgccgatgaagccggttattgcgtgtaatgctatgattgttgggtttggtgaggtaggagagatatcgaaagctaggagggtttttgatctaatggaggatagggataatgcgacttggcgaggaatgattaaagcttatgaaagaaaaggttttgaattggaggctcttgatttgtttgctcaaatgcagaaacaaggagttagaccgagttttccgtctttgatcagtattctttcggtttgtgccactttagcaagtctacaatatggtagacaggtccatgctcatttggtgagatgtcagtttgatgatgatgtctatgttgcctctgttttgatgaccatgtatgtcaaatgtggtgagcttgtaaaagcaaagctagtattcgacaggttttcctcaaaggacattatcatgtggaattcaatcatttctggctatgcgtcgcatggtctaggagaggaagctcttaagatttttcacgagatgccatcatctggtaccatgccaaacaaagtgaccttaattgcaattctgacagcatgtagctatgctggaaaactcgaggaagggcttgagatatttgaatcaatggaatcaaagttttgcgtgactccaacggttgagcattattcttgcacggtggatatgcttgggcgtgcaggacaggtagataaggcaatggagttgatcgaaagtatgactattaagccagatgctacagtttggggtgctctgttaggagcgtgtaaaactcactcacgattggatttagctgaagttgctgcaaagaaacttttcgagaatgaaccagataacgctggtacatacgttttgctatcgagcataaatgcatctcgatccaagtggggggatgttgcagtagtaagaaaaaacatgaggacaaacaatgtaagtaaattccctggttgtagttggattgaggtagggaagaaagtgcacatgttcactcgcggaggtatcaaaaaccatcccgagcaagcgatgatactaatgatgttggagaaaacagatggattattaagagaagctggttatagtcctgattgcagccatgtcttacacgatgtagacgaggaagagaaagttgatagtttaagccgtcacagtgaaagactcgcggtagcttatggactcttaaagctacccgaaggagtacctattcgagtcatgaagaaccttagagtctgtggagattgtcatgccgccattaaactcatttctaaagtcacagaaagagagatcattctaagagatgcaaacagattccatcatttcaacaatggagagtgttcttgtagagactactggtga

SEQ ID NO: 80128 - protein, 704 aa, Arabidopsis thaliana
  peptide (1)..(704): Ceres Seq. ID no. 12654553
MKRLKLILRRTYLTSTGVNCSFEISRLSRIGKINEARKFFDSLQFKAIGSWNSIVSGYFSNGLPKEARQLFDEMSERNVVSWNGLVSGYIKNRMIVEARNVFELMPERNVVSWTAMVKGYMQEGMVGEAESLFWRMPERNEVSWTVMFGGLIDDGRIDKARKLYDMMPVKDVVASTNMIGGLCREGRVDEARLIFDEMRERNVVTWTTMITGYRQNNRVDVARKLFEVMPEKTEVSWTSMLLGYTLSGRIEDAEEFFEVMPMKPVIACNAMIVGFGEVGEISKARRVFDLMEDRDNATWRGMIKAYERKGFELEALDLFAQMQKQGVRPSFPSLISILSVCATLASLQYGRQVHAHLVRCQFDDDVYVASVLMTMYVKCGELVKAKLVFDRFSSKDIIMWNSIISGYASHGLGEEALKIFHEMPSSGTMPNKVTLIAILTACSYAGKLEEGLEIFESMESKFCVTPTVEHYSCTVDMLGRAGQVDKAMELIESMTIKPDATVWGALLGACKTHSRLDLAEVAAKKLFENEPDNAGTYVLLSSINASRSKWGDVAVVRKNMRTNNVSKFPGCSWIEVGKKVHMFTRGGIKNHPEQAMILMMLEKTDGLLREAGYSPDCSHVLHDVDEEEKVDSLSRHSERLAVAYGLLKLPEGVPIRVMKNLRVCGDCHAAIKLISKVTEREIILRDANRFHHFNNGECSCRDYW

SEQ ID NO: 80129 - protein, 631 aa, Arabidopsis thaliana
  peptide (1)..(631): Ceres Seq. ID no. 12654554
MSERNVVSWNGLVSGYIKNRMIVEARNVFELMPERNVVSWTAMVKGYMQEGMVGEAESLFWRMPERNEVSWTVMFGGLIDDGRIDKARKLYDMMPVKDVVASTNMIGGLCREGRVDEARLIFDEMRERNVVTWTTMITGYRQNNRVDVARKLFEVMPEKTEVSWTSMLLGYTLSGRIEDAEEFFEVMPMKPVIACNAMIVGFGEVGEISKARRVFDLMEDRDNATWRGMIKAYERKGFELEALDLFAQMQKQGVRPSFPSLISILSVCATLASLQYGRQVHAHLVRCQFDDDVYVASVLMTMYVKCGELVKAKLVFDRFSSKDIIMWNSIISGYASHGLGEEALKIFHEMPSSGTMPNKVTLIAILTACSYAGKLEEGLEIFESMESKFCVTPTVEHYSCTVDMLGRAGQVDKAMELIESMTIKPDATVWGALLGACKTHSRLDLAEVAAKKLFENEPDNAGTYVLLSSINASRSKWGDVAVVRKNMRTNNVSKFPGCSWIEVGKKVHMFTRGGIKNHPEQAMILMMLEKTDGLLREAGYSPDCSHVLHDVDEEEKVDSLSRHSERLAVAYGLLKLPEGVPIRVMKNLRVCGDCHAAIKLISKVTEREIILRDANRFHHFNNGECSCRDYW

SEQ ID NO: 80130 - protein, 611 aa, Arabidopsis thaliana
  peptide (1)..(611): Ceres Seq. ID no. 12654555
MIVEARNVFELMPERNVVSWTAMVKGYMQEGMVGEAESLFWRMPERNEVSWTVMFGGLIDDGRIDKARKLYDMMPVKDVVASTNMIGGLCREGRVDEARLIFDEMRERNVVTWTTMITGYRQNNRVDVARKLFEVMPEKTEVSWTSMLLGYTLSGRIEDAEEFFEVMPMKPVIACNAMIVGFGEVGEISKARRVFDLMEDRDNATWRGMIKAYERKGFELEALDLFAQMQKQGVRPSFPSLISILSVCATLASLQYGRQVHAHLVRCQFDDDVYVASVLMTMYVKCGELVKAKLVFDRFSSKDIIMWNSIISGYASHGLGEEALKIFHEMPSSGTMPNKVTLIAILTACSYAGKLEEGLEIFESMESKFCVTPTVEHYSCTVDMLGRAGQVDKAMELIESMTIKPDATVWGALLGACKTHSRLDLAEVAAKKLFENEPDNAGTYVLLSSINASRSKWGDVAVVRKNMRTNNVSKFPGCSWIEVGKKVHMFTRGGIKNHPEQAMILMMLEKTDGLLREAGYSPDCSHVLHDVDEEEKVDSLSRHSERLAVAYGLLKLPEGVPIRVMKNLRVCGDCHAAIKLISKVTEREIILRDANRFHHFNNGECSCRDYW

SEQ ID NO: 80131 - DNA, 1437 bp, Arabidopsis thaliana
  misc_feature (1)..(1437): Ceres Seq. ID no. 12654583
  misc_feature (1)..(1437): Ortholog of  Ceres SEQ ID NO 15168591 as cited in SEQ ID NO 57836
atgaaggaggatcgtcgtcttcctcacaaacgcgacgccttccaattcttgaaaaccaaggctgcgtacgttatcgtcatagttctaacctacgcctttggttacttctccgcctaccactatcatcaaccgctgcagcagcagctgccaccgtctacgacagccgtggaaacgacaaaacctcaagtttgttcaatcgacaacttccgagttacgactccatgcggcaatcttgttccgccggaattgattcgccagactgttattgaccggatctttaacggaacttctccgtacatcgatttcccaccaccgcacgccaagaagtttctccggccaaaaagaatcaaaggttggggatcatacggggccgttttcgagaatctaatccgccgagtcaaacctaagacgatcgtcgaagtcgggagttttctcggcgcgtcggcgatacacatggcgaatctcacgcgccgacttgggctcgaggagactcagattctatgcgtcgacgacttccgtggctggcccggttttcgagaccggtttaaggacatggctttggttaacggtgacgttctgcttatgtaccagtttatgcaaaacgtggttatctcggatttttccggttcgatattgccggttcctttctcgaccggttcggctttggagaagctgtgtgagtggggagtgacggcggacctggtggagatagacgcgggtcacgattttaattcggcatgggcggatataaaccgggcggttcggatactccgacccggcggtgttatatttggtcacgattatttcacggcggcggataatagaggagtgaggagagccgtgaatctgttcgcagagattaaccggttaaaggtcaaaaccgatggtcaacattgggttattgattcggtcaaagtaattaataaagggacaagatttgcgatctcaaaaactgttgcgaagattaaagaggatgccaatcaatggttctttgctcaagttcttgagaatcaggatttggtgaatgagcaagctgttcacatttcggttaaggtgctgcgcgggtttttgagagatgaacacggtaaggtcctaattcatgctagaagatcttttgcatctgttcatagcaagcttgatgctacttttctttgttggcaatgggccatggagagtatgaaaagtctcagagttgataaaatcatctttgcctctgaagacaatgatctaattggagctgttacgcgactgccgtcttggccttcgtataaatttcagattcactttttgttgggagaattaataagaagctctaatcttggagctcatcttattgccaagagcgtgacaatggaggatcgccgccaatcgtatgtagcaaccgggtttcctttttggctgaaacatctttttgagaaagaaagaagtattgcttag

SEQ ID NO: 80132 - protein, 478 aa, Arabidopsis thaliana
  peptide (1)..(478): Ceres Seq. ID no. 12654584
MKEDRRLPHKRDAFQFLKTKAAYVIVIVLTYAFGYFSAYHYHQPLQQQLPPSTTAVETTKPQVCSIDNFRVTTPCGNLVPPELIRQTVIDRIFNGTSPYIDFPPPHAKKFLRPKRIKGWGSYGAVFENLIRRVKPKTIVEVGSFLGASAIHMANLTRRLGLEETQILCVDDFRGWPGFRDRFKDMALVNGDVLLMYQFMQNVVISDFSGSILPVPFSTGSALEKLCEWGVTADLVEIDAGHDFNSAWADINRAVRILRPGGVIFGHDYFTAADNRGVRRAVNLFAEINRLKVKTDGQHWVIDSVKVINKGTRFAISKTVAKIKEDANQWFFAQVLENQDLVNEQAVHISVKVLRGFLRDEHGKVLIHARRSFASVHSKLDATFLCWQWAMESMKSLRVDKIIFASEDNDLIGAVTRLPSWPSYKFQIHFLLGELIRSSNLGAHLIAKSVTMEDRRQSYVATGFPFWLKHLFEKERSIA

SEQ ID NO: 80133 - protein, 327 aa, Arabidopsis thaliana
  peptide (1)..(327): Ceres Seq. ID no. 12654585
MANLTRRLGLEETQILCVDDFRGWPGFRDRFKDMALVNGDVLLMYQFMQNVVISDFSGSILPVPFSTGSALEKLCEWGVTADLVEIDAGHDFNSAWADINRAVRILRPGGVIFGHDYFTAADNRGVRRAVNLFAEINRLKVKTDGQHWVIDSVKVINKGTRFAISKTVAKIKEDANQWFFAQVLENQDLVNEQAVHISVKVLRGFLRDEHGKVLIHARRSFASVHSKLDATFLCWQWAMESMKSLRVDKIIFASEDNDLIGAVTRLPSWPSYKFQIHFLLGELIRSSNLGAHLIAKSVTMEDRRQSYVATGFPFWLKHLFEKERSIA

SEQ ID NO: 80134 - protein, 294 aa, Arabidopsis thaliana
  peptide (1)..(294): Ceres Seq. ID no. 12654586
MALVNGDVLLMYQFMQNVVISDFSGSILPVPFSTGSALEKLCEWGVTADLVEIDAGHDFNSAWADINRAVRILRPGGVIFGHDYFTAADNRGVRRAVNLFAEINRLKVKTDGQHWVIDSVKVINKGTRFAISKTVAKIKEDANQWFFAQVLENQDLVNEQAVHISVKVLRGFLRDEHGKVLIHARRSFASVHSKLDATFLCWQWAMESMKSLRVDKIIFASEDNDLIGAVTRLPSWPSYKFQIHFLLGELIRSSNLGAHLIAKSVTMEDRRQSYVATGFPFWLKHLFEKERSIA

SEQ ID NO: 80135 - DNA, 1608 bp, Arabidopsis thaliana
  misc_feature (1)..(1608): Ceres Seq. ID no. 12654587
  misc_feature (1)..(1608): Ortholog of  Ceres SEQ ID NO 13594209 as cited in SEQ ID NO 59089
  misc_feature (1)..(1608): Ortholog of  Ceres SEQ ID NO 14307964 as cited in SEQ ID NO 66191
  misc_feature (1)..(1608): Ortholog of  Ceres SEQ ID NO 13502874 as cited in SEQ ID NO 66298
  misc_feature (1)..(1608): Ortholog of  Ceres SEQ ID NO 12614124 as cited in SEQ ID NO 68392
atgagaaccgaaatagaaagtttgtgggtatttgctcttgcatcaaaattcaatatttacatgcaacaacattttgcttcccttctcgtcgccattgctatcacttggtttaccataaccatcgtattttggtctactccgggtggaccggcttggggaaaatacttcttcactcgccggtttatttctctcgattacaaccgaaaatacaagaatctcattcccggtcctagagggtttccacttgtgggaagcatgagccttaggtcaagccacgtggctcatcagcgcatagcgtctgtggctgagatgagtaacgccaagcggctcatggcgtttagcctcggtgatactaaggtggtggtgacgtgtcatcctgccgtggcaaaggagatactaaacagttcggtttttgctgaccgaccggttgacgaaaccgcttacggtttgatgtttaaccgagccatgggatttgctcccaatggtacttattggcgtacgctgcgtcggttaggctcgaaccatctttttaacccgaagcaaatcaaacaatcggaggatcagagacgggtgatagcgactcagatggtgaatgcgtttgcacgtaaccctaaatccgcgtgtgcagtgcgtgatttgctcaaaacagcgtcgttgtgtaacatgatgggtttggttttcgggagagagtatgaattggagtcaaataacaacttggaatctgaatgcttaaagggtttggttgaagaagggtacgatcttctaggtacgttaaattggaccgaccatcttccttggttagccggtttagatttccaacaaatccggtttaggtgctcgcagctcgtaccgaaagtaaatctgttattgagccgtatcatacatgaacaacgtgctgccacgggtaactttcttgacatgttactttctcttcaaggttcagaaaaattatcagaatccgacatggttgctgttctttgggaaatgatatttaggggaacggacactgttgcggttttggtcgagtgggtgctagcgaggattgtgatgcatcccaaagttcaattaacggtccacgatgagcttgaccgagtcgttggcagatcaagaaccgtggatgagtcagaccttccatcactcacgtatctaacggctatgatcaaagaagtgttgaggctgcatccaccaggtccactgctttcttgggcacgactgtctataacagacacttccgtagatggatatcacgtgccggctgggaccaccgcgatggtcaacatgtgggctatagcacgtgacccacacgtgtgggaggatcctttagagtttaagcctgagaggttcgtggctaaagagggtgaagctgagttctctgttttcgggtcggatctgaggttggcaccgttcgggtcgggtaagagggtttgccctggaaagaatttgggacttacaacggtgtcgttttgggttgcaacgctcttgcatgagtttgagtggcttcctagcgtcgaagctaaccctccagatctctcggaggttttgaggctctcgtgtgagatggcttgtccactcatcgttaacgtaagctcaaggcgtaagataatgtaa

SEQ ID NO: 80136 - protein, 535 aa, Arabidopsis thaliana
  peptide (1)..(535): Ceres Seq. ID no. 12654588
MRTEIESLWVFALASKFNIYMQQHFASLLVAIAITWFTITIVFWSTPGGPAWGKYFFTRRFISLDYNRKYKNLIPGPRGFPLVGSMSLRSSHVAHQRIASVAEMSNAKRLMAFSLGDTKVVVTCHPAVAKEILNSSVFADRPVDETAYGLMFNRAMGFAPNGTYWRTLRRLGSNHLFNPKQIKQSEDQRRVIATQMVNAFARNPKSACAVRDLLKTASLCNMMGLVFGREYELESNNNLESECLKGLVEEGYDLLGTLNWTDHLPWLAGLDFQQIRFRCSQLVPKVNLLLSRIIHEQRAATGNFLDMLLSLQGSEKLSESDMVAVLWEMIFRGTDTVAVLVEWVLARIVMHPKVQLTVHDELDRVVGRSRTVDESDLPSLTYLTAMIKEVLRLHPPGPLLSWARLSITDTSVDGYHVPAGTTAMVNMWAIARDPHVWEDPLEFKPERFVAKEGEAEFSVFGSDLRLAPFGSGKRVCPGKNLGLTTVSFWVATLLHEFEWLPSVEANPPDLSEVLRLSCEMACPLIVNVSSRRKIM

SEQ ID NO: 80137 - protein, 515 aa, Arabidopsis thaliana
  peptide (1)..(515): Ceres Seq. ID no. 12654589
MQQHFASLLVAIAITWFTITIVFWSTPGGPAWGKYFFTRRFISLDYNRKYKNLIPGPRGFPLVGSMSLRSSHVAHQRIASVAEMSNAKRLMAFSLGDTKVVVTCHPAVAKEILNSSVFADRPVDETAYGLMFNRAMGFAPNGTYWRTLRRLGSNHLFNPKQIKQSEDQRRVIATQMVNAFARNPKSACAVRDLLKTASLCNMMGLVFGREYELESNNNLESECLKGLVEEGYDLLGTLNWTDHLPWLAGLDFQQIRFRCSQLVPKVNLLLSRIIHEQRAATGNFLDMLLSLQGSEKLSESDMVAVLWEMIFRGTDTVAVLVEWVLARIVMHPKVQLTVHDELDRVVGRSRTVDESDLPSLTYLTAMIKEVLRLHPPGPLLSWARLSITDTSVDGYHVPAGTTAMVNMWAIARDPHVWEDPLEFKPERFVAKEGEAEFSVFGSDLRLAPFGSGKRVCPGKNLGLTTVSFWVATLLHEFEWLPSVEANPPDLSEVLRLSCEMACPLIVNVSSRRKIM

SEQ ID NO: 80138 - protein, 450 aa, Arabidopsis thaliana
  peptide (1)..(450): Ceres Seq. ID no. 12654590
MSLRSSHVAHQRIASVAEMSNAKRLMAFSLGDTKVVVTCHPAVAKEILNSSVFADRPVDETAYGLMFNRAMGFAPNGTYWRTLRRLGSNHLFNPKQIKQSEDQRRVIATQMVNAFARNPKSACAVRDLLKTASLCNMMGLVFGREYELESNNNLESECLKGLVEEGYDLLGTLNWTDHLPWLAGLDFQQIRFRCSQLVPKVNLLLSRIIHEQRAATGNFLDMLLSLQGSEKLSESDMVAVLWEMIFRGTDTVAVLVEWVLARIVMHPKVQLTVHDELDRVVGRSRTVDESDLPSLTYLTAMIKEVLRLHPPGPLLSWARLSITDTSVDGYHVPAGTTAMVNMWAIARDPHVWEDPLEFKPERFVAKEGEAEFSVFGSDLRLAPFGSGKRVCPGKNLGLTTVSFWVATLLHEFEWLPSVEANPPDLSEVLRLSCEMACPLIVNVSSRRKIM

SEQ ID NO: 80139 - DNA, 1533 bp, Arabidopsis thaliana
  misc_feature (1)..(1533): Ceres Seq. ID no. 12654597
  misc_feature (1)..(1533): Ortholog of  Ceres SEQ ID NO 13594209 as cited in SEQ ID NO 59089
  misc_feature (1)..(1533): Ortholog of  Ceres SEQ ID NO 13585332 as cited in SEQ ID NO 60654
  misc_feature (1)..(1533): Ortholog of  Ceres SEQ ID NO 14316039 as cited in SEQ ID NO 62062
  misc_feature (1)..(1533): Ortholog of  Ceres SEQ ID NO 14308019 as cited in SEQ ID NO 65849
  misc_feature (1)..(1533): Ortholog of  Ceres SEQ ID NO 13502874 as cited in SEQ ID NO 66298
  misc_feature (1)..(1533): Ortholog of  Ceres SEQ ID NO 12614124 as cited in SEQ ID NO 68392
atgattttggtgctagcctccctcttcgctgttctcattcttaatgttcttctatggagatggctcaaggcttcagcatgtaaagcccaaaggcttcctccaggtccaccaagattgcctattttgggtaaccttcttcaattggggcctttacctcatcgggacttggcttctctatgtgataagtacggcccacttgtctacctccggcttggaaatgtagatgctatcacaacgaacgatcccgataccatccgtgagattcttttgcggcaggacgatgttttttcatcgagacccaaaacactcgccgcagtccacctagcgtatggatgtggggacgttgcattagcgccaatgggcccgcattggaaaagaatgaggaggatatgcatggaacacctacttacaaccaaaaggcttgaatcttttacaacccaacgggctgaggaagctcggtatctaatacgagatgtcttcaaacggtccgaaaccggaaagccgataaatcttaaggaagtattgggtgctttctctatgaacaatgtgactaggatgctactagggaaacaattctttgggcctggatctctagttagcccaaaagaagcccaagagtttttgcacataactcacaaattgttttggctgttgggtgtaatttacctaggagattacttgccattttggagatgggtggatccgtccggatgcgagaaagaaatgagggacgtggagaagcgtgttgacgagtttcacactaagatcatcgacgagcacagaagggcaaaactggaagatgaagataaaaacggagacatggattttgttgacgttttgttgtctctacctggtgagaacgggaaggcacacatggaagacgttgaaattaaagctctaattcaggacatgatagctgctgcgacagatacgtcagcagtcacaaacgaatgggcaatggctgaagcgatcaagcaaccgcgagtgatgcgtaaaattcaagaagaactcgataatgtcgtaggatcaaatcgaatggtcgacgaatcggatctagtccatttaaactatctacgttgtgtggtacgagagacgttccgaatgcatccagccggaccattcttgatccctcacgaatccgtccgagcaacaacgatcaacggctactacatcccggcaaagacacgtgtcttcatcaatacacatggattgggccgaaacactaagatatgggacgacgtggaagacttcaggccagaacgacactggcccgttgaaggtagcggacgcgttgagataagtcatggaccggattttaagatattgccgtttagtgccggcaagaggaaatgtcccggagctccgttaggtgtgacgatggtgctaatggctttggctcggctcttccattgctttgaatggtcttcaccgggaaatattgatacggtggaagtttatggcatgactatgcctaaggctaaaccattacgggcaatcgctaagccacgattggcagctcatttgtacacataa

SEQ ID NO: 80140 - protein, 510 aa, Arabidopsis thaliana
  peptide (1)..(510): Ceres Seq. ID no. 12654598
MILVLASLFAVLILNVLLWRWLKASACKAQRLPPGPPRLPILGNLLQLGPLPHRDLASLCDKYGPLVYLRLGNVDAITTNDPDTIREILLRQDDVFSSRPKTLAAVHLAYGCGDVALAPMGPHWKRMRRICMEHLLTTKRLESFTTQRAEEARYLIRDVFKRSETGKPINLKEVLGAFSMNNVTRMLLGKQFFGPGSLVSPKEAQEFLHITHKLFWLLGVIYLGDYLPFWRWVDPSGCEKEMRDVEKRVDEFHTKIIDEHRRAKLEDEDKNGDMDFVDVLLSLPGENGKAHMEDVEIKALIQDMIAAATDTSAVTNEWAMAEAIKQPRVMRKIQEELDNVVGSNRMVDESDLVHLNYLRCVVRETFRMHPAGPFLIPHESVRATTINGYYIPAKTRVFINTHGLGRNTKIWDDVEDFRPERHWPVEGSGRVEISHGPDFKILPFSAGKRKCPGAPLGVTMVLMALARLFHCFEWSSPGNIDTVEVYGMTMPKAKPLRAIAKPRLAAHLYT

SEQ ID NO: 80141 - protein, 391 aa, Arabidopsis thaliana
  peptide (1)..(391): Ceres Seq. ID no. 12654599
MGPHWKRMRRICMEHLLTTKRLESFTTQRAEEARYLIRDVFKRSETGKPINLKEVLGAFSMNNVTRMLLGKQFFGPGSLVSPKEAQEFLHITHKLFWLLGVIYLGDYLPFWRWVDPSGCEKEMRDVEKRVDEFHTKIIDEHRRAKLEDEDKNGDMDFVDVLLSLPGENGKAHMEDVEIKALIQDMIAAATDTSAVTNEWAMAEAIKQPRVMRKIQEELDNVVGSNRMVDESDLVHLNYLRCVVRETFRMHPAGPFLIPHESVRATTINGYYIPAKTRVFINTHGLGRNTKIWDDVEDFRPERHWPVEGSGRVEISHGPDFKILPFSAGKRKCPGAPLGVTMVLMALARLFHCFEWSSPGNIDTVEVYGMTMPKAKPLRAIAKPRLAAHLYT

SEQ ID NO: 80142 - protein, 384 aa, Arabidopsis thaliana
  peptide (1)..(384): Ceres Seq. ID no. 12654600
MRRICMEHLLTTKRLESFTTQRAEEARYLIRDVFKRSETGKPINLKEVLGAFSMNNVTRMLLGKQFFGPGSLVSPKEAQEFLHITHKLFWLLGVIYLGDYLPFWRWVDPSGCEKEMRDVEKRVDEFHTKIIDEHRRAKLEDEDKNGDMDFVDVLLSLPGENGKAHMEDVEIKALIQDMIAAATDTSAVTNEWAMAEAIKQPRVMRKIQEELDNVVGSNRMVDESDLVHLNYLRCVVRETFRMHPAGPFLIPHESVRATTINGYYIPAKTRVFINTHGLGRNTKIWDDVEDFRPERHWPVEGSGRVEISHGPDFKILPFSAGKRKCPGAPLGVTMVLMALARLFHCFEWSSPGNIDTVEVYGMTMPKAKPLRAIAKPRLAAHLYT

SEQ ID NO: 80143 - DNA, 2418 bp, Arabidopsis thaliana
  misc_feature (1)..(2418): Ceres Seq. ID no. 12654609
  misc_feature (1)..(2418): Ortholog of  Ceres SEQ ID NO 14313674 as cited in SEQ ID NO 59602
atcatgtagaagaattcgtatgtcttaagttttggttcttattataatgttaggactcgtcaccctgtaagcgaaagatcagttgaaatatacaagggtttggctgatggcatttagccatgataatcgtgtaaggttggtagttacagaaaatcttgaaaacagttcatagttgaatgattttttctactatctcattttcttatgattttgtttaggttcaaagatgaaggcaaaccattatcctctgaatatggttatggaagaaaagctagaccttctttagatagagttttcaagaatgtaaaatggggattcaagaagccattgagtttcccttcacataaggatcctgaccacaaggaaacatctagtgttactcggaagaacatcataaacccgcaggattcgtttctccagaactggaacaaaatatttttatttgcttgtgtggttgctttggcgattgatccattgtttttctacattcccattgtcgatagcgcaaggcactgtcttactttggactcaaagttggagatagctgcgagtttgcttcgtacgctcatcgatgccttttacattattcacattgtgtttcagttcaggacagcttacatcgctccttcttcgcgggtttttggaagaggtgaactggtagatgatgctaaggcaatagccttaaagtatctctcttcttacttcatcattgatctactctctatccttcctctcccacagatagtagttttagccgttattccaagcgtcaaccagccagtctctttgctaacaaaagactaccttaaattttccataattgctcaatatgttcctcggattctccgtatgtatccgctttacactgaagtgacaagaacatctggcattgttactgaaacagcatgggctggagctgcttggaacctctctctctatatgttagccagtcatgtgtttggagctttatggtacttaatctcagtagaacgagaagacagatgctggcaagaggcatgcgagaagacaaaaggttgtaatatgaaattcctctactgtgaaaacgatcgtaacgttagcaacaatttcctgaccacttcttgcccatttctcgaccctggtgatataacaaactcaaccatcttcaactttggcatcttcactgatgctcttaagagtggcgttgttgaatcacatgatttctggaagaaattcttctactgcttctggtggggtcttcgaaatctgagtgcattgggacagaatctccaaactagcaaattcgttggtgaaatcatatttgctatatcaatctgcatatctggactagtcttatttgctctacttatcggcaatatgcagaaatatttggagtcaacaacagttcgagaagaggaaatgagggtgagaaagagagatgcagagcagtggatgtctcatagaatgttacctgaagacctgaggaaacgtatcagaagatatgaacaatatagatggcaagagacaagaggagttgaagaagaaacccttcttcgtaacctccctaaagacctcagaagagatattaaacgccatctttgcctcgatctcctcaagaaagtacctttgtttgagataatggatgagcagttacttgacgcggtttgcgataggctaagacctgtgctctacaccgagaacagttacgtgatccgtgaaggagatcctgttggggaaatgttgtttgttatgagaggaagactggtaagtgccaccactaatggaggaagaagtgggttcttcaatgccgtgaacctaaaggcaagtgatttctgcggagaagatcttctcccgtgggcattagatcctcaatcttcttctcactttcccatctcgacaagaacagttcaagctctcactgaagtcgaagcctttgctctcacagctgaggatctcaagtctgtcgcttcacaattcagacgcctccatagcaagcaactccaacatacttttcggttttactcagtgcaatggagaacatggagcgtgtcttttatacaagcagcgtggaggagatactgtcggaggaagttagccaagtcactacgcgatgaagaagatcgtctccgagaagcgctcgctagtcaagataaagaacacaatgctgcaaccgtgtcgtcgtccttgagccttggaggcgctctttacgcgtcgcgtttcgcatcaaacgcgcttcacaatctgaggcacaatatctccaaccttcctcctcgctacactcttcctttgctacctcaaaaacccaccgagcctgacttcaccgccaatcatacaactgacccttagatctctcttgcatgtgtatagtgtgtggaataaagtgtaaaaacaatggtttgaactttgaaccaataaaatgtaaaaaattttgttgattga

SEQ ID NO: 80144 - protein, 706 aa, Arabidopsis thaliana
  peptide (1)..(706): Ceres Seq. ID no. 12654610
MILFRFKDEGKPLSSEYGYGRKARPSLDRVFKNVKWGFKKPLSFPSHKDPDHKETSSVTRKNIINPQDSFLQNWNKIFLFACVVALAIDPLFFYIPIVDSARHCLTLDSKLEIAASLLRTLIDAFYIIHIVFQFRTAYIAPSSRVFGRGELVDDAKAIALKYLSSYFIIDLLSILPLPQIVVLAVIPSVNQPVSLLTKDYLKFSIIAQYVPRILRMYPLYTEVTRTSGIVTETAWAGAAWNLSLYMLASHVFGALWYLISVEREDRCWQEACEKTKGCNMKFLYCENDRNVSNNFLTTSCPFLDPGDITNSTIFNFGIFTDALKSGVVESHDFWKKFFYCFWWGLRNLSALGQNLQTSKFVGEIIFAISICISGLVLFALLIGNMQKYLESTTVREEEMRVRKRDAEQWMSHRMLPEDLRKRIRRYEQYRWQETRGVEEETLLRNLPKDLRRDIKRHLCLDLLKKVPLFEIMDEQLLDAVCDRLRPVLYTENSYVIREGDPVGEMLFVMRGRLVSATTNGGRSGFFNAVNLKASDFCGEDLLPWALDPQSSSHFPISTRTVQALTEVEAFALTAEDLKSVASQFRRLHSKQLQHTFRFYSVQWRTWSVSFIQAAWRRYCRRKLAKSLRDEEDRLREALASQDKEHNAATVSSSLSLGGALYASRFASNALHNLRHNISNLPPRYTLPLLPQKPTEPDFTANHTTDP

SEQ ID NO: 80145 - protein, 491 aa, Arabidopsis thaliana
  peptide (1)..(491): Ceres Seq. ID no. 12654611
MYPLYTEVTRTSGIVTETAWAGAAWNLSLYMLASHVFGALWYLISVEREDRCWQEACEKTKGCNMKFLYCENDRNVSNNFLTTSCPFLDPGDITNSTIFNFGIFTDALKSGVVESHDFWKKFFYCFWWGLRNLSALGQNLQTSKFVGEIIFAISICISGLVLFALLIGNMQKYLESTTVREEEMRVRKRDAEQWMSHRMLPEDLRKRIRRYEQYRWQETRGVEEETLLRNLPKDLRRDIKRHLCLDLLKKVPLFEIMDEQLLDAVCDRLRPVLYTENSYVIREGDPVGEMLFVMRGRLVSATTNGGRSGFFNAVNLKASDFCGEDLLPWALDPQSSSHFPISTRTVQALTEVEAFALTAEDLKSVASQFRRLHSKQLQHTFRFYSVQWRTWSVSFIQAAWRRYCRRKLAKSLRDEEDRLREALASQDKEHNAATVSSSLSLGGALYASRFASNALHNLRHNISNLPPRYTLPLLPQKPTEPDFTANHTTDP

SEQ ID NO: 80146 - protein, 461 aa, Arabidopsis thaliana
  peptide (1)..(461): Ceres Seq. ID no. 12654612
MLASHVFGALWYLISVEREDRCWQEACEKTKGCNMKFLYCENDRNVSNNFLTTSCPFLDPGDITNSTIFNFGIFTDALKSGVVESHDFWKKFFYCFWWGLRNLSALGQNLQTSKFVGEIIFAISICISGLVLFALLIGNMQKYLESTTVREEEMRVRKRDAEQWMSHRMLPEDLRKRIRRYEQYRWQETRGVEEETLLRNLPKDLRRDIKRHLCLDLLKKVPLFEIMDEQLLDAVCDRLRPVLYTENSYVIREGDPVGEMLFVMRGRLVSATTNGGRSGFFNAVNLKASDFCGEDLLPWALDPQSSSHFPISTRTVQALTEVEAFALTAEDLKSVASQFRRLHSKQLQHTFRFYSVQWRTWSVSFIQAAWRRYCRRKLAKSLRDEEDRLREALASQDKEHNAATVSSSLSLGGALYASRFASNALHNLRHNISNLPPRYTLPLLPQKPTEPDFTANHTTDP

SEQ ID NO: 80147 - DNA, 1687 bp, Arabidopsis thaliana
  misc_feature (1)..(1687): Ceres Seq. ID no. 12654613
  misc_feature (1)..(1687): Ortholog of  Ceres SEQ ID NO 13646595 as cited in SEQ ID NO 20561
  misc_feature (1)..(1687): Ortholog of  Ceres SEQ ID NO 14314636 as cited in SEQ ID NO 56924
  misc_feature (1)..(1687): Ortholog of  Ceres SEQ ID NO 15168421 as cited in SEQ ID NO 60131
  misc_feature (1)..(1687): Ortholog of  Ceres SEQ ID NO 13597574 as cited in SEQ ID NO 64677
  misc_feature (1)..(1687): Ortholog of  Ceres SEQ ID NO 13597843 as cited in SEQ ID NO 64850
  misc_feature (1)..(1687): Ortholog of  Ceres SEQ ID NO 13597678 as cited in SEQ ID NO 65375
  misc_feature (1)..(1687): Ortholog of  Ceres SEQ ID NO 13662880 as cited in SEQ ID NO 65422
  misc_feature (1)..(1687): Ortholog of  Ceres SEQ ID NO 15176787 as cited in SEQ ID NO 66468
  misc_feature (1)..(1687): Ortholog of  Ceres SEQ ID NO 13596180 as cited in SEQ ID NO 67941
  misc_feature (1)..(1687): Ortholog of  Ceres SEQ ID NO 13591190 as cited in SEQ ID NO 68044
  misc_feature (1)..(1687): Ortholog of  Ceres SEQ ID NO 13595961 as cited in SEQ ID NO 68223
atagatatttttcaagaaataagaataaagaaaattctactcttaatggcggaagcaaacactccacacatagcaatcatgccgagtcccggtatgggtcaccttatcccattcgtcgagttagcaaagcgactcgttcagcacgactgtttcaccgtcacaatgatcatctccggtgaaacttcgccgtctaaggcacaaagatccgttctcaactctctcccttcctccatagcctccgtatttctccctcccgccgatctttccgatgttccctccacagcgcgaatcgaaactcgggccatgctcaccatgactcgttccaatccggcgctccgggagctttttggctctttatcaacgaagaaaagtctcccggcggttctcgtcgtcgatatgtttggtgcggatgcgttcgacgtggccgttgacttccacgtgtcaccatacattttctatgcatccaatgcaaacgtcttgtcgttttttcttcacttgccgaaactagacaaaacggtgtcgtgtgagtttaggtacttaaccgaaccgcttaagattcccggctgtgtcccgataaccggtaaggactttcttgatacggttcaagaccgaaacgacgacgcatacaaattgcttctccataacaccaagaggtacaaagaagctaaagggattctagtgaattccttcgttgatttagagtcgaatgcaataaaggccttacaagaaccggctcctgataaaccaacggtatacccgattgggccgctggttaacacaagttcatctaatgttaacttggaagacaagttcggatgtttaagttggctagacaaccaaccattcggctcggttctatacatatcatttggaagcggcggaacacttacatgtgagcagtttaatgagcttgctattggtcttgcggagagcggaaaacggtttatttgggtcatacgaagtccaagcgagatagttagttcgtcgtatttcaatccacacagcgagacagaccccttttcgtttttaccaattgggttcttagaccgaaccaaagagaaaggtttggtggttccatcatgggctccacaggttcaaatcctggctcatccatccacatgcgggtttttaacacactgtggatggaattcgaccttagaaagcattgtaaacggtgtaccactcatagcgtggcctttattcgcggagcaaaagatgaatacattgctactcgtggaggatgttggagcggctctaagaatccatgcgggtgaagatgggattgtacggagggaagaagtggtgagagtggtgaaggcactgatggaaggtgaagagggaaaagccataggaaataaagtgaaggagttgaaagaaggagttgttagagtcttgggtgacgatggattgtccagcaagtcatttggtgaagttttgttaaagtggaaaacgcaccagcgagatatcaaccaagagacgtcccactaaatatgtgagtttgaggctttgagctatgttatgcacattaggtatgcgaccatgctcaagataaaaaatgcttcaatattatgcattgtgttgcaaggagtcaccaacatattaataaactgtaattttgaccttggtcaaaatcaaaatgacctttgtacaacataaaatttaaaaggtaacatactttcatctgatt

SEQ ID NO: 80148 - protein, 495 aa, Arabidopsis thaliana
  peptide (1)..(495): Ceres Seq. ID no. 12654614
IDIFQEIRIKKILLLMAEANTPHIAIMPSPGMGHLIPFVELAKRLVQHDCFTVTMIISGETSPSKAQRSVLNSLPSSIASVFLPPADLSDVPSTARIETRAMLTMTRSNPALRELFGSLSTKKSLPAVLVVDMFGADAFDVAVDFHVSPYIFYASNANVLSFFLHLPKLDKTVSCEFRYLTEPLKIPGCVPITGKDFLDTVQDRNDDAYKLLLHNTKRYKEAKGILVNSFVDLESNAIKALQEPAPDKPTVYPIGPLVNTSSSNVNLEDKFGCLSWLDNQPFGSVLYISFGSGGTLTCEQFNELAIGLAESGKRFIWVIRSPSEIVSSSYFNPHSETDPFSFLPIGFLDRTKEKGLVVPSWAPQVQILAHPSTCGFLTHCGWNSTLESIVNGVPLIAWPLFAEQKMNTLLLVEDVGAALRIHAGEDGIVRREEVVRVVKALMEGEEGKAIGNKVKELKEGVVRVLGDDGLSSKSFGEVLLKWKTHQRDINQETSH

SEQ ID NO: 80149 - protein, 480 aa, Arabidopsis thaliana
  peptide (1)..(480): Ceres Seq. ID no. 12654615
MAEANTPHIAIMPSPGMGHLIPFVELAKRLVQHDCFTVTMIISGETSPSKAQRSVLNSLPSSIASVFLPPADLSDVPSTARIETRAMLTMTRSNPALRELFGSLSTKKSLPAVLVVDMFGADAFDVAVDFHVSPYIFYASNANVLSFFLHLPKLDKTVSCEFRYLTEPLKIPGCVPITGKDFLDTVQDRNDDAYKLLLHNTKRYKEAKGILVNSFVDLESNAIKALQEPAPDKPTVYPIGPLVNTSSSNVNLEDKFGCLSWLDNQPFGSVLYISFGSGGTLTCEQFNELAIGLAESGKRFIWVIRSPSEIVSSSYFNPHSETDPFSFLPIGFLDRTKEKGLVVPSWAPQVQILAHPSTCGFLTHCGWNSTLESIVNGVPLIAWPLFAEQKMNTLLLVEDVGAALRIHAGEDGIVRREEVVRVVKALMEGEEGKAIGNKVKELKEGVVRVLGDDGLSSKSFGEVLLKWKTHQRDINQETSH

SEQ ID NO: 80150 - protein, 469 aa, Arabidopsis thaliana
  peptide (1)..(469): Ceres Seq. ID no. 12654616
MPSPGMGHLIPFVELAKRLVQHDCFTVTMIISGETSPSKAQRSVLNSLPSSIASVFLPPADLSDVPSTARIETRAMLTMTRSNPALRELFGSLSTKKSLPAVLVVDMFGADAFDVAVDFHVSPYIFYASNANVLSFFLHLPKLDKTVSCEFRYLTEPLKIPGCVPITGKDFLDTVQDRNDDAYKLLLHNTKRYKEAKGILVNSFVDLESNAIKALQEPAPDKPTVYPIGPLVNTSSSNVNLEDKFGCLSWLDNQPFGSVLYISFGSGGTLTCEQFNELAIGLAESGKRFIWVIRSPSEIVSSSYFNPHSETDPFSFLPIGFLDRTKEKGLVVPSWAPQVQILAHPSTCGFLTHCGWNSTLESIVNGVPLIAWPLFAEQKMNTLLLVEDVGAALRIHAGEDGIVRREEVVRVVKALMEGEEGKAIGNKVKELKEGVVRVLGDDGLSSKSFGEVLLKWKTHQRDINQETSH

SEQ ID NO: 80151 - DNA, 1446 bp, Arabidopsis thaliana
  misc_feature (1)..(1446): Ceres Seq. ID no. 12654623
  misc_feature (1)..(1446): Ortholog of  Ceres SEQ ID NO 13646595 as cited in SEQ ID NO 20561
  misc_feature (1)..(1446): Ortholog of  Ceres SEQ ID NO 14314636 as cited in SEQ ID NO 56924
  misc_feature (1)..(1446): Ortholog of  Ceres SEQ ID NO 15168421 as cited in SEQ ID NO 60131
  misc_feature (1)..(1446): Ortholog of  Ceres SEQ ID NO 13597574 as cited in SEQ ID NO 64677
  misc_feature (1)..(1446): Ortholog of  Ceres SEQ ID NO 13597843 as cited in SEQ ID NO 64850
  misc_feature (1)..(1446): Ortholog of  Ceres SEQ ID NO 13597678 as cited in SEQ ID NO 65375
  misc_feature (1)..(1446): Ortholog of  Ceres SEQ ID NO 15176787 as cited in SEQ ID NO 66468
  misc_feature (1)..(1446): Ortholog of  Ceres SEQ ID NO 13596180 as cited in SEQ ID NO 67941
  misc_feature (1)..(1446): Ortholog of  Ceres SEQ ID NO 13591190 as cited in SEQ ID NO 68044
  misc_feature (1)..(1446): Ortholog of  Ceres SEQ ID NO 13595961 as cited in SEQ ID NO 68223
atggcagatggaaacactccacatgtagcaatcataccaagtcccggtataggtcacctcatcccactcgtcgagttagcaaagcgactccttgacaatcacggtttcaccgtcactttcatcatccccggcgattctcctccgtctaaggctcaaagatccgttctcaactctctcccttcctccatagcctccgtcttcctccctcccgccgatctttccgacgttccttcgacagctcgaatcgaaactcggatatcgctcaccgtgactcgttccaacccggcgctccgggagctttttggctcgttatcggcggagaaacgtctcccggcggttctcgtcgtcgatctatttggtacggatgcgttcgacgtggctgctgagttccacgtgtcgccatacattttctatgcatcaaatgccaacgtcctcacgtttctgcttcacttgccgaagctagacgaaacggtgtcgtgtgagtttagggaattaaccgaaccggttattattcccggttgtgtccccataaccggtaaggatttcgtcgatccgtgtcaagaccgaaaagatgaatcatacaaatggcttctacacaacgtcaagagattcaaagaagctgaagggattctagtgaattccttcgtcgatttagagccaaacactataaagattgtacaagaaccggctcctgataaaccaccggtttacctgattgggccgttggttaactcgggttcacacgatgctgacgtgaacgatgagtacaaatgtttaaattggctagacaaccaaccattcgggtcggttctatacgtatcctttggaagcggcggaacactcacgtttgagcagttcattgagctggctcttggcctagcggagagtggaaaacggtttctttgggtcatacgaagtccgagtgggatagctagttcatcgtatttcaatccacaaagccgaaatgatccattttcgtttttaccacaaggcttcttagaccgaaccaaagaaaaaggtctagtggttgggtcatgggctccacaggctcaaattctgactcatacatctataggtggatttttaactcattgtggatggaattcgagtctagaaagtattgtaaacggtgtaccgctcatagcatggccgttatacgcggagcaaaagatgaacgcattgctactcgtggatgttggtgcggctctaagagcacgactgggtgaagacggggtcgtaggaagggaagaagtggcgagagtggtaaaaggattgatagaaggagaagaagggaatgcggtaaggaaaaaaatgaaagagttgaaagaaggatctgttagagtcttaagggacgatggattctctaccaaatcgcttaatgaagtttcgttgaagtggaaagcccaccaacgaaagatcgaccaagaacaggaatcatttctatga

SEQ ID NO: 80152 - protein, 481 aa, Arabidopsis thaliana
  peptide (1)..(481): Ceres Seq. ID no. 12654624
MADGNTPHVAIIPSPGIGHLIPLVELAKRLLDNHGFTVTFIIPGDSPPSKAQRSVLNSLPSSIASVFLPPADLSDVPSTARIETRISLTVTRSNPALRELFGSLSAEKRLPAVLVVDLFGTDAFDVAAEFHVSPYIFYASNANVLTFLLHLPKLDETVSCEFRELTEPVIIPGCVPITGKDFVDPCQDRKDESYKWLLHNVKRFKEAEGILVNSFVDLEPNTIKIVQEPAPDKPPVYLIGPLVNSGSHDADVNDEYKCLNWLDNQPFGSVLYVSFGSGGTLTFEQFIELALGLAESGKRFLWVIRSPSGIASSSYFNPQSRNDPFSFLPQGFLDRTKEKGLVVGSWAPQAQILTHTSIGGFLTHCGWNSSLESIVNGVPLIAWPLYAEQKMNALLLVDVGAALRARLGEDGVVGREEVARVVKGLIEGEEGNAVRKKMKELKEGSVRVLRDDGFSTKSLNEVSLKWKAHQRKIDQEQESFL

SEQ ID NO: 80153 - DNA, 1329 bp, Arabidopsis thaliana
  misc_feature (1)..(1329): Ceres Seq. ID no. 12654625
  misc_feature (1)..(1329): Ortholog of  Ceres SEQ ID NO 13659033 as cited in SEQ ID NO 66372
  misc_feature (1)..(1329): Ortholog of  Ceres SEQ ID NO 13655724 as cited in SEQ ID NO 68973
atggattcattgagattaatatctaagagcatcaagattgaaggaaccccatttggttcctctcaccaacgcaatcaaattttcctcaaatccgtcgctttcttccttttgatcggtctcgcttaccgttttctcatcactaattccaccgtctctccggttcccaccgttcgatcctcgccggaatctctcccgccggatccttcaggtctcactgccatcactcaaacttcagcctctgtcgattccccagcaaacatcacaaccattgcttcacagaatgacccatcagggccaatctacaccaatgtctcttgccgtcatatccaagattaccaaaattgcttgaaaaacggaaggccagatgtgaattaccttcgatggagatggcaacctcgcgattgcgatctcccgaggtttaaccctgagcaattccttgacaatatgaggaacaaatggttggcttttatcggtgattccatctctcgtaaccatgtccaatccctcctctgcattctctctcaggtagaagaagtagaagatatcttccatgacaaggaatacaaatcaaggatctggagattcccttcttacaacttcacactctctgtcatttggtctcctttccttgtaaaagctgaaacctttgagaacggagttcctttctcagacattcgagtacacctcgacaagctagaccagaaatggactgatcagtacatcaatttcgactacgttgtcatctccggtggaaaatggttcctcaaaacaacaatcttccatgaaaacaacaccgtaaccggatgccattactgccaagggaagaacaatatgaccgaactcggttatctatactcgtaccgaaaggttcttcatttggttttagactttgtcgctgaaccgaaccataaagctcaggttctcttcagaacaacaacacctgatcatttcgagaatggagagtgggactctggtggtttctgtaaccgaacaatgccgtttacggaaggcagcgaaggagagatgaagagcgaggatgtatcgatgcgtgatatcgagcttgaagagttctataagactactactacacaacaagaaggttccaattcaaacattgtattacttgacacaacttcaatgtcgcttctccgaccagatggacatccgggaccgtaccggtatccaaatcctttcgctgggctgaagaacaaggagctgaatcaggttcagaacgattgtcttcattggtgcttacccggtccgattgattcatggaatgatctaatggtcgaggtgatgcttaaccgggaacggcaaagacgagaatag

SEQ ID NO: 80154 - protein, 442 aa, Arabidopsis thaliana
  peptide (1)..(442): Ceres Seq. ID no. 12654626
MDSLRLISKSIKIEGTPFGSSHQRNQIFLKSVAFFLLIGLAYRFLITNSTVSPVPTVRSSPESLPPDPSGLTAITQTSASVDSPANITTIASQNDPSGPIYTNVSCRHIQDYQNCLKNGRPDVNYLRWRWQPRDCDLPRFNPEQFLDNMRNKWLAFIGDSISRNHVQSLLCILSQVEEVEDIFHDKEYKSRIWRFPSYNFTLSVIWSPFLVKAETFENGVPFSDIRVHLDKLDQKWTDQYINFDYVVISGGKWFLKTTIFHENNTVTGCHYCQGKNNMTELGYLYSYRKVLHLVLDFVAEPNHKAQVLFRTTTPDHFENGEWDSGGFCNRTMPFTEGSEGEMKSEDVSMRDIELEEFYKTTTTQQEGSNSNIVLLDTTSMSLLRPDGHPGPYRYPNPFAGLKNKELNQVQNDCLHWCLPGPIDSWNDLMVEVMLNRERQRRE

SEQ ID NO: 80155 - protein, 294 aa, Arabidopsis thaliana; identical to SEQ ID NO: 44234
  peptide (1)..(294): Ceres Seq. ID no. 12654627

SEQ ID NO: 80156 - DNA, 1016 bp, Arabidopsis thaliana
  misc_feature (1)..(1016): Ceres Seq. ID no. 12654632
  misc_feature (1)..(1016): Ortholog of  Ceres SEQ ID NO 13584734 as cited in SEQ ID NO 65573
ctctctctgcatgcatctttctctctattaatctctccagtatttgtcaggatttgggtatttttttaataacgatcagtgtccaatctctcttatcgtcttcataagtttcctattatttcattcttcttcttctttattctcatttctctctctctctctttttactcacagacaaatctttttcacatctctttgcaaattcttgagaattcattcaagttacataaaaagctgagagcaatgaagaaaattgtgttaaagctggatttgcatgacgatagggcaaaacaaaaggcccttaaaacggtttctactctcccaggaatcgattccattgcaatggacatgaaggagaagaaattgacggttattggaaccgtggatccggtaaatgtagtaagtaagctaagaaagtattggccgatgacggatatcgtactagtgggacctgcgaaagagccggaaaaggagaagaaggaggagccgaagaaggaaggtggtggcgagccgccaaagaaagaaggagaagctccaaaagaagaagggaaaaaggaaggagaagcaccgaagaaggaagaagagaagaaagaaggtggcgataagaaggaaggagagaagaaagatcaaccacaagcgcagccgcaaccagttgtgccgccacctgatcatgtgttggaacttgtaaaggcgtataaagcatataatcctcacctaacaacgtattactacgcccaaagcatcgaagaaaaccctaatgcttgcgttatatgttgaaatatttataatgtgatatattttggggaaaagatggaccgatctatatatagtcatgaggatgaagaataagaaacaaaggatatatcttagacttcggatgggatcggatatgtttttgtctcctcgataatgcggggaagttttatttccttaaatcgatttcgatgatatgttttgtgtatatatcgtcgatagtactagaattttattttttcactttgaaggtaactttctgt

SEQ ID NO: 80157 - protein, 177 aa, Arabidopsis thaliana
  peptide (1)..(177): Ceres Seq. ID no. 12654633
MKKIVLKLDLHDDRAKQKALKTVSTLPGIDSIAMDMKEKKLTVIGTVDPVNVVSKLRKYWPMTDIVLVGPAKEPEKEKKEEPKKEGGGEPPKKEGEAPKEEGKKEGEAPKKEEEKKEGGDKKEGEKKDQPQAQPQPVVPPPDHVLELVKAYKAYNPHLTTYYYAQSIEENPNACVIC

SEQ ID NO: 80158 - protein, 144 aa, Arabidopsis thaliana
  peptide (1)..(144): Ceres Seq. ID no. 12654634
MDMKEKKLTVIGTVDPVNVVSKLRKYWPMTDIVLVGPAKEPEKEKKEEPKKEGGGEPPKKEGEAPKEEGKKEGEAPKKEEEKKEGGDKKEGEKKDQPQAQPQPVVPPPDHVLELVKAYKAYNPHLTTYYYAQSIEENPNACVIC

SEQ ID NO: 80159 - protein, 142 aa, Arabidopsis thaliana
  peptide (1)..(142): Ceres Seq. ID no. 12654635
MKEKKLTVIGTVDPVNVVSKLRKYWPMTDIVLVGPAKEPEKEKKEEPKKEGGGEPPKKEGEAPKEEGKKEGEAPKKEEEKKEGGDKKEGEKKDQPQAQPQPVVPPPDHVLELVKAYKAYNPHLTTYYYAQSIEENPNACVIC

SEQ ID NO: 80160 - DNA, 1110 bp, Arabidopsis thaliana
  misc_feature (1)..(1110): Ceres Seq. ID no. 12654640
  misc_feature (1)..(1110): Ortholog of  Ceres SEQ ID NO 13532807 as cited in SEQ ID NO 53012
  misc_feature (1)..(1110): Ortholog of  Ceres SEQ ID NO 13663060 as cited in SEQ ID NO 60964
  misc_feature (1)..(1110): Ortholog of  Ceres SEQ ID NO 13656849 as cited in SEQ ID NO 65764
  misc_feature (1)..(1110): Ortholog of  Ceres SEQ ID NO 13500573 as cited in SEQ ID NO 67431
  misc_feature (1)..(1110): Ortholog of  Ceres SEQ ID NO 13656501 as cited in SEQ ID NO 69206
atgtcaatagagaaaccattcttcggtgatgacagcaacagaggagtaagtatcaatggtggtcgttatgtgcagtataatgtctatggaaatctctttgaagtttctaaaaagtatgttcctcctcttcgtcctatcggcagaggcgcttctggcatcgtctgtgctgcatggaattcggagacgggtgaggaagtagcgatcaagaagattggtaatgcatttggcaacattatcgacgctaagagaactttgagagagattaagcttcttaagcatatggatcatgacaatgtcattgccattatagacataataagaccacctcagccagacaacttcaatgatgttcacattgtctatgagttaatggacactgatcttcaccacattatccgctctaaccaaccgttaactgatgatcattcacggttcttcctgtatcagttgttgcgaggcctcaagtatgtgcattcagccaatgtactgcatcgtgatttaaaaccgagtaacttgctcctgaatgcaaactgtgacctcaagattggggattttgggcttgcgaggactaaatcagagacagacttcatgacagaatatgttgttacacgttggtaccgagctccagagttgctccttaattgctcagaatacactgcagctatcgacatttggtctgtcggttgtatactcggtgaaataatgacgcgggagccgttatttccgggcagagattatgttcagcagcttagactcatcactgagcttataggctcaccagatgattcaagcctaggattcttaagaagcgacaacgctagaagatacgtaagacagcttccacagtatccaagacaaaactttgccgctagattcccaaacatgtcggtcaatgctgttgatttgctgcagaaaatgctcgtctttgacccaaacagacgcattacagtcgatgaagccttgtgccacccttacttagcaccgctacacgaatataacgaggaacctgtgtgtgtgagaccgttccattttgatttcgagcaaccttcattgacggaagagaacatcaaggagcttatatatcgtgaatcagtcaagtttaacccttaa

SEQ ID NO: 80161 - protein, 369 aa, Arabidopsis thaliana
  peptide (1)..(369): Ceres Seq. ID no. 12654641
MSIEKPFFGDDSNRGVSINGGRYVQYNVYGNLFEVSKKYVPPLRPIGRGASGIVCAAWNSETGEEVAIKKIGNAFGNIIDAKRTLREIKLLKHMDHDNVIAIIDIIRPPQPDNFNDVHIVYELMDTDLHHIIRSNQPLTDDHSRFFLYQLLRGLKYVHSANVLHRDLKPSNLLLNANCDLKIGDFGLARTKSETDFMTEYVVTRWYRAPELLLNCSEYTAAIDIWSVGCILGEIMTREPLFPGRDYVQQLRLITELIGSPDDSSLGFLRSDNARRYVRQLPQYPRQNFAARFPNMSVNAVDLLQKMLVFDPNRRITVDEALCHPYLAPLHEYNEEPVCVRPFHFDFEQPSLTEENIKELIYRESVKFNP

SEQ ID NO: 80162 - protein, 276 aa, Arabidopsis thaliana
  peptide (1)..(276): Ceres Seq. ID no. 12654642
MDHDNVIAIIDIIRPPQPDNFNDVHIVYELMDTDLHHIIRSNQPLTDDHSRFFLYQLLRGLKYVHSANVLHRDLKPSNLLLNANCDLKIGDFGLARTKSETDFMTEYVVTRWYRAPELLLNCSEYTAAIDIWSVGCILGEIMTREPLFPGRDYVQQLRLITELIGSPDDSSLGFLRSDNARRYVRQLPQYPRQNFAARFPNMSVNAVDLLQKMLVFDPNRRITVDEALCHPYLAPLHEYNEEPVCVRPFHFDFEQPSLTEENIKELIYRESVKFNP

SEQ ID NO: 80163 - protein, 246 aa, Arabidopsis thaliana
  peptide (1)..(246): Ceres Seq. ID no. 12654643
MDTDLHHIIRSNQPLTDDHSRFFLYQLLRGLKYVHSANVLHRDLKPSNLLLNANCDLKIGDFGLARTKSETDFMTEYVVTRWYRAPELLLNCSEYTAAIDIWSVGCILGEIMTREPLFPGRDYVQQLRLITELIGSPDDSSLGFLRSDNARRYVRQLPQYPRQNFAARFPNMSVNAVDLLQKMLVFDPNRRITVDEALCHPYLAPLHEYNEEPVCVRPFHFDFEQPSLTEENIKELIYRESVKFNP

SEQ ID NO: 80164 - DNA, 624 bp, Arabidopsis thaliana
  misc_feature (1)..(624): Ceres Seq. ID no. 12654652
  misc_feature (1)..(624): Ortholog of  Ceres SEQ ID NO 15178997 as cited in SEQ ID NO 0
atgacagaagcagagcaaaaggcggctttcctcggtggtcttgttgtctcattcaaggagcaaatgcatactgatgttctcgttaaacctggtgaagaagctccacccatacctacccacaaagccgttctggcggcaagatcaaaggtcttcaggaacatgttagattctgatgaatgcaagacctcccccgaggaatcaatcactctccctgatttgtcccacgacgaactcaaatctcttctcgagttcctctacagcggtaacctaaaagctccatacaatcaataccgatccctatatctggctgcagataagtacgacatttcatatctgcaagacgtatgccgtaaccatttcatcgcatctctgagctctaggaacgtcctagacatcttagagctcgccagtataccttgtgacacaatcttgaaagacgcggctatcaatcatattgtcaaacatatggaagaagtggttgttcccatgaaatatgagacgtttgtgcagaggaacccggatctaagcgtggagatcactcgggcttatctgagagagaccaaagccaaagccaaagatcatggagctcctctaaatggtaatactcgcccacgcatctggtga

SEQ ID NO: 80165 - protein, 207 aa, Arabidopsis thaliana
  peptide (1)..(207): Ceres Seq. ID no. 12654653
MTEAEQKAAFLGGLVVSFKEQMHTDVLVKPGEEAPPIPTHKAVLAARSKVFRNMLDSDECKTSPEESITLPDLSHDELKSLLEFLYSGNLKAPYNQYRSLYLAADKYDISYLQDVCRNHFIASLSSRNVLDILELASIPCDTILKDAAINHIVKHMEEVVVPMKYETFVQRNPDLSVEITRAYLRETKAKAKDHGAPLNGNTRPRIW

SEQ ID NO: 80166 - protein, 186 aa, Arabidopsis thaliana
  peptide (1)..(186): Ceres Seq. ID no. 12654654
MHTDVLVKPGEEAPPIPTHKAVLAARSKVFRNMLDSDECKTSPEESITLPDLSHDELKSLLEFLYSGNLKAPYNQYRSLYLAADKYDISYLQDVCRNHFIASLSSRNVLDILELASIPCDTILKDAAINHIVKHMEEVVVPMKYETFVQRNPDLSVEITRAYLRETKAKAKDHGAPLNGNTRPRIW

SEQ ID NO: 80167 - protein, 154 aa, Arabidopsis thaliana
  peptide (1)..(154): Ceres Seq. ID no. 12654655
MLDSDECKTSPEESITLPDLSHDELKSLLEFLYSGNLKAPYNQYRSLYLAADKYDISYLQDVCRNHFIASLSSRNVLDILELASIPCDTILKDAAINHIVKHMEEVVVPMKYETFVQRNPDLSVEITRAYLRETKAKAKDHGAPLNGNTRPRIW

SEQ ID NO: 80168 - DNA, 1452 bp, Arabidopsis thaliana
  misc_feature (1)..(1452): Ceres Seq. ID no. 12654660
  misc_feature (1)..(1452): Ortholog of  Ceres SEQ ID NO 13654989 as cited in SEQ ID NO 63117
atgggaggtcaaagctcaaagattggtacatgttgttcacacaagactactgctcttgaagctccagatgttgaaaacaaagagaatggtgaggtaaacggtgtgcattcttttcgtgaatactcactagaacagcttaagatcgccacctcttgttttgctttggagaatgttgtatctgaacatggagaaacagctccaaatgttgtctatcaagggaaattggagaatcatatgaagattgctatcaagcgcttttctggaactgcctggcctgatcctcgccaattcctggaagaagcaagattggttggtcagctacgcagcaaaagaatggccaatttactcggttattgctgtgaaggcggcgagaggttacttgtggctgagtttatgcctaatgagacactagccaaacaccttttccactgggatacagagccaatgaaatgggcgatgcgactaagggttgctctatacatttcagaagctcttgaatactgtagtaacaatggacacacgctatatcatgatctcaatgcttacagagttttatttgacgaggaatgtaatccaagactttcaacatttgggttaatgaagaatagtcgggatgggaaaagttatagcacaaatcttgcttttaccccacctgagtatctacgaactgggagaatcacagcagagagtgtgatttacagttttggcactcttctgcttgatcttctcaccggaaagcatattcctcctagccatgcccttgatttgattcgagacagaaatcttcagactctaaccgattcctgcttggagggacaattttcagacagtgatggtacggagttagtacgcctgacatcttgttgtcttcagtatgaagctcgtgagcgaccaaacataaaatctttggtcactgcactgatatctctccagaaagacacagaggttctgtctcatgttctaatgggtctgcctcaaagtggtacttttgcgtcacctccgtctccttttgctgaggcttgctcgggaaaagacctgacgtctatggttgagatcttggaaaaaattggttacaaagacgatgaagatctttcgtttatgtggacggaacagatgcaagaagctataaactcgaagaaaaaaggtgatattgcatttagaagaaaagactttagtgaagccattgagttttacacgcagtttcttgatttgggaatgatctctgcaacagtcttggtgcggcgaagtcaaagttacctaatgagtaacatggcgaaagaagctttagatgatgcaatgaaggctcaaggcatttctcctgtttggtatgttgcattgtatctccagtctgctgctctttctgtcctgggaatggagaaggaatctcaaatcgcacttaccgaaggatccattcttgaagccagaaagatttcagcttccacacagaactaa

SEQ ID NO: 80169 - protein, 483 aa, Arabidopsis thaliana
  peptide (1)..(483): Ceres Seq. ID no. 12654661
MGGQSSKIGTCCSHKTTALEAPDVENKENGEVNGVHSFREYSLEQLKIATSCFALENVVSEHGETAPNVVYQGKLENHMKIAIKRFSGTAWPDPRQFLEEARLVGQLRSKRMANLLGYCCEGGERLLVAEFMPNETLAKHLFHWDTEPMKWAMRLRVALYISEALEYCSNNGHTLYHDLNAYRVLFDEECNPRLSTFGLMKNSRDGKSYSTNLAFTPPEYLRTGRITAESVIYSFGTLLLDLLTGKHIPPSHALDLIRDRNLQTLTDSCLEGQFSDSDGTELVRLTSCCLQYEARERPNIKSLVTALISLQKDTEVLSHVLMGLPQSGTFASPPSPFAEACSGKDLTSMVEILEKIGYKDDEDLSFMWTEQMQEAINSKKKGDIAFRRKDFSEAIEFYTQFLDLGMISATVLVRRSQSYLMSNMAKEALDDAMKAQGISPVWYVALYLQSAALSVLGMEKESQIALTEGSILEARKISASTQN

SEQ ID NO: 80170 - protein, 405 aa, Arabidopsis thaliana
  peptide (1)..(405): Ceres Seq. ID no. 12654662
MKIAIKRFSGTAWPDPRQFLEEARLVGQLRSKRMANLLGYCCEGGERLLVAEFMPNETLAKHLFHWDTEPMKWAMRLRVALYISEALEYCSNNGHTLYHDLNAYRVLFDEECNPRLSTFGLMKNSRDGKSYSTNLAFTPPEYLRTGRITAESVIYSFGTLLLDLLTGKHIPPSHALDLIRDRNLQTLTDSCLEGQFSDSDGTELVRLTSCCLQYEARERPNIKSLVTALISLQKDTEVLSHVLMGLPQSGTFASPPSPFAEACSGKDLTSMVEILEKIGYKDDEDLSFMWTEQMQEAINSKKKGDIAFRRKDFSEAIEFYTQFLDLGMISATVLVRRSQSYLMSNMAKEALDDAMKAQGISPVWYVALYLQSAALSVLGMEKESQIALTEGSILEARKISASTQN

SEQ ID NO: 80171 - protein, 372 aa, Arabidopsis thaliana
  peptide (1)..(372): Ceres Seq. ID no. 12654663
MANLLGYCCEGGERLLVAEFMPNETLAKHLFHWDTEPMKWAMRLRVALYISEALEYCSNNGHTLYHDLNAYRVLFDEECNPRLSTFGLMKNSRDGKSYSTNLAFTPPEYLRTGRITAESVIYSFGTLLLDLLTGKHIPPSHALDLIRDRNLQTLTDSCLEGQFSDSDGTELVRLTSCCLQYEARERPNIKSLVTALISLQKDTEVLSHVLMGLPQSGTFASPPSPFAEACSGKDLTSMVEILEKIGYKDDEDLSFMWTEQMQEAINSKKKGDIAFRRKDFSEAIEFYTQFLDLGMISATVLVRRSQSYLMSNMAKEALDDAMKAQGISPVWYVALYLQSAALSVLGMEKESQIALTEGSILEARKISASTQN

SEQ ID NO: 80172 - DNA, 1017 bp, Arabidopsis thaliana
  misc_feature (1)..(1017): Ceres Seq. ID no. 12654738
  misc_feature (1)..(1017): Ortholog of  Ceres SEQ ID NO 14311812 as cited in SEQ ID NO 51566
ctcctctcttttccaaccaattctcttctttcttgtgtgttcacattcaaagaaaatggataatcacacagctaaagacattggtatgaagagaagtgcttctgagctggctctacaagagtatctcactacaagccctctagacccttgtttcgacctcatgaaccgggattacacttgtgagttaagagatagtcttttgtggtctgagggattgtttccggctggaccttttcgcgatgcacagtcctcaatctgcgagaatctgtcagctgatagtccagtgtcagccaataaacctgaggtaagaggaggagttaggagaaccacaagtggatcttctcatgttaactctgatgacgaagatgccgagacagaagcagggcaatctgaaatgactaatgatcccaatgatctgaaacgtattagaaggatgaactcaaacagggaatcagcaaagaggtcgaggagaaggaagcaagagtacttggtagatcttgagactcaggttgattctttgaaaggcgataactcaacactgtacaagcagctcatagacgcaacacaacagtttcgtagcgctggaacaaataacagagttctcaaatcagatgttgaaactctgagagtcaaggtgaaactagcagaagatttggtagcgagagggtcactcactagcagcttgaatcaacttctacaaactcatctaagtccaccatcacactccatcagcagtctgcactacacgggaaatacctcgcccgccattacagtccacagtgaccaatctttgttccctggaatgacactttctggacagaactcaagccctggacttggtaatgtatccagtgaagctgttagctgcgtctcagacatctggccatgactctctttcttcagaacatgtaatgatcactcagcgaatttcctgtatgtgtttcgctatagaactagaaacatataatgaaagcagcatgttcgttaaataaactcaagtttcgtcaacatatactt

SEQ ID NO: 80173 - protein, 295 aa, Arabidopsis thaliana
  peptide (1)..(295): Ceres Seq. ID no. 12654739
SSLFQPILFFLVCSHSKKMDNHTAKDIGMKRSASELALQEYLTTSPLDPCFDLMNRDYTCELRDSLLWSEGLFPAGPFRDAQSSICENLSADSPVSANKPEVRGGVRRTTSGSSHVNSDDEDAETEAGQSEMTNDPNDLKRIRRMNSNRESAKRSRRRKQEYLVDLETQVDSLKGDNSTLYKQLIDATQQFRSAGTNNRVLKSDVETLRVKVKLAEDLVARGSLTSSLNQLLQTHLSPPSHSISSLHYTGNTSPAITVHSDQSLFPGMTLSGQNSSPGLGNVSSEAVSCVSDIWP

SEQ ID NO: 80174 - protein, 277 aa, Arabidopsis thaliana
  peptide (1)..(277): Ceres Seq. ID no. 12654740
MDNHTAKDIGMKRSASELALQEYLTTSPLDPCFDLMNRDYTCELRDSLLWSEGLFPAGPFRDAQSSICENLSADSPVSANKPEVRGGVRRTTSGSSHVNSDDEDAETEAGQSEMTNDPNDLKRIRRMNSNRESAKRSRRRKQEYLVDLETQVDSLKGDNSTLYKQLIDATQQFRSAGTNNRVLKSDVETLRVKVKLAEDLVARGSLTSSLNQLLQTHLSPPSHSISSLHYTGNTSPAITVHSDQSLFPGMTLSGQNSSPGLGNVSSEAVSCVSDIWP

SEQ ID NO: 80175 - protein, 267 aa, Arabidopsis thaliana
  peptide (1)..(267): Ceres Seq. ID no. 12654741
MKRSASELALQEYLTTSPLDPCFDLMNRDYTCELRDSLLWSEGLFPAGPFRDAQSSICENLSADSPVSANKPEVRGGVRRTTSGSSHVNSDDEDAETEAGQSEMTNDPNDLKRIRRMNSNRESAKRSRRRKQEYLVDLETQVDSLKGDNSTLYKQLIDATQQFRSAGTNNRVLKSDVETLRVKVKLAEDLVARGSLTSSLNQLLQTHLSPPSHSISSLHYTGNTSPAITVHSDQSLFPGMTLSGQNSSPGLGNVSSEAVSCVSDIWP

SEQ ID NO: 80176 - DNA, 1578 bp, Arabidopsis thaliana
  misc_feature (1)..(1578): Ceres Seq. ID no. 12654757
  misc_feature (1)..(1578): Ortholog of  Ceres SEQ ID NO 12614670 as cited in SEQ ID NO 68565
atggagagtttggttgttcatacggtaaatgcaatttggtgcatagttattgtcggaatcttcagcgtaggttatcatgtgtatggaagagcggtggtggagcagtggaggatgcggaggagtttaaagttgcaaggcgtgaagggtcctccaccgtcgatctttaacggcaatgtgtcggagatgcaacggattcagtcggaggctaaacactgttccggcgataacatcatttctcatgactattcttcttctctatttcctcatttcgatcactggcgaaaacaatacggaaggatttacacatactcaacggggttaaagcagcacctttacataaaccacccggaaatggtgaaggagcttagccaaaccaacacacttaaccttggtagaatcactcacatcaccaaacgccttaaccccattctcggcaatggcatcatcacctctaatgggcctcattgggcccatcaacgtcgtatcattgcctatgagtttacccacgacaaaatcaagggaatggttggtttaatggtggaatctgccatgccaatgttgaacaaatgggaagagatggtgaaaagaggaggagaaatgggttgtgacataagagtggacgaagaccttaaggatgtctcagctgatgtcatcgctaaggcttgctttgggagctctttttcaaaaggcaaagcaatattctctatgattagggatcttttaaccgccattactaaacgaagcgtcctcttcagattcaatggcttcactgatatggtgtttggaagtaagaagcatggtgatgtggatattgatgcgcttgagatggaattagaatcttctatatgggaaacggttaaggagagggaaattgaatgtaaggatactcacaagaaggatctaatgcagttgatactcgagggagcgatgcgaagctgcgatggtaacttgtgggacaagtcagcctatagacggtttgtggtggacaattgcaagagcatctatttcgccggacatgattcaaccgcagtctcagtgtcttggtgccttatgctcctcgctctcaatcctagttggcaggttaaaattcgcgatgaaatcttgagttcttgcaagaatggcattcccgacgcagaatcaattcctaatctcaaaacggtgacaatggtaatacaagaaacaatgagactatacccaccagcaccaatcgtgggaagagaagcatccaaagacataagacttggagaccttgtggtgccaaaaggagtgtgcatttggacactcattcctgccttacaccgagaccccgagatctggggaccagacgcaaacgacttcaagccagagaggtttagtgagggaatctctaaggcttgcaaataccctcagtcatacatcccatttggccttggaccaagaacatgcgtaggcaaaaactttggtatgatggaagtgaaagtgcttgtttcacttattgtctcaaagttcagttttactctttccccgacttatcagcactctccaagccataaactccttgtagagcctcaacatggtgttgtcattagggttgtttga

SEQ ID NO: 80177 - protein, 525 aa, Arabidopsis thaliana
  peptide (1)..(525): Ceres Seq. ID no. 12654758
MESLVVHTVNAIWCIVIVGIFSVGYHVYGRAVVEQWRMRRSLKLQGVKGPPPSIFNGNVSEMQRIQSEAKHCSGDNIISHDYSSSLFPHFDHWRKQYGRIYTYSTGLKQHLYINHPEMVKELSQTNTLNLGRITHITKRLNPILGNGIITSNGPHWAHQRRIIAYEFTHDKIKGMVGLMVESAMPMLNKWEEMVKRGGEMGCDIRVDEDLKDVSADVIAKACFGSSFSKGKAIFSMIRDLLTAITKRSVLFRFNGFTDMVFGSKKHGDVDIDALEMELESSIWETVKEREIECKDTHKKDLMQLILEGAMRSCDGNLWDKSAYRRFVVDNCKSIYFAGHDSTAVSVSWCLMLLALNPSWQVKIRDEILSSCKNGIPDAESIPNLKTVTMVIQETMRLYPPAPIVGREASKDIRLGDLVVPKGVCIWTLIPALHRDPEIWGPDANDFKPERFSEGISKACKYPQSYIPFGLGPRTCVGKNFGMMEVKVLVSLIVSKFSFTLSPTYQHSPSHKLLVEPQHGVVIRVV

SEQ ID NO: 80178 - protein, 488 aa, Arabidopsis thaliana
  peptide (1)..(488): Ceres Seq. ID no. 12654759
MRRSLKLQGVKGPPPSIFNGNVSEMQRIQSEAKHCSGDNIISHDYSSSLFPHFDHWRKQYGRIYTYSTGLKQHLYINHPEMVKELSQTNTLNLGRITHITKRLNPILGNGIITSNGPHWAHQRRIIAYEFTHDKIKGMVGLMVESAMPMLNKWEEMVKRGGEMGCDIRVDEDLKDVSADVIAKACFGSSFSKGKAIFSMIRDLLTAITKRSVLFRFNGFTDMVFGSKKHGDVDIDALEMELESSIWETVKEREIECKDTHKKDLMQLILEGAMRSCDGNLWDKSAYRRFVVDNCKSIYFAGHDSTAVSVSWCLMLLALNPSWQVKIRDEILSSCKNGIPDAESIPNLKTVTMVIQETMRLYPPAPIVGREASKDIRLGDLVVPKGVCIWTLIPALHRDPEIWGPDANDFKPERFSEGISKACKYPQSYIPFGLGPRTCVGKNFGMMEVKVLVSLIVSKFSFTLSPTYQHSPSHKLLVEPQHGVVIRVV

SEQ ID NO: 80179 - protein, 464 aa, Arabidopsis thaliana
  peptide (1)..(464): Ceres Seq. ID no. 12654760
MQRIQSEAKHCSGDNIISHDYSSSLFPHFDHWRKQYGRIYTYSTGLKQHLYINHPEMVKELSQTNTLNLGRITHITKRLNPILGNGIITSNGPHWAHQRRIIAYEFTHDKIKGMVGLMVESAMPMLNKWEEMVKRGGEMGCDIRVDEDLKDVSADVIAKACFGSSFSKGKAIFSMIRDLLTAITKRSVLFRFNGFTDMVFGSKKHGDVDIDALEMELESSIWETVKEREIECKDTHKKDLMQLILEGAMRSCDGNLWDKSAYRRFVVDNCKSIYFAGHDSTAVSVSWCLMLLALNPSWQVKIRDEILSSCKNGIPDAESIPNLKTVTMVIQETMRLYPPAPIVGREASKDIRLGDLVVPKGVCIWTLIPALHRDPEIWGPDANDFKPERFSEGISKACKYPQSYIPFGLGPRTCVGKNFGMMEVKVLVSLIVSKFSFTLSPTYQHSPSHKLLVEPQHGVVIRVV

SEQ ID NO: 80180 - DNA, 1788 bp, Arabidopsis thaliana
  misc_feature (1)..(1788): Ceres Seq. ID no. 12654761
  misc_feature (1)..(1788): Ortholog of  Ceres SEQ ID NO 12614670 as cited in SEQ ID NO 68565
agtgctcgactatacatatagccaaagaagagcagaaaaatcaaagtcgtgagttcagaagctataacaaaatttctaagaaaaagaaagataagaaaatggagaattttatggtagagatggccaagaccatttcgtggatagttgtaataggagtgttaggtttagggattcgtgtttacggtaaagtgatggcggagcaatggaggatgcggaggaagctgacgatgcagggcgtgaagggtcctccgccgtcgctatttcgtggaaacgtgccggagatgcaaaaaatccagtcacaaataatgagtaactctaaacactactccggtgataatatcatcgcccatgactacacttcttctctctttccatatctcgaccactggcgaaaacaatacgggagagtgtacacgtattcgacgggggtgaagcaacacttgtacatgaaccacccggagttggtgaaagaacttaaccaagccaacactcttaaccttggcaaagtctcttacgtcaccaaacgccttaaatccattcttggccgtggtgttatcacctctaatgggcctcattgggcccatcaacgtcgtatcattgcacctgagtttttcctcgacaaagtcaagggaatggtgggattggtggtggaatcagcgatgccaatgctgagtaaatgggaagagatgatgaaaagagaaggagaaatggtgtgtgacataattgtagacgaagacctaagagctgcctctgctgacgttatctctagagcttgctttgggagctctttctccaaaggcaaagagatcttctctaagcttagatgtcttcaaaaggccatcactcacaacaacatcctcttcagcctcaatggcttcactgatgttgtgttcgggactaagaagcatgggaacgggaagattgatgagctagagagacacattgagtctttgatatgggaaaccgttaaagaaagagaaagggaatgtgtgggagatcacaagaaggatctaatgcagttgatactagaaggggccaggagtagttgtgatggcaacttggaggacaagacacaatcttacaaaagtttcgtggtggacaattgcaagagcatctattttgccgggcatgagaccagtgcggttgctgtctcttggtgtcttatgctcctcgctctcaacccttcttggcaaactcgtatccgcgatgaagtctttcttcattgcaagaacggtatacctgacgcagactctatttccaacctcaaaacggtgacaatggttatccaggaaacgttgaggctatacccaccagcagcattcgtgtcgagagaagcccttgaggacacaaaactcggaaacctcgtggtgccaaagggagtgtgcatctggacgttgatccctacattgcacagagaccctgagatatggggagctgacgcaaatgaattcaatccagaaagatttagcgaaggagtctctaaagcctgcaaacaccctcagtcattcgtcccatttggcttagggacaaggttgtgtttaggaaagaattttggtatgatggagctcaaggttcttgtctcacttattgtgtcaaggtttagctttactctctctcccacatatcaacactctccggtgtttagaatgcttgtagagcctcaacatggtgttgtcattagagttctgagacaataagatatgtcgttagcttatggttttagttttaatcctgtgtaataataagatattattacactatagtactataatagtattttctttggta

SEQ ID NO: 80181 - protein, 564 aa, Arabidopsis thaliana
  peptide (1)..(564): Ceres Seq. ID no. 12654762
CSTIHIAKEEQKNQSREFRSYNKISKKKKDKKMENFMVEMAKTISWIVVIGVLGLGIRVYGKVMAEQWRMRRKLTMQGVKGPPPSLFRGNVPEMQKIQSQIMSNSKHYSGDNIIAHDYTSSLFPYLDHWRKQYGRVYTYSTGVKQHLYMNHPELVKELNQANTLNLGKVSYVTKRLKSILGRGVITSNGPHWAHQRRIIAPEFFLDKVKGMVGLVVESAMPMLSKWEEMMKREGEMVCDIIVDEDLRAASADVISRACFGSSFSKGKEIFSKLRCLQKAITHNNILFSLNGFTDVVFGTKKHGNGKIDELERHIESLIWETVKERERECVGDHKKDLMQLILEGARSSCDGNLEDKTQSYKSFVVDNCKSIYFAGHETSAVAVSWCLMLLALNPSWQTRIRDEVFLHCKNGIPDADSISNLKTVTMVIQETLRLYPPAAFVSREALEDTKLGNLVVPKGVCIWTLIPTLHRDPEIWGADANEFNPERFSEGVSKACKHPQSFVPFGLGTRLCLGKNFGMMELKVLVSLIVSRFSFTLSPTYQHSPVFRMLVEPQHGVVIRVLRQ

SEQ ID NO: 80182 - protein, 532 aa, Arabidopsis thaliana
  peptide (1)..(532): Ceres Seq. ID no. 12654763
MENFMVEMAKTISWIVVIGVLGLGIRVYGKVMAEQWRMRRKLTMQGVKGPPPSLFRGNVPEMQKIQSQIMSNSKHYSGDNIIAHDYTSSLFPYLDHWRKQYGRVYTYSTGVKQHLYMNHPELVKELNQANTLNLGKVSYVTKRLKSILGRGVITSNGPHWAHQRRIIAPEFFLDKVKGMVGLVVESAMPMLSKWEEMMKREGEMVCDIIVDEDLRAASADVISRACFGSSFSKGKEIFSKLRCLQKAITHNNILFSLNGFTDVVFGTKKHGNGKIDELERHIESLIWETVKERERECVGDHKKDLMQLILEGARSSCDGNLEDKTQSYKSFVVDNCKSIYFAGHETSAVAVSWCLMLLALNPSWQTRIRDEVFLHCKNGIPDADSISNLKTVTMVIQETLRLYPPAAFVSREALEDTKLGNLVVPKGVCIWTLIPTLHRDPEIWGADANEFNPERFSEGVSKACKHPQSFVPFGLGTRLCLGKNFGMMELKVLVSLIVSRFSFTLSPTYQHSPVFRMLVEPQHGVVIRVLRQ

SEQ ID NO: 80183 - protein, 528 aa, Arabidopsis thaliana
  peptide (1)..(528): Ceres Seq. ID no. 12654764
MVEMAKTISWIVVIGVLGLGIRVYGKVMAEQWRMRRKLTMQGVKGPPPSLFRGNVPEMQKIQSQIMSNSKHYSGDNIIAHDYTSSLFPYLDHWRKQYGRVYTYSTGVKQHLYMNHPELVKELNQANTLNLGKVSYVTKRLKSILGRGVITSNGPHWAHQRRIIAPEFFLDKVKGMVGLVVESAMPMLSKWEEMMKREGEMVCDIIVDEDLRAASADVISRACFGSSFSKGKEIFSKLRCLQKAITHNNILFSLNGFTDVVFGTKKHGNGKIDELERHIESLIWETVKERERECVGDHKKDLMQLILEGARSSCDGNLEDKTQSYKSFVVDNCKSIYFAGHETSAVAVSWCLMLLALNPSWQTRIRDEVFLHCKNGIPDADSISNLKTVTMVIQETLRLYPPAAFVSREALEDTKLGNLVVPKGVCIWTLIPTLHRDPEIWGADANEFNPERFSEGVSKACKHPQSFVPFGLGTRLCLGKNFGMMELKVLVSLIVSRFSFTLSPTYQHSPVFRMLVEPQHGVVIRVLRQ

SEQ ID NO: 80184 - DNA, 1344 bp, Arabidopsis thaliana
  misc_feature (1)..(1344): Ceres Seq. ID no. 12654769
  misc_feature (1)..(1344): Ortholog of  Ceres SEQ ID NO 12609146 as cited in SEQ ID NO 52118
  misc_feature (1)..(1344): Ortholog of  Ceres SEQ ID NO 13594056 as cited in SEQ ID NO 55691
  misc_feature (1)..(1344): Ortholog of  Ceres SEQ ID NO 13638136 as cited in SEQ ID NO 58644
  misc_feature (1)..(1344): Ortholog of  Ceres SEQ ID NO 13596868 as cited in SEQ ID NO 62806
  misc_feature (1)..(1344): Ortholog of  Ceres SEQ ID NO 12587035 as cited in SEQ ID NO 63605
  misc_feature (1)..(1344): Ortholog of  Ceres SEQ ID NO 14301886 as cited in SEQ ID NO 64201
  misc_feature (1)..(1344): Ortholog of  Ceres SEQ ID NO 13595885 as cited in SEQ ID NO 69265
  misc_feature (1)..(1344): Ortholog of  Ceres SEQ ID NO 12566239 as cited in SEQ ID NO 0
  misc_feature (1)..(1344): Ortholog of  Ceres SEQ ID NO 13599119 as cited in SEQ ID NO 0
  misc_feature (1)..(1344): Ortholog of  Ceres SEQ ID NO 15179992 as cited in SEQ ID NO 0
atgggatatatggacttggcgttatcttattcgaatcaaatgcggattgttgaagctcccgcaagcggaggtggtctcagtcagaatggaaaatttagctatggatatgcaagctcagctggaaaaaggtcatctatggaagacttttttgagacaaggatcgacggtatcgatggagaaatcgttggtctatttggagtctttgatggtcatggtggatccagagcagctgagtatgtgaagcgtcaccttttcagcaatcttattactcatcctaagttcatctctgacaccaaatctgcaatagctgatgcctatactcatacagactctgaacttctcaagtcagaaaatagtcatactagagatgctggttcaactgcttccacagctattctcgttggtgatcgtttacttgttgctaatgttggtgattccagagctgttatatgtcgtggcggaaatgcatttgctgtttcaagagaccataaacctgaccaaagtgatgagcgtgaacggattgagaatgctggtggttttgtgatgtgggcagggacttggagagttggaggagttcttgcagtttcccgcgcgtttggtgatcgattgcttaaacaatatgttgttgctgatccagaaattcaggaagagaagattgatgattctcttgagtttctgattcttgccagcgatggactatgggatgttttctccaatgaggaagcagttgcagtagtaaaagaagttgaagatccggaagagtccaccaagaaacttgtgggagaagcaattaaaagaggaagtgcagacaatattacatgtgtagttgtacgtttcttggagagcaagtcagctaacaacaacggttccagctcatccgaggaagcaaatcaagtgccaaccgctgttagaaatgactcagaccacaagatctcagccaaagaaaccaatcaagaccataccacagtaaacaaggacttggaccgcaacactgacagtcaaagcctgaaccaaaagccgattgcagctagaagtgccgataactcgaaccaaaaaccaatcgcgactacagcaacaggacacagcgtttcttcagaacagagtggtttaaccggggaaaagagtcaaatgccaatcaaaattcgcagcgactcagagcctaagagttcagccaaggtacctaatcaaacgcaaagcacagtacacaacgacttggacagtagcactgcgaagaagccggccgcaacagaacagagcggatcaacgggtgaaaggaatcgaaaaccaatcaaagttcatagtgattccgccgcaagaaagacaactccctctatctttaactaa

SEQ ID NO: 80185 - protein, 447 aa, Arabidopsis thaliana
  peptide (1)..(447): Ceres Seq. ID no. 12654770
MGYMDLALSYSNQMRIVEAPASGGGLSQNGKFSYGYASSAGKRSSMEDFFETRIDGIDGEIVGLFGVFDGHGGSRAAEYVKRHLFSNLITHPKFISDTKSAIADAYTHTDSELLKSENSHTRDAGSTASTAILVGDRLLVANVGDSRAVICRGGNAFAVSRDHKPDQSDERERIENAGGFVMWAGTWRVGGVLAVSRAFGDRLLKQYVVADPEIQEEKIDDSLEFLILASDGLWDVFSNEEAVAVVKEVEDPEESTKKLVGEAIKRGSADNITCVVVRFLESKSANNNGSSSSEEANQVPTAVRNDSDHKISAKETNQDHTTVNKDLDRNTDSQSLNQKPIAARSADNSNQKPIATTATGHSVSSEQSGLTGEKSQMPIKIRSDSEPKSSAKVPNQTQSTVHNDLDSSTAKKPAATEQSGSTGERNRKPIKVHSDSAARKTTPSIFN

SEQ ID NO: 80186 - protein, 444 aa, Arabidopsis thaliana
  peptide (1)..(444): Ceres Seq. ID no. 12654771
MDLALSYSNQMRIVEAPASGGGLSQNGKFSYGYASSAGKRSSMEDFFETRIDGIDGEIVGLFGVFDGHGGSRAAEYVKRHLFSNLITHPKFISDTKSAIADAYTHTDSELLKSENSHTRDAGSTASTAILVGDRLLVANVGDSRAVICRGGNAFAVSRDHKPDQSDERERIENAGGFVMWAGTWRVGGVLAVSRAFGDRLLKQYVVADPEIQEEKIDDSLEFLILASDGLWDVFSNEEAVAVVKEVEDPEESTKKLVGEAIKRGSADNITCVVVRFLESKSANNNGSSSSEEANQVPTAVRNDSDHKISAKETNQDHTTVNKDLDRNTDSQSLNQKPIAARSADNSNQKPIATTATGHSVSSEQSGLTGEKSQMPIKIRSDSEPKSSAKVPNQTQSTVHNDLDSSTAKKPAATEQSGSTGERNRKPIKVHSDSAARKTTPSIFN

SEQ ID NO: 80187 - protein, 434 aa, Arabidopsis thaliana
  peptide (1)..(434): Ceres Seq. ID no. 12654772
MRIVEAPASGGGLSQNGKFSYGYASSAGKRSSMEDFFETRIDGIDGEIVGLFGVFDGHGGSRAAEYVKRHLFSNLITHPKFISDTKSAIADAYTHTDSELLKSENSHTRDAGSTASTAILVGDRLLVANVGDSRAVICRGGNAFAVSRDHKPDQSDERERIENAGGFVMWAGTWRVGGVLAVSRAFGDRLLKQYVVADPEIQEEKIDDSLEFLILASDGLWDVFSNEEAVAVVKEVEDPEESTKKLVGEAIKRGSADNITCVVVRFLESKSANNNGSSSSEEANQVPTAVRNDSDHKISAKETNQDHTTVNKDLDRNTDSQSLNQKPIAARSADNSNQKPIATTATGHSVSSEQSGLTGEKSQMPIKIRSDSEPKSSAKVPNQTQSTVHNDLDSSTAKKPAATEQSGSTGERNRKPIKVHSDSAARKTTPSIFN

SEQ ID NO: 80188 - DNA, 1491 bp, Arabidopsis thaliana
  misc_feature (1)..(1491): Ceres Seq. ID no. 12654773
  misc_feature (1)..(1491): Ortholog of  Ceres SEQ ID NO 13594209 as cited in SEQ ID NO 59089
  misc_feature (1)..(1491): Ortholog of  Ceres SEQ ID NO 14308027 as cited in SEQ ID NO 65826
  misc_feature (1)..(1491): Ortholog of  Ceres SEQ ID NO 13502874 as cited in SEQ ID NO 66298
  misc_feature (1)..(1491): Ortholog of  Ceres SEQ ID NO 12614124 as cited in SEQ ID NO 68392
atggaaatcataatcatctctctctgcctagcaacaatcctagcctttcttctcctaaaaccacttctgaatcgaaccgttgccaaagacaacctaccaccgtctccgtggcgagttccggtaatcggaaacctccaccagctaagcctccaccctcaccgctcccttcgttccctcagccaccgctacgggccactcatgctccttcattttggccgtgtcccgatcctcgtagtctcttcctctgacgtagctcatgacctcatgaaaacacacgaccttaaggttgcgaaccgcccgcgattaaaagtgattgaaacaatcctcaacggtgggagagaagtggttttttccccttacggagactattggaggcagattaagactgtatgcgtcgtccatctactcaataagaaaatggtacaatcctttgcaaaagtaagagaagaagagagaagtgtaatgatggagaaggtcgagaaagcaagttccgattcttcaccactaaatctaagcaagcttcttataacacttacaagcgatgtggcaagtagagtttcttttgggaaaaaacatagcaacgaggcaagcatgagcgatttcaagaatcaagtgagaaaaatcactgagctggtaggcggatttccggttagcgaatatatcccgtgtttggcgtggatagatcaaattcgtggtctgtataatagagcggaggaagtgagtaaaatttttggagatcttatggataaagtggtgcaagagcatttagatgctacaaataaaccaacaaaggatttcgtcgatatattgttgtcctttgaaagacagagtaaagatggaatagaagttcgacgaagcgacattaagttcataatcttggatatatttttaggaggaacgacaacaactaactcactactagaatggacaatgacggagcttattagacatccggaatgcatgaagaaactccaagacgagattcgcggcgatgcgacaaaccttactatatatagatcacatgaagaagttgaagatatgaagtacttaaaagcggttattaaggagggtcttcggttacatcccccttttccattactagtactaagactattgactcaagatgtcaaattaaaaggatatgacatagctgcaggcacacaggtaataaccaatgcttgggctattcaaagagacattgtgacatgggggatagatgcagaagaatttaggccagagagacacttagattcacctctggactttcgaggaacaaatttcgaatacattccatttggatctggaagaaggatttgtcctggaattggatttgctatggctttggttgaggtgacactagccaaccttgtgaaccgatttaactggagaatggatgctcggctttcgggggatgaatatgatctagctgaagcaacgggaatcgatgtttgccgcaaatttcctcttattgtatttccatctaatgcctaa

SEQ ID NO: 80189 - protein, 496 aa, Arabidopsis thaliana
  peptide (1)..(496): Ceres Seq. ID no. 12654774
MEIIIISLCLATILAFLLLKPLLNRTVAKDNLPPSPWRVPVIGNLHQLSLHPHRSLRSLSHRYGPLMLLHFGRVPILVVSSSDVAHDLMKTHDLKVANRPRLKVIETILNGGREVVFSPYGDYWRQIKTVCVVHLLNKKMVQSFAKVREEERSVMMEKVEKASSDSSPLNLSKLLITLTSDVASRVSFGKKHSNEASMSDFKNQVRKITELVGGFPVSEYIPCLAWIDQIRGLYNRAEEVSKIFGDLMDKVVQEHLDATNKPTKDFVDILLSFERQSKDGIEVRRSDIKFIILDIFLGGTTTTNSLLEWTMTELIRHPECMKKLQDEIRGDATNLTIYRSHEEVEDMKYLKAVIKEGLRLHPPFPLLVLRLLTQDVKLKGYDIAAGTQVITNAWAIQRDIVTWGIDAEEFRPERHLDSPLDFRGTNFEYIPFGSGRRICPGIGFAMALVEVTLANLVNRFNWRMDARLSGDEYDLAEATGIDVCRKFPLIVFPSNA

SEQ ID NO: 80190 - protein, 430 aa, Arabidopsis thaliana
  peptide (1)..(430): Ceres Seq. ID no. 12654775
MLLHFGRVPILVVSSSDVAHDLMKTHDLKVANRPRLKVIETILNGGREVVFSPYGDYWRQIKTVCVVHLLNKKMVQSFAKVREEERSVMMEKVEKASSDSSPLNLSKLLITLTSDVASRVSFGKKHSNEASMSDFKNQVRKITELVGGFPVSEYIPCLAWIDQIRGLYNRAEEVSKIFGDLMDKVVQEHLDATNKPTKDFVDILLSFERQSKDGIEVRRSDIKFIILDIFLGGTTTTNSLLEWTMTELIRHPECMKKLQDEIRGDATNLTIYRSHEEVEDMKYLKAVIKEGLRLHPPFPLLVLRLLTQDVKLKGYDIAAGTQVITNAWAIQRDIVTWGIDAEEFRPERHLDSPLDFRGTNFEYIPFGSGRRICPGIGFAMALVEVTLANLVNRFNWRMDARLSGDEYDLAEATGIDVCRKFPLIVFPSNA

SEQ ID NO: 80191 - protein, 408 aa, Arabidopsis thaliana
  peptide (1)..(408): Ceres Seq. ID no. 12654776
MKTHDLKVANRPRLKVIETILNGGREVVFSPYGDYWRQIKTVCVVHLLNKKMVQSFAKVREEERSVMMEKVEKASSDSSPLNLSKLLITLTSDVASRVSFGKKHSNEASMSDFKNQVRKITELVGGFPVSEYIPCLAWIDQIRGLYNRAEEVSKIFGDLMDKVVQEHLDATNKPTKDFVDILLSFERQSKDGIEVRRSDIKFIILDIFLGGTTTTNSLLEWTMTELIRHPECMKKLQDEIRGDATNLTIYRSHEEVEDMKYLKAVIKEGLRLHPPFPLLVLRLLTQDVKLKGYDIAAGTQVITNAWAIQRDIVTWGIDAEEFRPERHLDSPLDFRGTNFEYIPFGSGRRICPGIGFAMALVEVTLANLVNRFNWRMDARLSGDEYDLAEATGIDVCRKFPLIVFPSNA

SEQ ID NO: 80192 - DNA, 1153 bp, Arabidopsis thaliana
  misc_feature (1)..(1153): Ceres Seq. ID no. 12654784
  misc_feature (1)..(1153): Ortholog of  Ceres SEQ ID NO 14315461 as cited in SEQ ID NO 57150
actcgaaaatagagagtcaaccacagagagagatatcaacaaatcacacacgccatgaaccaaaccaaaactaccaccgacgataacaaaaactccaaaccggccgaaaccgaatcaaccatcaccgtaccggaatggataaccgaaacaatcaacggtggctccttctgccacgtagatctcgagaccggaaccaacggctgggcttcaccaccaggcaacgtgttctctctccgctcacataactacttcaccgccacaaaacaaaaatctcccggcggcgattacctcctctctctcgccgccgtagactggctcaaatccaccacaaagaaactcgatcacatcctctctcgtcccgataaccgtgtaatccacgctttcaaaacatcccaatctcgtagcttcatcttcgccgttaatttccaggtcccagggaaagaacactacaacttggtcttctacttcgcaacacaaaaaccaatcccttccgattcactcctccacaaattcatcaatacagacgaagattcgtttcgcaacgagagattcaaaatcgttagcaatgttgtgaaaggtccttgggttgttaaagcagcagctgggaaatttggtgcatttgttgctgggaaggctatgaagtgtacttattatagaggagataattattttgaggttgatgttgatataagtagctcggcgattatgacggcgcttattaggtttatgttggggtatgttacgtatttaatggttgatattggttttgttgtggaagcgcaaacggcggaggagttgccggagagattgattggtggtgctaggatttgtcatatggagttgtcctcgtcgtttttggttgatgatgacgagaagaagagtttacagccacggcggagaatgatgggtgcggcggaagataacgacgatgagatttgagatttgagtgaaagaaaagcaggctacgtcaaaaaaaataaaaataggtcaaggtttttttttttttttttcatctaaaattaattaaatctcaaaagagtcattcctgaggaaggttgtttacgtaagtgatatggttggacatgaactttacgcggtaaattatccgctttaacatttgcactataagaaattaaagataaagaaaaacttg

SEQ ID NO: 80193 - protein, 294 aa, Arabidopsis thaliana
  peptide (1)..(294): Ceres Seq. ID no. 12654785
MNQTKTTTDDNKNSKPAETESTITVPEWITETINGGSFCHVDLETGTNGWASPPGNVFSLRSHNYFTATKQKSPGGDYLLSLAAVDWLKSTTKKLDHILSRPDNRVIHAFKTSQSRSFIFAVNFQVPGKEHYNLVFYFATQKPIPSDSLLHKFINTDEDSFRNERFKIVSNVVKGPWVVKAAAGKFGAFVAGKAMKCTYYRGDNYFEVDVDISSSAIMTALIRFMLGYVTYLMVDIGFVVEAQTAEELPERLIGGARICHMELSSSFLVDDDEKKSLQPRRRMMGAAEDNDDEI

SEQ ID NO: 80194 - DNA, 1704 bp, Arabidopsis thaliana
  misc_feature (1)..(1704): Ceres Seq. ID no. 12654811
  misc_feature (1)..(1704): Ortholog of  Ceres SEQ ID NO 13599900 as cited in SEQ ID NO 531
  misc_feature (1)..(1704): Ortholog of  Ceres SEQ ID NO 14310498 as cited in SEQ ID NO 55066
  misc_feature (1)..(1704): Ortholog of  Ceres SEQ ID NO 15176759 as cited in SEQ ID NO 59678
  misc_feature (1)..(1704): Ortholog of  Ceres SEQ ID NO 15172875 as cited in SEQ ID NO 60423
  misc_feature (1)..(1704): Ortholog of  Ceres SEQ ID NO 13659971 as cited in SEQ ID NO 67565
  misc_feature (1)..(1704): Ortholog of  Ceres SEQ ID NO 13500385 as cited in SEQ ID NO 67583
aagtcctttgcttcatttcttataaaactaaaccaccttcttcttcatcattcatcaccaatctatctcatattccatatactgaatatggactcattctacttctgtatatacacatgggatccaaacttaaactttaccctctcttaaatcactcatccgtttttcacccagacagtcgttaccaatcggcccctacaatggaggaagagcaacaacaacttcgtgttctcttcgcgaaatacgagatgggaaggttactaggcaaaggaacattcggaaaagtttattacggcaaagagataacaaccggagaaagcgttgcaatcaaaatcatcaacaaagatcaagtcaaacgtgaaggtatgatggaacaaatcaaacgagagatctcaatcatgagacttgttcgtcatccaaacatcgttgagttaaaagaagtcatggctacaaaaacaaagatcttctttatcatggaatacgttaaaggcggtgaacttttctccaagatcgttaaaggaaagcttaaagaagactctgctcgtaagtatttccaacaattaatctcagccgttgatttttgtcatagtagaggcgtttctcaccgagatctaaaaccggagaatctcttagttgacgagaacggagatcttaaggtttcagattttggtctctctgctttaccggaacagattttacaagacggtttgcttcatactcagtgtggaactccggcgtatgttgcaccggaggttttgaggaagaaaggttacgacggagctaaaggtgatatttggtcgtgtggtattatcttgtacgtgcttctcgctggattcttaccgtttcaagatgagaacctaatgaaaatgtatcggaagatcttcaaatcggagtttgagtatccgccgtggttttcaccggagtccaagaggttgatttcaaagcttttagttgttgatcctaacaaacggatctcgataccggcgattatgcgaacaccgtggtttcgtaaaaacatcaactctccgatcgagttcaagatcgatgagctcgagatccaaaacgtagaagacgaaacaccaacaacaacagcaacaacagcaacaacaacaacaacaccggtctcgccgaagttctttaacgcgtttgaattcatctcttctatgtcatcaggatttgatctatcaagtttgttcgagagtaagaggaagctgagatctatgtttacgtcacggtggtcggcgtcggagataatggggaagcttgaagggatagggaaagagatgaatatgaaggtgaagaggactaaagactttaaggtgaagttgtttgggaaaacggaagggaggaaaggacagatcgcggtgactgctgaggttttcgaggttgcgccggaagtcgccgtcgttgagttgtgtaagtcggcgggagatactttggagtataataggttgtatgaagaacatgtccggccagcgttggaggagatagtgtggtcgtggcacggtgataatcataataataatattgttaagagtaatggtaattatgttagtgatgaaaattctggtagtgactgctaagagaatgtaatgatagttatgtaaattaaactgtgtatttttgttaatcagttgttagattcaaggaagtttttgtatattgtgtatatagaagttgaggtttattttattctctttgagc

SEQ ID NO: 80195 - protein, 526 aa, Arabidopsis thaliana
  peptide (1)..(526): Ceres Seq. ID no. 12654812
VLCFISYKTKPPSSSSFITNLSHIPYTEYGLILLLYIHMGSKLKLYPLLNHSSVFHPDSRYQSAPTMEEEQQQLRVLFAKYEMGRLLGKGTFGKVYYGKEITTGESVAIKIINKDQVKREGMMEQIKREISIMRLVRHPNIVELKEVMATKTKIFFIMEYVKGGELFSKIVKGKLKEDSARKYFQQLISAVDFCHSRGVSHRDLKPENLLVDENGDLKVSDFGLSALPEQILQDGLLHTQCGTPAYVAPEVLRKKGYDGAKGDIWSCGIILYVLLAGFLPFQDENLMKMYRKIFKSEFEYPPWFSPESKRLISKLLVVDPNKRISIPAIMRTPWFRKNINSPIEFKIDELEIQNVEDETPTTTATTATTTTTPVSPKFFNAFEFISSMSSGFDLSSLFESKRKLRSMFTSRWSASEIMGKLEGIGKEMNMKVKRTKDFKVKLFGKTEGRKGQIAVTAEVFEVAPEVAVVELCKSAGDTLEYNRLYEEHVRPALEEIVWSWHGDNHNNNIVKSNGNYVSDENSGSDC

SEQ ID NO: 80196 - protein, 488 aa, Arabidopsis thaliana
  peptide (1)..(488): Ceres Seq. ID no. 12654813
MGSKLKLYPLLNHSSVFHPDSRYQSAPTMEEEQQQLRVLFAKYEMGRLLGKGTFGKVYYGKEITTGESVAIKIINKDQVKREGMMEQIKREISIMRLVRHPNIVELKEVMATKTKIFFIMEYVKGGELFSKIVKGKLKEDSARKYFQQLISAVDFCHSRGVSHRDLKPENLLVDENGDLKVSDFGLSALPEQILQDGLLHTQCGTPAYVAPEVLRKKGYDGAKGDIWSCGIILYVLLAGFLPFQDENLMKMYRKIFKSEFEYPPWFSPESKRLISKLLVVDPNKRISIPAIMRTPWFRKNINSPIEFKIDELEIQNVEDETPTTTATTATTTTTPVSPKFFNAFEFISSMSSGFDLSSLFESKRKLRSMFTSRWSASEIMGKLEGIGKEMNMKVKRTKDFKVKLFGKTEGRKGQIAVTAEVFEVAPEVAVVELCKSAGDTLEYNRLYEEHVRPALEEIVWSWHGDNHNNNIVKSNGNYVSDENSGSDC

SEQ ID NO: 80197 - protein, 460 aa, Arabidopsis thaliana
  peptide (1)..(460): Ceres Seq. ID no. 12654814
MEEEQQQLRVLFAKYEMGRLLGKGTFGKVYYGKEITTGESVAIKIINKDQVKREGMMEQIKREISIMRLVRHPNIVELKEVMATKTKIFFIMEYVKGGELFSKIVKGKLKEDSARKYFQQLISAVDFCHSRGVSHRDLKPENLLVDENGDLKVSDFGLSALPEQILQDGLLHTQCGTPAYVAPEVLRKKGYDGAKGDIWSCGIILYVLLAGFLPFQDENLMKMYRKIFKSEFEYPPWFSPESKRLISKLLVVDPNKRISIPAIMRTPWFRKNINSPIEFKIDELEIQNVEDETPTTTATTATTTTTPVSPKFFNAFEFISSMSSGFDLSSLFESKRKLRSMFTSRWSASEIMGKLEGIGKEMNMKVKRTKDFKVKLFGKTEGRKGQIAVTAEVFEVAPEVAVVELCKSAGDTLEYNRLYEEHVRPALEEIVWSWHGDNHNNNIVKSNGNYVSDENSGSDC

SEQ ID NO: 80198 - DNA, 1491 bp, Arabidopsis thaliana
  misc_feature (1)..(1491): Ceres Seq. ID no. 12654815
  misc_feature (1)..(1491): Ortholog of  Ceres SEQ ID NO 13594209 as cited in SEQ ID NO 59089
  misc_feature (1)..(1491): Ortholog of  Ceres SEQ ID NO 13502874 as cited in SEQ ID NO 66298
  misc_feature (1)..(1491): Ortholog of  Ceres SEQ ID NO 12614124 as cited in SEQ ID NO 68392
atgagtttgtggtatatcattgttgcattcgtcttcttttcaactataatcattgtaaggaacactagaaagacaaagaagaatctacctcccggacccccaagacttcctattattggaaacttgcaccaattgggatctaaacctcatagttcaatgttcaaattatccgaaaaatatggacctctaatggctctaaggtttggaagtgtgtctactgttgtggcttctacaccagagacagtaaaggaagttttaaaaacatttgacgcagaatgttgttcgcggccttatatgacttatcctgcaagacttacatacaatttaaaagatattggcttttgtccctacaccaaatattggagggaggtacgaaagatgacagttgttgaactctacactgcaaaaagggtacaatcatttcaacatacaagaaaagaagaagttgcatcactcgttgatttcatcacacaagctgcgtcattggagaaaccggttaacttgaacacgaagttaatgaaactatcaggaagtgtgatttgtagagttgtatttggtatcaatcttaaaggaagtaaacttgagaatctttatgaggaagttattcaaggaaccatggaggtggtggggagttttgcagcagcagattacttcccgatcattggtagaatcatcgataggatcacagggttacatagcaaatgtgagaagattttcaaggcaatggatgcattttttgatcaatctataaagcatcatctagaagatgagagtattaaggatgatatcattgacttgctcctcaagatggaaaggggagagattgaacttggggagtttcaacttactcgagacaacaccaaaggaattcttttcaatattcttaacgctggaatagacacttctgcacaagttatgacatgggtgatgacatatttgatttcaaacccaagagttatgaagaaagcgcaagccgaggtgagagaagttataaaaaacaaagacgatatcattgaggaagatatagaacgactcgaatatctgaaaatggtagttaaagaaacgtttagggtattaccgctcgttccacttctaattccaagagaggcttcaaaagatgtaaagattggaggttatgacattccaaagaaaacatggatccatgtcaacatatgggctattcataggaatccaaacgtttggaaagatccagaagctttcatccccgagaggtttatggataaccagattgattataagggtttgaactttgagtttttgccgtttggtagcggaaggagaatgtgccctggtatagggatgggtatggctttggtacacttgactcttatcaatcttctttaccgatttgattggaagcttccggaaggaatggaggtagaagatgttgatcttgaagaatcatatggacttgtctgtcctaagaaagttccacttcagcttatcccggtccttacccaatggagttga

SEQ ID NO: 80199 - protein, 496 aa, Arabidopsis thaliana
  peptide (1)..(496): Ceres Seq. ID no. 12654816
MSLWYIIVAFVFFSTIIIVRNTRKTKKNLPPGPPRLPIIGNLHQLGSKPHSSMFKLSEKYGPLMALRFGSVSTVVASTPETVKEVLKTFDAECCSRPYMTYPARLTYNLKDIGFCPYTKYWREVRKMTVVELYTAKRVQSFQHTRKEEVASLVDFITQAASLEKPVNLNTKLMKLSGSVICRVVFGINLKGSKLENLYEEVIQGTMEVVGSFAAADYFPIIGRIIDRITGLHSKCEKIFKAMDAFFDQSIKHHLEDESIKDDIIDLLLKMERGEIELGEFQLTRDNTKGILFNILNAGIDTSAQVMTWVMTYLISNPRVMKKAQAEVREVIKNKDDIIEEDIERLEYLKMVVKETFRVLPLVPLLIPREASKDVKIGGYDIPKKTWIHVNIWAIHRNPNVWKDPEAFIPERFMDNQIDYKGLNFEFLPFGSGRRMCPGIGMGMALVHLTLINLLYRFDWKLPEGMEVEDVDLEESYGLVCPKKVPLQLIPVLTQWS

SEQ ID NO: 80200 - protein, 444 aa, Arabidopsis thaliana
  peptide (1)..(444): Ceres Seq. ID no. 12654817
MFKLSEKYGPLMALRFGSVSTVVASTPETVKEVLKTFDAECCSRPYMTYPARLTYNLKDIGFCPYTKYWREVRKMTVVELYTAKRVQSFQHTRKEEVASLVDFITQAASLEKPVNLNTKLMKLSGSVICRVVFGINLKGSKLENLYEEVIQGTMEVVGSFAAADYFPIIGRIIDRITGLHSKCEKIFKAMDAFFDQSIKHHLEDESIKDDIIDLLLKMERGEIELGEFQLTRDNTKGILFNILNAGIDTSAQVMTWVMTYLISNPRVMKKAQAEVREVIKNKDDIIEEDIERLEYLKMVVKETFRVLPLVPLLIPREASKDVKIGGYDIPKKTWIHVNIWAIHRNPNVWKDPEAFIPERFMDNQIDYKGLNFEFLPFGSGRRMCPGIGMGMALVHLTLINLLYRFDWKLPEGMEVEDVDLEESYGLVCPKKVPLQLIPVLTQWS

SEQ ID NO: 80201 - protein, 433 aa, Arabidopsis thaliana
  peptide (1)..(433): Ceres Seq. ID no. 12654818
MALRFGSVSTVVASTPETVKEVLKTFDAECCSRPYMTYPARLTYNLKDIGFCPYTKYWREVRKMTVVELYTAKRVQSFQHTRKEEVASLVDFITQAASLEKPVNLNTKLMKLSGSVICRVVFGINLKGSKLENLYEEVIQGTMEVVGSFAAADYFPIIGRIIDRITGLHSKCEKIFKAMDAFFDQSIKHHLEDESIKDDIIDLLLKMERGEIELGEFQLTRDNTKGILFNILNAGIDTSAQVMTWVMTYLISNPRVMKKAQAEVREVIKNKDDIIEEDIERLEYLKMVVKETFRVLPLVPLLIPREASKDVKIGGYDIPKKTWIHVNIWAIHRNPNVWKDPEAFIPERFMDNQIDYKGLNFEFLPFGSGRRMCPGIGMGMALVHLTLINLLYRFDWKLPEGMEVEDVDLEESYGLVCPKKVPLQLIPVLTQWS

SEQ ID NO: 80202 - DNA, 1491 bp, Arabidopsis thaliana
  misc_feature (1)..(1491): Ceres Seq. ID no. 12654819
  misc_feature (1)..(1491): Ortholog of  Ceres SEQ ID NO 13594209 as cited in SEQ ID NO 59089
  misc_feature (1)..(1491): Ortholog of  Ceres SEQ ID NO 14313084 as cited in SEQ ID NO 59183
  misc_feature (1)..(1491): Ortholog of  Ceres SEQ ID NO 13502874 as cited in SEQ ID NO 66298
  misc_feature (1)..(1491): Ortholog of  Ceres SEQ ID NO 12614124 as cited in SEQ ID NO 68392
atgagtttgtggtatatcattgttgcattcgtcttcttttcatctatgatcattgtaaggatcattagaaagacaaagaagaatctaccacccggacccccaagacttcctataattggaaacttgcaccaactaggatcaaaacctcatcgttcgatgttcaaattatccgaaacatatggacctctaatgtccctaaagtttggaagcgtgtctactgtggtggcatctacaccagagacagtgaaggaagtcttaaaaacatttgacgtagaatgttgttcgcgaccaaatatgacctatcccgcaagagttacgtacaatttaaaagatctatgcttttctccttatagcaaatattggagggaggtacgaaagatgacagttgttgaactctacaccgcaaaaagggtgcaatcatttcaacatacaagaaaagaagaagttgcagccctcgttgatttcatcaaacaagctgcttcattggagaaaccagttaacttgaacaagaagttaatgaaactatcaggaagtgtgatttgtagagttgcatttggtatcaatcttcaaggaagtaaacttgagaatacttatgaggaagtcattcaaggaactgtggagttggtggggagttttgcagcagcagattactttccggttgttggtagaatcatcgataggatcacagggttacatagcaaatgtgagaagcttttcaaggcaatggatgcattttttgatcaatctataaagcatcacctagaagatgagattattaaagatgatataattgacttgcttctcaagatggaaaggggagagactacacttggggagtttcaacttactcgcgaccacaccaaaggaattcttgccaatattctcaacgctggaatagacacttctgcacaagttatgacatgggtgatgacatatttgatttcaaacccaagagttttgaagaaagcgcaggccgaggtgagagaagtgataaaacacaaagatgatatcatagaagaagatatagaacgactccaatatctgaaaatggtaattaaagaaacgtttaggataaacccacttgtgccacttctaattccaagagaggcttcaaaagatgtaaagatcggaggttataatattccaaagaaaacatggatccatgttaatatatgggctattcataggaatccaaacgtttggaaagatccagaagctttcattcccgagaggtttatggatagccagattgactataaagggttgaactttgagttgttgccgtttggtagcggaaggagaatatgccctggtattggaatgggtatggccttggttcacttgactcttatcaatcttctttatcgattcgattggaagcttccagaaggaatgaaggtagcagatgttgatcttgaagaatcatatggacttgtttgtcctaagaaaatcccacttcagcttatcccggtccttacccaatggacttga

SEQ ID NO: 80203 - protein, 496 aa, Arabidopsis thaliana
  peptide (1)..(496): Ceres Seq. ID no. 12654820
MSLWYIIVAFVFFSSMIIVRIIRKTKKNLPPGPPRLPIIGNLHQLGSKPHRSMFKLSETYGPLMSLKFGSVSTVVASTPETVKEVLKTFDVECCSRPNMTYPARVTYNLKDLCFSPYSKYWREVRKMTVVELYTAKRVQSFQHTRKEEVAALVDFIKQAASLEKPVNLNKKLMKLSGSVICRVAFGINLQGSKLENTYEEVIQGTVELVGSFAAADYFPVVGRIIDRITGLHSKCEKLFKAMDAFFDQSIKHHLEDEIIKDDIIDLLLKMERGETTLGEFQLTRDHTKGILANILNAGIDTSAQVMTWVMTYLISNPRVLKKAQAEVREVIKHKDDIIEEDIERLQYLKMVIKETFRINPLVPLLIPREASKDVKIGGYNIPKKTWIHVNIWAIHRNPNVWKDPEAFIPERFMDSQIDYKGLNFELLPFGSGRRICPGIGMGMALVHLTLINLLYRFDWKLPEGMKVADVDLEESYGLVCPKKIPLQLIPVLTQWT

SEQ ID NO: 80204 - protein, 481 aa, Arabidopsis thaliana
  peptide (1)..(481): Ceres Seq. ID no. 12654821
MIIVRIIRKTKKNLPPGPPRLPIIGNLHQLGSKPHRSMFKLSETYGPLMSLKFGSVSTVVASTPETVKEVLKTFDVECCSRPNMTYPARVTYNLKDLCFSPYSKYWREVRKMTVVELYTAKRVQSFQHTRKEEVAALVDFIKQAASLEKPVNLNKKLMKLSGSVICRVAFGINLQGSKLENTYEEVIQGTVELVGSFAAADYFPVVGRIIDRITGLHSKCEKLFKAMDAFFDQSIKHHLEDEIIKDDIIDLLLKMERGETTLGEFQLTRDHTKGILANILNAGIDTSAQVMTWVMTYLISNPRVLKKAQAEVREVIKHKDDIIEEDIERLQYLKMVIKETFRINPLVPLLIPREASKDVKIGGYNIPKKTWIHVNIWAIHRNPNVWKDPEAFIPERFMDSQIDYKGLNFELLPFGSGRRICPGIGMGMALVHLTLINLLYRFDWKLPEGMKVADVDLEESYGLVCPKKIPLQLIPVLTQWT

SEQ ID NO: 80205 - protein, 444 aa, Arabidopsis thaliana
  peptide (1)..(444): Ceres Seq. ID no. 12654822
MFKLSETYGPLMSLKFGSVSTVVASTPETVKEVLKTFDVECCSRPNMTYPARVTYNLKDLCFSPYSKYWREVRKMTVVELYTAKRVQSFQHTRKEEVAALVDFIKQAASLEKPVNLNKKLMKLSGSVICRVAFGINLQGSKLENTYEEVIQGTVELVGSFAAADYFPVVGRIIDRITGLHSKCEKLFKAMDAFFDQSIKHHLEDEIIKDDIIDLLLKMERGETTLGEFQLTRDHTKGILANILNAGIDTSAQVMTWVMTYLISNPRVLKKAQAEVREVIKHKDDIIEEDIERLQYLKMVIKETFRINPLVPLLIPREASKDVKIGGYNIPKKTWIHVNIWAIHRNPNVWKDPEAFIPERFMDSQIDYKGLNFELLPFGSGRRICPGIGMGMALVHLTLINLLYRFDWKLPEGMKVADVDLEESYGLVCPKKIPLQLIPVLTQWT

SEQ ID NO: 80206 - DNA, 1491 bp, Arabidopsis thaliana
  misc_feature (1)..(1491): Ceres Seq. ID no. 12654823
  misc_feature (1)..(1491): Ortholog of  Ceres SEQ ID NO 13594209 as cited in SEQ ID NO 59089
  misc_feature (1)..(1491): Ortholog of  Ceres SEQ ID NO 13502874 as cited in SEQ ID NO 66298
  misc_feature (1)..(1491): Ortholog of  Ceres SEQ ID NO 12614124 as cited in SEQ ID NO 68392
atgagtttgtggtatatcatagttgtgttcgtcttctttgcatctatattcattgcaaagaacacaagaaagacaaagaagaatctacctcccggaccaccaagacttcctataattggtaacttgcaccaattgggatcaaaacctcaccgttcgatgttcaaattatctgaaaaatatggacctctagtgtacctaaagcttggaaaggtaccgtctgttgtggcctcaactccagagacagtgaaggatgtcttgaaaacgtttgacaaagattgttgttcgcgagcttttttgacatatcctgcaagaatttcatacaatttgaaagatcttgcgtttgctccctatagcaaatattggaaggcggtacgaaagatgacggttgtcgaactctacaccgcgaaaagggtaaaatcgtttcgaaatataagagaagaagaagttgcctccttcgtcgagttcatcaaacattccgcttcgttggaggaaatagttaacttgaaccaaacgttagtgaaactctctgggagtgtaatttgtagagttggttttggaatcaatcttgaagggagcaaacttgagaatacttatgaggaagtcattcatggaaccatggaggtgctagggagttttgcagcatcagattacttcccggttattggtggaataatcgataggatcacggggttacataacaaatgtgagaaggtttttaagggaacagattcatttttcgaccattgtataaagcatcacctagaagatggtggtagtaaagatgatatagttgacttgctgctcaaggtagaaaggggagagattggacttggagagtttcaatttactcgaaaccacaccaaaggaattcttctagacattcttcttgctggagtagacacttctggccacacaataacatgggtgatgacacatttgattaaaaacccaagagttatgaagaaagcacaagccgaggtgagagaagtgataaaaaacaaagacaatatcacagaagaagatatagaaggactcgagtatctgaaaatggtggttaaagaaacattaaggataaacccacttgtgccacttctaactccaagagaggcttcaaaagatgtaaagatcggaggttataatattccaaagaaaacatggatccatgttaatatatgggctattcataggaatccaaacgtttggaaagatccagaagctttcattcccgagaggtttatggataaccagattgactataaagggttgaactttgagttgttgccgtttggtagcggaaggagaatatgccctggtattggaatgggtatggccttgatacacttgactcttatcaatcttctttatcgatttgattggaagcttccagaaggaatggaggttgaagatgttgatcttgaagaatcatatggacttgtctgtcctaagaaagttccacttgagctgatcccggtcctcactcaatggacttga

SEQ ID NO: 80207 - protein, 496 aa, Arabidopsis thaliana
  peptide (1)..(496): Ceres Seq. ID no. 12654824
MSLWYIIVVFVFFASIFIAKNTRKTKKNLPPGPPRLPIIGNLHQLGSKPHRSMFKLSEKYGPLVYLKLGKVPSVVASTPETVKDVLKTFDKDCCSRAFLTYPARISYNLKDLAFAPYSKYWKAVRKMTVVELYTAKRVKSFRNIREEEVASFVEFIKHSASLEEIVNLNQTLVKLSGSVICRVGFGINLEGSKLENTYEEVIHGTMEVLGSFAASDYFPVIGGIIDRITGLHNKCEKVFKGTDSFFDHCIKHHLEDGGSKDDIVDLLLKVERGEIGLGEFQFTRNHTKGILLDILLAGVDTSGHTITWVMTHLIKNPRVMKKAQAEVREVIKNKDNITEEDIEGLEYLKMVVKETLRINPLVPLLTPREASKDVKIGGYNIPKKTWIHVNIWAIHRNPNVWKDPEAFIPERFMDNQIDYKGLNFELLPFGSGRRICPGIGMGMALIHLTLINLLYRFDWKLPEGMEVEDVDLEESYGLVCPKKVPLELIPVLTQWT

SEQ ID NO: 80208 - protein, 444 aa, Arabidopsis thaliana
  peptide (1)..(444): Ceres Seq. ID no. 12654825
MFKLSEKYGPLVYLKLGKVPSVVASTPETVKDVLKTFDKDCCSRAFLTYPARISYNLKDLAFAPYSKYWKAVRKMTVVELYTAKRVKSFRNIREEEVASFVEFIKHSASLEEIVNLNQTLVKLSGSVICRVGFGINLEGSKLENTYEEVIHGTMEVLGSFAASDYFPVIGGIIDRITGLHNKCEKVFKGTDSFFDHCIKHHLEDGGSKDDIVDLLLKVERGEIGLGEFQFTRNHTKGILLDILLAGVDTSGHTITWVMTHLIKNPRVMKKAQAEVREVIKNKDNITEEDIEGLEYLKMVVKETLRINPLVPLLTPREASKDVKIGGYNIPKKTWIHVNIWAIHRNPNVWKDPEAFIPERFMDNQIDYKGLNFELLPFGSGRRICPGIGMGMALIHLTLINLLYRFDWKLPEGMEVEDVDLEESYGLVCPKKVPLELIPVLTQWT

SEQ ID NO: 80209 - protein, 370 aa, Arabidopsis thaliana
  peptide (1)..(370): Ceres Seq. ID no. 12654826
MTVVELYTAKRVKSFRNIREEEVASFVEFIKHSASLEEIVNLNQTLVKLSGSVICRVGFGINLEGSKLENTYEEVIHGTMEVLGSFAASDYFPVIGGIIDRITGLHNKCEKVFKGTDSFFDHCIKHHLEDGGSKDDIVDLLLKVERGEIGLGEFQFTRNHTKGILLDILLAGVDTSGHTITWVMTHLIKNPRVMKKAQAEVREVIKNKDNITEEDIEGLEYLKMVVKETLRINPLVPLLTPREASKDVKIGGYNIPKKTWIHVNIWAIHRNPNVWKDPEAFIPERFMDNQIDYKGLNFELLPFGSGRRICPGIGMGMALIHLTLINLLYRFDWKLPEGMEVEDVDLEESYGLVCPKKVPLELIPVLTQWT

SEQ ID NO: 80210 - DNA, 1101 bp, Arabidopsis thaliana
  misc_feature (1)..(1101): Ceres Seq. ID no. 12654855
  misc_feature (1)..(1101): Ortholog of  Ceres SEQ ID NO 13596244 as cited in SEQ ID NO 69307
atgttggccttatatttcattctactcgtctgcgtgcccttaggtgtcatcatgaccgtgacgagtcctcgactagccatcactgtggccgtcactcagccggcggtcttaataatacaaaatcccaataataacctcacatctcctcaagtaattacatctcagccactggatcacgatgagttactccttcgtcaagcttctaaagccaacccaaacccttcacctaaatttcccaaaaaactagctttcatgttcttaacaacgaactctcttccacttgcaccactttgggagctttttttcaaccaaagctctcatcacaagtctctttacaatgtctacgtccatgtagacccgactcaaaaacacaaaccgggttctcacggcacatttcaaaaccggatcataccatcctcaaaaccggcttacaggcacaccccaaccctcatctcagccgcacgtcgtttactagcccatgcgcttctcgaggacccgtctaattacatgtttatccttctctccccttcttgcattcctttgcactcctttaacttcacttacaagacactagtctcctccacaaagagcttcatcgaaattctcaaagacgaaccagggtggtacgaaaggtgggcagcgcgtggaccctacgcgatgttccccgaggtaccacccgaggagttccgaataggatcacagttctggacgttgacacgagcccatgcgctgatggtggtgagtgacgtggagatatggtccaagtttaacaagtcatgcgtaagagaagacatatgttaccccgaagaacattacttccctactctccttaacatgcgagacccacaagggtgtgtatccgctacggtcacgcacgttgattggagcgtcaacgaccatggtcatcctcggacatataaaccgttggaggttagggctgagcttatacaaaagctgagaagtgcacggcctaggtatggggacggcaaccgaacgaggaaagatccatttcttttcgcccggaaattttctccggccgggatcaatcagttgatgaacataactcgaagtgtcatctttaacgattcggctcttgtgtaa

SEQ ID NO: 80211 - protein, 366 aa, Arabidopsis thaliana
  peptide (1)..(366): Ceres Seq. ID no. 12654856
MLALYFILLVCVPLGVIMTVTSPRLAITVAVTQPAVLIIQNPNNNLTSPQVITSQPLDHDELLLRQASKANPNPSPKFPKKLAFMFLTTNSLPLAPLWELFFNQSSHHKSLYNVYVHVDPTQKHKPGSHGTFQNRIIPSSKPAYRHTPTLISAARRLLAHALLEDPSNYMFILLSPSCIPLHSFNFTYKTLVSSTKSFIEILKDEPGWYERWAARGPYAMFPEVPPEEFRIGSQFWTLTRAHALMVVSDVEIWSKFNKSCVREDICYPEEHYFPTLLNMRDPQGCVSATVTHVDWSVNDHGHPRTYKPLEVRAELIQKLRSARPRYGDGNRTRKDPFLFARKFSPAGINQLMNITRSVIFNDSALV

SEQ ID NO: 80212 - protein, 349 aa, Arabidopsis thaliana
  peptide (1)..(349): Ceres Seq. ID no. 12654857
MTVTSPRLAITVAVTQPAVLIIQNPNNNLTSPQVITSQPLDHDELLLRQASKANPNPSPKFPKKLAFMFLTTNSLPLAPLWELFFNQSSHHKSLYNVYVHVDPTQKHKPGSHGTFQNRIIPSSKPAYRHTPTLISAARRLLAHALLEDPSNYMFILLSPSCIPLHSFNFTYKTLVSSTKSFIEILKDEPGWYERWAARGPYAMFPEVPPEEFRIGSQFWTLTRAHALMVVSDVEIWSKFNKSCVREDICYPEEHYFPTLLNMRDPQGCVSATVTHVDWSVNDHGHPRTYKPLEVRAELIQKLRSARPRYGDGNRTRKDPFLFARKFSPAGINQLMNITRSVIFNDSALV

SEQ ID NO: 80213 - protein, 282 aa, Arabidopsis thaliana
  peptide (1)..(282): Ceres Seq. ID no. 12654858
MFLTTNSLPLAPLWELFFNQSSHHKSLYNVYVHVDPTQKHKPGSHGTFQNRIIPSSKPAYRHTPTLISAARRLLAHALLEDPSNYMFILLSPSCIPLHSFNFTYKTLVSSTKSFIEILKDEPGWYERWAARGPYAMFPEVPPEEFRIGSQFWTLTRAHALMVVSDVEIWSKFNKSCVREDICYPEEHYFPTLLNMRDPQGCVSATVTHVDWSVNDHGHPRTYKPLEVRAELIQKLRSARPRYGDGNRTRKDPFLFARKFSPAGINQLMNITRSVIFNDSALV

SEQ ID NO: 80214 - DNA, 570 bp, Arabidopsis thaliana
  misc_feature (1)..(570): Ceres Seq. ID no. 12654871
  misc_feature (1)..(570): Ortholog of  Ceres SEQ ID NO 15173624 as cited in SEQ ID NO 60470
atggtacattcgaagaagttccgaggtgtccgccagcgtcagtggggttcttgggtttctgagattcgtcatcctctcttgaagagaagagtgtggctaggaacattcgacacggcggaaacagcggctagagcctacgaccaagccgcggttctaatgaacggccagagcgcgaagactaacttccccgtcatcaaatcgaacggttcaaattccttggagattaactctgcgttaaggtctcccaaatcattatcggaactattgaacgctaagctaaggaagaactgtaaagaccagacaccgtatctgacgtgtctccgcctcgacaacgacagctcacacatcggcgtctggcagaaacgcgccgggtcaaaaacgagtccaaactgggtcaagcttgttgaactaggtgacaaagttaacgcacgtcccggtggtgatattgagactaataagatgaaggtacgaaacgaagacgttcaggaagatgatcaaatggcgatgcagatgatcgaggagttgcttaactggacctgtcctggatctggatccattgcacaggtctaa

SEQ ID NO: 80215 - protein, 189 aa, Arabidopsis thaliana
  peptide (1)..(189): Ceres Seq. ID no. 12654872
MVHSKKFRGVRQRQWGSWVSEIRHPLLKRRVWLGTFDTAETAARAYDQAAVLMNGQSAKTNFPVIKSNGSNSLEINSALRSPKSLSELLNAKLRKNCKDQTPYLTCLRLDNDSSHIGVWQKRAGSKTSPNWVKLVELGDKVNARPGGDIETNKMKVRNEDVQEDDQMAMQMIEELLNWTCPGSGSIAQV

SEQ ID NO: 80216 - protein, 137 aa, Arabidopsis thaliana
  peptide (1)..(137): Ceres Seq. ID no. 12654873
MNGQSAKTNFPVIKSNGSNSLEINSALRSPKSLSELLNAKLRKNCKDQTPYLTCLRLDNDSSHIGVWQKRAGSKTSPNWVKLVELGDKVNARPGGDIETNKMKVRNEDVQEDDQMAMQMIEELLNWTCPGSGSIAQV

SEQ ID NO: 80217 - DNA, 2471 bp, Arabidopsis thaliana
  misc_feature (1)..(2471): Ceres Seq. ID no. 12654901
  misc_feature (1)..(2471): Ortholog of  Ceres SEQ ID NO 13600301 as cited in SEQ ID NO 1010
ctctgctgcatttttgttcccttcattatcaatctctctctcccaaacaaaaaaaaagcctcactttttacaaatgggttgtgctcaatctagggttgataacgaagaagcagtagctagatgcaaagaacgacgaaacgtaatcaaagaagcagtttccgcaagcaaagcattcgccgccggtcatttcgcttacgctattgctttgaaaaacactggtgctgctttaagtgactatggccatggcgaatctgatcaaaaagctttagacgatgtgttgttagatcaacaacattacgagaaacagagtcgtaacaatgtagatccggcttctcctcagccacctcctccaccgcctattgagaatcttcctcctccgcctcctcctttgcctaaattctctccttctccgattaaacgtgcgattagtttgccttctatggcggttagaggtcgaaaggttcagactttagatggtatggcgattgaggaagaggaagaagatgaagaggaggaagaggaagttaagggtagtggtagagacactgctcaggaggaggaggaaccgagaacgccggagaatgttgggaagagtaatgggaggaagagattggagaaaacaacgccggagattgtgagtgcttctccggcaaatagtatggcttgggattattttttcatggtggagaatatgcctggacctaatttagatgatagagaggttaggaatggttatgagaatcagagtagtcattttcagtttaatgaagaggatgatgaagaagaagaggaagaggaaagatctgggatatatcggaagaagtctggttctggtaaagtagttgaggagatggagcctaagacgccggagaaagttgaagaagaagaggaggaagatgaggaagaggatgaggaagaggaagaggaggaggaagaagaagtggtggtggaggtaaagaagaagaagaaagggaaagctaagattgagcattcgagtactgctccaccggagtttcggcgtgcggttgctaagactagtgctgctgcatcatcaagtgtgaatttgatgaagattcttgatgagattgatgatagattccttaaggcttcagaatgtgctcaagaggtttctaagatgcttgaagctacaaggttacattaccactcgaattttgcagataaccgaggatatgttgatcattcagctagagtaatgcgggttataacttggaataaatcgttaagaggcatttcgaatggagaaggtggaaaagatgatcaagaatcagatgagcatgaaactcatgctacggtgttggataaattgttagcatgggagaagaaactctatgatgaagtgaagcaaggtgagcttatgaagatagagtatcagaagaaggtatctttactcaacaggcataagaaacgaggtgcgagtgcagagaccgtggagaaaacaaaggcggctgtaagtcatctacacacaagatatattgttgacatgcaatccatggattcaacggtttctgaagtaaaccgtttaagggatgatcaattgtatccaagacttgttgccttagttgaagggatggcgaagatgtggacaaacatgtgtatacaccacgacacccaactaggtattgttggagagctaaaggcccttgaaatctcaacttctctcaaagaaaccacaaaacagcatcaccatcagactcgccagttctgcaccgtcttggaagaatggcatgttcagttcgatacacttgtcacccatcagaagcagtacattaactctctcaacaactggctgaagctaaatctaatccccatcgagagtagtcttaaagagaaagtttcatcacctccaaggcctcagcgcccgccaatccaagctcttctccactcatggcatgaccgtcttgagaaacttcccgatgaagtcgccaaatcagctatctcctctttcgcggcagtcatcaaaaccatcttgctgcaccaggaagaggagatgaaactgaaagagaaatgcgaagaaacacgaagagagtttatacggaagaagcaaggttttgaggattggtatcaaaaacatttgcaaaagagagggccaacagaggaagctgaaggcggggacgacgcaacaacaagctccagagatcatgtcacagagaggagaattgctgtggagacactgaagaaaaggcttgaagaagaagaagaagctcaccagagacattgtgttcaggtgagggagaaatctctaaacagtttgaagatcagattgcctgagatcttcagggcactgtctgattatgctcacgcttgtgctgactcatatgagaagctcagaatcatatcgcagagtcagaaatcaaacggtggagccactgaatcttcttgaaccagttttagttctatttaacctatgtaatatgttgtattatgatgggaacattaagcatagttttgtg

SEQ ID NO: 80218 - protein, 799 aa, Arabidopsis thaliana
  peptide (1)..(799): Ceres Seq. ID no. 12654902
SAAFLFPSLSISLSQTKKKPHFLQMGCAQSRVDNEEAVARCKERRNVIKEAVSASKAFAAGHFAYAIALKNTGAALSDYGHGESDQKALDDVLLDQQHYEKQSRNNVDPASPQPPPPPPIENLPPPPPPLPKFSPSPIKRAISLPSMAVRGRKVQTLDGMAIEEEEEDEEEEEEVKGSGRDTAQEEEEPRTPENVGKSNGRKRLEKTTPEIVSASPANSMAWDYFFMVENMPGPNLDDREVRNGYENQSSHFQFNEEDDEEEEEEERSGIYRKKSGSGKVVEEMEPKTPEKVEEEEEEDEEEDEEEEEEEEEEVVVEVKKKKKGKAKIEHSSTAPPEFRRAVAKTSAAASSSVNLMKILDEIDDRFLKASECAQEVSKMLEATRLHYHSNFADNRGYVDHSARVMRVITWNKSLRGISNGEGGKDDQESDEHETHATVLDKLLAWEKKLYDEVKQGELMKIEYQKKVSLLNRHKKRGASAETVEKTKAAVSHLHTRYIVDMQSMDSTVSEVNRLRDDQLYPRLVALVEGMAKMWTNMCIHHDTQLGIVGELKALEISTSLKETTKQHHHQTRQFCTVLEEWHVQFDTLVTHQKQYINSLNNWLKLNLIPIESSLKEKVSSPPRPQRPPIQALLHSWHDRLEKLPDEVAKSAISSFAAVIKTILLHQEEEMKLKEKCEETRREFIRKKQGFEDWYQKHLQKRGPTEEAEGGDDATTSSRDHVTERRIAVETLKKRLEEEEEAHQRHCVQVREKSLNSLKIRLPEIFRALSDYAHACADSYEKLRIISQSQKSNGGATESS

SEQ ID NO: 80219 - protein, 775 aa, Arabidopsis thaliana
  peptide (1)..(775): Ceres Seq. ID no. 12654903
MGCAQSRVDNEEAVARCKERRNVIKEAVSASKAFAAGHFAYAIALKNTGAALSDYGHGESDQKALDDVLLDQQHYEKQSRNNVDPASPQPPPPPPIENLPPPPPPLPKFSPSPIKRAISLPSMAVRGRKVQTLDGMAIEEEEEDEEEEEEVKGSGRDTAQEEEEPRTPENVGKSNGRKRLEKTTPEIVSASPANSMAWDYFFMVENMPGPNLDDREVRNGYENQSSHFQFNEEDDEEEEEEERSGIYRKKSGSGKVVEEMEPKTPEKVEEEEEEDEEEDEEEEEEEEEEVVVEVKKKKKGKAKIEHSSTAPPEFRRAVAKTSAAASSSVNLMKILDEIDDRFLKASECAQEVSKMLEATRLHYHSNFADNRGYVDHSARVMRVITWNKSLRGISNGEGGKDDQESDEHETHATVLDKLLAWEKKLYDEVKQGELMKIEYQKKVSLLNRHKKRGASAETVEKTKAAVSHLHTRYIVDMQSMDSTVSEVNRLRDDQLYPRLVALVEGMAKMWTNMCIHHDTQLGIVGELKALEISTSLKETTKQHHHQTRQFCTVLEEWHVQFDTLVTHQKQYINSLNNWLKLNLIPIESSLKEKVSSPPRPQRPPIQALLHSWHDRLEKLPDEVAKSAISSFAAVIKTILLHQEEEMKLKEKCEETRREFIRKKQGFEDWYQKHLQKRGPTEEAEGGDDATTSSRDHVTERRIAVETLKKRLEEEEEAHQRHCVQVREKSLNSLKIRLPEIFRALSDYAHACADSYEKLRIISQSQKSNGGATESS

SEQ ID NO: 80220 - protein, 653 aa, Arabidopsis thaliana
  peptide (1)..(653): Ceres Seq. ID no. 12654904
MAVRGRKVQTLDGMAIEEEEEDEEEEEEVKGSGRDTAQEEEEPRTPENVGKSNGRKRLEKTTPEIVSASPANSMAWDYFFMVENMPGPNLDDREVRNGYENQSSHFQFNEEDDEEEEEEERSGIYRKKSGSGKVVEEMEPKTPEKVEEEEEEDEEEDEEEEEEEEEEVVVEVKKKKKGKAKIEHSSTAPPEFRRAVAKTSAAASSSVNLMKILDEIDDRFLKASECAQEVSKMLEATRLHYHSNFADNRGYVDHSARVMRVITWNKSLRGISNGEGGKDDQESDEHETHATVLDKLLAWEKKLYDEVKQGELMKIEYQKKVSLLNRHKKRGASAETVEKTKAAVSHLHTRYIVDMQSMDSTVSEVNRLRDDQLYPRLVALVEGMAKMWTNMCIHHDTQLGIVGELKALEISTSLKETTKQHHHQTRQFCTVLEEWHVQFDTLVTHQKQYINSLNNWLKLNLIPIESSLKEKVSSPPRPQRPPIQALLHSWHDRLEKLPDEVAKSAISSFAAVIKTILLHQEEEMKLKEKCEETRREFIRKKQGFEDWYQKHLQKRGPTEEAEGGDDATTSSRDHVTERRIAVETLKKRLEEEEEAHQRHCVQVREKSLNSLKIRLPEIFRALSDYAHACADSYEKLRIISQSQKSNGGATESS

SEQ ID NO: 80221 - DNA, 2106 bp, Arabidopsis thaliana
  misc_feature (1)..(2106): Ceres Seq. ID no. 12654905
  misc_feature (1)..(2106): Ortholog of  Ceres SEQ ID NO 15170956 as cited in SEQ ID NO 55034
tccggtttacactctcatcaaaacacaaacacaacgcttatctctctcactctctttactcattcttctcatttggataagatctctctctttctctccctccttttcagcagattcaatccaaaccctaacctctttgattccgatctttagagaatatttctcttcaaaaaatccattataaatacttttacttaactaaaacttttttttttaccatctctctttttttttttacttactccatatgccatcaatgtcaaattgttctttctgtcctttgttcttaattagtgtcaccaccaccaccactacttctatactacaaacccttctcgtattctcttaaccaatacgtacttattacaccaaaagtctctttctctctatatatatatagataacagccaagagagagaaccaagaagaagttattttcttgatggatttctgttggaagagagagatggaaggtaaactagcacatgaccaccgcggcatgacgtcaccgcgtcgtatctgcgtcgtcaccggtccggtgatcgtaggcgccggaccgtcgggactagccacggcagcatgtttaaaagagagaggtatcacgtccgtactactagagagatcaaactgtatagcatcactatggcagctcaagacttatgaccgtcttcatcttcaccttcctaaacaattctgtgaacttccgattatacccttccccggagatttccctacctacccgacgaagcaacagttcatcgagtaccttgaggactacgctcggaggtttgacataaagccggagtttaaccaaacggttgagtcggctgcgtttgatgaaaaccttgggatgtggcgcgtgactagcgtgggagaagaaggcacgacggagtatgtttgtcggtggttagtggcggcgacgggggagaatgcggagccggtggtacctaggtttgaggggatggataagtttgcagccgccggggtagttaagcacacgtgtcattataaaaccggtggagatttcgccggaaaaagggttcttgtcgtcggatgtggaaactccggtatggaggtttgtttggatctctgcaacttcggtgctcagccttctctcgttgtcagagacgctgtgcacgtcctaccacgagagatgttgggtacttcaacttttgggctgtccatgttcttactgaaatggctgcccatccggcttgttgaccgtttccttttggttgtttcccggttcatcctcggggatactacccttttaggtcttaacaggccccggttaggtccactcgagctcaaaaatatctccggtaaaactccggttctcgacgttggcacgctagccaaaatcaaaaccggagacattaaggtgtgttcggggataagaaggttaaaacgacatgaagttgagttcgataacggaaaaacagagagatttgacgccattatattagcaactggctacaaaagcaacgtaccctcttggctaaaggagaataaaatgtttagtaagaaagatggatttccaatacaagagttccctgagggatggagaggggaatgtgggctatacgcggtcggattcacaaaacgtgggattagtggagcatcaatggatgcaaagagaatagctgaagacatacacaagtgttggaaacaagacgagcaagtaaaaaaaatctgaatcaaaacttattgactagacagtagagaaaagctaaggttttctatcaagaaaacataacttgccaaatgccggtagcgatcgaaaaaaaattgatggttttgtttcaaaggaggtgatgtaaattaagacttatctccagctgcaatgcaaattggggaaaagaatgaaaaggaaatttagtgagagtgattgtggtgggaattgatgatcatctgccccaaaggagaggaggggaccctcttctctttgcatgcttataacccactttgtaaatctttctataccttctttctatgtttctaatttttctttttctcttttctttcttttatttttgtttttttagatttccatagttaggtatgctctttgtttttcttctcttttttggttcaattttttttggc

SEQ ID NO: 80222 - protein, 417 aa, Arabidopsis thaliana
  peptide (1)..(417): Ceres Seq. ID no. 12654906
MDFCWKREMEGKLAHDHRGMTSPRRICVVTGPVIVGAGPSGLATAACLKERGITSVLLERSNCIASLWQLKTYDRLHLHLPKQFCELPIIPFPGDFPTYPTKQQFIEYLEDYARRFDIKPEFNQTVESAAFDENLGMWRVTSVGEEGTTEYVCRWLVAATGENAEPVVPRFEGMDKFAAAGVVKHTCHYKTGGDFAGKRVLVVGCGNSGMEVCLDLCNFGAQPSLVVRDAVHVLPREMLGTSTFGLSMFLLKWLPIRLVDRFLLVVSRFILGDTTLLGLNRPRLGPLELKNISGKTPVLDVGTLAKIKTGDIKVCSGIRRLKRHEVEFDNGKTERFDAIILATGYKSNVPSWLKENKMFSKKDGFPIQEFPEGWRGECGLYAVGFTKRGISGASMDAKRIAEDIHKCWKQDEQVKKI

SEQ ID NO: 80223 - protein, 409 aa, Arabidopsis thaliana
  peptide (1)..(409): Ceres Seq. ID no. 12654907
MEGKLAHDHRGMTSPRRICVVTGPVIVGAGPSGLATAACLKERGITSVLLERSNCIASLWQLKTYDRLHLHLPKQFCELPIIPFPGDFPTYPTKQQFIEYLEDYARRFDIKPEFNQTVESAAFDENLGMWRVTSVGEEGTTEYVCRWLVAATGENAEPVVPRFEGMDKFAAAGVVKHTCHYKTGGDFAGKRVLVVGCGNSGMEVCLDLCNFGAQPSLVVRDAVHVLPREMLGTSTFGLSMFLLKWLPIRLVDRFLLVVSRFILGDTTLLGLNRPRLGPLELKNISGKTPVLDVGTLAKIKTGDIKVCSGIRRLKRHEVEFDNGKTERFDAIILATGYKSNVPSWLKENKMFSKKDGFPIQEFPEGWRGECGLYAVGFTKRGISGASMDAKRIAEDIHKCWKQDEQVKKI

SEQ ID NO: 80224 - protein, 398 aa, Arabidopsis thaliana
  peptide (1)..(398): Ceres Seq. ID no. 12654908
MTSPRRICVVTGPVIVGAGPSGLATAACLKERGITSVLLERSNCIASLWQLKTYDRLHLHLPKQFCELPIIPFPGDFPTYPTKQQFIEYLEDYARRFDIKPEFNQTVESAAFDENLGMWRVTSVGEEGTTEYVCRWLVAATGENAEPVVPRFEGMDKFAAAGVVKHTCHYKTGGDFAGKRVLVVGCGNSGMEVCLDLCNFGAQPSLVVRDAVHVLPREMLGTSTFGLSMFLLKWLPIRLVDRFLLVVSRFILGDTTLLGLNRPRLGPLELKNISGKTPVLDVGTLAKIKTGDIKVCSGIRRLKRHEVEFDNGKTERFDAIILATGYKSNVPSWLKENKMFSKKDGFPIQEFPEGWRGECGLYAVGFTKRGISGASMDAKRIAEDIHKCWKQDEQVKKI

SEQ ID NO: 80225 - DNA, 1015 bp, Arabidopsis thaliana
  misc_feature (1)..(1015): Ceres Seq. ID no. 12654915
  misc_feature (1)..(1015): Ortholog of  Ceres SEQ ID NO 14314759 as cited in SEQ ID NO 59915
  misc_feature (1)..(1015): Ortholog of  Ceres SEQ ID NO 13661769 as cited in SEQ ID NO 61435
  misc_feature (1)..(1015): Ortholog of  Ceres SEQ ID NO 13600585 as cited in SEQ ID NO 0
ctgtctctcactttccttcattatttactcattgcccaaaataattcatttatcatatcctcaaacttttttttttctatacctcgaaatccaaaaaaataaatacattggtttagtgtggcattgatgtttttggtataaagctcttcaccaatgatagcttcagagagtaccaagagctgggaagctagcgcagtcagacaagagaatgaagaagagaagaagaaaccggttaaagattccggtaagcatccggtttatcggggtgtccgaaagaggaactggggaaaatgggtgtccgagatacgtgaacctaggaaaaaatcccgaatatggctaggaacgtttccttccccggagatggcggcgcgtgcacacgacgtagccgctcttagcatcaaaggagcctccgctatactcaatttccctgacctagccggctctttcccacgccctagctcgcttagccctcgagacatccaggtcgcggctctcaaagccgcacacatggagacctcacagtctttttcttcttcttcttctttaacgttttcatcttcacagtcttcttcttcgctagagtctctcgtgtcttcctccgcgaccggctccgaggagctaggggagattgtagagctcccaagtttgggatcgagctatgatggtttgactcagctaggtaacgagtttatattctctgactccgcagacttatggccttatccaccgcaatggtcagaaggtgattaccaaatgattcctgcctcgttatcacaagattgggatcttcaaggactgtataattattaagtcataatcataaaaatatactagtaatgctgtgtttaataattactttttaatgacccctttattttgtatagggcggctttaggtttatttgtctttgaatcttcttttctcaatttgtgggtgtgagagagctcgatatatgaatacttgtacatacttctcataacatgtgttttttttttcttaataaatgtggaaactt

SEQ ID NO: 80226 - protein, 218 aa, Arabidopsis thaliana
  peptide (1)..(218): Ceres Seq. ID no. 12654916
MIASESTKSWEASAVRQENEEEKKKPVKDSGKHPVYRGVRKRNWGKWVSEIREPRKKSRIWLGTFPSPEMAARAHDVAALSIKGASAILNFPDLAGSFPRPSSLSPRDIQVAALKAAHMETSQSFSSSSSLTFSSSQSSSSLESLVSSSATGSEELGEIVELPSLGSSYDGLTQLGNEFIFSDSADLWPYPPQWSEGDYQMIPASLSQDWDLQGLYNY

SEQ ID NO: 80227 - protein, 149 aa, Arabidopsis thaliana
  peptide (1)..(149): Ceres Seq. ID no. 12654917
MAARAHDVAALSIKGASAILNFPDLAGSFPRPSSLSPRDIQVAALKAAHMETSQSFSSSSSLTFSSSQSSSSLESLVSSSATGSEELGEIVELPSLGSSYDGLTQLGNEFIFSDSADLWPYPPQWSEGDYQMIPASLSQDWDLQGLYNY

SEQ ID NO: 80228 - DNA, 996 bp, Arabidopsis thaliana
  misc_feature (1)..(996): Ceres Seq. ID no. 12654922
  misc_feature (1)..(996): Ortholog of  Ceres SEQ ID NO 14313170 as cited in SEQ ID NO 20674
atggaagatgaagcacatgaattcttccacacatctgattttgccgttgatgaccttttagttgatttctctaacgatgatgacgaagaaaacgatgttgttgctgattccaccactaccaccaccataaccgacagctctaacttctccgctgctgatcttcccagtttccacggtgatgttcaagacggcactagcttctccggtgacctttgtataccttctgatgatttggctgatgagttagagtggctttcgaacattgtggatgaatcattgtcgcctgaagatgtacacaagctcgagctaatatccggttttaagagtcgaccggacccgaaatccgataccggaagcccggaaaacccgaatagcagcagtccgatttttactaccgacgtttctgtaccggccaaagctagaagcaaacgctcacgcgccgctgcgtgtaattgggcctcacgtgggcttctcaaggaaacgttttacgacagtcctttcaccggagaaaccattctctctagccaacaacacttgtctccgccaacctcgccgcctttgttgatggctccgctagggaaaaagcaagccgttgatggaggacaccgacggaagaaggatgtttcttcaccggagtctggtggcgcagaggagagacggtgtctccactgcgccacggataagactccgcaatggcggacaggcccaatgggcccgaagacgttgtgcaacgcttgcggtgttaggtacaaatcgggacgtttagtgccggagtatcggcccgcggcgagtccgacgtttgtgctggcgaaacactcaaattctcatcggaaagttatggagctccggcgacagaaggagatgagtagggcccatcatgagttcatacatcaccatcacggtacggacactgccatgattttcgacgtttcatcggacggtgatgattacttgatccaccacaacgttggcccagatttcagacagcttatttga

SEQ ID NO: 80229 - protein, 331 aa, Arabidopsis thaliana
  peptide (1)..(331): Ceres Seq. ID no. 12654923
MEDEAHEFFHTSDFAVDDLLVDFSNDDDEENDVVADSTTTTTITDSSNFSAADLPSFHGDVQDGTSFSGDLCIPSDDLADELEWLSNIVDESLSPEDVHKLELISGFKSRPDPKSDTGSPENPNSSSPIFTTDVSVPAKARSKRSRAAACNWASRGLLKETFYDSPFTGETILSSQQHLSPPTSPPLLMAPLGKKQAVDGGHRRKKDVSSPESGGAEERRCLHCATDKTPQWRTGPMGPKTLCNACGVRYKSGRLVPEYRPAASPTFVLAKHSNSHRKVMELRRQKEMSRAHHEFIHHHHGTDTAMIFDVSSDGDDYLIHHNVGPDFRQLI

SEQ ID NO: 80230 - DNA, 1960 bp, Arabidopsis thaliana
  misc_feature (1)..(1960): Ceres Seq. ID no. 12654940
  misc_feature (1)..(1960): Ortholog of  Ceres SEQ ID NO 14313714 as cited in SEQ ID NO 54084
acctaaccagaccttcttcgcatcttcgtcttcttccttcgtgatctctcaaattctctcccttttaaagtcctaaatcaaaaccctaaacccataaatccaatccctccattcgaattcttcattctctctctctctctctctcacaattactgatcggttctgaaatttgtagctatgcaggcaacggctttatcatctgggttcaatcctctaacgaaacgtaaagatcacagatttcccaggtcatgctctcagagaaattctctgtctttgattcaatgcgatataaaagagagatctttcggagagtctatgacgatcacgaatcgtggattgagttttaagacgaatgtgtttgagcaagctcgttctgtgactggagactgttcttatgatgaaacttcagctaaagcacgttctcatgttgttgcagaagataagattggtgtcttgcttttgaatttaggtggtcctgaaactcttaacgatgttcaacctttcttgtataatctctttgctgatccggatattataaggcttcctagaccatttcagtttcttcaagggactatagctaagtttatatctgttgttcgtgctccgaaatctaaagaagggtatgctgctattggtggtggctctcctttgcgtaaaataactgatgagcaagcggatgctattaagatgtctttgcaagcgaagaacattgctgctaatgtctatgttggtatgcggtattggtatccgttcactgaggaggctgttcagcagataaagaaggacaaaattactagacttgttgtactgccattgtatcctcagtattctatctctacaacgggttcaagcatacgcgttctccaagatttattcagatccgtacctagctggagtgccggtagctattataaagtcctggtaccaaaggcgaggctatgtcaattctatggctgacctcattgagaaggagcttcaaactttctctgatcctaaggaggttatgatattcttcagtgcccatggtgttccggtcagctacgtagagaatgctggagatccgtaccagaagcagatggaagagtgtattgacttgataatggaagagctaaaagccagaggggttcttaacgaccataaattggcataccagagtcgtgttggccctgttcaatggctgaagccatacaccgatgaggttcttgtcgaccttggtaagagtggtgttaagagtctactagccgttccagtcagtttcgtgagtgagcacattgagacacttgaggagatagacatggagtatagggaattagctcttgagtcaggggtagagaactggggacgggtacccgcgctaggtctcacaccatccttcatcaccgacttagctgatgcagtgatagaatcacttccttcagcagaagcaatgtcaaacccaaatgcagtggttgactcagaagatagcgagtcgtcagatgctttcagttacattgtcaagatgttcttcggttcgattctggctttcgtcctacttctctccccaaagatgttccatgcgttccggaacctatagaatctcgttggttttgtgttaagtcttttcttggagaaatgtcttggttaaattcaatatatatagtccaatctattgaagtactagtacaccagctctaataagctgatgtgggtaagtagttcaatagattggactatgtatattaaatttgactaagagataaactagagaatgggaataaagaatgagaaacggtattagaaagttctttgaggaaatttagatgtattttaaattgaagatgcatttagctataaacatagtggctacgttcctcttagagatgaggagagaattatattctattattatttggtttcttttcttcgtttttgtatggtttcaatacttaattgtcaaaagtatcctataattttgttgttc

SEQ ID NO: 80231 - protein, 259 aa, Arabidopsis thaliana
  peptide (1)..(259): Ceres Seq. ID no. 12654941
MQATALSSGFNPLTKRKDHRFPRSCSQRNSLSLIQCDIKERSFGESMTITNRGLSFKTNVFEQARSVTGDCSYDETSAKARSHVVAEDKIGVLLLNLGGPETLNDVQPFLYNLFADPDIIRLPRPFQFLQGTIAKFISVVRAPKSKEGYAAIGGGSPLRKITDEQADAIKMSLQAKNIAANVYVGMRYWYPFTEEAVQQIKKDKITRLVVLPLYPQYSISTTGSSIRVLQDLFRSVPSWSAGSYYKVLVPKARLCQFYG

SEQ ID NO: 80232 - protein, 213 aa, Arabidopsis thaliana
  peptide (1)..(213): Ceres Seq. ID no. 12654942
MTITNRGLSFKTNVFEQARSVTGDCSYDETSAKARSHVVAEDKIGVLLLNLGGPETLNDVQPFLYNLFADPDIIRLPRPFQFLQGTIAKFISVVRAPKSKEGYAAIGGGSPLRKITDEQADAIKMSLQAKNIAANVYVGMRYWYPFTEEAVQQIKKDKITRLVVLPLYPQYSISTTGSSIRVLQDLFRSVPSWSAGSYYKVLVPKARLCQFYG

SEQ ID NO: 80233 - protein, 207 aa, Arabidopsis thaliana
  peptide (1)..(207): Ceres Seq. ID no. 12654943
MADLIEKELQTFSDPKEVMIFFSAHGVPVSYVENAGDPYQKQMEECIDLIMEELKARGVLNDHKLAYQSRVGPVQWLKPYTDEVLVDLGKSGVKSLLAVPVSFVSEHIETLEEIDMEYRELALESGVENWGRVPALGLTPSFITDLADAVIESLPSAEAMSNPNAVVDSEDSESSDAFSYIVKMFFGSILAFVLLLSPKMFHAFRNL

SEQ ID NO: 80234 - DNA, 2203 bp, Arabidopsis thaliana
  misc_feature (1)..(2203): Ceres Seq. ID no. 12654955
  misc_feature (1)..(2203): Ortholog of  Ceres SEQ ID NO 14308618 as cited in SEQ ID NO 58541
acttttaatcctagtttcactgctcattcgtgtctttcttctatcaaggtctttctctggttaaatttggtgattatggacatggaaacatcttggagatttctcagaagtgtttgcttactttcatttatccttgggtctttttctgtctaccaaaccctttgtcttgttgacgctcaagaagacgccattgtaacactgcaagtagatgcttctaacgtgacacggcgaccgattcccgaaactctatttgggatcttctttgaggaaataaatcatgctggagcaggtggactatgggctgaacttgttagcaatagaggatttgaagctggtggacaaatcattccttccaatatctggccttggtccattattggagatgaatcatccatttatgttgttacagaccgttcttcgtgttttgagcgtaacaagattgctcttagaatggaagtcctttgtgacagcaactcttgtccgttaggaggagtcggggtttataacccgggttactggggcatgaacattgaagaagggaagaaatataaagtggtgttatatgtgcgttcgactggggacatcgatgtgtctgtgtcgtttacaagttctaatggatcagtgactcttgcgtcagaaaatattatagctttggcttctgatcttttaaattggacaaaaaaggaaatgcttttagaagcaaatggaacagataatggtgcaagacttcagtttacaactaccaaaaaaggttcaatttggtttgatcaagtctcagccatgcctatggatacttacaagggacatggtttcagaaatgaccttttccaaatgatggtcgatctaaaaccgcggtttatccgattcccgggtggttgttttgtggagggtgattggttaggcaatgcattccgctggaaagaaaccgtgagagcttgggaagagagacctggccattatggtgatgtttggaagtactggactgatgatggccttggccactttgaattctttcaacttgcagaagaccttggtgcatccccaatatgggtgtttaacaatgggatcagtcacaatgatcaagttgaaacaaaaaatgtcatgccttttgttcaagaagcgattgacggtatagagtttgctcgtggagattctaattctacatggggatcggttcgagctgcaatgggacatccagagccttttgaactgaaatatgttgcggttgggaatgaagattgttttaagagttactacagaggaaactatcttgaattctataatgctatcaaaaaagcttatccagatattaaaatcatctccaactgcgatgcatcggctaaaccgctcgatcacccggccgattactttgattaccacatttacactcttgcaagagacttgttttccaagtcccatgattttgacaatacaccgcgaaacggtccaaaggcttttgttagcgaatacgctgtaaacaaagcagatgctaaaaatggcaaccttttggccgctcttggtgaagcagctttcctccttggtttggaaaagaacagtgacattgtagaaatggttagctatgcacctctctttgtcaacacaaacgatagaaggtggatccctgatgcaatagtttttaactcgtctcatctatatggaactcctagctattgggtccaacacttcttcaccgagtcaagcggagcaactcttctcaattctacacttaagggaaagacttcttctgttgaagcatctgccatctctttccaaaccaatggcaaagattacatacagatcaaggctgtaaactttggagaacaatcagtaaatctaaaggtagcagtgacaggattgatggcaaaattttatggatccaaaaagaaagtacttacatctgccagtgtgatggatgagaactctttttcaaacccaaatatgattgtgccacaagaaagtttgctggagatgactgagcaggaagaccttatgtttgttctcccgccgcactcgttctcttccttcgatttgttgacagaatctgaaaatgtcatcaagatgccaatatctgattcatacaagaaaacttcaacaatgtgaagagaaacatcatcttggagactttcatgtcttttgtctttactcttcagtggttattaaacacataaacctatatgttcgtgaataataccaaagttagttg

SEQ ID NO: 80235 - protein, 699 aa, Arabidopsis thaliana
  peptide (1)..(699): Ceres Seq. ID no. 12654956
TFNPSFTAHSCLSSIKVFLWLNLVIMDMETSWRFLRSVCLLSFILGSFSVYQTLCLVDAQEDAIVTLQVDASNVTRRPIPETLFGIFFEEINHAGAGGLWAELVSNRGFEAGGQIIPSNIWPWSIIGDESSIYVVTDRSSCFERNKIALRMEVLCDSNSCPLGGVGVYNPGYWGMNIEEGKKYKVVLYVRSTGDIDVSVSFTSSNGSVTLASENIIALASDLLNWTKKEMLLEANGTDNGARLQFTTTKKGSIWFDQVSAMPMDTYKGHGFRNDLFQMMVDLKPRFIRFPGGCFVEGDWLGNAFRWKETVRAWEERPGHYGDVWKYWTDDGLGHFEFFQLAEDLGASPIWVFNNGISHNDQVETKNVMPFVQEAIDGIEFARGDSNSTWGSVRAAMGHPEPFELKYVAVGNEDCFKSYYRGNYLEFYNAIKKAYPDIKIISNCDASAKPLDHPADYFDYHIYTLARDLFSKSHDFDNTPRNGPKAFVSEYAVNKADAKNGNLLAALGEAAFLLGLEKNSDIVEMVSYAPLFVNTNDRRWIPDAIVFNSSHLYGTPSYWVQHFFTESSGATLLNSTLKGKTSSVEASAISFQTNGKDYIQIKAVNFGEQSVNLKVAVTGLMAKFYGSKKKVLTSASVMDENSFSNPNMIVPQESLLEMTEQEDLMFVLPPHSFSSFDLLTESENVIKMPISDSYKKTSTM

SEQ ID NO: 80236 - protein, 674 aa, Arabidopsis thaliana
  peptide (1)..(674): Ceres Seq. ID no. 12654957
MDMETSWRFLRSVCLLSFILGSFSVYQTLCLVDAQEDAIVTLQVDASNVTRRPIPETLFGIFFEEINHAGAGGLWAELVSNRGFEAGGQIIPSNIWPWSIIGDESSIYVVTDRSSCFERNKIALRMEVLCDSNSCPLGGVGVYNPGYWGMNIEEGKKYKVVLYVRSTGDIDVSVSFTSSNGSVTLASENIIALASDLLNWTKKEMLLEANGTDNGARLQFTTTKKGSIWFDQVSAMPMDTYKGHGFRNDLFQMMVDLKPRFIRFPGGCFVEGDWLGNAFRWKETVRAWEERPGHYGDVWKYWTDDGLGHFEFFQLAEDLGASPIWVFNNGISHNDQVETKNVMPFVQEAIDGIEFARGDSNSTWGSVRAAMGHPEPFELKYVAVGNEDCFKSYYRGNYLEFYNAIKKAYPDIKIISNCDASAKPLDHPADYFDYHIYTLARDLFSKSHDFDNTPRNGPKAFVSEYAVNKADAKNGNLLAALGEAAFLLGLEKNSDIVEMVSYAPLFVNTNDRRWIPDAIVFNSSHLYGTPSYWVQHFFTESSGATLLNSTLKGKTSSVEASAISFQTNGKDYIQIKAVNFGEQSVNLKVAVTGLMAKFYGSKKKVLTSASVMDENSFSNPNMIVPQESLLEMTEQEDLMFVLPPHSFSSFDLLTESENVIKMPISDSYKKTSTM

SEQ ID NO: 80237 - protein, 672 aa, Arabidopsis thaliana
  peptide (1)..(672): Ceres Seq. ID no. 12654958
METSWRFLRSVCLLSFILGSFSVYQTLCLVDAQEDAIVTLQVDASNVTRRPIPETLFGIFFEEINHAGAGGLWAELVSNRGFEAGGQIIPSNIWPWSIIGDESSIYVVTDRSSCFERNKIALRMEVLCDSNSCPLGGVGVYNPGYWGMNIEEGKKYKVVLYVRSTGDIDVSVSFTSSNGSVTLASENIIALASDLLNWTKKEMLLEANGTDNGARLQFTTTKKGSIWFDQVSAMPMDTYKGHGFRNDLFQMMVDLKPRFIRFPGGCFVEGDWLGNAFRWKETVRAWEERPGHYGDVWKYWTDDGLGHFEFFQLAEDLGASPIWVFNNGISHNDQVETKNVMPFVQEAIDGIEFARGDSNSTWGSVRAAMGHPEPFELKYVAVGNEDCFKSYYRGNYLEFYNAIKKAYPDIKIISNCDASAKPLDHPADYFDYHIYTLARDLFSKSHDFDNTPRNGPKAFVSEYAVNKADAKNGNLLAALGEAAFLLGLEKNSDIVEMVSYAPLFVNTNDRRWIPDAIVFNSSHLYGTPSYWVQHFFTESSGATLLNSTLKGKTSSVEASAISFQTNGKDYIQIKAVNFGEQSVNLKVAVTGLMAKFYGSKKKVLTSASVMDENSFSNPNMIVPQESLLEMTEQEDLMFVLPPHSFSSFDLLTESENVIKMPISDSYKKTSTM

SEQ ID NO: 80238 - DNA, 2112 bp, Arabidopsis thaliana
  misc_feature (1)..(2112): Ceres Seq. ID no. 12654963
  misc_feature (1)..(2112): Ortholog of  Ceres SEQ ID NO 13654989 as cited in SEQ ID NO 63117
  misc_feature (1)..(2112): Ortholog of  Ceres SEQ ID NO 13584744 as cited in SEQ ID NO 69137
atggcttcaccgtactcgtccgacgatatccattctccggtgaactcaacggtcgttgcaatagacaaagagaaacatagttcttacgctgttcgttgggccgtcgaccatctcctcaatatgattcacaatcccgtcatgattcttgtccatgttcgtaccaaaaattcaaaccatggagccaacttgaacaatgatgatctaaatcagctttttattccatatcgaggatattgtgcgcgaaaaggggttgttctagacgattccgacgtagcaaaaacaatcttggattacgttaataacaacctggttaacaatcttgtattgggagcatccacgaagaacaccttcgctaggtcttttatgtttagtaaaccacatgaggtgcaatctagcataatgaaatcgacgcctgatttttgttcggtgtatgtcatttctaaaggagggaaagttcagtcttcccgaccagctcaaagacctatcaccaatacgcttgccccgcctcgtgttccatcctctggctttttaatccaatctttatccgatagcgagcaagatctcatacctagggtccagcgtagtgcaaggaacaaacctaatgagactacttatccgcataatcgtgccgccttcaacacgacgcaaaaaggttacaaaagccctataaatgggtcgatggatttcaacaacggctttaatcaagctgccttccaaagaaatcccacgttacaaagttcgttttctgatgaatctgatggtgggtttggagtgatgggttcagttgatctctcttctcaaaatagtatggatttttatcatggtgcatcgagttcttcagaagagtcaattccacaatcaactaaagatattgaagctgagatgagaaggctaaagcttgaacttaagcaaactatggacatgtatagctcagcttgtaaagaagcacttacggcaaaaagaaaggcaaacgagctaaatcaatggaagatagaagaagctcgtaaattcgagaaagcgaggctttctgaagaagcagcattggcagttgctgaaatcgagaaagcaaagtgtagaacagccgtagaagcagctgagaaagctcaaagaatggctgaactagaaggacaaagaaggaagcaagcagagatgaaagctgtaagtgaagaaaaggacaaagaccgcgcagtgagtgctttggcacataacgatgttcgctacagaaaatatagtatagaagagatcgaagaagctacagagaggtttgcaaatcataggaagattggtgaaggaggatatggacctgtgtacaatggtgaacttgaccacactcctgttgccattaaagttttaagacctgatgctgctcaaggaaaaaaacaatttcaacaagaagttgaggttctatgttccataaggcatcctcacatggttcttctccttggtgcatgtcctgaatatggatgtttggtttacgagttcatggaaaatgggagcttagaggatagactttttcgtactggaaactctccaccgctttcgtggaggaaacgttttgaaatagcggcggagattgctaccgcactctcattccttcatcaagctaagccagaacctttagttcaccgcgacctaaaaccagccaatatactcttagacaaaaactacgtgagcaagatcagcgacgttggtttagcgcggttagtccccgcatcgatagctgatagcgtcacgcaattccacatgacatctgcggcaggaacgttttgttacatagaccctgaataccaacaaacaggaatgttaaccacaaaatcagacgtatactcattggggatattgctacttcagattataaccggaaggcctcccatggggctggctcaccaagtttcaagggcaattagtaaaggaactttcaaggaaatgcttgaccccgttgtgcctgattggcctgtacaagaggctcaatcttttgctactctagcgttgaaatgtgcggagctaagaaaaagagatagaccagatcttgggaaggaagtagtcccacatcttattagattaaaaaactttgggaatgatggtgatgagagaactaacgaatggatatga

SEQ ID NO: 80239 - protein, 703 aa, Arabidopsis thaliana
  peptide (1)..(703): Ceres Seq. ID no. 12654964
MASPYSSDDIHSPVNSTVVAIDKEKHSSYAVRWAVDHLLNMIHNPVMILVHVRTKNSNHGANLNNDDLNQLFIPYRGYCARKGVVLDDSDVAKTILDYVNNNLVNNLVLGASTKNTFARSFMFSKPHEVQSSIMKSTPDFCSVYVISKGGKVQSSRPAQRPITNTLAPPRVPSSGFLIQSLSDSEQDLIPRVQRSARNKPNETTYPHNRAAFNTTQKGYKSPINGSMDFNNGFNQAAFQRNPTLQSSFSDESDGGFGVMGSVDLSSQNSMDFYHGASSSSEESIPQSTKDIEAEMRRLKLELKQTMDMYSSACKEALTAKRKANELNQWKIEEARKFEKARLSEEAALAVAEIEKAKCRTAVEAAEKAQRMAELEGQRRKQAEMKAVSEEKDKDRAVSALAHNDVRYRKYSIEEIEEATERFANHRKIGEGGYGPVYNGELDHTPVAIKVLRPDAAQGKKQFQQEVEVLCSIRHPHMVLLLGACPEYGCLVYEFMENGSLEDRLFRTGNSPPLSWRKRFEIAAEIATALSFLHQAKPEPLVHRDLKPANILLDKNYVSKISDVGLARLVPASIADSVTQFHMTSAAGTFCYIDPEYQQTGMLTTKSDVYSLGILLLQIITGRPPMGLAHQVSRAISKGTFKEMLDPVVPDWPVQEAQSFATLALKCAELRKRDRPDLGKEVVPHLIRLKNFGNDGDERTNEWI

SEQ ID NO: 80240 - protein, 663 aa, Arabidopsis thaliana
  peptide (1)..(663): Ceres Seq. ID no. 12654965
MIHNPVMILVHVRTKNSNHGANLNNDDLNQLFIPYRGYCARKGVVLDDSDVAKTILDYVNNNLVNNLVLGASTKNTFARSFMFSKPHEVQSSIMKSTPDFCSVYVISKGGKVQSSRPAQRPITNTLAPPRVPSSGFLIQSLSDSEQDLIPRVQRSARNKPNETTYPHNRAAFNTTQKGYKSPINGSMDFNNGFNQAAFQRNPTLQSSFSDESDGGFGVMGSVDLSSQNSMDFYHGASSSSEESIPQSTKDIEAEMRRLKLELKQTMDMYSSACKEALTAKRKANELNQWKIEEARKFEKARLSEEAALAVAEIEKAKCRTAVEAAEKAQRMAELEGQRRKQAEMKAVSEEKDKDRAVSALAHNDVRYRKYSIEEIEEATERFANHRKIGEGGYGPVYNGELDHTPVAIKVLRPDAAQGKKQFQQEVEVLCSIRHPHMVLLLGACPEYGCLVYEFMENGSLEDRLFRTGNSPPLSWRKRFEIAAEIATALSFLHQAKPEPLVHRDLKPANILLDKNYVSKISDVGLARLVPASIADSVTQFHMTSAAGTFCYIDPEYQQTGMLTTKSDVYSLGILLLQIITGRPPMGLAHQVSRAISKGTFKEMLDPVVPDWPVQEAQSFATLALKCAELRKRDRPDLGKEVVPHLIRLKNFGNDGDERTNEWI

SEQ ID NO: 80241 - protein, 657 aa, Arabidopsis thaliana
  peptide (1)..(657): Ceres Seq. ID no. 12654966
MILVHVRTKNSNHGANLNNDDLNQLFIPYRGYCARKGVVLDDSDVAKTILDYVNNNLVNNLVLGASTKNTFARSFMFSKPHEVQSSIMKSTPDFCSVYVISKGGKVQSSRPAQRPITNTLAPPRVPSSGFLIQSLSDSEQDLIPRVQRSARNKPNETTYPHNRAAFNTTQKGYKSPINGSMDFNNGFNQAAFQRNPTLQSSFSDESDGGFGVMGSVDLSSQNSMDFYHGASSSSEESIPQSTKDIEAEMRRLKLELKQTMDMYSSACKEALTAKRKANELNQWKIEEARKFEKARLSEEAALAVAEIEKAKCRTAVEAAEKAQRMAELEGQRRKQAEMKAVSEEKDKDRAVSALAHNDVRYRKYSIEEIEEATERFANHRKIGEGGYGPVYNGELDHTPVAIKVLRPDAAQGKKQFQQEVEVLCSIRHPHMVLLLGACPEYGCLVYEFMENGSLEDRLFRTGNSPPLSWRKRFEIAAEIATALSFLHQAKPEPLVHRDLKPANILLDKNYVSKISDVGLARLVPASIADSVTQFHMTSAAGTFCYIDPEYQQTGMLTTKSDVYSLGILLLQIITGRPPMGLAHQVSRAISKGTFKEMLDPVVPDWPVQEAQSFATLALKCAELRKRDRPDLGKEVVPHLIRLKNFGNDGDERTNEWI

SEQ ID NO: 80242 - DNA, 1867 bp, Arabidopsis thaliana
  misc_feature (1)..(1867): Ceres Seq. ID no. 12655002
  misc_feature (1)..(1867): Ortholog of  Ceres SEQ ID NO 13594380 as cited in SEQ ID NO 58039
  misc_feature (1)..(1867): Ortholog of  Ceres SEQ ID NO 13597407 as cited in SEQ ID NO 64106
  misc_feature (1)..(1867): Ortholog of  Ceres SEQ ID NO 15180690 as cited in SEQ ID NO 0
aacttaagtgtttctgtttaactccttgagagaaaataacttttaaactttagcttctaagagatattcaggatgaccggaggaggatttgcgacttcggcgaacggagtagagtttgaggcaaagataactccaatagtcatcatatcttgcatcatggctgctaccggcggcctcatgtttggttacgacgtcggtgtctccggcggagtgacatcgatgccggactttctcgaaaagttttttcccgtggtttatcggaaagtagtagctggcgccgacaaagacagcaactactgcaaatacgacaaccaaggactacaacttttcacatcatctttatacttagccggtctaaccgcaacgttctttgcttcatacacgacaagaacgctcggaaggaggctaactatgctcatagccggcgttttcttcatcataggtgtggctctcaacgcgggggctcaagacctagccatgcttattgcaggcaggatattgcttggttgtggagttgggttcgctaatcaagccgttccgttgttcttgtcggagattgcacctactaggatccgtggtggtcttaatattctctttcagcttaacgtcactattggtatcctcttcgccaatcttgtcaactatgggaccgccaagattaaaggaggttggggatggaggttatcgttaggtttggcgggaattcccgcgcttcttctaacggtcggagctttattggtgacagagacaccaaacagtttagtcgaaagaggtcgtctcgatgaaggtaaagctgttcttcgtcgtattcgagggaccgataatgttgaaccagagttcgctgatctccttgaagctagtcgacttgctaaagaagttaaacacccttttagaaaccttcttcaacgtagaaaccgtcctcagctcgtcatcgccgtcgctttacagattttccagcaatgtactggaatcaacgcgattatgttctacgcgcctgttctgttcagcacattagggtttggtagtgacgcttcactttactcagcagtggtgaccggagcagtcaacgtcctctcaactttagtctcaatctactccgttgacaaagtcggtcgccgagttcttctcctagaagctggtgtccaaatgttcttctctcaagtcgtaatcgccattatccttggcgtcaaagtaacagacacttctacaaatctctccaaaggtttcgcaattctagtcgtggtaatgatctgcacatacgtcgctgctttcgcctggtcttggggaccgctcgggtggttaatccctagtgagacattccctctagagacacgttccgcgggacaaagtgtaacggtctgcgttaacttgctcttcacgttcattatcgctcaagctttcctctctatgctttgccatttcaagtttgggatattcatcttcttttctgcatgggttttgattatgtctgtctttgtgatgttcctacttccggagactaagaatattcctatcgaggagatgactgagagagtttggaagaagcattggttctgggctaggttcatggatgatcataatgatcacgagttcgtgaatggtgagaagagtaatggtaaatctaatggctttgatccttcaacacggctttaaagtggtttaagagtccctaaccaaagtagaagcagaagagagtgaacaagaggtggtaaacacaccaaagtagagaagggaaatacagttttcaattctatacagtgtactaaatttcgttactttaagtttgaactgcgtttgtgaataagtgaagtttttttttttgctttgttgtggttcttaatgtcatccctgagttccaattttctac

SEQ ID NO: 80243 - protein, 526 aa, Arabidopsis thaliana
  peptide (1)..(526): Ceres Seq. ID no. 12655003
MTGGGFATSANGVEFEAKITPIVIISCIMAATGGLMFGYDVGVSGGVTSMPDFLEKFFPVVYRKVVAGADKDSNYCKYDNQGLQLFTSSLYLAGLTATFFASYTTRTLGRRLTMLIAGVFFIIGVALNAGAQDLAMLIAGRILLGCGVGFANQAVPLFLSEIAPTRIRGGLNILFQLNVTIGILFANLVNYGTAKIKGGWGWRLSLGLAGIPALLLTVGALLVTETPNSLVERGRLDEGKAVLRRIRGTDNVEPEFADLLEASRLAKEVKHPFRNLLQRRNRPQLVIAVALQIFQQCTGINAIMFYAPVLFSTLGFGSDASLYSAVVTGAVNVLSTLVSIYSVDKVGRRVLLLEAGVQMFFSQVVIAIILGVKVTDTSTNLSKGFAILVVVMICTYVAAFAWSWGPLGWLIPSETFPLETRSAGQSVTVCVNLLFTFIIAQAFLSMLCHFKFGIFIFFSAWVLIMSVFVMFLLPETKNIPIEEMTERVWKKHWFWARFMDDHNDHEFVNGEKSNGKSNGFDPSTRL

SEQ ID NO: 80244 - protein, 498 aa, Arabidopsis thaliana
  peptide (1)..(498): Ceres Seq. ID no. 12655004
MAATGGLMFGYDVGVSGGVTSMPDFLEKFFPVVYRKVVAGADKDSNYCKYDNQGLQLFTSSLYLAGLTATFFASYTTRTLGRRLTMLIAGVFFIIGVALNAGAQDLAMLIAGRILLGCGVGFANQAVPLFLSEIAPTRIRGGLNILFQLNVTIGILFANLVNYGTAKIKGGWGWRLSLGLAGIPALLLTVGALLVTETPNSLVERGRLDEGKAVLRRIRGTDNVEPEFADLLEASRLAKEVKHPFRNLLQRRNRPQLVIAVALQIFQQCTGINAIMFYAPVLFSTLGFGSDASLYSAVVTGAVNVLSTLVSIYSVDKVGRRVLLLEAGVQMFFSQVVIAIILGVKVTDTSTNLSKGFAILVVVMICTYVAAFAWSWGPLGWLIPSETFPLETRSAGQSVTVCVNLLFTFIIAQAFLSMLCHFKFGIFIFFSAWVLIMSVFVMFLLPETKNIPIEEMTERVWKKHWFWARFMDDHNDHEFVNGEKSNGKSNGFDPSTRL

SEQ ID NO: 80245 - protein, 491 aa, Arabidopsis thaliana
  peptide (1)..(491): Ceres Seq. ID no. 12655005
MFGYDVGVSGGVTSMPDFLEKFFPVVYRKVVAGADKDSNYCKYDNQGLQLFTSSLYLAGLTATFFASYTTRTLGRRLTMLIAGVFFIIGVALNAGAQDLAMLIAGRILLGCGVGFANQAVPLFLSEIAPTRIRGGLNILFQLNVTIGILFANLVNYGTAKIKGGWGWRLSLGLAGIPALLLTVGALLVTETPNSLVERGRLDEGKAVLRRIRGTDNVEPEFADLLEASRLAKEVKHPFRNLLQRRNRPQLVIAVALQIFQQCTGINAIMFYAPVLFSTLGFGSDASLYSAVVTGAVNVLSTLVSIYSVDKVGRRVLLLEAGVQMFFSQVVIAIILGVKVTDTSTNLSKGFAILVVVMICTYVAAFAWSWGPLGWLIPSETFPLETRSAGQSVTVCVNLLFTFIIAQAFLSMLCHFKFGIFIFFSAWVLIMSVFVMFLLPETKNIPIEEMTERVWKKHWFWARFMDDHNDHEFVNGEKSNGKSNGFDPSTRL

SEQ ID NO: 80246 - DNA, 1721 bp, Arabidopsis thaliana
  misc_feature (1)..(1721): Ceres Seq. ID no. 12655014
  misc_feature (1)..(1721): Ortholog of  Ceres SEQ ID NO 13655852 as cited in SEQ ID NO 64636
atggcgtcgtctctatctccaccggaagaagcttcgtatcaccaccgtcataccaaaaggtacacctcctccgcttcctccgcttcctccaccaccaacggaaccgtcgaatcatcggtttccgatttcgtcaaacgtcccaaaatctctcatccgaattacatatcaagttccgagatcgaatcagagttttctcatcacgatccagatttcgcaagaatcaacaacggtagttttggttgttgtccgtcatcaatcctagctttacaacgagattggcagctccggttccttcgtcaaccggatcgattctatttcgacgaactcaaaccaaaaatctccgattctagatctgtaatcaaacggttaataaacgccgagcatgacgatgaagtctcgatcgtcgataacgcaacaaccgcagctgcaatcgttcttcaacaaaccgcttgggcttttcgtgaaggtcggttcgataaaggcgacgcggtggttatgcttcattacgcttatggctctgtgaagaaatctgttgaagcgtatgttacacgctccggtggacacgtcaccgaggtacagttaccttttccggttatttcggcggatgagattattgaccggtttaggattggtttagagtctggtaaagcgaatggtaggagagttaggttagctttgattgatcatgtgacttctatgccaagtgttgtgattcctattaaagagcttgtgaagatttgtagaagagaaggtgttgaccaagtttttgttgatgctgctcatgggataggttgtgttgatgttgatatgaaggagattggtgctgatttctatactagtaatcttcataagtggtttttcgcaccgccttctgttgctttcttgtattgtaggaaatcgagtaatggtggtgttgcggatttgcatcatcccgttgtttcgaatgagtatgggaacggtttggcggttgagagttcgtgggttggaactagagattatagtgctcagttggtggttccttcgatattggagtttgtaaatcggtttgaaggcgggattgatggtattaagaagaggaatcatgagtctgttgttgagatgggtcaaatgttggttaagtcttgggggactcagctcggttgtccccctgagatgtgtgcgagtatgatcatggttgggttgccagtgtgtttaggagtgtcgagtgagtcggatgttttgaagcttagaacgtttttaagagaaaagttcagaattgaaatcccaatctactttaggccaccaggggatggagagattgatccgatcacgggatatgtgcgtatttcttttcaagtttacaacaaacctgaggattatcataggctcagggacgcaataaacgggcttgttagagatgggttcaaatgcacgtctctatcttgttgaataagggcataaagcttttcaggcgaatgaatcatgagaaagaaagttatcatggtttaggtaccatggagctttatgagattcgaaggagtctctatttccacaatcatatctctcaacttcttatacagtaatgatgtatgagaaaactaagttttcttctatttccgttgctcgaatcgcctgttcaaaatttcccatttacataaccttagcaggtctaataaagcactctagtccgtgttgtgttctcgtaattggtctttaaattctctaattgttacgacggtcac

SEQ ID NO: 80247 - protein, 475 aa, Arabidopsis thaliana
  peptide (1)..(475): Ceres Seq. ID no. 12655015
MASSLSPPEEASYHHRHTKRYTSSASSASSTTNGTVESSVSDFVKRPKISHPNYISSSEIESEFSHHDPDFARINNGSFGCCPSSILALQRDWQLRFLRQPDRFYFDELKPKISDSRSVIKRLINAEHDDEVSIVDNATTAAAIVLQQTAWAFREGRFDKGDAVVMLHYAYGSVKKSVEAYVTRSGGHVTEVQLPFPVISADEIIDRFRIGLESGKANGRRVRLALIDHVTSMPSVVIPIKELVKICRREGVDQVFVDAAHGIGCVDVDMKEIGADFYTSNLHKWFFAPPSVAFLYCRKSSNGGVADLHHPVVSNEYGNGLAVESSWVGTRDYSAQLVVPSILEFVNRFEGGIDGIKKRNHESVVEMGQMLVKSWGTQLGCPPEMCASMIMVGLPVCLGVSSESDVLKLRTFLREKFRIEIPIYFRPPGDGEIDPITGYVRISFQVYNKPEDYHRLRDAINGLVRDGFKCTSLSC

SEQ ID NO: 80248 - protein, 310 aa, Arabidopsis thaliana
  peptide (1)..(310): Ceres Seq. ID no. 12655016
MLHYAYGSVKKSVEAYVTRSGGHVTEVQLPFPVISADEIIDRFRIGLESGKANGRRVRLALIDHVTSMPSVVIPIKELVKICRREGVDQVFVDAAHGIGCVDVDMKEIGADFYTSNLHKWFFAPPSVAFLYCRKSSNGGVADLHHPVVSNEYGNGLAVESSWVGTRDYSAQLVVPSILEFVNRFEGGIDGIKKRNHESVVEMGQMLVKSWGTQLGCPPEMCASMIMVGLPVCLGVSSESDVLKLRTFLREKFRIEIPIYFRPPGDGEIDPITGYVRISFQVYNKPEDYHRLRDAINGLVRDGFKCTSLSC

SEQ ID NO: 80249 - protein, 243 aa, Arabidopsis thaliana
  peptide (1)..(243): Ceres Seq. ID no. 12655017
MPSVVIPIKELVKICRREGVDQVFVDAAHGIGCVDVDMKEIGADFYTSNLHKWFFAPPSVAFLYCRKSSNGGVADLHHPVVSNEYGNGLAVESSWVGTRDYSAQLVVPSILEFVNRFEGGIDGIKKRNHESVVEMGQMLVKSWGTQLGCPPEMCASMIMVGLPVCLGVSSESDVLKLRTFLREKFRIEIPIYFRPPGDGEIDPITGYVRISFQVYNKPEDYHRLRDAINGLVRDGFKCTSLSC

SEQ ID NO: 80250 - DNA, 1361 bp, Arabidopsis thaliana
  misc_feature (1)..(1361): Ceres Seq. ID no. 12655026
  misc_feature (1)..(1361): Ortholog of  Ceres SEQ ID NO 14316404 as cited in SEQ ID NO 57641
  misc_feature (1)..(1361): Ortholog of  Ceres SEQ ID NO 12611159 as cited in SEQ ID NO 59821
  misc_feature (1)..(1361): Ortholog of  Ceres SEQ ID NO 15180029 as cited in SEQ ID NO 0
atagtttctctcattttataataattttctccatcttcttccttcctcttcaagcttatagaacctccaagaaccataaaactctctctgcaacaatctatactttcttcattacttttataaaaaatgggaagacattcttgttgttttaagcagaagctaagaaaaggcctttggtctcctgaagaagatgagaaacttctcaattacatcactagacatggtcatggctgttggagttctgtccctaaactcgcaggtttgcaaagatgtggaaagagttgtagacttaggtggataaattatttgagaccagatttaaagagaggagctttctctcaagacgaagaaagcttgatcattgagctccatgctgcattaggcaacagatggtctcaaatcgcaacgcggttaccgggaagaacagacaacgagatcaaaaacttttggaactcatgtcttaagaagaagctgagaagaaaaggcattgacccaacaacacataaacccttaataacaaacgagcttcaatctcttaacgtcatagatcagaaactgacgtcatcagaagtagtaaagtcaacgggttcgataaacaacctacatgatcagtcaatggtcgtctcatcgcaacaaggtccatggtggttcccggcgaatacaactacgactaatcaaaactctgcgttttgctttagttcaagtaatactacaacggtttcagaccagatcgtatctttaatctcttcaatgtctacgtcatcatctccgacaccaatgacttcaaacttcagtcctgctccaaacaactgggaacaactcaactactgcaacacagtaccaagtcagagcaacagtatctacagtgccttctttggtaatcaatacacagaagctagccaaaccatgaacaataataatccactagtagatcaacatcatcatcatcaagacatgaagtcatgggcatcagagattcttcattacacagaacacaaccaaagctcagaaactgttatagaagcagaagtgaagccagacattgccaactactactggagatcagcatcatcatcgtcgtcaccaaaccaagaagctgcaacattactacacgatgctaacgtggaagtgtacggtaaaaatctacaaaagcttaataacatggtgtttgatcagagcctttagattattaacatgtgttatagagagtttcattttctattcatattcatagacctgagtttattgattgatccatacatttgttatgcttgtgtgtaaagtatgtatatggtttttgatttatgtaaattttctgctcgagtgaatttttttggtgctaagatgtagttctttattcc

SEQ ID NO: 80251 - protein, 352 aa, Arabidopsis thaliana
  peptide (1)..(352): Ceres Seq. ID no. 12655027
MGRHSCCFKQKLRKGLWSPEEDEKLLNYITRHGHGCWSSVPKLAGLQRCGKSCRLRWINYLRPDLKRGAFSQDEESLIIELHAALGNRWSQIATRLPGRTDNEIKNFWNSCLKKKLRRKGIDPTTHKPLITNELQSLNVIDQKLTSSEVVKSTGSINNLHDQSMVVSSQQGPWWFPANTTTTNQNSAFCFSSSNTTTVSDQIVSLISSMSTSSSPTPMTSNFSPAPNNWEQLNYCNTVPSQSNSIYSAFFGNQYTEASQTMNNNNPLVDQHHHHQDMKSWASEILHYTEHNQSSETVIEAEVKPDIANYYWRSASSSSSPNQEAATLLHDANVEVYGKNLQKLNNMVFDQSL

SEQ ID NO: 80252 - protein, 189 aa, Arabidopsis thaliana; identical to SEQ ID NO: 69842
  peptide (1)..(189): Ceres Seq. ID no. 12655028

SEQ ID NO: 80253 - DNA, 1272 bp, Arabidopsis thaliana
  misc_feature (1)..(1272): Ceres Seq. ID no. 12655029
  misc_feature (1)..(1272): Ortholog of  Ceres SEQ ID NO 14312216 as cited in SEQ ID NO 53930
  misc_feature (1)..(1272): Ortholog of  Ceres SEQ ID NO 13656404 as cited in SEQ ID NO 65806
  misc_feature (1)..(1272): Ortholog of  Ceres SEQ ID NO 12779935 as cited in SEQ ID NO 66774
  misc_feature (1)..(1272): Ortholog of  Ceres SEQ ID NO 13598695 as cited in SEQ ID NO 67368
  misc_feature (1)..(1272): Ortholog of  Ceres SEQ ID NO 13591174 as cited in SEQ ID NO 68289
atgaggaagcttttcttgttagggtttatagttgcaggactggttcttgggaatgaggcaaatgggtatttagagttcaatgtcactgaattagatcgcattgaggatttagagtttggtttctccaaatttagttccaatttcaatccattaatggttggtctcacacttatcagaggagctggttctaaaggagctgtttgtttggatggtacattgcctggatatcacttacatcgtggacatggatctggagccaatagctggttaattcaattagagggaggaggatggtgtgacaacattaggaactgtgtataccgaaagaagtcgcgtcgcggatcttctaactatatggagaaacaaatacagtttacaggaatacttagcaataaagctcaagaaaatccagactttttcaactggaatcgagttaagcttcgttactgcgatggtggttccttcagtggagatagtcagaacaaggctgcacggcttcagtttagaggagagaagatatggagagccgcaatggacgatttgaaggcaaagggaatgcgaaatgcgaaacaggcacttctatctggttgctctgcaggtggtctagcagttattttacgctgtgacgaattcagaaacttgttttctggatggaccagagttaaatgcttaagtgatgcaggcttgttcttggacacgcctgatgtatccggtggacacactataaggaatttatataacggcgttgtgcagttgcagggagtgaagaacaatttgccacatttatgcactaaccatctcaatccaacctctgtaagctcttctttacttagttgtttcttccctcaaaacttgatcagtcagatgaaaactcctcttttcattgtcaatgcagcatatgatatttggcagattcaaagcagtatcgctccgccgagtgcagatcctagtggttattggcatgaatgcagattaaaccacggtagatgcactccggcgcagatacggttcttgcaagggtttagaaaccaaatgttgagagctgtgagtggtttctcgaattcgaaaaagaacggtttgttcatcaattcttgctttgctcattgccaaaccgaaaggcaagacacttggttcgccgatgattctcctgttatacacaaaaaggcggtggcgatagcggttggagattggtatttcgatagagctgaagtgaagctaatagattgtccatacccgtgtgataggagctgtcacaatctggtcttcagatga

SEQ ID NO: 80254 - protein, 423 aa, Arabidopsis thaliana
  peptide (1)..(423): Ceres Seq. ID no. 12655030
MRKLFLLGFIVAGLVLGNEANGYLEFNVTELDRIEDLEFGFSKFSSNFNPLMVGLTLIRGAGSKGAVCLDGTLPGYHLHRGHGSGANSWLIQLEGGGWCDNIRNCVYRKKSRRGSSNYMEKQIQFTGILSNKAQENPDFFNWNRVKLRYCDGGSFSGDSQNKAARLQFRGEKIWRAAMDDLKAKGMRNAKQALLSGCSAGGLAVILRCDEFRNLFSGWTRVKCLSDAGLFLDTPDVSGGHTIRNLYNGVVQLQGVKNNLPHLCTNHLNPTSVSSSLLSCFFPQNLISQMKTPLFIVNAAYDIWQIQSSIAPPSADPSGYWHECRLNHGRCTPAQIRFLQGFRNQMLRAVSGFSNSKKNGLFINSCFAHCQTERQDTWFADDSPVIHKKAVAIAVGDWYFDRAEVKLIDCPYPCDRSCHNLVFR

SEQ ID NO: 80255 - protein, 372 aa, Arabidopsis thaliana
  peptide (1)..(372): Ceres Seq. ID no. 12655031
MVGLTLIRGAGSKGAVCLDGTLPGYHLHRGHGSGANSWLIQLEGGGWCDNIRNCVYRKKSRRGSSNYMEKQIQFTGILSNKAQENPDFFNWNRVKLRYCDGGSFSGDSQNKAARLQFRGEKIWRAAMDDLKAKGMRNAKQALLSGCSAGGLAVILRCDEFRNLFSGWTRVKCLSDAGLFLDTPDVSGGHTIRNLYNGVVQLQGVKNNLPHLCTNHLNPTSVSSSLLSCFFPQNLISQMKTPLFIVNAAYDIWQIQSSIAPPSADPSGYWHECRLNHGRCTPAQIRFLQGFRNQMLRAVSGFSNSKKNGLFINSCFAHCQTERQDTWFADDSPVIHKKAVAIAVGDWYFDRAEVKLIDCPYPCDRSCHNLVFR

SEQ ID NO: 80256 - protein, 305 aa, Arabidopsis thaliana
  peptide (1)..(305): Ceres Seq. ID no. 12655032
MEKQIQFTGILSNKAQENPDFFNWNRVKLRYCDGGSFSGDSQNKAARLQFRGEKIWRAAMDDLKAKGMRNAKQALLSGCSAGGLAVILRCDEFRNLFSGWTRVKCLSDAGLFLDTPDVSGGHTIRNLYNGVVQLQGVKNNLPHLCTNHLNPTSVSSSLLSCFFPQNLISQMKTPLFIVNAAYDIWQIQSSIAPPSADPSGYWHECRLNHGRCTPAQIRFLQGFRNQMLRAVSGFSNSKKNGLFINSCFAHCQTERQDTWFADDSPVIHKKAVAIAVGDWYFDRAEVKLIDCPYPCDRSCHNLVFR

SEQ ID NO: 80257 - DNA, 1915 bp, Arabidopsis thaliana
  misc_feature (1)..(1915): Ceres Seq. ID no. 12655043
  misc_feature (1)..(1915): Ortholog of  Ceres SEQ ID NO 13597732 as cited in SEQ ID NO 64810
  misc_feature (1)..(1915): Ortholog of  Ceres SEQ ID NO 14301912 as cited in SEQ ID NO 67786
aactccaatgctcacttatacagaagctgagaagcagaaccgcttttatataatcgcactcactcagagaaacagagaagacgatagatagagaaaaaaaaaaaatggcgttggctcttcgtagactctcctcttccgttaagaaaccgatctcgcttctctcctctaatggcggttcactccgtttcatgtcgtctttatcaaccgcagctatggcggaatcggagaaatctcgttctagttggattaagcaattgaatgcatctctagatgaaatcgatcctgaagttgcggatattatcgaattagagaaggctagacaatggaagggatttgaacttataccgtcagagaatttcacttctctatctgtgatgcaagccgttggttctgttatgactaataagtatagtgaaggataccctggagctagatactatggaggaaatgagtacattgacatggctgagacattatgtcaaaaacgcgcattagaagcttttcagttagatccttctaaatggggagtcaatgtgcagtctttatcaggatcaccagctaatttccaagtttacactgcattgttgaagcctcatgaaagaatcatggcacttgatttacctcatggtggacatctttctcatggttatcagactgacacgaagaaaatatcggctgtatccatcttttttgagacaatgccatacagattggatgagaacactggttacattgattatgaccagctagaaaagagtgccgtgcttttcagaccgaaacttattgttgcgggtgcaagtgcttatgctcgtctatatgactatgcacgtattcgtaaggtctgtaacaagcaaaaggcagttatgttggctgatatggctcatattagtgggttggttgctgctggcgttattccttctccttttgagtatgcagatgttgttacgactacaactcacaaatcgcttcgcggtcctagaggggctatgatattctttaggaaggggttaaaagagattaacaaacaagggaaagaggtcatgtatgactatgaggacagaattaatcaagctgtttttcctggactgcaaggtggtccacataatcacactataacgggtctagcagttgctctgaagcaggcaagaactcctgagtacaaggcctaccaggatcaagttctccgtaattgctcaaagtttgctgagactttgcttgcgaaaggatatgatttagtgtctggaggcactgataatcatttagttttggtgaatctgaaaaacaagggaatagatggatcaagagtggaaaaagtattagaattagtacatattgcagcaaacaagaatactgttcctggtgatgtttctgccatggttcccggtggcatccgtatgggaacaccagccctcacatcaagaggattcattgaggaagattttgcaaaagtggcggagtattttgatttagccgtcaagatagccttaaagatcaaagcagagtctcaaggaacaaagttgaaagactttgtagcaacaatgcaatcaaatgagaaattacagtcagagatgtcaaagctccgtgagatggtagaagaatatgctaagcaattcccaacgattgggttcgagaaagagacgatgagatacaaagagtagttttcatcgtgtggattgacacgtttccacatctctgagatgctttagtgatcatggaccagaggcgcaaccgatggtctgaagtatcgctgaaactaaagttgaactaaaaaaatcgcactccaatgttgtctcttaccctttccttttgtctctcaaattttatctttgcttccttaagttggttcctcaaaattcaaaatttgtaatgcaactggtttaaggttgctatgatggataatggcaactaaagttat

SEQ ID NO: 80258 - protein, 517 aa, Arabidopsis thaliana
  peptide (1)..(517): Ceres Seq. ID no. 12655044
MALALRRLSSSVKKPISLLSSNGGSLRFMSSLSTAAMAESEKSRSSWIKQLNASLDEIDPEVADIIELEKARQWKGFELIPSENFTSLSVMQAVGSVMTNKYSEGYPGARYYGGNEYIDMAETLCQKRALEAFQLDPSKWGVNVQSLSGSPANFQVYTALLKPHERIMALDLPHGGHLSHGYQTDTKKISAVSIFFETMPYRLDENTGYIDYDQLEKSAVLFRPKLIVAGASAYARLYDYARIRKVCNKQKAVMLADMAHISGLVAAGVIPSPFEYADVVTTTTHKSLRGPRGAMIFFRKGLKEINKQGKEVMYDYEDRINQAVFPGLQGGPHNHTITGLAVALKQARTPEYKAYQDQVLRNCSKFAETLLAKGYDLVSGGTDNHLVLVNLKNKGIDGSRVEKVLELVHIAANKNTVPGDVSAMVPGGIRMGTPALTSRGFIEEDFAKVAEYFDLAVKIALKIKAESQGTKLKDFVATMQSNEKLQSEMSKLREMVEEYAKQFPTIGFEKETMRYKE

SEQ ID NO: 80259 - protein, 489 aa, Arabidopsis thaliana
  peptide (1)..(489): Ceres Seq. ID no. 12655045
MSSLSTAAMAESEKSRSSWIKQLNASLDEIDPEVADIIELEKARQWKGFELIPSENFTSLSVMQAVGSVMTNKYSEGYPGARYYGGNEYIDMAETLCQKRALEAFQLDPSKWGVNVQSLSGSPANFQVYTALLKPHERIMALDLPHGGHLSHGYQTDTKKISAVSIFFETMPYRLDENTGYIDYDQLEKSAVLFRPKLIVAGASAYARLYDYARIRKVCNKQKAVMLADMAHISGLVAAGVIPSPFEYADVVTTTTHKSLRGPRGAMIFFRKGLKEINKQGKEVMYDYEDRINQAVFPGLQGGPHNHTITGLAVALKQARTPEYKAYQDQVLRNCSKFAETLLAKGYDLVSGGTDNHLVLVNLKNKGIDGSRVEKVLELVHIAANKNTVPGDVSAMVPGGIRMGTPALTSRGFIEEDFAKVAEYFDLAVKIALKIKAESQGTKLKDFVATMQSNEKLQSEMSKLREMVEEYAKQFPTIGFEKETMRYKE

SEQ ID NO: 80260 - protein, 481 aa, Arabidopsis thaliana
  peptide (1)..(481): Ceres Seq. ID no. 12655046
MAESEKSRSSWIKQLNASLDEIDPEVADIIELEKARQWKGFELIPSENFTSLSVMQAVGSVMTNKYSEGYPGARYYGGNEYIDMAETLCQKRALEAFQLDPSKWGVNVQSLSGSPANFQVYTALLKPHERIMALDLPHGGHLSHGYQTDTKKISAVSIFFETMPYRLDENTGYIDYDQLEKSAVLFRPKLIVAGASAYARLYDYARIRKVCNKQKAVMLADMAHISGLVAAGVIPSPFEYADVVTTTTHKSLRGPRGAMIFFRKGLKEINKQGKEVMYDYEDRINQAVFPGLQGGPHNHTITGLAVALKQARTPEYKAYQDQVLRNCSKFAETLLAKGYDLVSGGTDNHLVLVNLKNKGIDGSRVEKVLELVHIAANKNTVPGDVSAMVPGGIRMGTPALTSRGFIEEDFAKVAEYFDLAVKIALKIKAESQGTKLKDFVATMQSNEKLQSEMSKLREMVEEYAKQFPTIGFEKETMRYKE

SEQ ID NO: 80261 - DNA, 3194 bp, Arabidopsis thaliana
  misc_feature (1)..(3194): Ceres Seq. ID no. 12655073
  misc_feature (1)..(3194): Ortholog of  Ceres SEQ ID NO 13600310 as cited in SEQ ID NO 5086
aaacaccgcaattttctctgcatctcataatttcaccagaatctcagatggcgacgacatcggagatcaacaatgatctttcgttttccgttgtatcgattgttgaagatgttcttcaacaacatagtagccgatcaagcgacgtcggtttggtttccagaaaagttgaagaatcttctttgagaagatatgaagctgctgggtggcttagagatatgatcggagtttccaatggtaaagattttccaggagagccttctgaagaagagtttaggcttggattgcgaagtgggatcgttctttgtaatgttcttaacaaagttaatcctggatcagtctcaaaggtcgttgaagcgccggacgatgttgcagatggagctgcactttcagcttttcaatactttgaaaacataaggaattttttagtagctatagaggaaatggggttgccatcatttgaagcttcagatatggagaagggaggcaagtctataaggatagtgaactgcattcttgcccttaagtcttatagtgagtggaaactgaaaggtgaaaatggtccatggaggtatggatctaacatgaaacataactttggatcgagaaaactatttctgagaaaaagttcagagccatttgttagttctatatcgagaactcagtcgacggatatgttatcaactgatcaacctctgagttctgatggagattctagatccataaatgggcttgttcggtcattcattgcagacagaaagcatgaagatattccaaatgttgtagagtctgtgttgaacaaagttatggaagaagtccagcagcgtttatcaatccacaatgaaatgatgaaatcaagttcaaagcctattccagaagatgattcatcctgtgagacagtggtccggtctcagctgtgtgatgcaagacaacatgaggaagcagaagaaaatagtccgccccaggttgtggaaaaaaagtttcaaaggacaaattttgaacatcacgaagaacaaaagattcttctgaatcaacaaaaacacatccaggagttgaagcaaaccttatacactacaaaagcaggaatgaaattgctgcagatgaagtatcaagaagatttctttcatctaggcaagcatttaaatggtttagcttatgcggctacgggatacaaaagggttcttgaagaaaaccgtaaactgtacaatctagtgcaggatctaaaaggaaacatacgggtgtactgtcgagttaggccgttcttgcctgggcaagaaagtggtggtttgagtgccgtggaagacatagacgaagggaccatcacgatcagagttccatcaaagtatgggaaagcaggacaaaaaccatttatgttcaacaaagtctttggtccttctgcaacacaagaggaagtgttttcagacatgcagcctttggtacggtcggttctcgatggctacaatgtctgcatcttcgcttatggccaaaccgggtcagggaaaacttttaccatgacagggcctaaggaactgactgaagagagcctaggtgtgaactacagggcactggcagatctgtttcttctatcaaatcaaagaaaagacacgaccagctacgaaatctcagttcagatgttggaaatttacaacgagcaagtcagagatctacttgcccaagatggccagactaaaaggttagagatcagaaacaactctcacaatggaatcaatgtaccggaagcaagtctagtgcctgtctcatcgacggatgacgttatacagctaatggatttgggacacatgaatcgtgcagtgagctctacagccatgaatgacagaagtagtcgatctcacagttgtgtaactgttcatgttcaaggcagagacctcacatctggctctatcctccatggttctatgcatctggttgatcttgcaggaagcgagagagtggacaagtctgaggtgactggagacagactgaaggaggctcaacacatcaacaagtccctctcggctcttggagatgtcatctcctcgctttcccagaagacttctcatgtgccttacagaaacagtaaactcactcagctgctgcaggactccctcggaggatcagccaagacacttatgtttgtccacataagtccagaacctgacactctcggagaaactattagtactctgaagtttgctgaacgagtggggagtgttgagctaggcgctgctcgtgtgaacaaagataactcagaggttaaggagcttaaagagcagattgctaatcttaagatggctctagtgaggaaaggaaatggtaatgatgtacaaccaacagctataccaatcaaccgtgagagaatatcgagaagaagatcactcgaaactcctactattcgacccaaattacctaccatgggaaacacatcaaacaacagtaggccccagatcatggatctaagtggaccagaggcttttaacgacagtactgcatcttcaagaagacacagcttagatatccatgagctaatgaaatcttcttctccggcttggccgaggcagccactcaatggaaaagacgaggacagagaatctaagtcgggcgagtggatcgataagcatgaagaattaattcaaaatcagaatccaaattctcccgagcaattctaccagtcaatggtccctcaacaacaatcactatatggtgggaaacaagatttcgaagtgcagagtattacagataacgaatctgatgaagccgcaacaagcgattgctcagattccgatttgctgtggcgattgagcgttcaagtgaatgttcccaaagtttctaatatccaaaactcagcaaaccccaaaccaaagaaaattcagcccagaactgctaaactctcagaaactagaagtttaattccatcgctgatcccagcaccaagcaagagacctcctaacacagtaaattcacagccgcagcgaccaacgagagatggaaaacgcagactgagtttaggcacatgaacacaccagttttgtaaagagtttaaaaaggaaggagacaaatatttgttgttttgtatattgtgagagaaagctttctctgttgtggccgctcttattgtgccattaaggtaaaaatctcaaatttgctgttttgagtgtacaaaaaatgattccttattatacaatcttcttttggattct

SEQ ID NO: 80262 - protein, 1002 aa, Arabidopsis thaliana
  peptide (1)..(1002): Ceres Seq. ID no. 12655074
TPQFSLHLIISPESQMATTSEINNDLSFSVVSIVEDVLQQHSSRSSDVGLVSRKVEESSLRRYEAAGWLRDMIGVSNGKDFPGEPSEEEFRLGLRSGIVLCNVLNKVNPGSVSKVVEAPDDVADGAALSAFQYFENIRNFLVAIEEMGLPSFEASDMEKGGKSIRIVNCILALKSYSEWKLKGENGPWRYGSNMKHNFGSRKLFLRKSSEPFVSSISRTQSTDMLSTDQPLSSDGDSRSINGLVRSFIADRKHEDIPNVVESVLNKVMEEVQQRLSIHNEMMKSSSKPIPEDDSSCETVVRSQLCDARQHEEAEENSPPQVVEKKFQRTNFEHHEEQKILLNQQKHIQELKQTLYTTKAGMKLLQMKYQEDFFHLGKHLNGLAYAATGYKRVLEENRKLYNLVQDLKGNIRVYCRVRPFLPGQESGGLSAVEDIDEGTITIRVPSKYGKAGQKPFMFNKVFGPSATQEEVFSDMQPLVRSVLDGYNVCIFAYGQTGSGKTFTMTGPKELTEESLGVNYRALADLFLLSNQRKDTTSYEISVQMLEIYNEQVRDLLAQDGQTKRLEIRNNSHNGINVPEASLVPVSSTDDVIQLMDLGHMNRAVSSTAMNDRSSRSHSCVTVHVQGRDLTSGSILHGSMHLVDLAGSERVDKSEVTGDRLKEAQHINKSLSALGDVISSLSQKTSHVPYRNSKLTQLLQDSLGGSAKTLMFVHISPEPDTLGETISTLKFAERVGSVELGAARVNKDNSEVKELKEQIANLKMALVRKGNGNDVQPTAIPINRERISRRRSLETPTIRPKLPTMGNTSNNSRPQIMDLSGPEAFNDSTASSRRHSLDIHELMKSSSPAWPRQPLNGKDEDRESKSGEWIDKHEELIQNQNPNSPEQFYQSMVPQQQSLYGGKQDFEVQSITDNESDEAATSDCSDSDLLWRLSVQVNVPKVSNIQNSANPKPKKIQPRTAKLSETRSLIPSLIPAPSKRPPNTVNSQPQRPTRDGKRRLSLGT

SEQ ID NO: 80263 - protein, 987 aa, Arabidopsis thaliana
  peptide (1)..(987): Ceres Seq. ID no. 12655075
MATTSEINNDLSFSVVSIVEDVLQQHSSRSSDVGLVSRKVEESSLRRYEAAGWLRDMIGVSNGKDFPGEPSEEEFRLGLRSGIVLCNVLNKVNPGSVSKVVEAPDDVADGAALSAFQYFENIRNFLVAIEEMGLPSFEASDMEKGGKSIRIVNCILALKSYSEWKLKGENGPWRYGSNMKHNFGSRKLFLRKSSEPFVSSISRTQSTDMLSTDQPLSSDGDSRSINGLVRSFIADRKHEDIPNVVESVLNKVMEEVQQRLSIHNEMMKSSSKPIPEDDSSCETVVRSQLCDARQHEEAEENSPPQVVEKKFQRTNFEHHEEQKILLNQQKHIQELKQTLYTTKAGMKLLQMKYQEDFFHLGKHLNGLAYAATGYKRVLEENRKLYNLVQDLKGNIRVYCRVRPFLPGQESGGLSAVEDIDEGTITIRVPSKYGKAGQKPFMFNKVFGPSATQEEVFSDMQPLVRSVLDGYNVCIFAYGQTGSGKTFTMTGPKELTEESLGVNYRALADLFLLSNQRKDTTSYEISVQMLEIYNEQVRDLLAQDGQTKRLEIRNNSHNGINVPEASLVPVSSTDDVIQLMDLGHMNRAVSSTAMNDRSSRSHSCVTVHVQGRDLTSGSILHGSMHLVDLAGSERVDKSEVTGDRLKEAQHINKSLSALGDVISSLSQKTSHVPYRNSKLTQLLQDSLGGSAKTLMFVHISPEPDTLGETISTLKFAERVGSVELGAARVNKDNSEVKELKEQIANLKMALVRKGNGNDVQPTAIPINRERISRRRSLETPTIRPKLPTMGNTSNNSRPQIMDLSGPEAFNDSTASSRRHSLDIHELMKSSSPAWPRQPLNGKDEDRESKSGEWIDKHEELIQNQNPNSPEQFYQSMVPQQQSLYGGKQDFEVQSITDNESDEAATSDCSDSDLLWRLSVQVNVPKVSNIQNSANPKPKKIQPRTAKLSETRSLIPSLIPAPSKRPPNTVNSQPQRPTRDGKRRLSLGT

SEQ ID NO: 80264 - protein, 931 aa, Arabidopsis thaliana
  peptide (1)..(931): Ceres Seq. ID no. 12655076
MIGVSNGKDFPGEPSEEEFRLGLRSGIVLCNVLNKVNPGSVSKVVEAPDDVADGAALSAFQYFENIRNFLVAIEEMGLPSFEASDMEKGGKSIRIVNCILALKSYSEWKLKGENGPWRYGSNMKHNFGSRKLFLRKSSEPFVSSISRTQSTDMLSTDQPLSSDGDSRSINGLVRSFIADRKHEDIPNVVESVLNKVMEEVQQRLSIHNEMMKSSSKPIPEDDSSCETVVRSQLCDARQHEEAEENSPPQVVEKKFQRTNFEHHEEQKILLNQQKHIQELKQTLYTTKAGMKLLQMKYQEDFFHLGKHLNGLAYAATGYKRVLEENRKLYNLVQDLKGNIRVYCRVRPFLPGQESGGLSAVEDIDEGTITIRVPSKYGKAGQKPFMFNKVFGPSATQEEVFSDMQPLVRSVLDGYNVCIFAYGQTGSGKTFTMTGPKELTEESLGVNYRALADLFLLSNQRKDTTSYEISVQMLEIYNEQVRDLLAQDGQTKRLEIRNNSHNGINVPEASLVPVSSTDDVIQLMDLGHMNRAVSSTAMNDRSSRSHSCVTVHVQGRDLTSGSILHGSMHLVDLAGSERVDKSEVTGDRLKEAQHINKSLSALGDVISSLSQKTSHVPYRNSKLTQLLQDSLGGSAKTLMFVHISPEPDTLGETISTLKFAERVGSVELGAARVNKDNSEVKELKEQIANLKMALVRKGNGNDVQPTAIPINRERISRRRSLETPTIRPKLPTMGNTSNNSRPQIMDLSGPEAFNDSTASSRRHSLDIHELMKSSSPAWPRQPLNGKDEDRESKSGEWIDKHEELIQNQNPNSPEQFYQSMVPQQQSLYGGKQDFEVQSITDNESDEAATSDCSDSDLLWRLSVQVNVPKVSNIQNSANPKPKKIQPRTAKLSETRSLIPSLIPAPSKRPPNTVNSQPQRPTRDGKRRLSLGT

SEQ ID NO: 80265 - DNA, 1086 bp, Arabidopsis thaliana
  misc_feature (1)..(1086): Ceres Seq. ID no. 12655116
  misc_feature (1)..(1086): Ortholog of  Ceres SEQ ID NO 13598420 as cited in SEQ ID NO 63088
ggaaaaaaaaactagaagcagatctgttgaagttaagccgagattcatcaattcgtgttatttgtctctcttgataagcaaaaaacatcgtacgaagaagaagaagatgaccttaattttttctgaatgaaatcttaaaattcccagaaagaagaatgacgaacagctcgtcatcgaagaaacaagctcaagatcagccagaaactagcgaacccactctcaaatctctcaaaaccaagatgactaaatccgacgaaaagcagaagaagcttaaagacattgaaataagcgttccaattgtgtatggtaatgtagcattctggcttggcaagaaggctagtgagtatcaatctcacaagtgggcagtatatgttcgaggggcaacaaatgaagatatcagtgttgtagtaaagaaagttgtatttcagcttcattctagtttcaatagcccgactagagttatcgaggagcctccattcgaggtatcggaatctggttggggagaattcgagattgcaatgacattgcatttccacagtgatgtctgtgataagccattgagtttatatcatcatttaaagctataccctgaagatgaatcaggtcctttgacaatgaagaagcctgtggttgtggaatcttatgacgagattgtctttcctgatccttcagaaagttttttagctagggttcagaatcatccggctttgacctttccaagattaccctctggttacaacttgcctgctcctatgcaagtcgaagataccgggaaaaagaagagaggtgatacgaaagatcatagtttgggacaatggttcatgagtttctctgaagcagatgagttattacagcttgcagctgctcgtcaacaggttcaagctcatattgcgaaactgaggcgacaaataagtttgctagagggacagaatcagaccgttaaaacaggatcagacctgtgaatctgattctgtagccatcatcttccattgagcgggagattggcatgttgtaactgtattagcatagatttccatttttcttgtattaataaacacaaataaagattagtgtcaagttcttatc

SEQ ID NO: 80266 - protein, 268 aa, Arabidopsis thaliana
  peptide (1)..(268): Ceres Seq. ID no. 12655117
MTNSSSSKKQAQDQPETSEPTLKSLKTKMTKSDEKQKKLKDIEISVPIVYGNVAFWLGKKASEYQSHKWAVYVRGATNEDISVVVKKVVFQLHSSFNSPTRVIEEPPFEVSESGWGEFEIAMTLHFHSDVCDKPLSLYHHLKLYPEDESGPLTMKKPVVVESYDEIVFPDPSESFLARVQNHPALTFPRLPSGYNLPAPMQVEDTGKKKRGDTKDHSLGQWFMSFSEADELLQLAAARQQVQAHIAKLRRQISLLEGQNQTVKTGSDL

SEQ ID NO: 80267 - protein, 240 aa, Arabidopsis thaliana
  peptide (1)..(240): Ceres Seq. ID no. 12655118
MTKSDEKQKKLKDIEISVPIVYGNVAFWLGKKASEYQSHKWAVYVRGATNEDISVVVKKVVFQLHSSFNSPTRVIEEPPFEVSESGWGEFEIAMTLHFHSDVCDKPLSLYHHLKLYPEDESGPLTMKKPVVVESYDEIVFPDPSESFLARVQNHPALTFPRLPSGYNLPAPMQVEDTGKKKRGDTKDHSLGQWFMSFSEADELLQLAAARQQVQAHIAKLRRQISLLEGQNQTVKTGSDL

SEQ ID NO: 80268 - protein, 147 aa, Arabidopsis thaliana
  peptide (1)..(147): Ceres Seq. ID no. 12655119
MTLHFHSDVCDKPLSLYHHLKLYPEDESGPLTMKKPVVVESYDEIVFPDPSESFLARVQNHPALTFPRLPSGYNLPAPMQVEDTGKKKRGDTKDHSLGQWFMSFSEADELLQLAAARQQVQAHIAKLRRQISLLEGQNQTVKTGSDL

SEQ ID NO: 80269 - DNA, 932 bp, Arabidopsis thaliana
  misc_feature (1)..(932): Ceres Seq. ID no. 12655120
  misc_feature (1)..(932): Ortholog of  Ceres SEQ ID NO 14306264 as cited in SEQ ID NO 1386
  misc_feature (1)..(932): Ortholog of  Ceres SEQ ID NO 15179159 as cited in SEQ ID NO 0
acataaaatttgtataatagtacgtggttgatcgtttttgtgtgttgaaaatcaaaatggcgtcgagcgatgagcgtccaggagcgtatccggcacgtgacggatcagagaacttacctccgggagatccaaagacgatgaagacggtggtgatggataaaggagcggcgatgatgcaatcgttgaaaccgatcaaacagatgagtctccatttgtgttctttcgcttgttatggtcacgatcctagccgtcagattgaagtcaacttctatgttcatcgactcaaccaagactttcttcaatgtgctgtttacgattgcgactcctctaaaccccatctcatcgggatcgagtatattgtgtcggagaggttatttgagagtcttgatccggaggagcaaaagctttggcactctcatgactatgagatccaaacaggccttctagtaactccaagggtccctgagcttgtagctaagacagagcttgaaaatattgccaaaacttatgggaagttttggtgcacttggcagaccgatcgcggggataaattgccacttggtgcaccatcacttatgatgtcaccacaagacgtgaatatgggaaagatcaagccagggctattgaagaaacgtgacgatgagtatggaatctcgacggaatctttgaagacgtctcgagttggaattatgggaccggagaagaaaaattcgatggctgattattgggttcatcacggaaaaggattagcggttgacataatcgaaactgagatgcagaaattggctccgttcccgtaatgaagttggtgtgtaactaataataaaatgttgtatatgtcgtcctatgttgtcttataagaccattagtaaacataattatcctatatatatatactgttgtctgtgttgaaatataaccaccttcaacgt

SEQ ID NO: 80270 - protein, 247 aa, Arabidopsis thaliana
  peptide (1)..(247): Ceres Seq. ID no. 12655121
MASSDERPGAYPARDGSENLPPGDPKTMKTVVMDKGAAMMQSLKPIKQMSLHLCSFACYGHDPSRQIEVNFYVHRLNQDFLQCAVYDCDSSKPHLIGIEYIVSERLFESLDPEEQKLWHSHDYEIQTGLLVTPRVPELVAKTELENIAKTYGKFWCTWQTDRGDKLPLGAPSLMMSPQDVNMGKIKPGLLKKRDDEYGISTESLKTSRVGIMGPEKKNSMADYWVHHGKGLAVDIIETEMQKLAPFP

SEQ ID NO: 80271 - protein, 220 aa, Arabidopsis thaliana
  peptide (1)..(220): Ceres Seq. ID no. 12655122
MKTVVMDKGAAMMQSLKPIKQMSLHLCSFACYGHDPSRQIEVNFYVHRLNQDFLQCAVYDCDSSKPHLIGIEYIVSERLFESLDPEEQKLWHSHDYEIQTGLLVTPRVPELVAKTELENIAKTYGKFWCTWQTDRGDKLPLGAPSLMMSPQDVNMGKIKPGLLKKRDDEYGISTESLKTSRVGIMGPEKKNSMADYWVHHGKGLAVDIIETEMQKLAPFP

SEQ ID NO: 80272 - protein, 215 aa, Arabidopsis thaliana
  peptide (1)..(215): Ceres Seq. ID no. 12655123
MDKGAAMMQSLKPIKQMSLHLCSFACYGHDPSRQIEVNFYVHRLNQDFLQCAVYDCDSSKPHLIGIEYIVSERLFESLDPEEQKLWHSHDYEIQTGLLVTPRVPELVAKTELENIAKTYGKFWCTWQTDRGDKLPLGAPSLMMSPQDVNMGKIKPGLLKKRDDEYGISTESLKTSRVGIMGPEKKNSMADYWVHHGKGLAVDIIETEMQKLAPFP

SEQ ID NO: 80273 - DNA, 1452 bp, Arabidopsis thaliana
  misc_feature (1)..(1452): Ceres Seq. ID no. 12655130
  misc_feature (1)..(1452): Ortholog of  Ceres SEQ ID NO 13599900 as cited in SEQ ID NO 531
  misc_feature (1)..(1452): Ortholog of  Ceres SEQ ID NO 13659971 as cited in SEQ ID NO 67565
  misc_feature (1)..(1452): Ortholog of  Ceres SEQ ID NO 13500385 as cited in SEQ ID NO 67583
atggcggatttgttaagaaaagtgaaatcgataaagaagaagcaggatcagagcaatcatcaagctctgatccttggcaaatacgaaatgggtaggcttcttggccacggaaccttcgctaaagtctatctcgcacgaaacgctcaatctggagaaagcgtagcgatcaaggtaattgacaaagagaaagttctcaaatccggtttaatcgcacacatcaaacgcgagatctcgatcttgcgccgtgttcgtcatcctaacatcgttcagctattcgaagtcatggcgacgaaatctaagatctatttcgtaatggaatatgttaaaggaggtgaattgttcaacaaggtagctaaaggaaggttaaaagaagaaatggcacgtaaatattttcaacagttgatctcagccgtatcgttttgtcacttccgtggtgtttatcatcgagatttgaaaccggagaatcttcttttagacgaaaatggaaacctaaaagtctctgattttggtcttagtgctgtttctgatcagattcgacaagatgggttatttcatactttttgtgggacccctgcttacgtggcaccggaggttcttgctcggaaaggctacgatggagctaaagtcgatatttggtcttgtggagtgatcttgtttgtgttaatggcagggtttcttccttttcatgatcggaatgttatggctatgtataagaagatttacagaggagattttaggtgtccgagatggtttccggttgagattaaccggttattgattcgaatgttggagactaaaccggagagacggtttacaatgccggatattatggagactagttggttcaagaaaggttttaagcatattaagttttatgttgaagatgatcatcagctttgtaacgttgctgatgatgatgagatcgaatcgattgaatcggtttcggggaggtcttctacggtttctgaaccggaagacttcgagtcttttgatgggaggagaagaggtggttcgatgcctagaccggcaagtttgaatgctttcgatctcatttcgttttcgccaggttttgatctttcgggtttgtttgaggatgatggtgaaggatctaggtttgtgtctggtgctcctgttggtcagatcatttctaagttggaggaaatcgcgaggattgtgagttttactgtgcgaaagaaggattgtaaagtgagtcttgaaggttcaagagaaggaagtatgaaaggtccattgtcaattgctgctgagatatttgaactgacaccagctttggttgttgttgaagtgaagaagaaaggaggtgataaaatggagtatgatgagttttgtaataaggagttgaaacctaagttgcagaatttgtcttccgaaaatggccaacgggtttctggttcgcgttctttgccatcgtttttactttctgatactgattag

SEQ ID NO: 80274 - protein, 483 aa, Arabidopsis thaliana
  peptide (1)..(483): Ceres Seq. ID no. 12655131
MADLLRKVKSIKKKQDQSNHQALILGKYEMGRLLGHGTFAKVYLARNAQSGESVAIKVIDKEKVLKSGLIAHIKREISILRRVRHPNIVQLFEVMATKSKIYFVMEYVKGGELFNKVAKGRLKEEMARKYFQQLISAVSFCHFRGVYHRDLKPENLLLDENGNLKVSDFGLSAVSDQIRQDGLFHTFCGTPAYVAPEVLARKGYDGAKVDIWSCGVILFVLMAGFLPFHDRNVMAMYKKIYRGDFRCPRWFPVEINRLLIRMLETKPERRFTMPDIMETSWFKKGFKHIKFYVEDDHQLCNVADDDEIESIESVSGRSSTVSEPEDFESFDGRRRGGSMPRPASLNAFDLISFSPGFDLSGLFEDDGEGSRFVSGAPVGQIISKLEEIARIVSFTVRKKDCKVSLEGSREGSMKGPLSIAAEIFELTPALVVVEVKKKGGDKMEYDEFCNKELKPKLQNLSSENGQRVSGSRSLPSFLLSDTD

SEQ ID NO: 80275 - protein, 454 aa, Arabidopsis thaliana
  peptide (1)..(454): Ceres Seq. ID no. 12655132
MGRLLGHGTFAKVYLARNAQSGESVAIKVIDKEKVLKSGLIAHIKREISILRRVRHPNIVQLFEVMATKSKIYFVMEYVKGGELFNKVAKGRLKEEMARKYFQQLISAVSFCHFRGVYHRDLKPENLLLDENGNLKVSDFGLSAVSDQIRQDGLFHTFCGTPAYVAPEVLARKGYDGAKVDIWSCGVILFVLMAGFLPFHDRNVMAMYKKIYRGDFRCPRWFPVEINRLLIRMLETKPERRFTMPDIMETSWFKKGFKHIKFYVEDDHQLCNVADDDEIESIESVSGRSSTVSEPEDFESFDGRRRGGSMPRPASLNAFDLISFSPGFDLSGLFEDDGEGSRFVSGAPVGQIISKLEEIARIVSFTVRKKDCKVSLEGSREGSMKGPLSIAAEIFELTPALVVVEVKKKGGDKMEYDEFCNKELKPKLQNLSSENGQRVSGSRSLPSFLLSDTD

SEQ ID NO: 80276 - protein, 389 aa, Arabidopsis thaliana
  peptide (1)..(389): Ceres Seq. ID no. 12655133
MATKSKIYFVMEYVKGGELFNKVAKGRLKEEMARKYFQQLISAVSFCHFRGVYHRDLKPENLLLDENGNLKVSDFGLSAVSDQIRQDGLFHTFCGTPAYVAPEVLARKGYDGAKVDIWSCGVILFVLMAGFLPFHDRNVMAMYKKIYRGDFRCPRWFPVEINRLLIRMLETKPERRFTMPDIMETSWFKKGFKHIKFYVEDDHQLCNVADDDEIESIESVSGRSSTVSEPEDFESFDGRRRGGSMPRPASLNAFDLISFSPGFDLSGLFEDDGEGSRFVSGAPVGQIISKLEEIARIVSFTVRKKDCKVSLEGSREGSMKGPLSIAAEIFELTPALVVVEVKKKGGDKMEYDEFCNKELKPKLQNLSSENGQRVSGSRSLPSFLLSDTD

SEQ ID NO: 80277 - DNA, 2007 bp, Arabidopsis thaliana
  misc_feature (1)..(2007): Ceres Seq. ID no. 12655134
  misc_feature (1)..(2007): Ortholog of  Ceres SEQ ID NO 14307374 as cited in SEQ ID NO 54073
atgggttgtcgatggaatccaattgggttccaattctcttgcttcatgttcttgatcattactcttcaatctcgttcttcgttgtccctcgaatccgaaggatttgtattgttgaaattccgggcaagagttgattctgatcctcatggaactcttgcaaattggaatgtttctgatcatgatcatttctgttcttggtttggtgttacgtgtgtcgacaataaagtgcagatgctgaatcttagtggttgttctttgggaggaactttagctccggagcttagtcaattgagtgaattaagatctctaatactatccaagaacaaactctctggtgacattccaaacgaatttgcgagtttcgcgaaattagagttcttggatttgcgagataataacttaaacggagtagttccacccgagctaaataaagtgttgacaccagaaaacttgttgctttctggtaacaaatttgcgggttttatgaccgtaaagttcctgagacttcaatcgctgtataaagtccagatgaacaagaatcgagagctatcttcggtttccgctgatgtcctcgactgtgtcaatagaaaacttggatactgggtgcgaagagaatctcatgggaagaattatgtagtgaattatcacccaagtgagaacgaaactagtatcttcaaaagacgtgagttactcgaggaaacaagcaatttagcggctatgcctgcgcctgatacgcccagtccttctcctgagattataactatagtgtttcctcgaagcagcgggtcgtttccagcattaactaatgcaaagaagagaatacctccattgatccctccttcttctcctcctcctctacctaccaacaacaccatcgctagtgatccaccgaggaaattcgaagaaaaatcgaaagggtttaaggacgtttggttgtatgttgtgatcggtgttgctgctttcgtagcgatgctgataatagtagcggttatattcttcttccggaaaagagctgtgaagagtataggtccatggaagactggtttgagtggacaattgcagaaagcttttgttactggtgtacctaagctaaaccggtctgaactagaaacagcctgtgaagatttcagtaatatcattgaagcatttgatggttacactgtctataaaggaactttgtccagtggcgttgagattgcggttgcttcaaccgccattttggaaactagggaatggacaagagctatggaaatgacttaccgcagaaggattgatacaatgtcaagagtcaaccataagaactttattaatctgattggttattgcgaagaagatgaaccgtttaataggatgatggttttcgaatatgctccaaatggaactcttttcgaacatttgcatgataaggaaatggagcatcttgattggaacgcgaggacgaggataataatgggaactgcttattgtctgcaatatatgcacgagctcaatcctccaatctcacacactaaacttgtctcatcagcaatatacttaaccgatgattacgcagcaaaggtcggagaggttcctttcagcggacaaaccgggagtaaaccgagaaaaccgatgagtggtgatttagaccaatctttattgccattacctcctgaaccagagactaatgtctatagctttggagtattaatgcttgagataatctctggaaagctctcagattcagaagaagaaggatcaattctaaaatgggcgtcaaagtatctggagaatgataatttgagagatatgattgatcctacactaacaacgtataaagaagaagaacttgaagctatatgtgacgtggcacgacattgtctgaaacttgacgaaagccaaagaccaaaaatgaaatatgtggttcaacaattgaaagaagtaataaacatatctcaagaacaagcaacaccaagactctctcctctttggtgggcagagcttgagatcttatcctctgaagctacataa

SEQ ID NO: 80278 - protein, 668 aa, Arabidopsis thaliana
  peptide (1)..(668): Ceres Seq. ID no. 12655135
MGCRWNPIGFQFSCFMFLIITLQSRSSLSLESEGFVLLKFRARVDSDPHGTLANWNVSDHDHFCSWFGVTCVDNKVQMLNLSGCSLGGTLAPELSQLSELRSLILSKNKLSGDIPNEFASFAKLEFLDLRDNNLNGVVPPELNKVLTPENLLLSGNKFAGFMTVKFLRLQSLYKVQMNKNRELSSVSADVLDCVNRKLGYWVRRESHGKNYVVNYHPSENETSIFKRRELLEETSNLAAMPAPDTPSPSPEIITIVFPRSSGSFPALTNAKKRIPPLIPPSSPPPLPTNNTIASDPPRKFEEKSKGFKDVWLYVVIGVAAFVAMLIIVAVIFFFRKRAVKSIGPWKTGLSGQLQKAFVTGVPKLNRSELETACEDFSNIIEAFDGYTVYKGTLSSGVEIAVASTAILETREWTRAMEMTYRRRIDTMSRVNHKNFINLIGYCEEDEPFNRMMVFEYAPNGTLFEHLHDKEMEHLDWNARTRIIMGTAYCLQYMHELNPPISHTKLVSSAIYLTDDYAAKVGEVPFSGQTGSKPRKPMSGDLDQSLLPLPPEPETNVYSFGVLMLEIISGKLSDSEEEGSILKWASKYLENDNLRDMIDPTLTTYKEEELEAICDVARHCLKLDESQRPKMKYVVQQLKEVINISQEQATPRLSPLWWAELEILSSEAT

SEQ ID NO: 80279 - protein, 653 aa, Arabidopsis thaliana
  peptide (1)..(653): Ceres Seq. ID no. 12655136
MFLIITLQSRSSLSLESEGFVLLKFRARVDSDPHGTLANWNVSDHDHFCSWFGVTCVDNKVQMLNLSGCSLGGTLAPELSQLSELRSLILSKNKLSGDIPNEFASFAKLEFLDLRDNNLNGVVPPELNKVLTPENLLLSGNKFAGFMTVKFLRLQSLYKVQMNKNRELSSVSADVLDCVNRKLGYWVRRESHGKNYVVNYHPSENETSIFKRRELLEETSNLAAMPAPDTPSPSPEIITIVFPRSSGSFPALTNAKKRIPPLIPPSSPPPLPTNNTIASDPPRKFEEKSKGFKDVWLYVVIGVAAFVAMLIIVAVIFFFRKRAVKSIGPWKTGLSGQLQKAFVTGVPKLNRSELETACEDFSNIIEAFDGYTVYKGTLSSGVEIAVASTAILETREWTRAMEMTYRRRIDTMSRVNHKNFINLIGYCEEDEPFNRMMVFEYAPNGTLFEHLHDKEMEHLDWNARTRIIMGTAYCLQYMHELNPPISHTKLVSSAIYLTDDYAAKVGEVPFSGQTGSKPRKPMSGDLDQSLLPLPPEPETNVYSFGVLMLEIISGKLSDSEEEGSILKWASKYLENDNLRDMIDPTLTTYKEEELEAICDVARHCLKLDESQRPKMKYVVQQLKEVINISQEQATPRLSPLWWAELEILSSEAT

SEQ ID NO: 80280 - protein, 591 aa, Arabidopsis thaliana
  peptide (1)..(591): Ceres Seq. ID no. 12655137
MLNLSGCSLGGTLAPELSQLSELRSLILSKNKLSGDIPNEFASFAKLEFLDLRDNNLNGVVPPELNKVLTPENLLLSGNKFAGFMTVKFLRLQSLYKVQMNKNRELSSVSADVLDCVNRKLGYWVRRESHGKNYVVNYHPSENETSIFKRRELLEETSNLAAMPAPDTPSPSPEIITIVFPRSSGSFPALTNAKKRIPPLIPPSSPPPLPTNNTIASDPPRKFEEKSKGFKDVWLYVVIGVAAFVAMLIIVAVIFFFRKRAVKSIGPWKTGLSGQLQKAFVTGVPKLNRSELETACEDFSNIIEAFDGYTVYKGTLSSGVEIAVASTAILETREWTRAMEMTYRRRIDTMSRVNHKNFINLIGYCEEDEPFNRMMVFEYAPNGTLFEHLHDKEMEHLDWNARTRIIMGTAYCLQYMHELNPPISHTKLVSSAIYLTDDYAAKVGEVPFSGQTGSKPRKPMSGDLDQSLLPLPPEPETNVYSFGVLMLEIISGKLSDSEEEGSILKWASKYLENDNLRDMIDPTLTTYKEEELEAICDVARHCLKLDESQRPKMKYVVQQLKEVINISQEQATPRLSPLWWAELEILSSEAT

SEQ ID NO: 80281 - DNA, 631 bp, Arabidopsis thaliana
  misc_feature (1)..(631): Ceres Seq. ID no. 12655144
  misc_feature (1)..(631): Ortholog of  Ceres SEQ ID NO 13595008 as cited in SEQ ID NO 56041
gtgataaaactaagtaagaaatagcataaaagtaaaagggaatgtcgagtgaggagttgaggctggtttcgccgacgatagacaacgatgggaagttgccgagaaagtatacgatggcaggtcaaggtgttaagaaagacatctctcctcctcttgaatggtacaacgttccagaaggtacaaaaacgctagctttggtggtggaagacatcgatgcgcctgatcctagtggcccgctggtgccatggacggtgtgggttgtcgtcgacataccaccagagatgaaaggcctaccggaaggatattccggcaatgaggatcagactaccggtattcgggaagggaacaacgatcacaagattccgggatggcgtggacctctcttacctagtcacggtcaccgttttcagttcaagctttttgctctcgatgataaacccaagattggtcacacggtgacgaaagagagattgctgatcgcaattgaagggcacgtgctaggagaagccatcttgacgtgtttggcctaaaatatgtcgttcgtcgttatagtcataacaccgttggatatgtatcatagttaataattccatatcacgtattgaggattatcaatgaaataattctagtt

SEQ ID NO: 80282 - protein, 162 aa, Arabidopsis thaliana
  peptide (1)..(162): Ceres Seq. ID no. 12655145
MSSEELRLVSPTIDNDGKLPRKYTMAGQGVKKDISPPLEWYNVPEGTKTLALVVEDIDAPDPSGPLVPWTVWVVVDIPPEMKGLPEGYSGNEDQTTGIREGNNDHKIPGWRGPLLPSHGHRFQFKLFALDDKPKIGHTVTKERLLIAIEGHVLGEAILTCLA

SEQ ID NO: 80283 - protein, 138 aa, Arabidopsis thaliana
  peptide (1)..(138): Ceres Seq. ID no. 12655146
MAGQGVKKDISPPLEWYNVPEGTKTLALVVEDIDAPDPSGPLVPWTVWVVVDIPPEMKGLPEGYSGNEDQTTGIREGNNDHKIPGWRGPLLPSHGHRFQFKLFALDDKPKIGHTVTKERLLIAIEGHVLGEAILTCLA

SEQ ID NO: 80284 - protein, 82 aa, Arabidopsis thaliana
  peptide (1)..(82): Ceres Seq. ID no. 12655147
MKGLPEGYSGNEDQTTGIREGNNDHKIPGWRGPLLPSHGHRFQFKLFALDDKPKIGHTVTKERLLIAIEGHVLGEAILTCLA

SEQ ID NO: 80285 - DNA, 1362 bp, Arabidopsis thaliana
  misc_feature (1)..(1362): Ceres Seq. ID no. 12655152
  misc_feature (1)..(1362): Ortholog of  Ceres SEQ ID NO 12625388 as cited in SEQ ID NO 63299
atggcttctttaatgttatctctcggttccacttctctgttaccgcgcgagattaacaaggataagctaaagcttggaacttctgcttcgaacccgttcctaaaagcaaagtcttttagcagagtgactatgacggttgcagtgaagccttctcgtttcgagggtataactatggctccaccagaccctattcttggagtcagtgaagcattcaaagctgacactaacgggatgaaactcaatcttggtgttggtgcttatcgtactgaggaactccagccttatgtgcttaatgttgttaaaaaggcggagaatttgatgttggagagaggagataacaaagagtatcttccaattgaggggttggcagcattcaacaaggctactgctgagttgctatttggagctggtcatcctgttattaaggaacaaagagtagcaacaattcagggtctttcgggaacaggttcactgcgattagcagcggctcttatagagcgttatttccctggagcaaaagttgtgatctcatcaccaacctggggtaatcacaagaatatcttcaatgatgccaaagttccgtggtccgaataccgctactatgatccaaaaacaattggtttggattttgagggaatgatagcagatataaaggaagctccagaaggatccttcatcttgcttcacggatgtgctcacaacccaactggaattgacccaacaccagaacagtgggtaaaaattgctgatgtcattcaggaaaagaaccatatcccatttttcgatgttgcataccagggctttgctagtggaagccttgatgaagatgcagcatctgtgagattatttgctgagcggggaatggagttttttgttgctcagtcatatagtaaaaatttaggtttgtatgcagaaagaattggggcaatcaatgtcgtgtgctcctcagctgatgctgctacaagggtcaagagccagttgaaaaggattgctcggcctatgtactcgaatccaccagttcatggggcgagaatcgtggccaatgtagtgggtgatgtaactatgttcagtgaatggaaagcagagatggaaatgatggcaggaagaataaagacggttagacaagagctgtatgatagcctcgtttcaaaagacaagagcgggaaggactggtccttcattctgaagcaaattggcatgttctctttcaccggcctaaacaaagctcagagcgataacatgacggacaaatggcatgtgtatatgactaaagacgggaggatatcattggccggattatctctggccaaatgcgagtatcttgctgatgcgatcatcgactcataccataacgtaagctga

SEQ ID NO: 80286 - protein, 453 aa, Arabidopsis thaliana; identical to SEQ ID NO: 39108
  peptide (1)..(453): Ceres Seq. ID no. 12655153

SEQ ID NO: 80287 - protein, 449 aa, Arabidopsis thaliana; identical to SEQ ID NO: 39109
  peptide (1)..(449): Ceres Seq. ID no. 12655154

SEQ ID NO: 80288 - protein, 410 aa, Arabidopsis thaliana; identical to SEQ ID NO: 39110
  peptide (1)..(410): Ceres Seq. ID no. 12655155

SEQ ID NO: 80289 - DNA, 501 bp, Arabidopsis thaliana
  misc_feature (1)..(501): Ceres Seq. ID no. 12655196
  misc_feature (1)..(501): Ortholog of  Ceres SEQ ID NO 15174694 as cited in SEQ ID NO 54754
  misc_feature (1)..(501): Ortholog of  Ceres SEQ ID NO 15175666 as cited in SEQ ID NO 54985
atgcaaaacgaaataaggaaagtggtgacaaagggcaaggctgctggtgtgcttcgtttagtgtttcatgatgctggaacctttgaactggacgatcattctgtgtcttgggcggatatgatctctgtcgctgggtctgaagcagtttcaatatgtggcggcccaacaattccagtagttttgggaagacttgattcagcgcaacctgatccagaaggcaagctacctccagaaaccctgagtgcctcgggattgaaagaatgcttcaaaagaaaaggattttcgacccaggagcttgttgccttatctggggcacatacgattgggagtaaaggctttggagatccgacagtttttgacaatgcatactacaaaatccttcttgaaaaaccatggacgtgggtgaaacggtatgcagaagaccaagacaagttcttcgaagacttcacaaatgcttatatcaaactagtaaattctggggccaaatggaatatgttatga

SEQ ID NO: 80290 - protein, 166 aa, Arabidopsis thaliana
  peptide (1)..(166): Ceres Seq. ID no. 12655197
MQNEIRKVVTKGKAAGVLRLVFHDAGTFELDDHSVSWADMISVAGSEAVSICGGPTIPVVLGRLDSAQPDPEGKLPPETLSASGLKECFKRKGFSTQELVALSGAHTIGSKGFGDPTVFDNAYYKILLEKPWTWVKRYAEDQDKFFEDFTNAYIKLVNSGAKWNML

SEQ ID NO: 80291 - protein, 127 aa, Arabidopsis thaliana
  peptide (1)..(127): Ceres Seq. ID no. 12655198
MISVAGSEAVSICGGPTIPVVLGRLDSAQPDPEGKLPPETLSASGLKECFKRKGFSTQELVALSGAHTIGSKGFGDPTVFDNAYYKILLEKPWTWVKRYAEDQDKFFEDFTNAYIKLVNSGAKWNML

SEQ ID NO: 80292 - DNA, 2067 bp, Arabidopsis thaliana
  misc_feature (1)..(2067): Ceres Seq. ID no. 12655214
  misc_feature (1)..(2067): Ortholog of  Ceres SEQ ID NO 12586556 as cited in SEQ ID NO 64667
  misc_feature (1)..(2067): Ortholog of  Ceres SEQ ID NO 13660894 as cited in SEQ ID NO 67475
atggacgaagttactctttgtcttgcgcttaaagcatgtcgtggagacttgaaacgcggctgccaaatccacgggttttccacaacttctgggttcacttcctttgtttgtgtttcaaacgcagtaatgggtatgtaccgtaaagccggtcgctttgacaatgctttgtgcatatttgagaatctggttgatcctgatgttgtttcttggaacactatactctctgggtttgatgacaatcaaattgctctgaattttgttgttaggatgaaatctgctggagtagtttttgacgcattcacttattccactgctcttagcttctgtgtgggctctgaaggatttcttttaggattgcagttgcagtcaactgtggtgaaaaccggactggagtctgatcttgtcgttggaaactcgtttattacaatgtattcgcggtctggaagtttcagaggagctcggagagtttttgatgaaatgtcgtttaaggatatgatttcatggaactctttattgtcaggactttctcaagaaggcactttcgggtttgaagcagtggttatctttagggacatgatgcgagaaggtgtggagcttgatcacgtgtcttttactagcgtgattactacctgttgtcacgaaactgacttgaagctggccaggcaaattcatggtttgtgcataaaaagaggttatgaatcacttttagaagttggtaatattttgatgtcaaggtactccaagtgtggggttttggaagctgtgaaatcagtgtttcaccaaatgagtgagcggaatgttgtctcttggacaacaatgatttcctcgaataaagacgatgctgtgtccatcttccttaatatgcggtttgatggagtttaccctaacgaggtcacttttgttggattaatcaatgccgtgaagtgcaatgagcaaatcaaagaagggcttaaaattcatgggctatgcatcaagacaggctttgtttcagaaccatctgtaggcaacagtttcatcacattgtatgccaagtttgaggctctggaagatgccaagaaggcttttgaggatataactttccgggagattatatcctggaatgctatgatatctggatttgcacaaaatggattctctcatgaagctctcaagatgttcttatccgcagcagcagaaacaatgccgaatgaatacactttcggaagtgtcttgaatgcaatagcttttgcagaggatatatctgtaaagcaaggtcagcgttgccatgctcatttactgaaattgggtttgaatagttgtcctgttgtttcaagcgcgcttcttgatatgtacgccaagcgtgggaacattgatgaatctgagaaagtctttaacgagatgtctcaaaagaaccaatttgtttggacatcgataatatcagcctattcaagccacggtgattttgaaaccgtgatgaacttgttccacaagatgattaaagaaaacgtagcaccagacctagtcacttttctctctgtgttaacagcttgtaatagaaaaggaatggtagacaagggctatgagattttcaacatgatgatcgaagtctacaatcttgagccgtctcatgagcattactcatgtatggttgatatgcttggccgagctgggagattgaaagaagcagaagagcttatgagtgaggttcctggaggaccaggagagtcgatgcttcagagcatgctcgggtcttgtaggctgcacgggaatgtgaaaatgggagcaaaagtggctgagcttgcaatggaaatgaaaccggaactgtcaggttcttacgttcagatgtataacatctatgcagagaaagaagagtgggataaagctgcagagatcaggaaagcaatgaggaagaaaaacgtaagtaaagaagctggattcagttggatcgatgttggtgacactgaagggtctttaacgatgcaaggtttctcttcaggggataagtctcatccaaaatctgatgagatttatagaatggtggaaattattggattggagatgaatttggaggggaaagttgcagtttag

SEQ ID NO: 80293 - protein, 688 aa, Arabidopsis thaliana
  peptide (1)..(688): Ceres Seq. ID no. 12655215
MDEVTLCLALKACRGDLKRGCQIHGFSTTSGFTSFVCVSNAVMGMYRKAGRFDNALCIFENLVDPDVVSWNTILSGFDDNQIALNFVVRMKSAGVVFDAFTYSTALSFCVGSEGFLLGLQLQSTVVKTGLESDLVVGNSFITMYSRSGSFRGARRVFDEMSFKDMISWNSLLSGLSQEGTFGFEAVVIFRDMMREGVELDHVSFTSVITTCCHETDLKLARQIHGLCIKRGYESLLEVGNILMSRYSKCGVLEAVKSVFHQMSERNVVSWTTMISSNKDDAVSIFLNMRFDGVYPNEVTFVGLINAVKCNEQIKEGLKIHGLCIKTGFVSEPSVGNSFITLYAKFEALEDAKKAFEDITFREIISWNAMISGFAQNGFSHEALKMFLSAAAETMPNEYTFGSVLNAIAFAEDISVKQGQRCHAHLLKLGLNSCPVVSSALLDMYAKRGNIDESEKVFNEMSQKNQFVWTSIISAYSSHGDFETVMNLFHKMIKENVAPDLVTFLSVLTACNRKGMVDKGYEIFNMMIEVYNLEPSHEHYSCMVDMLGRAGRLKEAEELMSEVPGGPGESMLQSMLGSCRLHGNVKMGAKVAELAMEMKPELSGSYVQMYNIYAEKEEWDKAAEIRKAMRKKNVSKEAGFSWIDVGDTEGSLTMQGFSSGDKSHPKSDEIYRMVEIIGLEMNLEGKVAV

SEQ ID NO: 80294 - protein, 646 aa, Arabidopsis thaliana
  peptide (1)..(646): Ceres Seq. ID no. 12655216
MGMYRKAGRFDNALCIFENLVDPDVVSWNTILSGFDDNQIALNFVVRMKSAGVVFDAFTYSTALSFCVGSEGFLLGLQLQSTVVKTGLESDLVVGNSFITMYSRSGSFRGARRVFDEMSFKDMISWNSLLSGLSQEGTFGFEAVVIFRDMMREGVELDHVSFTSVITTCCHETDLKLARQIHGLCIKRGYESLLEVGNILMSRYSKCGVLEAVKSVFHQMSERNVVSWTTMISSNKDDAVSIFLNMRFDGVYPNEVTFVGLINAVKCNEQIKEGLKIHGLCIKTGFVSEPSVGNSFITLYAKFEALEDAKKAFEDITFREIISWNAMISGFAQNGFSHEALKMFLSAAAETMPNEYTFGSVLNAIAFAEDISVKQGQRCHAHLLKLGLNSCPVVSSALLDMYAKRGNIDESEKVFNEMSQKNQFVWTSIISAYSSHGDFETVMNLFHKMIKENVAPDLVTFLSVLTACNRKGMVDKGYEIFNMMIEVYNLEPSHEHYSCMVDMLGRAGRLKEAEELMSEVPGGPGESMLQSMLGSCRLHGNVKMGAKVAELAMEMKPELSGSYVQMYNIYAEKEEWDKAAEIRKAMRKKNVSKEAGFSWIDVGDTEGSLTMQGFSSGDKSHPKSDEIYRMVEIIGLEMNLEGKVAV

SEQ ID NO: 80295 - protein, 644 aa, Arabidopsis thaliana
  peptide (1)..(644): Ceres Seq. ID no. 12655217
MYRKAGRFDNALCIFENLVDPDVVSWNTILSGFDDNQIALNFVVRMKSAGVVFDAFTYSTALSFCVGSEGFLLGLQLQSTVVKTGLESDLVVGNSFITMYSRSGSFRGARRVFDEMSFKDMISWNSLLSGLSQEGTFGFEAVVIFRDMMREGVELDHVSFTSVITTCCHETDLKLARQIHGLCIKRGYESLLEVGNILMSRYSKCGVLEAVKSVFHQMSERNVVSWTTMISSNKDDAVSIFLNMRFDGVYPNEVTFVGLINAVKCNEQIKEGLKIHGLCIKTGFVSEPSVGNSFITLYAKFEALEDAKKAFEDITFREIISWNAMISGFAQNGFSHEALKMFLSAAAETMPNEYTFGSVLNAIAFAEDISVKQGQRCHAHLLKLGLNSCPVVSSALLDMYAKRGNIDESEKVFNEMSQKNQFVWTSIISAYSSHGDFETVMNLFHKMIKENVAPDLVTFLSVLTACNRKGMVDKGYEIFNMMIEVYNLEPSHEHYSCMVDMLGRAGRLKEAEELMSEVPGGPGESMLQSMLGSCRLHGNVKMGAKVAELAMEMKPELSGSYVQMYNIYAEKEEWDKAAEIRKAMRKKNVSKEAGFSWIDVGDTEGSLTMQGFSSGDKSHPKSDEIYRMVEIIGLEMNLEGKVAV

SEQ ID NO: 80296 - DNA, 2415 bp, Arabidopsis thaliana
  misc_feature (1)..(2415): Ceres Seq. ID no. 12655256
  misc_feature (1)..(2415): Ortholog of  Ceres SEQ ID NO 14307164 as cited in SEQ ID NO 54775
  misc_feature (1)..(2415): Ortholog of  Ceres SEQ ID NO 13518411 as cited in SEQ ID NO 55230
  misc_feature (1)..(2415): Ortholog of  Ceres SEQ ID NO 13654989 as cited in SEQ ID NO 63117
  misc_feature (1)..(2415): Ortholog of  Ceres SEQ ID NO 13584744 as cited in SEQ ID NO 69137
atgtcgctctctccttcttcctcgccggctccggcaacttccccgcctgccatgtcattacctccggcagattccgtacctgacacgtcatcacctccagctcctcctttgtctcctcttcccccaccattgagctctcctccgccgttgccttcaccaccgcctctctccgctcccaccgcttccccaccgcctcttccggttgaatccccaccgtctcctcctatagaatcaccaccgcctcctctactggaatcacctcctcctcctccgttggaatctccatctccaccgtctcctcacgtctcagctccttccggttcaccgccattacccttccttcccgccaaaccttctccgccgccttcttcacctccctccgagacagttccgccgggaaatacgatttctccaccacctcgttcacttccctccgaatcaaccccgccggtgaacacagcttctcctccaccgccatctcctcctcgccgccgtagtggccctaagccttcgtttcctcctcccatcaattcttctccaccaaatccttctccgaacactccgtcactcccagaaacttctcctccacctaaaccaccgctctcaacgacgccatttccctcctcatccactcccccgcctaagaagtcccctgcagcagtaactcttcctttctttgggccagcgggccaattaccggatgggaccgtagcacctcctattgggcctgttatagagcccaagacgagtccagccgaatcaatatctccgggaacgccacagccactggttccgaagagtctacctgtaacgacgtcgtatcaccgatcatccgccggattcttatttggcggtgtaatcgttggagctcttctactaattctgttaggtcttctctttgtcttctacagagctaccagaaatagaaataacaacagcagctctgctcatcatcaatccaaaactccctcaaaagttcaacatcatcggggcggtaatgctggtacgaaccaggcacatgttatcacaatgccaccaccaatccatgctaaatatatatctagtggaggttgtgatacgaaggagaacaattctgttgcgaaaaacatttcaatgccatctggaatgttctcctacgaagaactttcaaaagcaactggtggattttcagaggagaaccttttgggagaaggcggtttcggatatgttcacaaaggagtgttgaaaaacgggacagaagttgcggtgaagcagctgaagattgggagctatcaaggggaaagagaattccaagctgaggttgacacaatcagtagggttcatcataagcacctcgtttcattggttggttattgcgttaatggagataaaagactcttggtttacgagtttgttcctaaagataccttggagttccacttgcatgagaacagaggaagcgtgttggaatgggaaatgaggctcaggattgctgtaggagcagcaaaaggattagcttatcttcatgaggattgcagtccaactataattcaccgtgatatcaaagcagctaatatccttctagattccaaatttgaggcaaaggtctctgactttggactagccaagtttttctcagacaccaattcatcattcactcatatctctactcgagtggtaggaactttcggatacatggctccagaatacgcgtccagtggtaaagtaactgataaatcagatgtatattcctttggggtcgtgcttctagaactcatcactggacgtccatcaattttcgccaaagattcttccacaaaccagagtttagtagactgggcgaggccattgcttacgaaagcaatctctggagaaagttttgactttcttgtagactcaaggttggagaagaattacgatacaactcagatggcaaacatggctgcttgtgctgctgcttgcatacgccaatcagcttggcttcggcctagaatgagccaggtagtacgtgctcttgaaggcgaggtggccctgagaaaggtcgaagagactgggaatagcgtgacctatagctcttctgaaaacccgaatgacatcacaccacggtatggaacaaataagaggagattcgacacaggttcaagcgatggttacacttcagaatatggagttaacccttctcagtcgagcagtgaacatcaacaggtgaatacttagttcacaggttcaatagggcaagtttcaccacaattattgggttttcggatacagtcatcttgggttaacataaaatgttgtaagaaattagactacttcattcatttgtagttaaggggtccgaagaacactgcttgtgttttgttaaatgtataaattggttgtaatattggggcacaagtttaattatgttgcaaatactttgtttgcttctgatcg

SEQ ID NO: 80297 - protein, 731 aa, Arabidopsis thaliana
  peptide (1)..(731): Ceres Seq. ID no. 12655257
MSLSPSSSPAPATSPPAMSLPPADSVPDTSSPPAPPLSPLPPPLSSPPPLPSPPPLSAPTASPPPLPVESPPSPPIESPPPPLLESPPPPPLESPSPPSPHVSAPSGSPPLPFLPAKPSPPPSSPPSETVPPGNTISPPPRSLPSESTPPVNTASPPPPSPPRRRSGPKPSFPPPINSSPPNPSPNTPSLPETSPPPKPPLSTTPFPSSSTPPPKKSPAAVTLPFFGPAGQLPDGTVAPPIGPVIEPKTSPAESISPGTPQPLVPKSLPVTTSYHRSSAGFLFGGVIVGALLLILLGLLFVFYRATRNRNNNSSSAHHQSKTPSKVQHHRGGNAGTNQAHVITMPPPIHAKYISSGGCDTKENNSVAKNISMPSGMFSYEELSKATGGFSEENLLGEGGFGYVHKGVLKNGTEVAVKQLKIGSYQGEREFQAEVDTISRVHHKHLVSLVGYCVNGDKRLLVYEFVPKDTLEFHLHENRGSVLEWEMRLRIAVGAAKGLAYLHEDCSPTIIHRDIKAANILLDSKFEAKVSDFGLAKFFSDTNSSFTHISTRVVGTFGYMAPEYASSGKVTDKSDVYSFGVVLLELITGRPSIFAKDSSTNQSLVDWARPLLTKAISGESFDFLVDSRLEKNYDTTQMANMAACAAACIRQSAWLRPRMSQVVRALEGEVALRKVEETGNSVTYSSSENPNDITPRYGTNKRRFDTGSSDGYTSEYGVNPSQSSSEHQQVNT

SEQ ID NO: 80298 - protein, 714 aa, Arabidopsis thaliana
  peptide (1)..(714): Ceres Seq. ID no. 12655258
MSLPPADSVPDTSSPPAPPLSPLPPPLSSPPPLPSPPPLSAPTASPPPLPVESPPSPPIESPPPPLLESPPPPPLESPSPPSPHVSAPSGSPPLPFLPAKPSPPPSSPPSETVPPGNTISPPPRSLPSESTPPVNTASPPPPSPPRRRSGPKPSFPPPINSSPPNPSPNTPSLPETSPPPKPPLSTTPFPSSSTPPPKKSPAAVTLPFFGPAGQLPDGTVAPPIGPVIEPKTSPAESISPGTPQPLVPKSLPVTTSYHRSSAGFLFGGVIVGALLLILLGLLFVFYRATRNRNNNSSSAHHQSKTPSKVQHHRGGNAGTNQAHVITMPPPIHAKYISSGGCDTKENNSVAKNISMPSGMFSYEELSKATGGFSEENLLGEGGFGYVHKGVLKNGTEVAVKQLKIGSYQGEREFQAEVDTISRVHHKHLVSLVGYCVNGDKRLLVYEFVPKDTLEFHLHENRGSVLEWEMRLRIAVGAAKGLAYLHEDCSPTIIHRDIKAANILLDSKFEAKVSDFGLAKFFSDTNSSFTHISTRVVGTFGYMAPEYASSGKVTDKSDVYSFGVVLLELITGRPSIFAKDSSTNQSLVDWARPLLTKAISGESFDFLVDSRLEKNYDTTQMANMAACAAACIRQSAWLRPRMSQVVRALEGEVALRKVEETGNSVTYSSSENPNDITPRYGTNKRRFDTGSSDGYTSEYGVNPSQSSSEHQQVNT

SEQ ID NO: 80299 - protein, 388 aa, Arabidopsis thaliana
  peptide (1)..(388): Ceres Seq. ID no. 12655259
MPPPIHAKYISSGGCDTKENNSVAKNISMPSGMFSYEELSKATGGFSEENLLGEGGFGYVHKGVLKNGTEVAVKQLKIGSYQGEREFQAEVDTISRVHHKHLVSLVGYCVNGDKRLLVYEFVPKDTLEFHLHENRGSVLEWEMRLRIAVGAAKGLAYLHEDCSPTIIHRDIKAANILLDSKFEAKVSDFGLAKFFSDTNSSFTHISTRVVGTFGYMAPEYASSGKVTDKSDVYSFGVVLLELITGRPSIFAKDSSTNQSLVDWARPLLTKAISGESFDFLVDSRLEKNYDTTQMANMAACAAACIRQSAWLRPRMSQVVRALEGEVALRKVEETGNSVTYSSSENPNDITPRYGTNKRRFDTGSSDGYTSEYGVNPSQSSSEHQQVNT

SEQ ID NO: 80300 - DNA, 1035 bp, Arabidopsis thaliana
  misc_feature (1)..(1035): Ceres Seq. ID no. 12655301
  misc_feature (1)..(1035): Ortholog of  Ceres SEQ ID NO 15178681 as cited in SEQ ID NO 63192
  misc_feature (1)..(1035): Ortholog of  Ceres SEQ ID NO 13579918 as cited in SEQ ID NO 64644
  misc_feature (1)..(1035): Ortholog of  Ceres SEQ ID NO 13654122 as cited in SEQ ID NO 68192
atggcgtcgatccttatctccggagctgccggagtctcgattcctctagttggaaccctacttccgttaaacggtggcttaatgaggggagccaaagcgttcgcagcaggagttatcctcgcaacagggttcgttcacatgctctcgggcggatccaaagctttgtccgacccatgtctgccggagtttccatggaaaatgttcccttttccagaattcttcgccatggtcgcggcgcttcttactctgctcgcggatttcatgatcacgggatactacgagaggaaacaggagaagatgatgaaccagtccgtcgagtcgcttggtacgcaagtttcggttatgtctgacccaggtcttgaatcgggttttctgagagatcaagaagatggaggggcgttgcatatcgtggggatgcgggctcacgcggagcatcaccgtcatagcctctccatgggtgccgaaggttttgaggctctctctaagagaagtggtgtttccggtcatggacacggccacagccacggccacggggacgtaggcttggacagtggtgtgaggcacgttgttgtttctcagatacttgaaatgggaatagtgtcacattcaataatcataggaatatcgcttggagtatcacatagcccatgcaccatacgtcctctccttctcgctctttccttccaccaattcttcgaaggttttgccctcggtggctgcgtcgcagaggccagactaaccccgcgtggatctgccatgatggctttcttcttcgccatcactactccgatcggtgtagcggtgggaacggccattgcctcatcttacaactcttatagcgttgcagcattggtggctgaaggagtgctcgattctctctctgcggggatacttgtgtacatggcgcttgtggatttgatcgctgcggatttcttgagcaagaagatgagtgttgatttcagagttcaagttgtttcttattgctttttgtttcttggagctgggatgatgtctgctcttgcaatttgggcttga

SEQ ID NO: 80301 - protein, 344 aa, Arabidopsis thaliana
  peptide (1)..(344): Ceres Seq. ID no. 12655302
MASILISGAAGVSIPLVGTLLPLNGGLMRGAKAFAAGVILATGFVHMLSGGSKALSDPCLPEFPWKMFPFPEFFAMVAALLTLLADFMITGYYERKQEKMMNQSVESLGTQVSVMSDPGLESGFLRDQEDGGALHIVGMRAHAEHHRHSLSMGAEGFEALSKRSGVSGHGHGHSHGHGDVGLDSGVRHVVVSQILEMGIVSHSIIIGISLGVSHSPCTIRPLLLALSFHQFFEGFALGGCVAEARLTPRGSAMMAFFFAITTPIGVAVGTAIASSYNSYSVAALVAEGVLDSLSAGILVYMALVDLIAADFLSKKMSVDFRVQVVSYCFLFLGAGMMSALAIWA

SEQ ID NO: 80302 - protein, 317 aa, Arabidopsis thaliana
  peptide (1)..(317): Ceres Seq. ID no. 12655303
MRGAKAFAAGVILATGFVHMLSGGSKALSDPCLPEFPWKMFPFPEFFAMVAALLTLLADFMITGYYERKQEKMMNQSVESLGTQVSVMSDPGLESGFLRDQEDGGALHIVGMRAHAEHHRHSLSMGAEGFEALSKRSGVSGHGHGHSHGHGDVGLDSGVRHVVVSQILEMGIVSHSIIIGISLGVSHSPCTIRPLLLALSFHQFFEGFALGGCVAEARLTPRGSAMMAFFFAITTPIGVAVGTAIASSYNSYSVAALVAEGVLDSLSAGILVYMALVDLIAADFLSKKMSVDFRVQVVSYCFLFLGAGMMSALAIWA

SEQ ID NO: 80303 - protein, 298 aa, Arabidopsis thaliana
  peptide (1)..(298): Ceres Seq. ID no. 12655304
MLSGGSKALSDPCLPEFPWKMFPFPEFFAMVAALLTLLADFMITGYYERKQEKMMNQSVESLGTQVSVMSDPGLESGFLRDQEDGGALHIVGMRAHAEHHRHSLSMGAEGFEALSKRSGVSGHGHGHSHGHGDVGLDSGVRHVVVSQILEMGIVSHSIIIGISLGVSHSPCTIRPLLLALSFHQFFEGFALGGCVAEARLTPRGSAMMAFFFAITTPIGVAVGTAIASSYNSYSVAALVAEGVLDSLSAGILVYMALVDLIAADFLSKKMSVDFRVQVVSYCFLFLGAGMMSALAIWA

SEQ ID NO: 80304 - DNA, 2073 bp, Arabidopsis thaliana
  misc_feature (1)..(2073): Ceres Seq. ID no. 12655309
  misc_feature (1)..(2073): Ortholog of  Ceres SEQ ID NO 15170788 as cited in SEQ ID NO 52635
  misc_feature (1)..(2073): Ortholog of  Ceres SEQ ID NO 13638058 as cited in SEQ ID NO 55054
  misc_feature (1)..(2073): Ortholog of  Ceres SEQ ID NO 15170362 as cited in SEQ ID NO 57883
  misc_feature (1)..(2073): Ortholog of  Ceres SEQ ID NO 14303297 as cited in SEQ ID NO 67765
atcccaaaaataaaaagagtatatctctcacacacatacacaaacttgacagttttttaatttctctgttagtgaactcaaaccttcccatttccatggacaccaaaatcggatcgatcgatgattgcaagccgacgaacggcgacgtctgtagtccaacaaacggcaccgtcgcaacaatccacaactctgttccttcctccgctatcaccatcaactactgcgacgcgactctcggccgtcacttagctcgtcgtctcgtccaagccggcgttacggatgttttctctgttcccggagatttcaacctcactttgcttgatcacctcatggctgagccggacctcaacctaatcggatgttgtaacgagctaaacgccggttacgctgccgacggttacgctagatctcgtggagtcggcgcttgcgttgttaccttcaccgttggtggactcagcgttttaaacgcgatcgctggtgcttacagcgagaatcttcctcttatctgtatcgtcggaggtcctaactctaacgattatggcactaaccggattcttcatcacaccattggattacctgattttagccaagagcttaggtgcttccaaacggtgacttgttatcaggcggtggtgaacaatttagatgatgctcatgaacagattgataaagcaatatcaacagctttgaaagagagcaagcctgtgtatataagtgtaagctgtaacttagcagcgattcctcatcatacatttagccgtgatcctgtccctttttctctagctccaagattgagcaacaagatgggtttagaagctgcggtggaagcaacattggagtttctgaataaggctgtgaagccagttatggttggtggtcctaagttgcgtgtggctaaagcttgtgatgcctttgttgagctagctgatgcttcaggctatgctttggcgatgatgccttctgcgaaaggctttgtaccagagcaccatcctcatttcattggaacttattggggagcagtgagcactcctttttgctctgagattgtggaatctgcggatgcttacatttttgcaggtccaatcttcaacgactatagctctgttggttactcgcttctcctcaagaaagaaaaagccatcgttgtgcaacctgatcgtatcactgtggccaatggtcctacttttggttgcattttgatgagcgatttcttcagggaattgtctaagagggtgaagcgtaacgagactgcatatgagaactaccataggatctttgtccctgaaggtaagccattgaagtgtgaatcaagagagccattgagagttaacacaatgttccagcacattcagaagatgctctctagtgaaaccgctgtgattgctgaaaccggtgattcttggttcaattgccaaaaactaaagctgccaaaaggatgtgggtacgagtttcagatgcagtatggatcgattgggtggtctgttggtgcaactctaggatacgcacaggcatcaccagagaagcgagtgttggcattcatcggtgatgggagtttccaagtcacggttcaggacatatcaacaatgctgcgtaatggacagaagacgatcatcttcttgattaacaatggtggctacaccattgaagtagagattcatgacggtccttataacgtgattaagaactggaactacactggtctcgttgacgccattcataacggtgaaggcaattgctggactgcaaaggtgagatacgaagaggagttagtggaggcgattacgacagcgacgacggagaagaaagattgtctatgtttcatagaagtgattcttcacaaggatgatacgagcaaagagttgcttgagtggggctcacgcgtctctgctgctaacagccgtcctcccaatcctcagtagaagaagcaacacagaatcttcaatgcttcttaccaatttagtgacattttctgataagtgttgatttttcgaccgttgggtttaatcatgtttcaaacttattagtatctctttccatgtacgctttatcatggaataaagtaaagctcctttt

SEQ ID NO: 80305 - protein, 638 aa, Arabidopsis thaliana
  peptide (1)..(638): Ceres Seq. ID no. 12655310
PKNKKSISLTHIHKLDSFLISLLVNSNLPISMDTKIGSIDDCKPTNGDVCSPTNGTVATIHNSVPSSAITINYCDATLGRHLARRLVQAGVTDVFSVPGDFNLTLLDHLMAEPDLNLIGCCNELNAGYAADGYARSRGVGACVVTFTVGGLSVLNAIAGAYSENLPLICIVGGPNSNDYGTNRILHHTIGLPDFSQELRCFQTVTCYQAVVNNLDDAHEQIDKAISTALKESKPVYISVSCNLAAIPHHTFSRDPVPFSLAPRLSNKMGLEAAVEATLEFLNKAVKPVMVGGPKLRVAKACDAFVELADASGYALAMMPSAKGFVPEHHPHFIGTYWGAVSTPFCSEIVESADAYIFAGPIFNDYSSVGYSLLLKKEKAIVVQPDRITVANGPTFGCILMSDFFRELSKRVKRNETAYENYHRIFVPEGKPLKCESREPLRVNTMFQHIQKMLSSETAVIAETGDSWFNCQKLKLPKGCGYEFQMQYGSIGWSVGATLGYAQASPEKRVLAFIGDGSFQVTVQDISTMLRNGQKTIIFLINNGGYTIEVEIHDGPYNVIKNWNYTGLVDAIHNGEGNCWTAKVRYEEELVEAITTATTEKKDCLCFIEVILHKDDTSKELLEWGSRVSAANSRPPNPQ

SEQ ID NO: 80306 - protein, 607 aa, Arabidopsis thaliana
  peptide (1)..(607): Ceres Seq. ID no. 12655311
MDTKIGSIDDCKPTNGDVCSPTNGTVATIHNSVPSSAITINYCDATLGRHLARRLVQAGVTDVFSVPGDFNLTLLDHLMAEPDLNLIGCCNELNAGYAADGYARSRGVGACVVTFTVGGLSVLNAIAGAYSENLPLICIVGGPNSNDYGTNRILHHTIGLPDFSQELRCFQTVTCYQAVVNNLDDAHEQIDKAISTALKESKPVYISVSCNLAAIPHHTFSRDPVPFSLAPRLSNKMGLEAAVEATLEFLNKAVKPVMVGGPKLRVAKACDAFVELADASGYALAMMPSAKGFVPEHHPHFIGTYWGAVSTPFCSEIVESADAYIFAGPIFNDYSSVGYSLLLKKEKAIVVQPDRITVANGPTFGCILMSDFFRELSKRVKRNETAYENYHRIFVPEGKPLKCESREPLRVNTMFQHIQKMLSSETAVIAETGDSWFNCQKLKLPKGCGYEFQMQYGSIGWSVGATLGYAQASPEKRVLAFIGDGSFQVTVQDISTMLRNGQKTIIFLINNGGYTIEVEIHDGPYNVIKNWNYTGLVDAIHNGEGNCWTAKVRYEEELVEAITTATTEKKDCLCFIEVILHKDDTSKELLEWGSRVSAANSRPPNPQ

SEQ ID NO: 80307 - protein, 529 aa, Arabidopsis thaliana
  peptide (1)..(529): Ceres Seq. ID no. 12655312
MAEPDLNLIGCCNELNAGYAADGYARSRGVGACVVTFTVGGLSVLNAIAGAYSENLPLICIVGGPNSNDYGTNRILHHTIGLPDFSQELRCFQTVTCYQAVVNNLDDAHEQIDKAISTALKESKPVYISVSCNLAAIPHHTFSRDPVPFSLAPRLSNKMGLEAAVEATLEFLNKAVKPVMVGGPKLRVAKACDAFVELADASGYALAMMPSAKGFVPEHHPHFIGTYWGAVSTPFCSEIVESADAYIFAGPIFNDYSSVGYSLLLKKEKAIVVQPDRITVANGPTFGCILMSDFFRELSKRVKRNETAYENYHRIFVPEGKPLKCESREPLRVNTMFQHIQKMLSSETAVIAETGDSWFNCQKLKLPKGCGYEFQMQYGSIGWSVGATLGYAQASPEKRVLAFIGDGSFQVTVQDISTMLRNGQKTIIFLINNGGYTIEVEIHDGPYNVIKNWNYTGLVDAIHNGEGNCWTAKVRYEEELVEAITTATTEKKDCLCFIEVILHKDDTSKELLEWGSRVSAANSRPPNPQ

SEQ ID NO: 80308 - DNA, 1452 bp, Arabidopsis thaliana
  misc_feature (1)..(1452): Ceres Seq. ID no. 12655313
  misc_feature (1)..(1452): Ortholog of  Ceres SEQ ID NO 13599900 as cited in SEQ ID NO 531
  misc_feature (1)..(1452): Ortholog of  Ceres SEQ ID NO 14310556 as cited in SEQ ID NO 54965
atggaggatatacaggaggaagagaacggtacggacgaggaggttctgggatcgagcttgaccatggagaaagtggccgcagcgaagcagtacatcgagaatcactacaaagctcagaacaagaacattcaagagaggaaagagagacggtggatcttagaaagaaagttggcgtcttctggagtgccaaaagaggagcaaatcaacatgattaaagacctggagagaaaagagacagagtttatgaggcttaaaaggaacaagattagtgtcgatgactttgagcttttgactatcattggaagaggtgcttttggtgaggttcgcttatgtcgggagagaaagtctggaaatatttatgccatgaagaagttaaagaaatctgaaatggtcatgagaggacaggttgagcatgtcagagcagagaggaacctgctggctgaggttgaaagccattatattgtgaagctttactattcatttcaggatcccgagtatctgtatctgattatggaatatctccccggtggtgatatgatgaccttgctcatgagggaggacacattacgggaagatgttgccagattttatattgctcaaagtgtcctggccattgaatccatacacagatacaactatattcatagggatatcaaacctgataacctacttttggacaaagatgggcacatgaaactctcggactttgggctctgtaagcctcttgattgtagaaatttaccttcaattcaggagaatagggccacggatgatgaaactatgtcagaacctatggatgttgatagatgctttcctgacactgataacaagagaagctggcgcagtccccaggaacaacttcagcattggcagatgaatcgcagaaaactagcattttcaactgtgggaacaccggactatattgctcctgaagttttgctgaagaaaggatatggcatggaatgtgattggtggtcattaggtgcaattatgtacgaaatgctcgttgggtatcctcctttttatgctgatgaccctatatcaacttgcagaaagatcgtccattggagaaaccatttgaaatttcctgaggatgcgaagttttcatctgaggcaaaagatcttatctgcaggttgctgtgcaacgttgaccataggcttggtactggaggaggagcccagcaaatcaaggatcatccttggttcaaggatgttgtgtgggaaaagctctatgaaatggaggctgcgtacaaaccagaagtgaacgacgagctagatacacaaaattttatgaagtttgatgaagtgaattctcctgcacctgaaagaactagatcaggactctccaggaagatgcttcttgctcccaaggatttaagttttgttggctacacatacaagaactttgacgctgtaaaaggattgcgtcattcacttggtaaattcacatga

SEQ ID NO: 80309 - protein, 483 aa, Arabidopsis thaliana
  peptide (1)..(483): Ceres Seq. ID no. 12655314
MEDIQEEENGTDEEVLGSSLTMEKVAAAKQYIENHYKAQNKNIQERKERRWILERKLASSGVPKEEQINMIKDLERKETEFMRLKRNKISVDDFELLTIIGRGAFGEVRLCRERKSGNIYAMKKLKKSEMVMRGQVEHVRAERNLLAEVESHYIVKLYYSFQDPEYLYLIMEYLPGGDMMTLLMREDTLREDVARFYIAQSVLAIESIHRYNYIHRDIKPDNLLLDKDGHMKLSDFGLCKPLDCRNLPSIQENRATDDETMSEPMDVDRCFPDTDNKRSWRSPQEQLQHWQMNRRKLAFSTVGTPDYIAPEVLLKKGYGMECDWWSLGAIMYEMLVGYPPFYADDPISTCRKIVHWRNHLKFPEDAKFSSEAKDLICRLLCNVDHRLGTGGGAQQIKDHPWFKDVVWEKLYEMEAAYKPEVNDELDTQNFMKFDEVNSPAPERTRSGLSRKMLLAPKDLSFVGYTYKNFDAVKGLRHSLGKFT

SEQ ID NO: 80310 - protein, 462 aa, Arabidopsis thaliana
  peptide (1)..(462): Ceres Seq. ID no. 12655315
MEKVAAAKQYIENHYKAQNKNIQERKERRWILERKLASSGVPKEEQINMIKDLERKETEFMRLKRNKISVDDFELLTIIGRGAFGEVRLCRERKSGNIYAMKKLKKSEMVMRGQVEHVRAERNLLAEVESHYIVKLYYSFQDPEYLYLIMEYLPGGDMMTLLMREDTLREDVARFYIAQSVLAIESIHRYNYIHRDIKPDNLLLDKDGHMKLSDFGLCKPLDCRNLPSIQENRATDDETMSEPMDVDRCFPDTDNKRSWRSPQEQLQHWQMNRRKLAFSTVGTPDYIAPEVLLKKGYGMECDWWSLGAIMYEMLVGYPPFYADDPISTCRKIVHWRNHLKFPEDAKFSSEAKDLICRLLCNVDHRLGTGGGAQQIKDHPWFKDVVWEKLYEMEAAYKPEVNDELDTQNFMKFDEVNSPAPERTRSGLSRKMLLAPKDLSFVGYTYKNFDAVKGLRHSLGKFT

SEQ ID NO: 80311 - protein, 414 aa, Arabidopsis thaliana
  peptide (1)..(414): Ceres Seq. ID no. 12655316
MIKDLERKETEFMRLKRNKISVDDFELLTIIGRGAFGEVRLCRERKSGNIYAMKKLKKSEMVMRGQVEHVRAERNLLAEVESHYIVKLYYSFQDPEYLYLIMEYLPGGDMMTLLMREDTLREDVARFYIAQSVLAIESIHRYNYIHRDIKPDNLLLDKDGHMKLSDFGLCKPLDCRNLPSIQENRATDDETMSEPMDVDRCFPDTDNKRSWRSPQEQLQHWQMNRRKLAFSTVGTPDYIAPEVLLKKGYGMECDWWSLGAIMYEMLVGYPPFYADDPISTCRKIVHWRNHLKFPEDAKFSSEAKDLICRLLCNVDHRLGTGGGAQQIKDHPWFKDVVWEKLYEMEAAYKPEVNDELDTQNFMKFDEVNSPAPERTRSGLSRKMLLAPKDLSFVGYTYKNFDAVKGLRHSLGKFT

SEQ ID NO: 80312 - DNA, 2973 bp, Arabidopsis thaliana
  misc_feature (1)..(2973): Ceres Seq. ID no. 12655327
  misc_feature (1)..(2973): Ortholog of  Ceres SEQ ID NO 12586556 as cited in SEQ ID NO 64667
  misc_feature (1)..(2973): Ortholog of  Ceres SEQ ID NO 14316045 as cited in SEQ ID NO 66810
  misc_feature (1)..(2973): Ortholog of  Ceres SEQ ID NO 13660894 as cited in SEQ ID NO 67475
atgcgatcaacctccaaggccatccctttctcctttcacacatctctcattgttcaatgtctccgtcctctgcgttttacttctgctgcttcgccgtcttcatcttcctcgtcttcgtcacaatggttcggctttcttcggaatgcaatcacctcgtcggacttgatgctcggaaaatgtacacacgcacgtatcctaaccttcgaggaaaacccagaacgattcctgattaacaatctcatctccatgtactccaagtgtggatcactcacttatgctcgccgagtgttcgataaaatgcctgacagagatcttgtttcctggaactcgattttagctgcctatgctcagtcttccgaatgcgttgtcgagaacattcaacaagcttttcttcttttcaggatattacgccaggacgttgtgtataccagtcgaatgactctgtctccaatgttgaaactttgtttgcattctgggtatgtgtgggcttcagagtcatttcatgggtatgcttgcaagattggtttggacggtgatgaatttgttgccggagctcttgttaacatatatttgaagtttggtaaggttaaggaaggtaaggttttgtttgaggagatgccttatagagatgtggtgttatggaacttgatgttgaaggcttatctggaaatgggttttaaggaagaagcaatagacctctcttctgcatttcattcaagtggtttaaatcccaatgaaatcactctgcgtttacttgctagaatttcaggtgatgattctgatgcaggacaagtgaaatcctttgcaaatggtaatgatgcttcttctgtttcagaaataatattcaggaacaaaggattgagtgaatatctccattcaggccagtattcagctcttctcaaatgttttgcggatatggtagagtccgacgtggaatgtgatcaagtcacatttattttaatgttagctacagctgttaaagtagatagtttagcattagggcagcaagttcattgtatggcattgaagttaggacttgatttgatgcttactgtttcgaatagtctaataaacatgtactgtaaactgagaaaattcggtttcgctaggacagtatttgacaatatgagtgaacgagatttgatttcgtggaattcagttattgccggaatagctcaaaatggcttagaagtagaagcagtgtgtctgtttatgcagctgttacgttgcggcctcaaaccagaccagtatactatgacgagtgttctaaaggctgcttcttctcttcctgaaggcttgtcgttgagtaaacaagtacatgttcatgcaattaaaatcaataatgtttctgatagttttgtctctactgctctgattgatgcctactctcggaacagatgtatgaaagaggcagagattttgtttgagaggcataattttgatctcgtcgcttggaatgccatgatggctggttatacccaaagtcatgacggtcataagactctgaagctttttgctttgatgcataaacagggagagagatctgatgatttcacgctcgcaacagtgtttaagacatgtggtttcttgtttgccataaatcaaggaaagcaagtccatgcttatgcaatcaaatctggatatgacttagatctatgggtcagcagtgggattttggatatgtatgtaaaatgtggcgatatgagtgcagcacaatttgcctttgatagtattcccgtacctgacgatgttgcttggacgactatgatatcaggatgcatagaaaatggagaagaagaaagagcgtttcatgtttttagccagatgaggctcatgggagtgttgcctgatgaatttacaatagccacacttgcgaaagcaagctcttgtttgacggcattagaacaggggcgccaaattcatgcaaatgccctcaagttgaattgtacgaatgaccctttcgttggaacttcacttgtggacatgtatgctaagtgtggaagcatagacgatgcatattgtttgtttaaaagaatagagatgatgaacatcactgcctggaatgccatgttagtgggattagctcaacatggggaagggaaagaaacgctccagcttttcaaacagatgaaatctctgggtataaaacctgataaggtcacatttatcggcgttctttctgcttgcagtcactcaggcttggtatcagaggcatacaagcatatgcgatcaatgcatggagactatggcattaaacctgaaatagaacactactcttgtttggctgatgcgcttggccgtgctggacttgttaaacaggctgaaaatttgatcgagtcaatgtccatggaagcttcagcatcgatgtacagaactttgcttgcagcttgccgagttcaaggggacacagaaacagggaagagagtggcaactaagcttttggagctagagccactggactcatcagcttatgttcttttatccaatatgtatgctgctgcttccaaatgggatgagatgaaacttgcccggacgatgatgaaagggcacaaagtgaaaaaagacccgggtttcagttggatcgaggtgaaaaacaagatacatatatttgtcgtggatgataggtcaaaccggcaaaccgagttgatatacaggaaagtaaaagacatgataagagacatcaaacaagaagggtatgttcctgagacagatttcacacttgtagatgtggaagaagaagagaaagagcgtgccctgtactaccacagtgagaagctagcagttgctttcggacttttgagcactcctccatccacaccaatccgtgtgattaagaatctacgcgtctgtggagattgtcacaacgcgatgaaatatatagcaaaggtgtataatagagagattgtacttagagatgcaaaccggtttcaccggttcaaggatggtatttgctcatgtggtgattattggtag

SEQ ID NO: 80313 - protein, 990 aa, Arabidopsis thaliana
  peptide (1)..(990): Ceres Seq. ID no. 12655328
MRSTSKAIPFSFHTSLIVQCLRPLRFTSAASPSSSSSSSSQWFGFLRNAITSSDLMLGKCTHARILTFEENPERFLINNLISMYSKCGSLTYARRVFDKMPDRDLVSWNSILAAYAQSSECVVENIQQAFLLFRILRQDVVYTSRMTLSPMLKLCLHSGYVWASESFHGYACKIGLDGDEFVAGALVNIYLKFGKVKEGKVLFEEMPYRDVVLWNLMLKAYLEMGFKEEAIDLSSAFHSSGLNPNEITLRLLARISGDDSDAGQVKSFANGNDASSVSEIIFRNKGLSEYLHSGQYSALLKCFADMVESDVECDQVTFILMLATAVKVDSLALGQQVHCMALKLGLDLMLTVSNSLINMYCKLRKFGFARTVFDNMSERDLISWNSVIAGIAQNGLEVEAVCLFMQLLRCGLKPDQYTMTSVLKAASSLPEGLSLSKQVHVHAIKINNVSDSFVSTALIDAYSRNRCMKEAEILFERHNFDLVAWNAMMAGYTQSHDGHKTLKLFALMHKQGERSDDFTLATVFKTCGFLFAINQGKQVHAYAIKSGYDLDLWVSSGILDMYVKCGDMSAAQFAFDSIPVPDDVAWTTMISGCIENGEEERAFHVFSQMRLMGVLPDEFTIATLAKASSCLTALEQGRQIHANALKLNCTNDPFVGTSLVDMYAKCGSIDDAYCLFKRIEMMNITAWNAMLVGLAQHGEGKETLQLFKQMKSLGIKPDKVTFIGVLSACSHSGLVSEAYKHMRSMHGDYGIKPEIEHYSCLADALGRAGLVKQAENLIESMSMEASASMYRTLLAACRVQGDTETGKRVATKLLELEPLDSSAYVLLSNMYAAASKWDEMKLARTMMKGHKVKKDPGFSWIEVKNKIHIFVVDDRSNRQTELIYRKVKDMIRDIKQEGYVPETDFTLVDVEEEEKERALYYHSEKLAVAFGLLSTPPSTPIRVIKNLRVCGDCHNAMKYIAKVYNREIVLRDANRFHRFKDGICSCGDYW

SEQ ID NO: 80314 - protein, 935 aa, Arabidopsis thaliana
  peptide (1)..(935): Ceres Seq. ID no. 12655329
MLGKCTHARILTFEENPERFLINNLISMYSKCGSLTYARRVFDKMPDRDLVSWNSILAAYAQSSECVVENIQQAFLLFRILRQDVVYTSRMTLSPMLKLCLHSGYVWASESFHGYACKIGLDGDEFVAGALVNIYLKFGKVKEGKVLFEEMPYRDVVLWNLMLKAYLEMGFKEEAIDLSSAFHSSGLNPNEITLRLLARISGDDSDAGQVKSFANGNDASSVSEIIFRNKGLSEYLHSGQYSALLKCFADMVESDVECDQVTFILMLATAVKVDSLALGQQVHCMALKLGLDLMLTVSNSLINMYCKLRKFGFARTVFDNMSERDLISWNSVIAGIAQNGLEVEAVCLFMQLLRCGLKPDQYTMTSVLKAASSLPEGLSLSKQVHVHAIKINNVSDSFVSTALIDAYSRNRCMKEAEILFERHNFDLVAWNAMMAGYTQSHDGHKTLKLFALMHKQGERSDDFTLATVFKTCGFLFAINQGKQVHAYAIKSGYDLDLWVSSGILDMYVKCGDMSAAQFAFDSIPVPDDVAWTTMISGCIENGEEERAFHVFSQMRLMGVLPDEFTIATLAKASSCLTALEQGRQIHANALKLNCTNDPFVGTSLVDMYAKCGSIDDAYCLFKRIEMMNITAWNAMLVGLAQHGEGKETLQLFKQMKSLGIKPDKVTFIGVLSACSHSGLVSEAYKHMRSMHGDYGIKPEIEHYSCLADALGRAGLVKQAENLIESMSMEASASMYRTLLAACRVQGDTETGKRVATKLLELEPLDSSAYVLLSNMYAAASKWDEMKLARTMMKGHKVKKDPGFSWIEVKNKIHIFVVDDRSNRQTELIYRKVKDMIRDIKQEGYVPETDFTLVDVEEEEKERALYYHSEKLAVAFGLLSTPPSTPIRVIKNLRVCGDCHNAMKYIAKVYNREIVLRDANRFHRFKDGICSCGDYW

SEQ ID NO: 80315 - protein, 908 aa, Arabidopsis thaliana
  peptide (1)..(908): Ceres Seq. ID no. 12655330
MYSKCGSLTYARRVFDKMPDRDLVSWNSILAAYAQSSECVVENIQQAFLLFRILRQDVVYTSRMTLSPMLKLCLHSGYVWASESFHGYACKIGLDGDEFVAGALVNIYLKFGKVKEGKVLFEEMPYRDVVLWNLMLKAYLEMGFKEEAIDLSSAFHSSGLNPNEITLRLLARISGDDSDAGQVKSFANGNDASSVSEIIFRNKGLSEYLHSGQYSALLKCFADMVESDVECDQVTFILMLATAVKVDSLALGQQVHCMALKLGLDLMLTVSNSLINMYCKLRKFGFARTVFDNMSERDLISWNSVIAGIAQNGLEVEAVCLFMQLLRCGLKPDQYTMTSVLKAASSLPEGLSLSKQVHVHAIKINNVSDSFVSTALIDAYSRNRCMKEAEILFERHNFDLVAWNAMMAGYTQSHDGHKTLKLFALMHKQGERSDDFTLATVFKTCGFLFAINQGKQVHAYAIKSGYDLDLWVSSGILDMYVKCGDMSAAQFAFDSIPVPDDVAWTTMISGCIENGEEERAFHVFSQMRLMGVLPDEFTIATLAKASSCLTALEQGRQIHANALKLNCTNDPFVGTSLVDMYAKCGSIDDAYCLFKRIEMMNITAWNAMLVGLAQHGEGKETLQLFKQMKSLGIKPDKVTFIGVLSACSHSGLVSEAYKHMRSMHGDYGIKPEIEHYSCLADALGRAGLVKQAENLIESMSMEASASMYRTLLAACRVQGDTETGKRVATKLLELEPLDSSAYVLLSNMYAAASKWDEMKLARTMMKGHKVKKDPGFSWIEVKNKIHIFVVDDRSNRQTELIYRKVKDMIRDIKQEGYVPETDFTLVDVEEEEKERALYYHSEKLAVAFGLLSTPPSTPIRVIKNLRVCGDCHNAMKYIAKVYNREIVLRDANRFHRFKDGICSCGDYW

SEQ ID NO: 80316 - DNA, 2226 bp, Arabidopsis thaliana
  misc_feature (1)..(2226): Ceres Seq. ID no. 12655349
  misc_feature (1)..(2226): Ortholog of  Ceres SEQ ID NO 15180650 as cited in SEQ ID NO 0
aaaattcgaactttacgctcttctctcttcttcttcaacttcccaccttcgtttgaataatctcattgccgttattctctctagctcttcccatttccaggattcttcgatatgggagcatctcacagtcatgaagatctagagatctgttcctccgatgaagatgaatatgaagaatatgaagaaggaagagagggagaggaagaggaagagacgtttcaggactcgcgggatgatacgttaggtatatcttcctccggtggtcgtcgtctccggcctaaatctccttcatcatcactcgacgacgttgaggcaaaactccaagccctgaagctgaaatacccattgacgcaatcagccccgtctactcagaactcagctcggcttttccgctacatcaatggcaacactcccaaagccaaatgggtcacagctgagaaactgactgcttattgtttcgtcaagactaacaaaggagatgaagatgatgaagacgacgatgagaacggagatgtggaaaacgaatggtggattttgaaagtcggaagcaagatccgtgaaaaggtatcagatgaaatgcaattgaaagcttataaagatcaacgccgtgttgatttcgttgctaaagctgtttgggctatgaaattcgccagcagtgaagatttttcggtttttgtaagcagctataacaattgcttgtttgagaacaatcatggtgttgagtttaatgaggctaacaaggcaaaaatctatgggaaagatttcattgggtgggctaatcctgaagctgctgatgattccatgtgggaagatgctgatgatattttgcttcaaagcccaggaggaggatctgcaactccggctagagatacacaggatttgactgaggcctttgaagaagctacaagtgagggcatacatagcttagctctaggtgctttagataatagctttctagttggagattctggtattcaggttttcaagaacatgagacaggggattcaagggaaaggtgtttgtgttaactttgagcctggttatggtcgaactcattcttcagcaccgaagaaggctcttctcatgagagctgagactaatatgctgctcatgagtcctatgagccaaacgcctcattcacgaggtatccatcagcttgacattgaaaccgggaaaattatttcagagtggaagtttgagaaagatggagtggatatctctatgagtgacattactaatgatggtaaaggtgctcaattggatccatctgcgtcaacgtttcttggtctggataacaataggctttgcaggtgggatatgcgtgaccgatatgggatggttcaggatcttgctactgcgaatactccagtcttgaattgggcacaggggcatcagttttctagagggactaactttcagtgctttgcaactactggtgatggctcaattgttgttggctctcttgatggcaaaattagactctactcgagcaacactatgaggcaggcaaagacggctttccctggacttggtgcacctgttactcatgtggatgctacattcgatgggaaatggattgttggtacaactgacacatatttgattgttatctgtacccttttcactgacaaaagtggcaaaacaaagaccggcttcgagggtcgcatgggaaataagattgccgcaccaaggttgcttaagttgaggcctcttgatgcacatttagctggatctgacaacaagttccgcaatgctcagttttcttgggtcacggaggatgggaaacaggagcgtcatgtggtagctactgttggcaagttcagtgtgatatggaactttcagcaggtgaagaatggatctcatgaatgctaccatgatcaggaagggctgaagaaatgctactgctacaagatagtccttcgaaatgaatctatagtggacagtcgcttcatgaatgacaactttgcaatctctggttcacctgaagcgcctttggtcattgcaacgcctatgaaagtcagctctttcagcttatccagcaagcgatgaaacaagcaagtgatggaccggaccactagttattttcatttgaattctagtctatttgtaaccatgtgaaattacaatgttctggctcttagaacgatgttagattcagagataagacacctagcaatgttgctaaattactttggtctggctttgacttttaagatgtttggtcgt

SEQ ID NO: 80317 - protein, 645 aa, Arabidopsis thaliana
  peptide (1)..(645): Ceres Seq. ID no. 12655350
MGASHSHEDLEICSSDEDEYEEYEEGREGEEEEETFQDSRDDTLGISSSGGRRLRPKSPSSSLDDVEAKLQALKLKYPLTQSAPSTQNSARLFRYINGNTPKAKWVTAEKLTAYCFVKTNKGDEDDEDDDENGDVENEWWILKVGSKIREKVSDEMQLKAYKDQRRVDFVAKAVWAMKFASSEDFSVFVSSYNNCLFENNHGVEFNEANKAKIYGKDFIGWANPEAADDSMWEDADDILLQSPGGGSATPARDTQDLTEAFEEATSEGIHSLALGALDNSFLVGDSGIQVFKNMRQGIQGKGVCVNFEPGYGRTHSSAPKKALLMRAETNMLLMSPMSQTPHSRGIHQLDIETGKIISEWKFEKDGVDISMSDITNDGKGAQLDPSASTFLGLDNNRLCRWDMRDRYGMVQDLATANTPVLNWAQGHQFSRGTNFQCFATTGDGSIVVGSLDGKIRLYSSNTMRQAKTAFPGLGAPVTHVDATFDGKWIVGTTDTYLIVICTLFTDKSGKTKTGFEGRMGNKIAAPRLLKLRPLDAHLAGSDNKFRNAQFSWVTEDGKQERHVVATVGKFSVIWNFQQVKNGSHECYHDQEGLKKCYCYKIVLRNESIVDSRFMNDNFAISGSPEAPLVIATPMKVSSFSLSSKR

SEQ ID NO: 80318 - protein, 490 aa, Arabidopsis thaliana
  peptide (1)..(490): Ceres Seq. ID no. 12655351
MQLKAYKDQRRVDFVAKAVWAMKFASSEDFSVFVSSYNNCLFENNHGVEFNEANKAKIYGKDFIGWANPEAADDSMWEDADDILLQSPGGGSATPARDTQDLTEAFEEATSEGIHSLALGALDNSFLVGDSGIQVFKNMRQGIQGKGVCVNFEPGYGRTHSSAPKKALLMRAETNMLLMSPMSQTPHSRGIHQLDIETGKIISEWKFEKDGVDISMSDITNDGKGAQLDPSASTFLGLDNNRLCRWDMRDRYGMVQDLATANTPVLNWAQGHQFSRGTNFQCFATTGDGSIVVGSLDGKIRLYSSNTMRQAKTAFPGLGAPVTHVDATFDGKWIVGTTDTYLIVICTLFTDKSGKTKTGFEGRMGNKIAAPRLLKLRPLDAHLAGSDNKFRNAQFSWVTEDGKQERHVVATVGKFSVIWNFQQVKNGSHECYHDQEGLKKCYCYKIVLRNESIVDSRFMNDNFAISGSPEAPLVIATPMKVSSFSLSSKR

SEQ ID NO: 80319 - protein, 469 aa, Arabidopsis thaliana
  peptide (1)..(469): Ceres Seq. ID no. 12655352
MKFASSEDFSVFVSSYNNCLFENNHGVEFNEANKAKIYGKDFIGWANPEAADDSMWEDADDILLQSPGGGSATPARDTQDLTEAFEEATSEGIHSLALGALDNSFLVGDSGIQVFKNMRQGIQGKGVCVNFEPGYGRTHSSAPKKALLMRAETNMLLMSPMSQTPHSRGIHQLDIETGKIISEWKFEKDGVDISMSDITNDGKGAQLDPSASTFLGLDNNRLCRWDMRDRYGMVQDLATANTPVLNWAQGHQFSRGTNFQCFATTGDGSIVVGSLDGKIRLYSSNTMRQAKTAFPGLGAPVTHVDATFDGKWIVGTTDTYLIVICTLFTDKSGKTKTGFEGRMGNKIAAPRLLKLRPLDAHLAGSDNKFRNAQFSWVTEDGKQERHVVATVGKFSVIWNFQQVKNGSHECYHDQEGLKKCYCYKIVLRNESIVDSRFMNDNFAISGSPEAPLVIATPMKVSSFSLSSKR

SEQ ID NO: 80320 - DNA, 1107 bp, Arabidopsis thaliana
  misc_feature (1)..(1107): Ceres Seq. ID no. 12655357
  misc_feature (1)..(1107): Ortholog of  Ceres SEQ ID NO 13647762 as cited in SEQ ID NO 20426
atggagatgtctagaggaagcaacagttttgacaataagaagcctagttgccaaagaggtcactggagacctgttgaagatgacaatctccggcaactcgttgaacaatacggtcccaagaactggaattttattgctcaacatctctatggaagatcagggaaaagctgtagattaagatggtacaaccaacttgatccaaacatcaccaagaaacccttcaccgaggaggaagaagagagactgcttaaagctcatcggatccaagggaatcgttgggcctccatagcccgactgttccccgggaggaccgacaacgctgtcaaaaaccattttcatgtcatcatggctagacgcaaacgggaaaacttctcttccacggctacttctacgttcaaccaaacttggcatactgttttgagccctagttctagtcttacaaggctaaatagatcccatttcgggctatggaggtatcgaaaggataagagttgcggtctctggccttactcttttgtttcaccacctacgaatggtcaatttggatcttcatctgtctctaacgtacaccacgaaatttatcttgagaggagaaagtcgaaagagttggtggatcctcagaattacacatttcatgcagccacaccagatcataagatgacttcaaatgaagatggaccatccatgggagatgatggtgagaagaacgatgttactttcattgattttcttggtgttggattagcttcttaggttataacatcacaagtcaaagcttttaagggtttctatcattagggttaggcatcattttcagccttttgcttccttaaactctcatatggatcttctatcaattataactctcatttcctatatcattcaaatatatacatatccataacatgtaggtgtgtatctatacgtgtatcacatgcacttaattaagattggtgaatatacatacacatataagtttgtctatatcatcagtatattgcatgcatggtttattgtttgatacagaatcatgtaacaaatacgtatacacaaagatatgctcaaagaaagatatgctaactaacttttctaagtgtatttagaccc

SEQ ID NO: 80321 - protein, 250 aa, Arabidopsis thaliana
  peptide (1)..(250): Ceres Seq. ID no. 12655358
MEMSRGSNSFDNKKPSCQRGHWRPVEDDNLRQLVEQYGPKNWNFIAQHLYGRSGKSCRLRWYNQLDPNITKKPFTEEEEERLLKAHRIQGNRWASIARLFPGRTDNAVKNHFHVIMARRKRENFSSTATSTFNQTWHTVLSPSSSLTRLNRSHFGLWRYRKDKSCGLWPYSFVSPPTNGQFGSSSVSNVHHEIYLERRKSKELVDPQNYTFHAATPDHKMTSNEDGPSMGDDGEKNDVTFIDFLGVGLAS

SEQ ID NO: 80322 - protein, 248 aa, Arabidopsis thaliana
  peptide (1)..(248): Ceres Seq. ID no. 12655359
MSRGSNSFDNKKPSCQRGHWRPVEDDNLRQLVEQYGPKNWNFIAQHLYGRSGKSCRLRWYNQLDPNITKKPFTEEEEERLLKAHRIQGNRWASIARLFPGRTDNAVKNHFHVIMARRKRENFSSTATSTFNQTWHTVLSPSSSLTRLNRSHFGLWRYRKDKSCGLWPYSFVSPPTNGQFGSSSVSNVHHEIYLERRKSKELVDPQNYTFHAATPDHKMTSNEDGPSMGDDGEKNDVTFIDFLGVGLAS

SEQ ID NO: 80323 - protein, 135 aa, Arabidopsis thaliana
  peptide (1)..(135): Ceres Seq. ID no. 12655360
MARRKRENFSSTATSTFNQTWHTVLSPSSSLTRLNRSHFGLWRYRKDKSCGLWPYSFVSPPTNGQFGSSSVSNVHHEIYLERRKSKELVDPQNYTFHAATPDHKMTSNEDGPSMGDDGEKNDVTFIDFLGVGLAS

SEQ ID NO: 80324 - DNA, 2925 bp, Arabidopsis thaliana
  misc_feature (1)..(2925): Ceres Seq. ID no. 12655377
  misc_feature (1)..(2925): Ortholog of  Ceres SEQ ID NO 14307018 as cited in SEQ ID NO 59674
accaattccaatcctgtttccttggatcagagatacgaatctgaatcacaatctcgagatcttcagtgttttccaacggtgattgatgtttcacgtggaagaagaaagcagtggaggcgatgggtctgagattgatgaggagtttggcggagacgattcaacgacgtcattgtcgcgatgggtgttcgatgagaaagatgattatgaggttaatgaagattacgacgatgatggatatgatgagcataatcacccggaaatggattccgatgaggaggatgacaatgtggagcagcgtttgattcgcactagccctgccgttgactctttcgatgtagatgctcttgagattcctggaactcagaaaaacgaaatcgaggacactggtataggaaagaaactcatacttgctttgcagacacttggggttgtatttggtgatattggaactagcccattgtataccttcactgtcatgttcagaagatctccaattaacgacaaagaagatattattggagccttgtcattggttatatacactttaatattgattcctcttgtaaagtatgtacattttgttctttgggccaatgacgatggcgaaggtgggacgtttgctttgtattcgttgatctgccggcatgcaaatgttagccttatcccaaatcaacttccatcagatgctcgcatatcaggctttggtttgaaggttccgtctccagaacttgaaagatcattgataattaaagaaagacttgaggcgtcaatggccttgaaaaagcttcttctgattttagttcttgccggcactgctatggtgattgctgatgctgttgttacgccagcaatgtcagtaatgtctgctatcggtggtctgaaggttggagttggtgttatagaacaagatcaggtggtcgtgatatcagtcagctttcttgtgatcttgttcagtgtacaaaaatatggaaccagcaaattggggcttgttttgggtcctgctttacttctgtggtttttttgtctagcgggcattggaatttacaacctcgtaaaatatgacagcagcgtttttaaagcgttcaatcctgcatatatctatttctttttcaagagaaactctgtaaatgcttggtatgcacttgggggttgcgttttatgtgcaactggatcggaggccatgtttgcagatcttagctatttctctgttcactctatccagcttacttttatccttctggtgttaccttgcctcttgctgggttatttgggtcaagccgcatacctctctgaaaacttcagcgctgccggggatgctttcttttcgtcagttccaagttctttgttctggccagtctttctcatttctaatgttgctgctttaattgccagtcgtgcaatgacaacagccacatttacatgcatcaaacagtcaatagcactaggctgtttcccacgtcttaaaatcattcacacctcaaagaaattcattggacagatttatataccggttcttaactggtcccttctggtggtgtgtctgatcgttgtctgctctacctcaaatatcttcgcgattggaaacgcttatggcatcgcagagctgggaattatgatgactacaacaattttggtgacccttatcatgcttcttatctggcagacgaacatcatagttgtgagcatgtttgcaattgtttccctgatagtcgaactggttttcttctcatccgtttgttcaagtgtggctgatggaagttggataatcttggtttttgctacaattatgtttctcataatgtttgtttggaactacgggagtaaactgaagtatgaaactgaagtccagaaaaagctaccaatggacctactacgagaactgggcagtaaccttgggacaattagagcacccggtattggtctactttataatgagctagctaaaggagttccggcaatatttggtcattttctaaccacccttcctgcaatccattccatggttatcttcgtgtgtataaagtatgtccctgttccaagtgtgcctcagaccgagagatttcttttcagacgtgtatgcccaagaagctatcatttattccgctgtgtagccaggtatggatacaaagatgtgcggaaggaaagtcaccaggcgtttgagcagatactgattgagagtctagaaaaatttatacgtaaggaagcacaggagcgtgcacttgagagtgacggagaccataatgatacagattctgaggatgatacgactctgtccagagttctgatagcacccaatggaagtgtgtattcacttggagtgcctctcttagctgagcacatgaattcgtcaaacaagcgacccatggagagaagaaaggccagcatagattttggggcaggtccttcatcggcgttggatgtggagcagagtctagaaaaagaattgtcgtttatacacaaagcgaaagagtcaggggtggtgtatctactgggacatggggacataagggctactaaggattcttggtttctgaagaagctggtaataaattacttgtatgctttcttgaggaagaactccaggagagggataacaaacctaagcgttccgcatacacatttgatgcaagttggaatgacttatatggtatgaacaagaccccgatcaaactactggttttcatctactcgcaagtctcatgaattgtcgaagaacatgaaacacttaccaattcaagagattttttttttcttttacacattgttgcaaaagtgtgatggagttataaaagtacaggagaaacaaaatgatttttttgtattgagagttgctatttgattctgtgtttgttatttattgattgatttgtattggcttgtcccagtcttgagtattggaatatagaatgaaggacttgctcttgc

SEQ ID NO: 80325 - protein, 855 aa, Arabidopsis thaliana
  peptide (1)..(855): Ceres Seq. ID no. 12655378
MFHVEEESSGGDGSEIDEEFGGDDSTTSLSRWVFDEKDDYEVNEDYDDDGYDEHNHPEMDSDEEDDNVEQRLIRTSPAVDSFDVDALEIPGTQKNEIEDTGIGKKLILALQTLGVVFGDIGTSPLYTFTVMFRRSPINDKEDIIGALSLVIYTLILIPLVKYVHFVLWANDDGEGGTFALYSLICRHANVSLIPNQLPSDARISGFGLKVPSPELERSLIIKERLEASMALKKLLLILVLAGTAMVIADAVVTPAMSVMSAIGGLKVGVGVIEQDQVVVISVSFLVILFSVQKYGTSKLGLVLGPALLLWFFCLAGIGIYNLVKYDSSVFKAFNPAYIYFFFKRNSVNAWYALGGCVLCATGSEAMFADLSYFSVHSIQLTFILLVLPCLLLGYLGQAAYLSENFSAAGDAFFSSVPSSLFWPVFLISNVAALIASRAMTTATFTCIKQSIALGCFPRLKIIHTSKKFIGQIYIPVLNWSLLVVCLIVVCSTSNIFAIGNAYGIAELGIMMTTTILVTLIMLLIWQTNIIVVSMFAIVSLIVELVFFSSVCSSVADGSWIILVFATIMFLIMFVWNYGSKLKYETEVQKKLPMDLLRELGSNLGTIRAPGIGLLYNELAKGVPAIFGHFLTTLPAIHSMVIFVCIKYVPVPSVPQTERFLFRRVCPRSYHLFRCVARYGYKDVRKESHQAFEQILIESLEKFIRKEAQERALESDGDHNDTDSEDDTTLSRVLIAPNGSVYSLGVPLLAEHMNSSNKRPMERRKASIDFGAGPSSALDVEQSLEKELSFIHKAKESGVVYLLGHGDIRATKDSWFLKKLVINYLYAFLRKNSRRGITNLSVPHTHLMQVGMTYMV

SEQ ID NO: 80326 - protein, 797 aa, Arabidopsis thaliana
  peptide (1)..(797): Ceres Seq. ID no. 12655379
MDSDEEDDNVEQRLIRTSPAVDSFDVDALEIPGTQKNEIEDTGIGKKLILALQTLGVVFGDIGTSPLYTFTVMFRRSPINDKEDIIGALSLVIYTLILIPLVKYVHFVLWANDDGEGGTFALYSLICRHANVSLIPNQLPSDARISGFGLKVPSPELERSLIIKERLEASMALKKLLLILVLAGTAMVIADAVVTPAMSVMSAIGGLKVGVGVIEQDQVVVISVSFLVILFSVQKYGTSKLGLVLGPALLLWFFCLAGIGIYNLVKYDSSVFKAFNPAYIYFFFKRNSVNAWYALGGCVLCATGSEAMFADLSYFSVHSIQLTFILLVLPCLLLGYLGQAAYLSENFSAAGDAFFSSVPSSLFWPVFLISNVAALIASRAMTTATFTCIKQSIALGCFPRLKIIHTSKKFIGQIYIPVLNWSLLVVCLIVVCSTSNIFAIGNAYGIAELGIMMTTTILVTLIMLLIWQTNIIVVSMFAIVSLIVELVFFSSVCSSVADGSWIILVFATIMFLIMFVWNYGSKLKYETEVQKKLPMDLLRELGSNLGTIRAPGIGLLYNELAKGVPAIFGHFLTTLPAIHSMVIFVCIKYVPVPSVPQTERFLFRRVCPRSYHLFRCVARYGYKDVRKESHQAFEQILIESLEKFIRKEAQERALESDGDHNDTDSEDDTTLSRVLIAPNGSVYSLGVPLLAEHMNSSNKRPMERRKASIDFGAGPSSALDVEQSLEKELSFIHKAKESGVVYLLGHGDIRATKDSWFLKKLVINYLYAFLRKNSRRGITNLSVPHTHLMQVGMTYMV

SEQ ID NO: 80327 - protein, 725 aa, Arabidopsis thaliana
  peptide (1)..(725): Ceres Seq. ID no. 12655380
MFRRSPINDKEDIIGALSLVIYTLILIPLVKYVHFVLWANDDGEGGTFALYSLICRHANVSLIPNQLPSDARISGFGLKVPSPELERSLIIKERLEASMALKKLLLILVLAGTAMVIADAVVTPAMSVMSAIGGLKVGVGVIEQDQVVVISVSFLVILFSVQKYGTSKLGLVLGPALLLWFFCLAGIGIYNLVKYDSSVFKAFNPAYIYFFFKRNSVNAWYALGGCVLCATGSEAMFADLSYFSVHSIQLTFILLVLPCLLLGYLGQAAYLSENFSAAGDAFFSSVPSSLFWPVFLISNVAALIASRAMTTATFTCIKQSIALGCFPRLKIIHTSKKFIGQIYIPVLNWSLLVVCLIVVCSTSNIFAIGNAYGIAELGIMMTTTILVTLIMLLIWQTNIIVVSMFAIVSLIVELVFFSSVCSSVADGSWIILVFATIMFLIMFVWNYGSKLKYETEVQKKLPMDLLRELGSNLGTIRAPGIGLLYNELAKGVPAIFGHFLTTLPAIHSMVIFVCIKYVPVPSVPQTERFLFRRVCPRSYHLFRCVARYGYKDVRKESHQAFEQILIESLEKFIRKEAQERALESDGDHNDTDSEDDTTLSRVLIAPNGSVYSLGVPLLAEHMNSSNKRPMERRKASIDFGAGPSSALDVEQSLEKELSFIHKAKESGVVYLLGHGDIRATKDSWFLKKLVINYLYAFLRKNSRRGITNLSVPHTHLMQVGMTYMV

SEQ ID NO: 80328 - DNA, 1386 bp, Arabidopsis thaliana
  misc_feature (1)..(1386): Ceres Seq. ID no. 12655396
  misc_feature (1)..(1386): Ortholog of  Ceres SEQ ID NO 15171805 as cited in SEQ ID NO 57433
  misc_feature (1)..(1386): Ortholog of  Ceres SEQ ID NO 13596743 as cited in SEQ ID NO 62731
atgtcgtcgacccatcagttagtttcttcgatgatctcttcttcctcatccactttcttagccccttcaaattttaatctcagaactcgaaatgcttgcttacccatggcaaaacgggtcaatacttgcaaatgtgttgctacgccgcaagagaagatcgagtataagaccaaagtgtcacggaattcaaacatgtccaaacttcaggctggatacctattcccggagattgcaagaagaaggtctgcacacttgttgaaatatccagatgcacaagttataagtcttggaataggcgacacaactgagccaattcctgaagtgatcacttctgctatggcaaagaaagctcatgagttgtcaacaatagagggatatagtggttatggtgctgaacaaggtgcaaagccactgagagctgctattgcgaaaacattctacggtggccttggcataggggatgatgacgtttttgtttctgatggagctaaatgtgatatctcacgtctccaggttatgtttggttccaatgttacaattgctgttcaggatccttcatatccggcttatgtggactccagtgttattatgggtcagactgggcaatttaacactgatgtgcaaaagtatggaaacatcgagtacatgagatgcactccagagaatggcttctttcccgacttgtccaccgttggcaggacagatataattttcttctgttccccaaataaccctacgggtgctgctgccacgagagagcaactaacgcagttagttgagtttgcaaagaagaacggttctataatagtgtatgattccgcctatgcaatgtacatgtctgatgataacccacgatccatcttcgaaatccctggagcagaggaggtcgctatggagacagcttcgttcagcaaatatgctggtttcactggagttcgacttggttggactgtcatcccgaaaaagctactctattcagacggtttccctgttgccaaagacttcaatcggattatctgcacttgtttcaatggtgcatctaatatctctcaagctggtgctcttgcttgccttacacccgaaggacttgaggcaatgcataaggtgattggattctataaagaaaacacaaacataatcattgacacattcacatctctcgggtatgatgtatatggaggaaagaatgcgccttacgtatgggttcacttcccgaaccaaagctcatgggatgtgtttgctgagattctggagaagactcatgtggttacaactccaggaagtgggtttggaccagggggtgaagggttcgttcgtgtcagtgcctttggtcacagagagaacatcttagaggcatgtcgaagattcaagcagctttacaaatga

SEQ ID NO: 80329 - protein, 461 aa, Arabidopsis thaliana [sequence omitted]

SEQ ID NO: 80330 - protein, 451 aa, Arabidopsis thaliana; identical to SEQ ID NO: 76835
  peptide (1)..(451): Ceres Seq. ID no. 12655398

SEQ ID NO: 80331 - protein, 426 aa, Arabidopsis thaliana
  peptide (1)..(426): Ceres Seq. ID no. 12655399
MAKRVNTCKCVATPQEKIEYKTKVSRNSNMSKLQAGYLFPEIARRRSAHLLKYPDAQVISLGIGDTTEPIPEVITSAMAKKAHELSTIEGYSGYGAEQGAKPLRAAIAKTFYGGLGIGDDDVFVSDGAKCDISRLQVMFGSNVTIAVQDPSYPAYVDSSVIMGQTGQFNTDVQKYGNIEYMRCTPENGFFPDLSTVGRTDIIFFCSPNNPTGAAATREQLTQLVEFAKKNGSIIVYDSAYAMYMSDDNPRSIFEIPGAEEVAMETASFSKYAGFTGVRLGWTVIPKKLLYSDGFPVAKDFNRIICTCFNGASNISQAGALACLTPEGLEAMHKVIGFYKENTNIIIDTFTSLGYDVYGGKNAPYVWVHFPNQSSWDVFAEILEKTHVVTTPGSGFGPGGEGFVRVSAFGHRENILEACRRFKQLYK

SEQ ID NO: 80332 - DNA, 1713 bp, Arabidopsis thaliana
  misc_feature (1)..(1713): Ceres Seq. ID no. 12655400
  misc_feature (1)..(1713): Ortholog of  Ceres SEQ ID NO 14307156 as cited in SEQ ID NO 54069
  misc_feature (1)..(1713): Ortholog of  Ceres SEQ ID NO 15169651 as cited in SEQ ID NO 64156
gttgtttgttttatcatctctccataattgcttcgatttctctgcaaagacacaacacaaaaagtgctttttttaatcagatattttctgggcttcactttaactctcttcgtgcttggttttccgatcttagtcgttactaattgagtcggagactgttcatttcctgattctgaagaaagttttggagaaggagaagatgtcaactctgcgagtgagctagggtttagtgtgttttccgatttttgagctcttggggattgttgttttctcttaaagagtcgattttgaatggcggtggagtatgtatgttgcagcccaaacttctttatacatatagctgtgattgtgtttcttgtcttgttcgctggactcatgtctggcttaacattgggtcttatgtctttgagtctcgttgatcttgaagttctcgctaaatccggtacacctgaacatcgtaaatatgcagcaaagatattgccagtggtaaagaatcagcacttgttgcttgtcactttacttatatgcaatgcagctgctatggagacgcttcctatttttcttgatggccttgtgacggcatggggtgccattttgatttcagttacattgattcttctctttggtgagattatacctcagtcgatttgttcacgttatggtttagcgattggtgcaacagtggctccgtttgtccgtgtcctagtctttatctgcttacctgttgcatggccaataagcaagttgctggactttctattgggtcatcgtcgtgcagcgctttttcgaagagctgagctgaaaacacttgtggattttcatggaaatgaggctggaaagggtggggagttgactcatgacgaaacgacaatcattgcaggagctcttgaactctctgagaaaatggtcaaagatgcaatgacaccaatatcggatatctttgtgattgatatcaatgccaaactagacagagacttgatgaacttgattcttgagaaagggcatagcagagttccagtatactatgagcagccaactaacataatcggccttgttctggtgaagaacttattaactatcaacccagatgaagaaatacctgtcaagaatgtcacgataagaaggattccaagagttccagaaatcttgcctttatatgacatattgaacgaattccagaaaggactcagccacatggctgttgttgtaagacagtgtgacaaaatccacccattaccttctaaaaatgggagtgttaaggaagcccgagtggatgtggatagtgagggaactcctactcctcaggagagaatgttaaggacaaaaagatcgcttcaaaagtggaagagctttccgaatcgagcaagttcgtttaaaggagggtcaaagagcaagaagtggtcaaaagacaatgatgcagacatcctgcaattgaatggcaatccgctgcctaaacttgctgaggaagaagaagcagtcggaatcattacgatggaggatgtcattgaagaacttctgcaggaggagatctttgacgaaactgatcaccattttgaagactcctaacacagagtgcatgaccactgaactggttatgaatgtcgaaaactttagtctttgttttcaactttcaaactgtcacttgtccggcgaatgtgtatcaatgtaggcatgaacaacaactttttctatggtttcaagatgttttctctc

SEQ ID NO: 80333 - protein, 424 aa, Arabidopsis thaliana
  peptide (1)..(424): Ceres Seq. ID no. 12655401
MAVEYVCCSPNFFIHIAVIVFLVLFAGLMSGLTLGLMSLSLVDLEVLAKSGTPEHRKYAAKILPVVKNQHLLLVTLLICNAAAMETLPIFLDGLVTAWGAILISVTLILLFGEIIPQSICSRYGLAIGATVAPFVRVLVFICLPVAWPISKLLDFLLGHRRAALFRRAELKTLVDFHGNEAGKGGELTHDETTIIAGALELSEKMVKDAMTPISDIFVIDINAKLDRDLMNLILEKGHSRVPVYYEQPTNIIGLVLVKNLLTINPDEEIPVKNVTIRRIPRVPEILPLYDILNEFQKGLSHMAVVVRQCDKIHPLPSKNGSVKEARVDVDSEGTPTPQERMLRTKRSLQKWKSFPNRASSFKGGSKSKKWSKDNDADILQLNGNPLPKLAEEEEAVGIITMEDVIEELLQEEIFDETDHHFEDS

SEQ ID NO: 80334 - protein, 396 aa, Arabidopsis thaliana
  peptide (1)..(396): Ceres Seq. ID no. 12655402
MSGLTLGLMSLSLVDLEVLAKSGTPEHRKYAAKILPVVKNQHLLLVTLLICNAAAMETLPIFLDGLVTAWGAILISVTLILLFGEIIPQSICSRYGLAIGATVAPFVRVLVFICLPVAWPISKLLDFLLGHRRAALFRRAELKTLVDFHGNEAGKGGELTHDETTIIAGALELSEKMVKDAMTPISDIFVIDINAKLDRDLMNLILEKGHSRVPVYYEQPTNIIGLVLVKNLLTINPDEEIPVKNVTIRRIPRVPEILPLYDILNEFQKGLSHMAVVVRQCDKIHPLPSKNGSVKEARVDVDSEGTPTPQERMLRTKRSLQKWKSFPNRASSFKGGSKSKKWSKDNDADILQLNGNPLPKLAEEEEAVGIITMEDVIEELLQEEIFDETDHHFEDS

SEQ ID NO: 80335 - protein, 388 aa, Arabidopsis thaliana
  peptide (1)..(388): Ceres Seq. ID no. 12655403
MSLSLVDLEVLAKSGTPEHRKYAAKILPVVKNQHLLLVTLLICNAAAMETLPIFLDGLVTAWGAILISVTLILLFGEIIPQSICSRYGLAIGATVAPFVRVLVFICLPVAWPISKLLDFLLGHRRAALFRRAELKTLVDFHGNEAGKGGELTHDETTIIAGALELSEKMVKDAMTPISDIFVIDINAKLDRDLMNLILEKGHSRVPVYYEQPTNIIGLVLVKNLLTINPDEEIPVKNVTIRRIPRVPEILPLYDILNEFQKGLSHMAVVVRQCDKIHPLPSKNGSVKEARVDVDSEGTPTPQERMLRTKRSLQKWKSFPNRASSFKGGSKSKKWSKDNDADILQLNGNPLPKLAEEEEAVGIITMEDVIEELLQEEIFDETDHHFEDS

SEQ ID NO: 80336 - DNA, 519 bp, Arabidopsis thaliana
  misc_feature (1)..(519): Ceres Seq. ID no. 12655404
  misc_feature (1)..(519): Ortholog of  Ceres SEQ ID NO 13663631 as cited in SEQ ID NO 67073
atgtttcataaggttgctattgaaaccttggttctcctacttctcatcaattacttgacacaaatcgatgtttcctccgcacaatactctcagtatcctcagtcccatgaatatcctgacagctaccttagaccccacaacgcagcccgagccgcggtcaaagtcaagcctctaagatgggatttcggtatagccactgtggctcaggactacgcaaaccatctagcctcaggtccatgcagtcttgaacattcctctggaccatatggagagaatcttgcatttggcagtggagacatgtcggccgctcaggcggttgcgatgtgggtacatgagaagtcgtactatgatttttactcaaactcgtgccatggtccggcttgtggacactacacgcaggtcgtgtggcgtggctcagctcgtctcggttgtggtaaggctaagtgtaataatggtgccagtattgttgtgtgtaactatgaccccgcaggcaattacattggagctagaccatattga

SEQ ID NO: 80337 - protein, 172 aa, Arabidopsis thaliana
  peptide (1)..(172): Ceres Seq. ID no. 12655405
MFHKVAIETLVLLLLINYLTQIDVSSAQYSQYPQSHEYPDSYLRPHNAARAAVKVKPLRWDFGIATVAQDYANHLASGPCSLEHSSGPYGENLAFGSGDMSAAQAVAMWVHEKSYYDFYSNSCHGPACGHYTQVVWRGSARLGCGKAKCNNGASIVVCNYDPAGNYIGARPY

SEQ ID NO: 80338 - DNA, 1692 bp, Arabidopsis thaliana
  misc_feature (1)..(1692): Ceres Seq. ID no. 12655415
  misc_feature (1)..(1692): Ortholog of  Ceres SEQ ID NO 14313288 as cited in SEQ ID NO 67419
atgttcattaagacatggtcatttgaaattctgattacattttttgtcttggtgcagtgtctagagaacccttataaaccacagtacaatggagggatcatcgtgaatcctgacttgcaaaatggttcacaaggctggtcacagtttggaaacgccaaagtcgatttcagagaatttggaggcaataagtttgttgttgccacacaaaggaatcaatcttctgacagcatctcgcagaaggtgtacttggaaaaaggaattctctacactttctctgcttggttacaagtgagcataggaaaatctcccgtgagcgctgttttcaagaagaatggtgaatataagcatgccggttcggttgttgctgaatccaaatgttggtccatgctgaaaggtggtctcactgttgatgaatctggtcctgctgaactcttcttcgagagcgagaacacaatggttgagatttgggttgatagcgtctctttgcaacctttcacacaagaagagtggaactctcaccacgaacagagcattggcaaagtaagaaaaggtaccgtgagaatcagagtcatgaataacaaaggcgagacgatacctaatgcaaccatatccatagaacagaagaaactcggatacccattcgggtgcgcggtagaaaacaacatacttgggaatcaagcataccaaaactggttcactcaaagatttaccgtgacaactttcgggaacgagatgaaatggtacagcacagaaagaataagagggcaagaggattactcgacagctgacgcgatgttaagtttcttcaagagccacgggattgctgtacgtgggcacaatgttttatgggatgatcctaagtaccaacctggatgggtgaattctctgtctggtaacgacctctacaacgctgtgaaacgaagggtttactcggttgtctcgcgatacaaaggacagcttttgggttgggatgttgtgaatgagaatcttcatttctccttctttgagagcaagttcggtcctaaagcctcttataacacctacacaatggcccatgccgtcgatccaaggacaccaatgttcatgaatgaatataatacgttagagcaacctaaggatttaacttctagtccagcaaggtatttgggaaagcttagggagcttcaatctattcgggttgccggaaagattccgttagcgataggtcttgagtctcatttcagcactcctaacattccgtatatgagatcagctcttgatacttttggtgccactggtttgcctatttggctcactgagattgacgttgatgcgcctcccaatgtccgggccaactatttcgagcaagttctaagggaaggccatgcacatccgaaagtgaatggaatggtgatgtggacaggttattctccatcaggttgctaccgaatgtgcctcaccgatggaaactttaagaacctacccactggagacgtcgtggacaagcttttacgtgaatggggagggcttcgcagccaaaccacaggtgtcactgatgctaatgggttatttgaagctccactctttcatggtgactatgatctccgtatatcccatcctctcaccaattcaaaggcttcttacaactttacgttgacttccgatgacgactcctcacagaaacaaccatctctatatgtctttcgtgtttga

SEQ ID NO: 80339 - protein, 563 aa, Arabidopsis thaliana; identical to SEQ ID NO: 49507
  peptide (1)..(563): Ceres Seq. ID no. 12655416

SEQ ID NO: 80340 - protein, 435 aa, Arabidopsis thaliana; identical to SEQ ID NO: 49508
  peptide (1)..(435): Ceres Seq. ID no. 12655417

SEQ ID NO: 80341 - protein, 412 aa, Arabidopsis thaliana; identical to SEQ ID NO: 76895
  peptide (1)..(412): Ceres Seq. ID no. 12655418

SEQ ID NO: 80342 - DNA, 1725 bp, Arabidopsis thaliana
  misc_feature (1)..(1725): Ceres Seq. ID no. 12655423
  misc_feature (1)..(1725): Ortholog of  Ceres SEQ ID NO 14313288 as cited in SEQ ID NO 67419
atgttcgttgtaattcttgttgttataattactctgtttgttttggtgcagtgtctagagatacctttaaaaccacagtacaatggaggaatcatcgtcagccctgacgtacgagatggcaccctaggctggacaccattcggaaacgcgaaagtcgatttcagaaaaattggaaaccataatttttttgttgcacgagacaggaaacaaccttttgatagtgtctcacagaaggtttatttggaaaagggacttctctacactttctctgcttggttacaagtaagtaaaggaaaggctcctgtgaaagcagttttcaagaagaatggtgaatataagcttgctggttcggttgttgctgaatccaaatgctggtccatgcttaagggtggtctcactgttgatgaatctggtcctgccgaactctattttgaggtatatttttctgtgaattgttgccagtttctgcgttccagtgaagacacaactgttgagatttgggttgatagcgtctcgttgcaaccattcacgcaagaagagtggaactctcaccatgaacaaagcattcagaaggagagaaagagaaccgtgagaatcagagccgtgaacagcaaaggcgagccaataccgaaagcaaccatttccattgaacagaggaaactcggattcccattcgggtgcgaggtagaaaagaacattcttgggaacaaagcataccaaaactggttcactcaaagatttacagtgacaactttcgcgaacgagatgaaatggtacagcacagaagttgtaagaggcaaagaggactattcaacggctgacgcgatgttgcgattcttcaagcagcatggggttgctgtacgtggccacaatattttatggaatgatcctaagtaccaacctaaatgggtgaatgctctgtctggtaacgacctctacaacgctgtgaaacgaagggttttctcggtggtctcacgatacaaaggccagcttgcgggttgggacgttgtgaatgagaatctccatttctcctactttgaggacaagatgggtcctaaagcctcatataacatctttaagatggcgcaagcttttgatcctacgacaaccatgtttatgaatgaatacaatacgttagaggaatcaagcgattcagattctagtctagcaaggtatttacagaagcttagggagattagatctatccgagtttgtggtaacatatctctagggatcggtctcgagtctcatttcaagactcctaacattccgtacatgagatcagctcttgacactcttgccgctactggtttgcctatatggcttactgaggttgacgtcgaagctcctccaaatgtccaagccaagtattttgagcaggtcctaagggaaggccacgcacatccgcaagtgaaaggaatagtgacgtggtcaggttattctccatcaggttgctaccgaatgtgcctaaccgatggaaacttcaagaacgtacccactggtgacgttgtggacaaacttctccatgaatggggaggcttccgcagacaaaccacaggtgtcactgatgctgatggatactttgaagcttctctcttccatggtgactacgatctcaagattgctcatcctctcaccaattcaaaagcttctcacagctttaagctgacttctgatgtctcttcctcacagaatcaaccatcttcttttgtctttcgtgtttaa

SEQ ID NO: 80343 - protein, 574 aa, Arabidopsis thaliana
  peptide (1)..(574): Ceres Seq. ID no. 12655424
MFVVILVVIITLFVLVQCLEIPLKPQYNGGIIVSPDVRDGTLGWTPFGNAKVDFRKIGNHNFFVARDRKQPFDSVSQKVYLEKGLLYTFSAWLQVSKGKAPVKAVFKKNGEYKLAGSVVAESKCWSMLKGGLTVDESGPAELYFEVYFSVNCCQFLRSSEDTTVEIWVDSVSLQPFTQEEWNSHHEQSIQKERKRTVRIRAVNSKGEPIPKATISIEQRKLGFPFGCEVEKNILGNKAYQNWFTQRFTVTTFANEMKWYSTEVVRGKEDYSTADAMLRFFKQHGVAVRGHNILWNDPKYQPKWVNALSGNDLYNAVKRRVFSVVSRYKGQLAGWDVVNENLHFSYFEDKMGPKASYNIFKMAQAFDPTTTMFMNEYNTLEESSDSDSSLARYLQKLREIRSIRVCGNISLGIGLESHFKTPNIPYMRSALDTLAATGLPIWLTEVDVEAPPNVQAKYFEQVLREGHAHPQVKGIVTWSGYSPSGCYRMCLTDGNFKNVPTGDVVDKLLHEWGGFRRQTTGVTDADGYFEASLFHGDYDLKIAHPLTNSKASHSFKLTSDVSSSQNQPSSFVFRV

SEQ ID NO: 80344 - protein, 448 aa, Arabidopsis thaliana
  peptide (1)..(448): Ceres Seq. ID no. 12655425
MLKGGLTVDESGPAELYFEVYFSVNCCQFLRSSEDTTVEIWVDSVSLQPFTQEEWNSHHEQSIQKERKRTVRIRAVNSKGEPIPKATISIEQRKLGFPFGCEVEKNILGNKAYQNWFTQRFTVTTFANEMKWYSTEVVRGKEDYSTADAMLRFFKQHGVAVRGHNILWNDPKYQPKWVNALSGNDLYNAVKRRVFSVVSRYKGQLAGWDVVNENLHFSYFEDKMGPKASYNIFKMAQAFDPTTTMFMNEYNTLEESSDSDSSLARYLQKLREIRSIRVCGNISLGIGLESHFKTPNIPYMRSALDTLAATGLPIWLTEVDVEAPPNVQAKYFEQVLREGHAHPQVKGIVTWSGYSPSGCYRMCLTDGNFKNVPTGDVVDKLLHEWGGFRRQTTGVTDADGYFEASLFHGDYDLKIAHPLTNSKASHSFKLTSDVSSSQNQPSSFVFRV
